United States Patent Application Publication US 2014/0057251 A1 - sequence listing, part 64

SEQ ID NO: 98779 - DNA, 952 bp, Cannabis sativa
aaataaaattaaaaaatcgtaaaaatatttacaattccgtaaaatcgtatttttgtaatttttttgattttgtgtaattgtgaaataatccctttcattaatggcaattagttaacacaataacttgtaattcaaatgggacatttttttattgttggagacacgatcagaattgaaattaaaagaacgagttaaataatcatctgccaaattcttaaatcatttgaccaaaaaactaaaaaaataaaagagaaatttatttttcatgcttacaattggccaataattagaaaataaactaaatttttgcaccctctaaaattagtgtatctttgcattgattccaaaatcactcctattattttgatgtaattcaactaaagattttagtaaattttcaatcaacttcattattataatatatataggtttttttatttaattatcaatgccagtttagatttgaacctcataaataagaagttttttaagagaaaaaaaattggaaaatgtttcttaatatccttacccaacttcataactcaggagcattaatttcaaagataaatgctacttaaccttttttaaaaagtcaaattttagacattatataaccactggaaacactcccaataattaatgtaaaataactatttaggtaaaaatttaggtgaagtttgttaatatttttggttttaaaatttttaatcacaaaaataaaagtaattttttttttgttttttaaattttatttttgaaaaataaaaatgtattttataacaactacttctgttttttaagtttaaaaacaaaaaatgtgttctgtaaattttatttttattttaatttgttaattttatttaagtcgggtccggatgtgggtctgggtcggggagttcgggttccaaggtctaggttggggtgggaatctaaaatattgataaaaaactgt

SEQ ID NO: 98780 - DNA, 780 bp, Cannabis sativa
tgggaatgcggctttacaaagaaagagaagtttgtctctagtgacgcaagttctgatgatgacaaattcacaatgaagaggatagagcttctctgtccagaaaactgagcggtgaggcctgtttttggtttattaattctgtaatttgcaattagacatatttgatcttttgtactatgaactcagttttaatgtgtaaaattatattaatataaccaaactgcctttaattatgtgttataataatcacatttctaacttgggatagtttagtcattgatcattttgagttcatgataatttaatataaattaatatacaagtattattgaaaatagagtacctatgctagcttcaataaaacaacatgtaacaaatagttaagtgataataataataatagtttatatataagtaataatgacacaaacatattgttggtgttttaactactttgaagagccaaacagaattaactgtttttcgacaactcagcatatggttggtgacttgtccaactgtcataactatataaacttcctctccccaacttgatcaggtgcattgcaagagaacaaagcctacaccagtttaagttagtagtgtccaggattgagagagagagagagagagagagagtctgtgtaaggaaagaaaccagaaagaacaagggaatcaccattgtcattgctgaattctcagctggtcttttcacagtggattgagggttgtaaatggagattgttcactcttgaagtgacttctctcagtgtgagattt

SEQ ID NO: 98781 - DNA, 508 bp, Cannabis sativa
tttttggttgtctattgtgtgtaggttcttgtgtaaaacctcttgaagaacttgaaagagaagaggaagaacaacaagggtttcggctgggactttgttgtagcaaaggaggtgtctcggctggacagtagcaagaaggaaagagaagaaaagaagaaagtgggctgttgtgtttcaaagcttgaaggaggagctgctagggtttcatttcaaagagaaaaggaagaagaaagtgaagggccggctgtggaaaattaaatgtggcactagggttttctttgaacaaagaaaataagcttttatatggtcattaatggtagaagtgtaaataaaagcaaatctggcttttcaaaagggcatcagattttttaaaaagggcatatcctgattggtaaagggaatattccctttgtgatccgcaccaataaaaaggacggttttgcccctctgttttgaacgttggtgttgtgtgtagggggcattttcggaatgccagctgtttcctaca

SEQ ID NO: 98782 - DNA, 913 bp, Cannabis sativa
tcataagtaaattctattttaccagtgcaataccaacttttgccagcataaaaatgtactggcaaaagtgacatttcttgtagtagttggttagagatgctgatccaattgatctagttgacattgtgagtataattgtggtactaaaatattattgaaaataagtaaatgaaaccctttttttattcttagatatgaattgattacaatatcagtctcctataataatgtgcctatgatcgccccttcaacaaccttcaccttttctattcatttatattatatatatgagaaatgttaagggtggtaatgctacttaatacttttttatgtgccaatatcacaattaatttaactaagtatcgggtcacatatagttttaatataataaattttagagagtattgctagtctatcgcaatgtgatatgtattaaacactactaatacccaataacaaagctcatatatatatatatacacctgtatttatatcgattcataatttatttgcttgcattgaatactccaacaaatagaatttaattcattaacaaaagttgtgggtatgaaagatttagttctttttgtaactaattatattcatttcggccttgctagtagcctcttcacattgttattgtttctcttcttgttatattttatataataatatatattgtattgttcaataatactattttattatatttaatctttacatgaacatatttattaatatgtttgtttattttagggtattattaatatgctattaggattttttattttattattataaaccgcttgattagcttgaaattattaattatacttattgattgatatatgtatataatggagtttgtctaatttacctattaatagatcctttataatgttagccaaaaaaa

SEQ ID NO: 98783 - DNA, 919 bp, Cannabis sativa
  modified_base (187)..(195): a, c, t, g, unknown or other
  modified_base (532)..(538): a, c, t, g, unknown or other
gtatatagattcaataattttttttgaaaaggaaaaatcaaaaattttacggtgcacttctttaaaataaatatattgatatatcgctatttgtttaggtatccaaaataactttttagtcaatttttttcttataattatgtactatatagttattcaagacattctgtaaaattttaaaaaattnnnnnnnnnttaacacgccaaaaatagagttcaaacaatatgttatacgagtgattattttatttatacatgtgaaataaattgtttgaacattactgtctatattgtaaattattttgaatttttcaaaatttttattttaaaggagtacattgtaaaagcacacaaaaaatatcatatttttatattttgtagaatagagtgcttctacaatacacccctaaaataggtgcaccgatgcacccttatctatttctgcattaagaaaaaaaattagtccaatttttttcatagtggtataagttttagttatttaaaatctcttacaaaattttgagaaattcannnnnnnttacaatataaaaaataatattcaaacagtctatattacacgcgtttataataaaagagtcacatgtgtagcagacagtttgaaccttgtttttcagcatgttaaattttttcgaattttttaaaattttacaaaatatcttaaataactttaatgtaactgaccatgaaaaaaattagactataaaaactctttcggatgccgaaaaaagataagagtcatctgaacacccctcttaagggagtggattatagaattttccaatagtataaaatcttaaaattttgaattggattagattagattattagatcggctattttatgaacaccctacccttgaaatgcttacaatttatagttacacgtgtcaatatagtta

SEQ ID NO: 98784 - DNA, 1823 bp, Cannabis sativa
ctaattaacttatatctaatattatcccacttaaaatcccataattgtcaataggttggcaaaaaatctttattgggttgcctacatttagtgctaaagaacatataatatctcgaataacaacacatggctaagattttttacagacttttctctctaacatgaatgagaacacataattttcaaatatgaacgcttagctaatacataatttcaattataattataccaaatataataaatgaattaaatgaatgtagttccatggaggaaagagcgttgaagtatccaaatctctagccatgactttgaagtttgaacattcaacattaaactttcaaagagtacaccattgagtaagtttggtggtacaaataattaattaaataaatgtaatagtaaaagtggcttatcgtttcttacttttctagaactatatcatgaattagtaaaatgaaaaaaaatgaaaacgagagtgaacatagttatggtataaaacttacacacgtggctaataatgtattattattatatacacattttgtaatcaagttgtaggttttttttttttttttttcaaccaaccaaccaaccatcaactaccgagaaaaaatgtgttacaaacagagcttttttgctttcatgtgtaggggccatgtgtactgagtagcacgtgagtacacgcgccgaagaattagtttttttttttttttaataatctggaaaattacctggagaatagagtttttattacgcgtttgttctagactattgggtttgtaatacgtttcgtgtgacgtcacataagaaggaagtataaaacctgttctcttttattttatttctactcaaaataactaattaaaatgatttttttttcttatccaaaattaaaatatataggttatattcatatgcatgaatggttttctgttacgtgctctataatttagttgggtttacatgataagagcaaagcaagttgtttacatatatttttgtaactgtatatgatcagattgaatactcaatactgaatcaaaataataaacaatatagattcaatttcaatccttatccattataaagctaaagcattaaatttgaggggtcatgctaccgaattatacaataagattgttcgtttctttatgcaatggtgtatttttttttactatgttatcagtactaaatacttaaaattgtagtaaatatttcattattttgtttctttcttctttgagtggtcccttttgaaagtaattaaataatgatcatcatctcatccaccactgattagaacatataatatatatgaacaattaatatggcattacttgttaaaatatataaataattaaattgagattcagtatatggttacacaaccacctatatatataatggtactcttttatgacattgaggtcaacaatagaatataatcaagttacgcaataatagtaagggacaattagagaaagactcttattttatcaaattgagttactgatccaaatgatcaatccttacacacaacaattgctaatgtgtcagtaattaatatttattgatcatgatcatcaatacaatggatatgattaatttttttaataagagtgacagaacagaacagataataatacctatagtacactgattgttcaattattaaacaccttgcaactaattaaaaataaatataagaaaaaaaaggttgttgtgaagtaagcaaaaaacaatatatagtaatacagtagaacctctatactctattcaagaataacctctaatttgttataaaaaaatcaagtcccgatttg

SEQ ID NO: 98785 - DNA, 923 bp, Cannabis sativa
agtgatggaagaaaagattgattcccttgtttggaaagaaagagaaagagggagagaagaatgttacaataacaccatgtttggtaagagagatgagtgggtggatggagagaggaagagtgatggaagagaagattgattctcttgtttggaaagaaagagggggagaagaatgttggaaaatcttctctttctaaaatttgcaaatttattctctcaaattttaaaagaattgtagaaaatgaacaaaaaaaaaaattgctaaatacaataattattcctttaaaaagtgataaatatttatgttcaaaaaaaggtaatattgtaattatactaattaattttcacttatcattcacgcctaatgtcaaatacaattatcatttccattatttttttcaactttctaagctctccatccatcctattatgcatccattctactaagcatagtctaagaaattgtcatatccttccatctctctcatttctttcctctccatctaccaacttctctcttctatagacatagtctaaattagtggtgttcataaaatagctgatttaatccaatttccacgattcaatccaattcaatccgcaaagtgcggatatattcgcacttgagattggatgttgattgacatgtaaaattaaataatctaatctaatacacacatatttataaaaaaaaaaataaaaaattatatatacaaataacattttaatgtaaagaaaatagtaatttaaaggtctaatgcatataatacaattatattgcaaaacttaaaaaatcaaatgtatattctattcttgtatatatttttctttctacatacaactgaaaataaaatcaaatatttttttatacatacaattttattttcttcttttgaatttgttatttgttattttatttattt

SEQ ID NO: 98786 - DNA, 1835 bp, Cannabis sativa
agaagtgtttacaatgcgaatgttttggattggggtcttttttttatagtttctcaaaaaatattgttaatggattatggacactagtggtggccaacaccttttataggttgcgcctcatgattgattatcgatatttcctaaagtctatttaagttatatgagacctgatacttaatcacatcaatagcgacatgacattgaggacggtgctaggcaccaatggtgtcttttagcaattctctttctcaaactgtaaccgcaccgcaagatctttaaatcgcaatcacatcacgaaaatgtagtgtgatgcggtgtagtttaggcatttatactatcattattattaaacgttataataaaaatttaaaactcaatctaataaagttttaagaatacaaaaaaaaaaatcttattaaagttttaatatttataataatcatcaagttattatattgaattatctctaaaaattatgtaatatacacatatctttgttcatatatgaaaacaataaaataaaaatatattgtaaaaattagtaattttgtaatatatagtatagttttgaactgtaattattaaattcaaaactgtaaatctcaccccactatatagtctggtaaaaatacaaactacaatcactctaaaaaaaaattcaaattgtattttttatataacgtggacgatttgtacagtaaaagcggtttgatgaatacctagtataaatgtacataaatgatttttttttttaaaaaaagagttgtactatctaaacattaatgtataaagtgtatatataataaggtttgacttagtactattggtttataagattcaaaagaaaatatcattaataggttgtgatagagtgacaaattaagagtggttatatgtcattaatttggtgcatattgtgattttttttcttttgaaagaatgcatattgtgatttgaaaggtaataatatggattatcaaaccaatcatttgaatatattagcttaggcatagtggtggtaaagtgaagatgccttttgaaaattcttaagttgattttcggacaagtactcatgtatactacaaaaacaaatatagaaattaatatttagaaatagattctctaaaaaaaaagcaaactatatcacaaaacttgcaattaattgatttttggagatcacatttgatctttcattaccatatcaccaaataaaatccacaatgtttgaaaatgtttcctttatttatttaaaaaagataattaaaaaaaaagtttgacaaaaaagtaccacatttgggattttacaaacaacgtaagactaaaaaactttgttcaaaaataaataaataaaataaaaaagaaaaattagagttaaaaaaacaccaataaaatttttgccccgtgcccttcaatttttcaagcacttaaaagtttctcccaaattactaagattttatttaattttactaatttgacgaatgtccatgtgttaaatcatacttctcccacactttgatacttatcaaattatgccttctaaacatgaactaaatcgtacttgttgaattttcatccacgtccaatttttgttaatatacttagaaaaaaaattttaagtttaagaatctcaataatctggaggaatttttaacaacatacaaaatttgagaaaataatttgatatatgttaatgttttagaacaaaattcctaattagctagtgaggggggaatgtgtaaaagttctgaaatttaggggcaaaaagaaaagagggggaatgtgtaaaaggtcagaaatttaggggcaaaactaagaaaatgagagagagagagaga

SEQ ID NO: 98787 - DNA, 3117 bp, Cannabis sativa
atgtgatttttgctttaagaatcttacttttatatatatgctgaagttgactttgagtcaaatcacaacagttcatcttttttaagaggactaaaagacatgtaatccatgaaaagacatgcatatatacttacagataaacaatatataattcttacaggttaagactcctctccaaaaaaaaagaaaaatgcaagtcaaaaatagtgacgtcaatgttaaaaatgtaaatattagtattatgtttagtttgacttgttaatttatgagatgaaattgcatatatacatatatgtatagtaagtaaccaacctcatctaaggaatggtaatcatcagaaatccttgagtattttctatccaagtttctttttggtgatctatggccataagatgatgatgaagaagatgcatagtgatgttgaggagttaagtaggggctttgttgaggcaaaggtgactgaggatagccataattatcccacgacctgtaaaaatcatcagaaaattttctctgatcacttgaattttttgatgagttagttcccatgacccctttaaaaatctacttctagttgcaaagaaaatctcagattgcaatcaatgaaactcctttaattagattatgatgtgaaaaacttctattcgtatatcaatatatatataatgtattatgtatatgcagtttcatatatgtataaaaatccaacaattgtgaaataaagaagaaaaatcccatgtggaataattaggcggctagaagagactctgtcaaacctttgtttttctctttgctaacctttcaattatataattacgtgtatataaatttttcgttaatttatagtgaaaaatcgctttaagaaacttaaaaaggatggagaaatgagtgtttctgactttgatcataaacatcattaaatatgatccatagggagaaaaaaatggtgtactatatcttttgatggaagttgccttgaaatgcaacaaaatcaggaaatacatatatgcgaatataaggtttagtcaactgcttatatttatgtacattaaattatacttataaacaactagtcatatatgaaatttaggtttatattaagagctaattagatataaaaatatatttatatcgatgttggtcatattgacgaagatattgtattttcacgatactaattaatatgaagtggaaaatgctataatacataagacaattggttgggaactgcttctcattattgtaggctgtggttcattcatatcatgactaggacggtcaactactctgttacattgtgatttcttagtcggtcaattcaatcaaagtttttacttttatttctctagaaagaaatacattaatttgaatctataataatttattatttatgttaaggtatgcaatcacaattacgggtgatccaatcgctcacatcgtacagtttaaatcttttatgatttgtatttttgccaaattatatggtggtggtgcaatttacaattttaaattgtataaaaggagtttaaattgcaccatattataacaaagtaataattttttaaatataatttttaaattatctaaattcgtagatatgcaattgtgattaaaatttattaaattacttagatagtaaaataatattatgaataagtgttgctcaacatttatgtgaaatttagacttagtgctcaggtatataaatgaatatataattaagatattatataaatataaatatttgttgaattatttattgtggatatatatttattaggcttaatagatataacatgcataaattgtcttcggcgtgttgtggtggatttgtaaagcaccgcgcaaatacattaactaaaataagctaattaagaagaaacaaaaacttaagaacttatctacaaattaataaaaatatgactttcccttatctctatattattttagagtgtaagacattgattgctgaagttggtattaatttctctttaagttttattaagcctgttaatagggttgcgcattgtttggcgcgattctctctcttattgaggcaaatcatgtctttagtagctttcctttacttaatgtaattgcatccttaattttggatgatttaaattaatgaaattaccgttattattaaaaaaaaacttaacaatagaagcctaacactttaacaacaaaaaaacaaataaattaaagctaaataagttagacccaatttaacaaaataagcaaatgcaacaagctaaggcaaaacaatgaacaaaaaagacaaagttttaaatgtttaatgattaaattattaggcaatagtgtaaacttttcataccgtaccatacctttttttgtaatgtgaatttatagttttgaaattttactgtgtggttgcagtttgaaaaattacaaaaattacatatacaaattaattttaaaaaaataagtaaaaatcacaccgctcccatggaaaacacccttactcacaacattgttgttactttgacataagaaaggaatatctccaaaaaaaaaaaaattaaataataaaacttttaatataaaaaatgacaacccctaactttccattctaccataaaaacttctacaaagtaataaggatgggattagtataaaatatttagtaaatataagaaaaaatagcatattataaaaagggcaataaaaatttataatctaaaggttagaatttattatgtacatgatttattccttggaccaataagaaacttgttaaaatcttataagaaaatggtatttttactaagtaacaaaagtagtcaaaaccagtgaaaaaacatgaaggcataaattgattatttagtggtgaatttccgtccaaaccaacccaacatctacaaaataaagaaaagaagtatattaatctcaaatattttaatcactaaaaaaaatcagacataattgtagaatgtaaaagctaaaacatatttatgaagtcttcattgctgaaacagtgttaccattatacttgatttttctttgaaactgctacatcatattggctttacaaaaccaaactaactatggtgtcgtttggtaacacttttgttttttaatttttttaatcacaaa

SEQ ID NO: 98788 - DNA, 963 bp, Cannabis sativa
aaaaaaaaaaaaaaagaatggaaatttgtggagttatcaattttaggttggattttgaattttttcttttacaaaggtagcttttttttatggattgataaaaattaatgtattcctctctatatattcaagcaggcttagaaaaaatctagatgtttttcttttggtctctatattcttttttttttttggaaagcgtctcaaccactaaacatcacgagcaataagtactcgaaaatagtgggaatgagaatttattcaaaaatagtatatgctattaacatatcctagatacaattaggattctctggtcaccaaatcattctactttttgccgttaacgtaagtttgaccaaggtatatatgagtaacatcattacaagatctcttacaatgaacaaaactaataactttgagcctattacaaaaaccaaaaatatcatccaaaagtagacccaaagaagtgataacaaaaatattgacaatatagaaaaaatagtattcaaataatctaattcatacacatataaagtaaaaaaatcatacatataacatgaatcatattagaattttacaaaataaataaataaatgtgcatcaatacatttcctttggggatagaatttttccaacattgaaagcttaattacaattgcaaataagatgagtaatcgcaagttaatttgaagtttttcttagagttttttggaacaaaaccatctcaactatcgtttcacttgcatcttctaagctcaaattttgacggtaaaacctccaaattattaaactagtaataaatttaaggtgttattcagttaactgtcactatgggctgcttatgtgtacactattgtacacatgacatatatttatattgatacacttaatattattatttaaaaaatatttttaaatttcattttaaaattaaataaaattataaaaataaaatattttaaaaaa

SEQ ID NO: 98789 - DNA, 905 bp, Cannabis sativa
tcttacctttaattccaaattcatccatggtggccaacccaaatagagaaatgtccgatgatcccggccctaagtcacaataatagtaaaatggtaatcacttgacctatcccgttttaaggtcttaaattgtttatttaaaataattgaaataaaataaatttaaattaaaccaatatacttacaaatatttattatgcattcataattcatagaaaataaaagacaaatttgcctcaaagttaaaaaaaaaaaaaaaaaacataatccagtggaaaataaaaaaaaaatatgtctcaaagtttaaaaaaaaaatcataacccaagtatagtatcataatctcatacctctcaagtctctaaacaaattaaaatgtaaacaaagatgaaactaagaatcgagaagaaaatactttagcacttgtaatctacaataatcaccaatttactatcggcattgaatgtttcataatttaagcatacgatatataattttgattatggatgataatcaaaataattttgattatcaataatatatatacatatatatatactatatatacgttaacaataaaaaggaacctatatatttatattgaggtcggatatagtgcggataatatttttcttgctcccgtcccatccccgttttgggtattgaaattgtcccccaccaccgccccattaaccactaagacggggaatccccaccccattaagagtgggttcccacaatatattaactattctcgtagtataaatttctctctttatttattagtatgatattttttgagaatgtgctagaaaaataaaatcgtgagaatttaaattaaaacggataatatcatattaatataaatatagatatcgtcccaacgattcccaacataacaccctct

SEQ ID NO: 98790 - DNA, 525 bp, Cannabis sativa
tttagcatttttcaagatgcttgcgccactaccactataatttttaacatttctcatttaagattaataaagtactatagtcagtccgtcactccatatagacacattaattttttgttggcacagcatttatgactatacataggaaactcgcaatagtagttattagttggtagctgatcagttacttgtaccactcaactcattaataaattacttaaaatacaaacataatcattttgcaggtgaaaattcaaatcttattggatccaaaatatcatacattcatcatcaataaatctgcaagtgatattctcactttttgaaagagacaatacaatacaattatatttagctatttatatatttatatgtgtgatcttctgtatattcatatcatatcaatcaattattatatagcttaattattattattattatatataattggctaatattgcgtctgcatgctgtttcaccaccttccaagccctaacaatatgagattcctcagtcaaggttgac

SEQ ID NO: 98791 - DNA, 521 bp, Cannabis sativa
  modified_base (488)..(489): a, c, t, g, unknown or other
tttctataaatatgtgatattgattcatagttttgtgttgaaaaagataagtagatgagggtgtcactccttcatttatgttaacaacgtgccatttaatttatctatgttatgtggtgcacaatagaccagaccacaacatataatataggaagaatagtgatggtagtgaagatttggacggtgtagtgagtcattgtattgttgaataaaatcaatctgaaatgacgtgcttaatttcttcaacaacttacacacaaacgaataaataggtatatgcttctaatttgagaggcattccatatataaataaatatatatagttcgaatggataagagtgtaagggagaccactccgtccgacatgaagagtaacattatattctctcttctataacaaaaattagagaaaacctaaaatcacctttggtgcctagttccttcctatatgttactattggtttaactaagtatcgggtcccatatannttaatataatagcttttaaggagtattgctag

SEQ ID NO: 98792 - DNA, 554 bp, Cannabis sativa
aattttgcaattaaataagcacaataataggcttgtcaaataattgtggagaaaacaagtgtcaagtttaactctccaacttgcaaataaggtgaagacatgtaaaatcaattattcattcaccatagcttcattatatatcagcacatttttattctttttagaagttaatgaataatactctgaaaaacacaataattatttgactaaaatattgaatttgattaaattaaagaaacgttgcacctgatcacgtgtcagattatggcgttttgtttgaagatacataaatggagatatgagttcattgagttgtgtggatcatcatgtgggccttcgggccatttaaaataagcagactcctttttctttcagagactattccatggcccaaattgtttcagtagggcctggtatctttacgacttaccaaatgaaccttatcttcaggatccaacaatttattcatgcgattaatatagctctataaacgttttcctcatacaaaagagacgacagcgacaatagcgctttggattaatacgaaattgatt

SEQ ID NO: 98793 - DNA, 1369 bp, Cannabis sativa
aaaaggtatggtgatagtggatcaccttgacggatgcctcgggatggagtcacatttccttgaatagatccattaaccaaaaaagagtaggagacactactgaggcatctttgaataagctcaacaactggaaaggcaaaacccaacgcaatcatcatttgttggagaaaatgccactctactctgtcgaaggccttactcatgtcaagcttcatagcagcaaaaccttcttttcctcttttcaaatgcttgagagagtgtaataattcaaaagctactagcacattatcagtgatttgccttgattgtaaaaaagcactttgagagtccgaaatcactagagaaagaaaaggcttcagtcgaataacaatggctttggagacgagcttgtagagaacgttgcacagactaataggacgtaactgagaaactgtgcttggactctttactttgggaatcaaagtgattaaagtcttgttgaacatagttgggtctgcaccattattaagaatatccaggactgttgttgtaaccaaatctcccacaatatgccaatagtttgaatagaacataacagacaatccatcaaggccggggctactgtcttgtcccatagatttcagtgcagagtagacctcatccgccttatatggttgtgtcaagatttcattcatttctgcggtgataatgcagggagtacaagagatgactcgttgaagggcctcagaatctataccttcagtagcatagatatttccaaaatactgctccaccattctgctaatgccttgcagcgaggaatgaataataccatggtcatcagtcaaagatttaattgtgttaaacgatcgtcttccattagctttttggtgaaaaaacttggtgtttgagtcaccagattgtagccatgaaacacgggaacgctgcttccaatagtcttcttcttgctgcagaagttcatctaaaattgattcattcgacttgagcaaatcaaagtgtgaaggacttgtatctgaggaattattgagggcagcaaccttgtcttgagtgattttaattctttttggtaaatccccaaacttagcccgatgccatgaagaaagttgagtagcaactgaagcaaaattaattgaaagttggtcagcagaatttgcatttgaactagaccaaattttaccaataatatcttggcattgttcctcctgaagccacaatttttcaaatctaaatctagatttagatttctggacagcagagtgaagccgagttttgacagtggctttaatagctcgatgatctgactgaaaaaaatccaaatgttgcaaagaaatggcagcaaaattctcaaaccagcaggaattgacaaaag

SEQ ID NO: 98794 - DNA, 7002 bp, Cannabis sativa
  modified_base (206)..(208): a, c, t, g, unknown or other
tcaaatatttatttttatttaatttttaaaagtaataacctttgttaagcattgtttaaaagagctaaaaactctagccaagaagctagtttgtttcaaggtaaggggaattccccatgtgattagaggttctttcaaaaaagaaaaaaataaataaataaaactagaaggatttatttttgcaatataaatatatatatatatannnatatatatatttatatatattggtcaaattcattcagtatacgcaataaggatttttctcaaacaactatatctttatttactttttcccatttaggaaagaatagctgtattgtatacaaatgtatttggaatctctcccaaattaattaataaataaagagaaactagctagctatatagtactacagtatcgaataaaatcaatatccatggattatggaatggactaaattaataatcagttatgtcataaataactaattaacactagatcttttaagagaaaaagatgatcataattaacactactagatcttttatgagaaaaagaccatgtattaattatttaataatgattaagaacgagtccattcatggattaagaatgatacgtacgtaacttacttttctttttctttatgagctggaatatgtatgtatgtatgtattagtaaataatgtaaatttatatctttatatatatatatatgcatcttgagcccacaattgtctaccctataaatgagccaacatatccaaagatctcgatatagttacagctagttttaaccatatttcgaaaaagaatatatataccacaataatgctcaacagttccgaattgagataacttctcttttctgcttaattttctttccttttctttttgattagattaattagaaccacttgtatgggttggtatagatcagatgtgttttttctttgatcgatcgggaaaataatgaagttatataataagtggtgcacatatatcaagaggataaaatatatttatttatagaaataagaagagaaatgttaaaagatattgtcttgtattttttaacgtgttaatatcgttattagtccgactaaatatcaaatttcatataatttaatataataattttaaaaaatattcataagtattataatgagaaatataataagagcacttacggtgtcaaataccacaaaagatgatatattattattgatgtaaattaatatcgagttcctatattttaatttaataaataatataaaaaaccgctaactgctcataaaatgtcatatcaatatagtattgggtactataaaatacttaataacaatgctttaaacatattaatttgatattttttttctagtggcattatcacatgaggaactcaaatatgaaaagcaatgggaaactgcatataagatttagaaatgacaaaaactatacactaaaagtgatccaaacaagtttaacggtctcaccatctatgtcctaagtaaatgggtgcatttcttggaaggcaccgcattttatataatatagatatttatatatatatatatatatatagatgataatggttatcattaattaattagctatatgtcatagattatatacgaccattgttacaaggcagttgaggtattgaaaatggttacagtaatattttttaatagttattatattaaattacctgatatttaattaaattaataatatgataaaaataatcatacttttgtagcatttttcattatttactatatagctaggtatagcagcaacttaattaacacattaattattaattagtagtctagctagtttcctcccacatgtacatacatacatttataccaagctaatattaattctgttcaatcatttagcgacagagaggttttaaatattaatttctaggaattagtatataaactgttgaatcatattgagttagttgtcagatataagagtttcacagtaaggggaacatctattgttataaaataaattctttcattttcatcaaattttatctttgtgcaaaataattatttaattaataaactatgttagttaaatatatgtagctctctaatatctatagctatgcataatcaaatgaactaaaagattatattgatttgtatatcttccgatttatatatagagccagtaacatcatataacatatgtgtccaatatataaaagttgaaaattttgtttaattttataacaattgctagttagatggcagacaaaaataattagccgattatgcctttaacaaattaattaacccttgtcgatatctccatggctcaatagtatatatcactagatatctctggctatcaatgaagggccatccctctttaatttgttaaattttgtttaagttatttataatatatatttgttcttcttattaatttattaatatatatgtactatcattaacaaacagctctgatataaattaattccaattaatctagcctagtttattatgtaaatatataataaactatcatcaatgattgaatagtgagtgggtattatctatatatataattaataaactatcagtttcgaccataacaaagaaaagctagttaaccaattaatgaaacgtccatatctacacctctagatcacgatgaaattaattaattagctagctagctagtatattgttagttcgtcaattcaattattaattagagtaaatatatatgatatgcaacaaaaaaataataaatatttgattaggccataatatacaaaatatcaaagtactacagtacgttcaaacaaaatatatatatttgttgcggtgactgatagaaacacatgcagcaaatgactcattaattgccttcttatattcatatatatatataaatatatatatatatatattagatagcccaagaatctagctccttgtgtattaatatatatatacataattcttttgttcactcaattctcaaaatatatagtgcaattcatgcaatttggtttttaattatataaattattatctagtatttaattaatgtcacgcaagctctatatcttccatctttgaaaaagggccggctcaaacgtgacagcaacgtaggtatttttctaagccctctccttcaatgaaaggtctcacgttcatatcatatataaataaatatatatataatatatataaacgcaacccccagcacattatattaatatatatatatatggccagatattctcaaaattcaaggtttgtgatctataatatatattatatacaaacgctaattaaaaataataactcatacatagttcaaaaaagtttctaaaaattaataattatgaaatcatttaatttcatcatggtgttctaccgattcaaacattttatcttaaacaaatctttgtgtttttttattttcggaatatattcatattattaattaattttgccatgcaccattatgacatcctatatacatgtgcaaacatatcatataaattcctactctagttaaagtatatatataggtgatgttttgtatctatatgtttataataataaattgttttttttttcgtagatcaacatatacattaacgatattcataggattccttcaaatgttattgcaacttaagaacttgggccaattacaaaatctgcatacagcatcatcatattctacttctaccttcaagaaaatcgttctgtgcgacacataagaaaaattttatagtaagggtaagactttttcttttactggttcttttttttattactttaaaataaattataattcaatatttttttatataataatgtacaatagttatagttatagtaggtcaacaatattgttttgggataatttagtatctaaagtagcgtttaaatatttaattacactagtaattaactaattattgatttttattacacatgtgtaatgaactactttaaattctgttaattttttttttcaatatcataaattattcttaattttttaaaatagaattcatatcataatataatatagatcatcatataaaaatataaataaattataaattctttaaatacccaaacaaaaacattcctactatttacacccccatacaataattactccatgtttatatacatattaggctaatattatgtgaaatgtgtatatttaattatattttggttatgtatatatttttttagttgtataataaatttttttttaatgatttactcaataacaacttcattttttattaaaaattatttaatttgagtactatttataaaaaaaaatataataatattaaaaatttgttgttaattattagttttagtttatctgtaatacttttaattattttagaaatattatatatatttttttattttaaaataataatagaaagatatatttttagtatctgcaatagataacgacgtataatagaaatataattttttagatatataaattaggtaaaaataagaatgataatagaaagatatttaaatttgaattgtaatattaaaaaaatactttacattataaatttaaataagagggatatgtgtaataaatttaaatttaaattatcatatttaaatgttctcaaaaaaaaattattatatttaaaaaaaaaataacacttataaatctttctaaaaacatgatcatagcgaagaaaacaatgtcattgtatagccactgtcatgacatataaaaccaaaaaataataacaaaataccttcccccttatttctagacactatgaattccaaccaattaaacacacagaagccctccaaaacaatatacaaataattcattttttttaaaaaaataataatatataattaaaattatcgtttattcacgtgatgaccttgcgaaaccacttttgtttttcttttctgtgtgtctcactatcattatccctacgtataatcctagtcacataataaatttatcgtttttttttcaatttaaaatttgttctcactaccatattataataataataaattattctaaagggctatatatgttctccctatcacatgcatataaaaactaagcacaaaatctcgtctatatatagcttagcatggacagtcacacactgaatcaaataaacaagagaaaaaaaaaatagggtagagccggccgggaacagtgtaagtcgaaaatggccgcgtggtacggtgacgaagaggttagccaaaagcccgtgatgatctggcaaaagaaatgggcccacatgtcggtctccatatagccctttgacgtgtagtgggcccaatatgtcccctcaacagctgtcaaactttgaaacaaaaatattatatgtcgggctagaccaacgtacagaggactcggcccactacgctcaaattacactataaaaccctccaaccctcctcccaaaatctcacaacaacaacaacaccaccactactactctctctttctctcttcaaaaagagatttcctattctgagcctttgattttctctctttataacatttttcttagttcagtactccctataccatttgcccatcatataagatctaatcctatcatcatggccgttgattcagtaacaccttctcctttgggaccacctgcatgtgagaaagacgctaagccgcttcagttcatagaggacatgactcgaaacattgaccccgttcaggaaaagactctcagcgagatactgagtcgtaactcggaaactgagtacctgaaacgatttcagctcaacggagctaccgaccgtgactccttcaagtcaaaggtccctgttgtcacctacgaggatattcagcctgacattcaacgcatcgctaatggagatcgcactcctatattttcatctcatcccgtttctgagtttctcactaggcataattttatataccgaaattttattcattgtactttttgtttagggtaaattataacttgttttattgtttactggaatcatatatatgcagttctggtacttctgctggcgaaagaaaattgatgccaacaattcatgaagaattggatcgtcgccagcttttgtacagtcttctcatgcccgttatgaacctgtaagagtctatgtcataatgaagttaattattagttgagtaattgacttaatgaatatagtttatacatttcttgtgcatatgattaatttccttttttctcttccccaaaagatacgtgccaggattggacaagggaaaaggactctacttcttgttcatcaaagctgaaacaaagaccccaagtggtctagtggctagacccgttctgaccagctactacaagagcgaacacttcaagactcgtccgtacgacccttacaacgtctacactagtccaaacgagacaatcctttgcccagactcattccagagcatgtactcacagatgctctgcggcctcgtcatgcgccacgaggtcctccgagtcggagccgtttttgcgtcgggactcctccgagccataaggttcctccagctcaactggagagaactcgctcacgacatctccaccggaacgctgaaccccaaaatcaccgacccggctatcaaggagaagctgctttcggatatcctgaaacccgacccggaactggcggacttcatcgcctccgaatgctcgggagagaattgggaaaggatcattacccgtatttggccaaacaccaaattcctcgatgtgatcgttactggcgcaatggctcagtacatcccgacccttgattactacagcggcggtcttcccaaggcttgcacaatgtacgcttcttccgagtgttacttcggacttaaccttaaaccaatgtgcgatccctccgatgtttcttacaccatcatgccaaacatgggctacttcgagttcatgccccatgacccggaggctcagccttcgagccgccagtctcagccgccacggctcc

SEQ ID NO: 98795 - DNA, 535 bp, Cannabis sativa
gaattgagaatccaagaaataacgatgttattgtttcttatccaagcattgtaaagattatattcagagatatgaggtttagggatagaaccatccaagaatcctattttgtttttgacagaaattgccaactgcattgcacgactccatgaggtgtaattatcttgccctgttagaggctgagagaccagaatgttgccggggttatcgccgtggtgaaggtaatagggatcggagggatcctcaagaggatttctggaattcagaactcgattgctttgagttgcagaaatggcagagccttgaattccagtttcagctccaatttcttgattgtcattagacattcttgattagagaagagtgctggaaagaatttccaggaagatgaacgaaagtcttcacagaaagagtgaaggagagaacaaatcagtacaccaccatcgccggagaagaagacacggtctggtgggaaaaggcggaagcgtagaagatcagtggagaagtcagtttctccgctctgataccatgttac

SEQ ID NO: 98796 - DNA, 1245 bp, Cannabis sativa
acacacacacacacacacattataagctactaaatcatatgacagcctatgacttttccagtcatcattttctttaagaatgaacttaaaacttaaacatgctcgtgttcttttacctggaatggtccaaatatttcttttgtcacaaggtcataattgttgtccttcacaattttttcaagaggaacatagacagctgttggtttaacagcaccatatatttggggaatggaatgattctctaaaggttcaccccctaggagtagctttgaacctggtatctgaagtaattgattaatgtgttccagaattgctccagttgtaacctgcatcacacaaaagaaagacaaggtcgatgagaacgtgaggtgtttggttgactcacaaaacaatattactggtcacatcaaagagctaattaagacaacctaaaaaatagtcattggcaaaaataggaaacataaagtttagaagggtagcaaaataacaacataagtaaagtatacataccgtaaggacaggaccaatagaaatcttctaacttccttctgtcggcaagatcttgtattttcattataagtgaagttttggcctagttctgcatgtaagaaaacagagagatcaagaatagtgactggttggataacatcaaaagtcttggtgccaaactttatcgaaaactatatatgcatgggacatgattagaagcatatctttagagttgttaaagtatatcttcaaacccttgatttagaacagaaacaaacccaaaaatataccaagtgtcaaattgaagaaacaatttcctcagaggacaaatatcaaatttgaaatagggaattttctttaattggtaagcttataacatgtaattggattcaaatggtttaaaacacaatctagaccccgcccaaaatactctatctcagaataattttggttagaagctcttagctataacagctctatctattacaacaagaagatctatcatattatttggaacaagagttgagcataaaaatattcttttcttgtgtagggtccttttgctaaattttctaccaatttgcaaggtaagtaccaataaagatactttgaagctaatactatatcacataaaaccagaattctagttcatgataactgttagaatttgaggaataagatgaatgggattccatcccaaaaccaattggaaatgggaggagtagcccttttatcttatatatcacaatttatttc

SEQ ID NO: 98797 - DNA, 506 bp, Cannabis sativa
aaaactaccaataccacttgtaattgggtataatttagcatacatacatgtacagggggtcggtcttatggggcgtgagacgaaattaaattttgggacctctatatatatatagttttaactattataaaaataatagttctagtgcttattgtaatggttaagtttttaaaaactcttaagagctccaaggtttaatctctcataactacacattaaatattttttaaaaaaatttaaaaagtcatggttaggaattgatcccatgatttcctagtttaaagaaagactttttaccgctacaccaaataatttttgttatattttcttcttatttaatattttatctatatattaatatatttttttcataatttcagggccctgagcgtttggggacccgaggtgcacgcctagtctgcctaccctcagggctgaccctgcatatacaaatacaaaactatatcccaaagtacaaaacgaagaaccatcaccactaatcttat

SEQ ID NO: 98798 - DNA, 565 bp, Cannabis sativa
taatctgaaccaattattattatcattgaagtcccacaagtacaaataatgtgtatctgagctgctaactgaccgattatgacacaccaccacccacttcggaaaacttggataatttggtacccattagggctgaacatcgggcgggtttatcgggtttcgggttgacgggtttcgggttcacgggtttcgggttcaaaaaattgaaaccaaacttggataatgtgtatttaaattaatgtgttttgtgaggtgggttcacaagtacaaataatgtgtaccaacccggacccgattataaataatattttttttttaattatttgcatatttattaattatttaaattttgcatggtaaaatatcattattctccgtagaacataagttaaaaataaaatttaaaacataatttacttcaatagtttatagaaaataatattattatttaaattttttcaattattcttttcttctttttattttggtatatttgaaaagaaaaatacatataaataaaaataaatatttatttaatttaataatatattaatataaaactatt

SEQ ID NO: 98799 - DNA, 2233 bp, Cannabis sativa
aactccagttcactctttatataggctttcaggcactaaaaagatataaaaacgcacatgttaaatgcctattcgaattaggaaaccacccaaacccacatgagacaaacacacattttttgtgccgtttagggggccggttgtggccccaaaaaggctgggccgcagcccgtgttggagtttcaccagatggcttggttttgacggtgatttttctgctgcgtcgattgatagtattttggccataactctctcgatattgctcgaaattggatgatttgagagagttatgtctcacattgagagaaatcacttcaagagtgatactccctttacatccctccacacacactcactatgatcttggactctctctctaaactaaatctaaagtatgagctttggagattataactctgaactcagaactctaatctccaaagctcatactttaggggacaattgttatacttaaatttcggctagcaataagaagctaacacatgtatcagagctggaatatgaaccaacccaagctgtgtattattaaatgaaaattaaataactcacctcgagaattacagtaaatagaaatattcaaactcgatgccatatagacattagcaagatgtgagtaataactattgactaataagaccggcgttggcaagataattcttcctactctaccaatttctttttggtctcaatgagttcttgagccatccaaatcacttcgggatcttgttcgtaattatactcctcatcgttcttgttatacccattgtccttaggatcatcctcctgatcttcctcgtcgatgggatttttatcatgtatttctcacattgttgattcttcttggggtgattgctcacttttgacgtctctccgtccccaacaacacccatctttatgtgtgtagtgggaggaggattaacatcatccatagtggtattcccatcacgagttttaggtttggtggcggtggttctagtggctaccattggtgtagtatacaacatcaatatcaaatctttctctagttctcaatgaaagcaccaaaatatttaccgagtttttcaaaaactgattaaaaatagaatgaaagataaagaaaataaattaaatataaatatcaagatgaattttttttacatggttcgagtgttgacaaactctagtcgacgagtcaatattatcttgctagataagtcttcgagtattaaactagtgttcttgtctggtttatgaaccctggctttagccttaacttgtaagaattgaatctttaaccctttgtaatttgcatgaaggggttttattatatttataggctagggtttttatgtaaacatattccactaatggggtaaatagaagtaatatattaacattggacctatttggtaaggcctagcctgtgaagcaatggttatatgtacatgtagaaactacttaattttgataggtaaaaaacatgtgccaccttcgcatgtaataaaggtaatttgatagttattggacaattaccatatattcttttatggttctcatgatctctagatatgactttgggggacaaagtcctaatatgatgggatttgatatgaaatgagcatcatatcagccttgacattcagagatctatttaattacctttctagaagtatcacaaaaatttatccagatgtcgtctccgctgggcccttctctcgcctatatgagatgtccatccggaacctagatggcctaacttagtgagtgtaatccattattctgagtgggcccgcaactggacctttgttgattgaattagagtcttagatgtgcacgtgtccctctcctaaaaacatgaataacatgaagaaatatagttaattactatagaaaaatagacttttaacgtcacgttttcatatcaacaaaaatctcaattttcgtctagaaaaagtccaaaacttttggttggcacattttgagtcgggaaacagtgctagagaaagaatcacaagtagtaggtcttttgttggcaagactttatcaacatttttttagaaggtgcctagaaaaatattttttttgtgctcatgactatattgttagggacttaattatgtatagatcacttaatttatagctacaatgtagttcatccttttatagatgtattgctttttccttttttttttttttttttgctggaaaaaaaataccaaattaattgttaaaa

SEQ ID NO: 98800 - DNA, 597 bp, Cannabis sativa
taaagaatatatattaattcaagcaaaaaataataataataaatatatatttaaattattatctttgaacaaataattaaaatatacatatttaatattaactcacttcataaaatgtgaagtaatatatgtgaaattacgcttgggcaagtaattacatatataatcaaccaaaagaaataatattttctacacatataaaatttagtgataaaataatcattaaaaattaataactttcaactaaattttcataaaaaagatatattaattgtatataatatattgatgataaaaaataaagtgttcaccataacacattagttttgcattaaacaatcaagttttataattttagaacaacaaataatgaaaagatgtaaaataaagagtattggtggagactacatagtcaagataaatcaaaataagagagtgactacgtctaacagaatgagaaaaatccaaaaaaaaaaaattctatgatttactaatttcgaaaaataaaattatttctaataattttttaactgtataattatcattaaattaataataattattatacgaagtaaaaaaaaataaaaatcatcaaaa

SEQ ID NO: 98801 - DNA, 2658 bp, Cannabis sativa
  modified_base (2255)..(2255): a, c, t, g, unknown or other
aaaacctaattttcacaaaatacaatttcatttcacgcttctctatccctggccattttgaaaccctagcagagctctcccctcccatttcgaaacccagcagagccgccccagccacaatttcgaaagactatcgaccgcccaccgtccaccgcccctctttctcttttgtgtcgtccactaccgttggcggcccaccgttcaccacccttctctttctcacggtatgtagctctttctttctcatctgaaactctctctctctctctctctctttcgtcaaaaatttcatctcgtctgaacaaggctctctctcattttttagcataaagaataggtaagaaatttcatcttgttgtgttggttgccaacgacaagtagttcaaatacacaagtgtcatttggttcctcttatgctttttgacaagtgttgaagctggtttctttgttttatgttgattagtgagtgtagttaaacctaatgtgagtgatatttttggtagagattataattatcattaagtaaagggtcatcactagttgaggcctttgatgtactttaaggatcaaccagtgataatatatacaagtttttcttcatttattttttactgtttaatttatgggttggtttgggtataaataaatacagcattctctataattgaagtttgaaaacaacttttatattgtgttatgctagtttcacttctgtcataatatattctcatatctccaacttcatactgtgtatttatttgtattaaatcttgttgcagcattgctcgcttatgtgatcaccatgaaatcttttacctatttataacatagggtcatcattcacttcactaaatgtttatagagtgggtaaccttttgtgagctgaatcagaataataggcctcatgagctacaatagagtttgaagttttgaatatgaggacacgaatctttcatttaattgaatgaaatactaactaataatgactttttttgtgtcataatgtgctattgctattaaatatattttttattttgtatttctctgatcttcaactactcagcatttttctacttgtgctagtctgataggcctctttttacatttatttctcccctgtggtagttttctgaagcatttggtaagctctatggacaacccaagcacaatataaataatggcggagttgaacagtcacgatcacgtggtggtagcattcacgagaactgcataaagtaaacttttatttcttactatctattttaagcttcctttgttgtaatctgataccagtttgtttgacatctctttacatgttccttaatgtgtggttcctgttctgcaatacattgtttatttatcataatacgctgaagttgttgctgcaatgtcctctttttgcgaatatctagctccgtaagattatgttttctttcatttactctactttttaacttgccttttagaaatgcttattcttttttttaagcagtacacttaatctgagtgtaccattctcatatgattgacatggtttagttacacttacacatttgaaccaaacaggaatggttcatttctttctgtatctagcaattgctagccccttatcctaagaataaggaaggcatgattggctgatcacaactttcaatgagtgtctgttgttaaaataaatatgaggggataatatgattcaaactagagattgttataagaatgtttaaacagctagcttgtcttgaactcagcaattagataaggcaaaaattgatcaggagtagcagtattgatacttatcttttgtttgagtttaacttttgaatgtaatcatcgacacttctgatattgtcttctcaggctcctgcatttatcaaagccggatattgtatcgcaaaaagagaagattgattttattttaatgttggtttggtgatttgatgcacatgcacttatcatttgatagccatctttatatatcaaggagtgctcataagctacaaaatttacttacaatatgagcttatatttcctatgcatatatgaactttagataccctcagtataacctttattattttccattcttagttttattaatacacttcatagttagatctgcatttttattttttggtgtttaaataaatgtttatattgtttatctgatattgtattatttttcatgaaaggattgatttgatattgtatttattttttggtcggaattgtttggtttcagatttttttttttntttttttaaaaaaaatacttttgcttcagtttataaccgaagcaaaaaacaattagcgttactgcataggtttttgcttcggttatgaactgaagcagaaacctttttgttttagcttctgttatgaaccgaagcaaaaaaccaattagcgtcaactgaagcaaaaaaatcagtatttgcgtttatggttataacgtcggttacaccaactgaagcaaatactttatatgtcacttaaaaactgaagcaaaatgtcctttttgtagtagtgttagctggggattcattttactatgggctcaacagtgaggtaatatccacctcttgctaacacaacagtttcatttctcaggaaagctcacccgacaggaagaacaaccaagcctagccgcctctgctcttc

SEQ ID NO: 98802 - DNA, 656 bp, Cannabis sativa
attttaatatttttataagtttccttttaattatcatcctaatatattaataatattatcaaacacatttaattaagttgtatactttttgacactaataatgtcctcttctaaaatgatcaaaaaatacttatatttcaatagtcaaagttgcaaatcattaaacaccttataattctaaaagtctttatcataatggtctcacgttatgttaattattagttattattattattatgggcccctatttattttttctaaaaacaaatccctcttatcacttctcttccatggtcaaaatatgctcaaacttattggatgcatgcaaatgcacatcattacaacactgcaaatcataaatatataaatgtattatgatcaaattaatttaatggtgatctttggaaacaatttcctaaaatgtaccaagtaataatattcgaatcctttcctattgaattcatcatatatgagactttcatgtataattgaaattgacctttaatgctaaggtgtaatgtgatgtttccaatggaaatacagtcactttccattcttttaagttagtgcaacaacaaaattaacacaaatatcattgacttttattttagttttaataatggtgagtcttctataaacatatatatatgtttata

SEQ ID NO: 98803 - DNA, 970 bp, Cannabis sativa
cccccaaagctgccaagtccaaggagtctggaccaccaacggtttggtctgagctggtcaggggcaatcctgaatggatgtaggcacctgcttcacccttgtcggtgcttctaaatgccaagaagggcaaggggatgctggcccattatatgaaccggctgattcctgaggtcagtgagcaactggcgggtgttgacaatgactcttctttggagttgttggtggctggagtcttgaaggagttcaccagggtaagtcttttttgatacttccccataatcttccacacttagctcaatatgctaaagtttttcctttgtgcaggccggtctgaagttggcctacacttactcctaggctaagtctgctgcttccaagaatgcggctctgtccgacaccctgaaggcgaaggcggacttggcaaagaaggatgctgaagaagccaggcggaagccggagctgttcggttggagttgggtgaagccaataagaagctgtttgccactaagaagaaaatcactgtgctgtctaaggatctcgaggttgcagaccgttttgaggagaccattgagatcttatctgctaaggtaaaaagtcttcaagatgagaggacttctgtgcgagcagttcttcatcggatgaaggaggaaaaggaggccaaggagggggagctttcggctgaggtggacaggttgaaggagaaggtcaatgccttggagacagctggtcttgagctcttctttgatttttggaaagctaatcctcgggccaatttcgactacttaggtgatgctaaggacatgtaccttgagtactgcgcatcccaagtggcatatggcgaaactaaggtggctgcttcaacctccagtaagactgctgatgttcctcccgttcaaacaacagatcctcctactctagttggcccagaagaacttaaccaagaggctgggactccagctgtttaaacact

SEQ ID NO: 98804 - DNA, 1080 bp, Cannabis sativa
aaaatcatatcccataatatatatagatatataaatatatatctaaatgtataaataatatattagttgaataaaaaaattataactaattgagtaaggcataaatcaatcatatcatgaaaataaattaaaacaaatattaagtcacatcaaagtgaaaaaaaaaaaacattatagactacatgagcaacacctaaaatattattaaacaatttgagagttttaactaatttagtaaaaaaaaaatatgacttttttcttaagtaaaaacttcaaatttccaaaaattgtaaaaatactttgaaaaaaatatgacatgccacatcatcattcttaattttttttatataaatatatagagtagcaggagaggcacgttagttcacacaattaattacgaaaatagataaggaattcaaaatggcggaatatatagaaacattacttcataagatgaaaaggttttgagtgcctattactcttattctttataatcctaagcatgcatccgaatttggccctattctgcaatatttcatactagattattgcaaacgagtgtgttaaccatcttaaatgcctattaaagagttaaattggtgcttttgctcttaaaaacttaatatgtctaaggcctatatgatcgagttgagtggtcttttctttgttgtcttatgcgcaagttagggtttcatgagaagtggatttgtgttgctacaatgactcacaattaatcgtgaattaagttctaggcgaatactaggcgaagggttgaaaaatggcaagatatttgaagaaggtttggaagaacttggagaagttcgatttctttaaaattgaacaaattctaatagagaacacataactcaaaaatgtgtcgaacgccttggcaaaactggcctcgcaaaatgaacttgacaaattgaatttggtaccagtcaaagttctaaataaacccagtatatgtgaatatgaagaagttgaaatattagaagcctcgcccacatggatgacacttatagttaaatatctactcaacgggcaacttccagcagacaaaaatgaggcatgaaaactctt

SEQ ID NO: 98805 - DNA, 696 bp, Cannabis sativa
  modified_base (536)..(549): a, c, t, g, unknown or other
  modified_base (641)..(653): a, c, t, g, unknown or other
acatggaggtgtatgtggacaacattctttttaagtataaaaggctgagggcatgtggaggccttatgcgagtgcttcaaagtcctttccagctacaacatgaagctcaaccccctcaaatgctcttttggtgtaagctcgagaaaattccttggctttatatttaacgccaggggaatagaagcaaacccagacaagatccaaccacttttggacatgaagtcacccatagctgtcaaggaagtacaaagcctaataggactctttactacattaagtagatttgtgtccatgtctacagacaaatgtgtacccttcttcaacattctcaaaggcacgcaaaaaattaaagtggacagaggaatgcgaaaacgcaatccaagagctaaagaaaaagttcagttttattccctaaataaaactcatttcaataaaatcagatttactaattaataaaatatcagaaattgcttttatgttgcatcgttcacaagatttatttcatgattatacttattgtataaattctattaagnnnnnnnnnnnnnnaaatatgtatatatttgttcatgattatagtgtcgtcagcacagtagaatatataatgattatatgttcaaaaatttaattcccatgatttnnnnnnnnnnnnnatttagactggcatgataatcggcaataaggtatacttacacc

SEQ ID NO: 98806 - DNA, 2566 bp, Cannabis sativa
  modified_base (513)..(527): a, c, t, g, unknown or other
ataagtctcaatatcctcctttttacctacaataaaaaaaaaattaatgttaaagggatacatgtaacactttatttgatgtcatttacttacatacaaaaaatattagattgaaaaatgctatgtgtaagtgtcacgtgtaacaataatagtggaacctccacctatatccaagtgtcaatgcattatttttttaagtttctttttcttgattagtgtcttaacttgcaagtaatatgactcttataaaaacaaccacacattgaaaactttgcacaagttctcatttcatcagacgacaatgcttaaatattttctattctcgtaaatatattatatatatatagctttatgttcttcttatttaaaaaaatttaggtttctcatctaccaacataggtttcttctttttttaatggctcaatattttaatttaaggtacatagtggcataagtacccaaagttttacaaacattgggtacttatgtcgctaaaaataaacattgagtttnnnnnnnnnnnnnnnataaaactttgggtacttatgccgatgtttaccctttaatttaattataatatttcctctttcaactatattttcttttaaatagttgttcttttaaaataattgctcttatactcactttagatatattatcataatgttgacttaattttattattgacatatttcgatttatatgatttgtagcaggtgcagataattgactggagcttcttttcagcagaaatttaattgcatcgtgtgcaaaaaaaatgctgaagccatactgttaagacagttaaagttagttagctttattcagtttagttagttagcttagctgtctttaagtggttgttgttcaagttgttatttttctattatgagcttgagtgagctgttagtttgttacaataactaattaactcactctcttgattgccttgtatataattaagctccttgagctcagttttagtaatcaatcacttcttttctaattctttctttctcagtttcttctatctttttctttgtttttctttcatttctttcatcatctcaagaaaaacttcaacatggtatcaaagcactttccgccactaatggaaaatattgctacaagtgatcaaggcaatcatcatactgtagctggtcctggttctatcagcaacaggggcaaggaagcaagtgaatcgcccactgtcttcttcaatcacaatctttctgttaagctaaatgattataacatcttgctttggaagcaataagttatggctgcaatcagaggtaacagacttctccctttcagtgctgctcctcctcttaaatttctctcagatgcagatcaagcttcgaatattctgaatccaacctatgtcgactaggatgttcaagactagttactcgtgttctggctcctctcttcaatgtcagaaagcttactgactcgaattgttggatgtgaatcagctggtcacatatggcgcaccttggaaaagtacttcacgcttgaagttaatgccaatattctcgagttcagaacaaagcttcaaaatctcaagagaggtaatcttggactcaaatagtacttgcttcgaattaaacaacatgtagatctactggcgtctattggtgaagttatgtcagatcgtgatcacattggagctatcttcaaaggtttgcccagtgagtatgacacatttgtcgtttctgctaatggcagaatcaaaggctactctgttatagaaatcgaagcccttttacttacatctgaatcttgaattgagaaaactaatactgagctggatctcagtgctaatatgatgacaagtgaaactgagcttcatcctgaggcaaactacacgaacaataaaaacttcaaacagtctcagcaaggcaactacaatcagtttcatccttgaagaggaaatttcagtggaaaccttaataggagcacacatacacaaggtaacagtccaaacatctcttcgaatatctctttctctactaatgatcgtacttttaatggttaattttccaagaggaggatccaacctttcaagaggaggaaggttcaatccaccagtcaacaaaccacagtgccaaattcgcttcagaattggtcatactgctcaagactattactacaaattcggcaaaaagtttttcacactccactagtcaaggctcaagttcattagtagcaggatcacctgctcaagcgaatcttacacccaccaatcaaggtctagacaacaattggtccttggctcaagagcaaccaatcattccacactagatgctcataatgtcatgaacaacagtgattatactggacgtgaacgcatgtatgttggtgatggtagaggtctgtccattaagcatgctggtcatactttcaatactcaaaattcttgtcaatctcatcccttacttctcaaaaatttatccctgctattacaaaaaatcttgtcagtgtctctaagttttctgaagatagtggtgtttattttcagttccatcctaatcattgtcttgtgaaagatcaggtgacacat

SEQ ID NO: 98807 - DNA, 2460 bp, Cannabis sativa
aaaaataattatttaatatctttttatatttttagtgacttgcattgtgagacatgaacatccaatttttcatgtccaaattatagtattaaaaatccttaaacatctaattttattcctttgtgtcgaaaatggttgtgtacgtaccttagtccaaaatatgataacttccaagaagaaatataaatatcatttataaaacataattaaataacaaagcctaagtgcataacaaatctgcatcatgattttattatattatcgaccgaaacgtctacccattggaatttggatcaataacaatattgatacaagaaaatagctagtacaccaaaattaatggttattaatccatgatcgctccatctttctacaaagttcacagaaaataaaaatataataattcgttggtgtataataaatctaaaactttattatcttgtatgttagatagaggtagtttattataagatgagtttccgtatataataagagttatcttccaaagagaatcacttattaaattagaaaagtccatccttattgggagaaatctctagtgacaaacactccttcaattccaccacaacttgattcattgttggtctttcagctgagtttatacgcacacaagctgtggcaatttccatagttttccatgcagaattgagttggaagtttcctctcagtttgggatcaactatgcttttaatttcaccattttcacgaagcatgttctcaacccattgagatatgtggatgacttcattgctacttatttttgcaatcactggtcgactagtgattatctctaatagaacaactccaaaagcataaacatcacttttctcacttaaccaatttgatttgtaatacctaaagttcaagataatcatatataatattttatgtacattttcaaagttatatgtaatcaaattaattaattaacatttaaatatatatatatttatacttactctgggtcaagatatccaggggtgccagctacaactgttgacacatgaccaccaccttcaacattgaaagctcttgagagtccaaaatcagcaagtttggcttgaaatttttcattcaacaatatattggtgcttttcacatctctatgaactattggtggcttgcaaccatagtgtagatactccaaacctaagtttcattaacaaacaaaatccaattaattatatataattacactttcactacccaaactttaaattttgtgtatgtatattaacatatgtatataatggctaccttgtgctgcatccacagccatttgcaatctctccttccaagtcaatgtataagcttgtttatctgtaattttattatttagatgaagaatttatcaattcctttgtgttagttttctcagatattttggtatcaactaagtaatgatgaatttaaagaacctgagagatgtttccctaagtttccattagccatgtactcatagataagacccatgtgtttgtcatcctcaatgcaatatccaacaagactagtcaagtttctgtggtgaactctcattaaaatttttacctgtcagtaatattaaaccatgaaattcagataataataaacactctaaacaaaacaaagtatatgaaatgagaaattaatcatcttaattagaaatttatatacctcagcttgaagctctttgtagccctgagctgatgactccgagagcatcttgactgccacttgagtgttgtttaagaagccatgataaacagttccaaatcctccttttccaataactttctcaaagttgttggtaattctcattacttcagcgtaagtatattgatggttttgtggctcaaatcccgatccattaatttcgttattacttgactttgggacaatatcgttgggttgccttatcccaacttctgctcctgttatcgttataattaagctttatttacatacttgatttatcattccgataaggattggtaaatatacatatataaacatatatatatatatatatgtatatatttatgtataaatacctttatttcttcttttgatgattttccatccgataaagaatgcagcaaagaggactaatagagagcctagtgttgctattataggaattatatagtttttctttttcttcttttggcacgaatgtgagaaacaaagatctgggttacccgaaacactatacaataaagaagttattaattatagacataactctcactgtgctgacaaattaatgtataaaaattattgccaatatagagaaaatgaaaatatactttagcaataatgagccactgatagatttttcgatgagctcgcttggaactgaaccgatgaacttgttacctctcaagtctctgaaatggaaaaaatgtatgtgtttctttgctctcttcatcaaataaagatatatatacatatctttatata

SEQ ID NO: 98808 - DNA, 758 bp, Cannabis sativa
ttaaaaaacaatttttcttttgtagtgataatacaacttttacaacacttccttttttttttctcattatattatgtggcggcttttttttcttccttgtttttcttagacaacttttaaaaataaattacattaatttagggtggactcataaaagccatggagtatagtcgtgcctgaaaaagaatgaaaaaaaaaatatatttatgtatttttattaattatcatttatatttgtaataaaaattgatatttatagatataatagagattaaacttaattgcatttataatatagattaagaatttaaatcctactaatagtattttttttatttctttttaagtttatttttgttcttacaaaaagaattacgcttccattactttaaattttgaatccgttattataatgctgaaatgtatgaaaagttgagttttgaaaacaaaaaggtaaaaagaaattgttttataatcttggggtgtatttaacgaattcacgtaattaattccacactaattaagtcatggacctaattaattaattactaattaaattgttttatagttgtaatataaaatcatttaataaagccattaattaatattttcaattttcaaagggaagcgtacagtttgcctaaattcatgttcaataaatttatgaagcctattaagggagcatgtaatagatattaatgattctttctccaaccctagggttccgcatattaatgaatttattattattattatta

SEQ ID NO: 98809 - DNA, 3914 bp, Cannabis sativa
tgtcaatacttagactttgatagaaatattttcttttctttacatataattaattccatgagtacaaattatttggcctataaatacacaaaatcccatgtaggtgattctcactattaaaattaatatcagcccttgaataaaatattccttttttttttttttacataagaaaattatgtgtctctttctcttcttccttgttatttttgcttttccatcaaacactttatcatcacatgatcatcttgatgattctcctcctttagtccagttccatccccaagaaagttatgctttgcttcaattcaagaactcatttcccataacaaatagtagttactcttcctactatgcagctgagcttggaatttccaaccccaatagtactaattcatggaatataatgagcaaggattgttgcacatggagtggagtcacatgcgatgagaatactcgccatgtcatccgcctcgaccttcaatgcagtggccttcaaggcattcttcacttcaacagtacccttttcactcttactcatcttcagtctcttgttctctcctacaatcattttcacacttccaaagtttctacaaaatttggaaggttttcaagtatgattatttaccttgatctttctcacaccatgctcattggtgaagtcccttttgagttttcatacttgtccaagttggtttcacttgatttgagttttaatcatgagttgaaacttgagacatctagctggaaaagaattgtggaaaacctaacaaatcttagagagttgcttttgcatgatgttggtatgtcttatctctcacccaattcatttactaatttatcaacttctttgaaatatcttgatcttagtgaaagtggattggagggggagtttccaaagaatattttcaacttgccaaaccttaaagagctagacttaagttacaacacaaatctcaatggtacattcccacaatataattggagtagcccacttaagaaattgagtctttctcactccaagttcttgatagacttgccttatcttacaagaaacttgaagtatttgactactctatctttagcttcttgcaattttgtaggattatatccaaaagttccactacatggaaacctcacacaaatcacttccttagacctttcttctaacaattttgggggtcaaatcccatggtcatctctcaatcttccaaaactaattgaactagatctttcattcaataatttcactggccagcttctagatgtttgtagtaattccacaacagttttgtcttcatgtgtctcttcatcagactcaattggtggtcttcctttgaatttaaagtccttgaaattgtctactaacaaacttagtgggacaataccatcatggttatattcccttaagtatttgcatgagttagatctaagtggaaaccaattcactggctccatccttgatgatttcaaatatgattctttagtacatcttgatttacaatctaacaaactagaaggtccctttccaagttcaattttcaaacttgttaataatctttcctttttgtttctttcatcaaacagattgagtggtgttgtgtcattagatgagttttcaaatcttaaaagtctcaaatatcttgatctttcctttaataacttatcagtggttgattattctatcaaaaataacaacactcttccaaacactcttttctcattggcattgtcttcatgtggtctaactgagttcccatactctctaagaagtgttgaaaagttaggaatcttggagctttcctacaatcaaatccaaggggatattccttcatggctttggaatgttggaaaggattcattgtatttccttgatctttctcataacttgttaacacatgttgatcaacttccatggaagaacctacaaaacattgacttgtgctctaacaagcttcaaggtcatcttccaattccaccactttcaacattgttgttcttatttgcaaataatgagttggttggagaaataccatcaatgatatgtaacctcacttctcttagagctgttgatttgtcaaataacagtttaagtggtaacattcctccatgccttggaaattcaagcaaacttctctcagtgttatgtttgcaaaagaataacttttttggcataattcctccaatgtttgcaaagggaatttctttaaggaatctaaaccttaatggaaatcaattggagggtccccttcctttctcattgttcaactgtaaaaagttggaaattttggatgttgggaacaatgggatacatggatcatttcctcattggttagaatctctcccaaacttacaagttcttatcttgagatctaatagatttcatggttcaataattaagcccaataatgttagattcccctttcaaaggttgagaatcatggatgtatctaacaataaattcatgggtgtcttaccaaaagaatattttgagaattttgtgggcatgactaatgcctattcaagagatttgcaatacatgggaagattcataggacaatcctattatcatgattttgttactgtagcaataaaagggttttatgttgagttggtgaaaatccaatccatgtttataaccattgatttctcaagaaacaatttcacaggagagattccaaacatgattggaatgcttcattcactcaaaggcctcaatttttctcacaacaggctaacaggtaatattccgcaatcacttggaaatttgagcaatcttgaatggttagatctctcctcgaatgagcttaatgggaagattcctggacaattggctgcaaatctaaatcaacttggatttttaaatctttccatgaacaaattggagggacaaatacctcttggaccccaattcaacacattcaataatgattcatattttggaaatttgggattatgtggatttccaatttctaaatcatgcaattttattgaagacaagaaaaaccaaacatcttctccattaaaggatcaattgtatgatcattatttttggaaagttgtgttgataggatatggaactggaataatcattggaatttcgattggatatgtttttcttgcaaataaggctgttgatcagattaccaaaagctttcgaagctacaatagcatcaatttgtgatgaaagtgatcaaatagtggaatttggagaagatgcacaattggtggagtctactgtttcgactcttgtgtctaccatgtttttacttgatgtgtcttgaaaaaactaagtcaacttccaatattattattattattattgtatttttttttttttgtgaacgaatatttttctgtaattttctttttggtatttttcttttcagaaaatattttctctagttcttcctttttgtattaaatattaaataattaaggaaatattaaataattaagggttttttcattaatagtaataataataataattatttatcgagatttcaaaatccaataaaatatacgtgaaagctaaagaaatatatgtgaataataaagaaataacactattcattttacgtagttggggcgttaatgagttttagtctacggatcaatattcttacgataagactagaaaaaccttatgatttacataagtggataataaagacacattaaatgtttcattgttaattactattttccatattggaaagatatgatcgtcagacgagattttgggagttaagtcctgatattgtgggatcgagtaattaatagttgtgatacagagctagttgtctaggtgtttgctaaccgttaggctatttttcgcctattgctcgggtaatttttagagttaatttttttcttcatcgttattttttagaatagaattacgcttgttt

SEQ ID NO: 98810 - DNA, 599 bp, Cannabis sativa
tatatatatagcaatataattaattgatttgtaactaagtgccttaccacaaatcaactattcgcatctagtgcgtaaattgagatctgaatgtttgtacttaactataataccaacctaattaacactctaatcatactaatattagtagcattaatccatattatttaatactgcctaacatactaaatatcaatatcatggtgtaacttgatgaacacatattgtcatctctaatatattagctataaggtaatataatacatgtatgttaaacatgtacggatgtacatcagaatactttccttatctagaatcactaaaggaaaattatattttgtcagcgaaattcataaattaagtgagaaagttttgtcggcacaattaagcttgtcacactactacaaaagacagaatttgcaacagtctcaaaaatactttttttaacactcgtatagattagtcaacagtttataagtgcaaagagaaaatttaaaaaaaaaaatacattattcccgacggtttagaacaacattaacccatactttgccaaactctggcgcctcactctcatgtaaacattcagacacaatctcaag

SEQ ID NO: 98811 - DNA, 508 bp, Cannabis sativa
acaaaaaccaaggtttggttgtttttgtagtgggaaatggttaactgtctctatagaatactgtggaaacgtttaaccatttgacccagcgggaaacccaattttctgaaaaatggtacgctgtttggggtgtttttccagtacctaggtttctgtgttttatctatatttaggttattccaagctattatcgataggggtttgatcaattttttaagtttagggcttatttcaagtttgattaagttattcatcaagtttctgttgtcgtgacatagtgcccaagatcgtcgagcaccattccactcagttcggcccgcacacctgactttagactacggtaagaaaagtcaattgttacggtaattaccgttattaagaaagagttattattctcatttgaaaccgctgctagacttcttacttatcagctggttcatcaggaaatgacagtgacattagaaactcgttggtaattaacaagtgttaaggatgctttataaagtat

SEQ ID NO: 98812 - DNA, 782 bp, Cannabis sativa
cttctaattacacagttacagtattattatatgttcagacaaatataccaaattatgcaattaccttcacttacatacaaattcaattactcgcttttcaattaattattgtttaattacacagatggtctgtcattatctttcttccccatggattgtctcactttttttcttttctctattttatgcatcagtcttccaatattattagaagataaacataatgtctttataatcttatgtcaccaatcttcttaatatattttacatctgataatacagaagggatgaatgtgacttgtaaaattcaaaagatgtttcaattaacactctaaccatataattaggagagaaattataaaattattcaaaataaaaagtcagatatgagctgtatgacgttgttggtacaattttttggtcacaaagaaatgggccacgataacgttaatagtgacacaaatcatacaaaatattgaaaagtataatatagatgaacagtgacttgtgatcacagttcagtgattataaattatgtgccctttgaaataatatgatgatatctaagtttagttttgcttcactctctaatctctattctgtatttatctaattttaaaaaatggatgctccaggggaaaatgaggatcaatcataccttggacatgttaaaaagcgccacgaggataaaggctttttttacgcttggtaaatattattattattatttttcataattaatttaattgggtttaattttaatatattttttatatatataa

SEQ ID NO: 98813 - DNA, 834 bp, Cannabis sativa
cactaaacattccaaaagtcttatctctattactattatcaccctattaattctattttatttattttcacatattcttaaagagaacaaaagaaaaaaaacacaattaaatttgttattaattagaccctttgtaaaatctagttgccattatgaagttgaactggttagcactataatgcaattttacaattctctcatttggggccattttttattataataaaatttgaaaaattttctcattaattttcacataaaaattattaattgtccccttagtgcggatcttaagtcctttaggtcttaataaacacaaaacgacaatgcgcattgatgaagactaggccttgtgacatcaattttcacaaaataagcacttttcacaaaaaatattatgtgggttttgcttatattaatggaatttgtatatattatatcatatatatatatttatatgagtgtacatggctactttcccactaagtcttatttattatatatgagttggttatattataggtaacgtgtgtgagggtgcaaattaatttattcaaactaatttagattagtgcttttttgtttttaattatatggatagacttggtttaaaagtgatgatatacccaacacaccattcattttatgtttctatcaaaattggtaaaagagtgtatgaaaaatttcaaatattcttacccactttatgtatatcttataaaaggcttttcacacaaaatataagacctagcttacctcttattatttattaggactctaataacttacaaattgacaacattattgtgttatgttaaccacttattgagtatt

SEQ ID NO: 98814 - DNA, 662 bp, Cannabis sativa
  modified_base (50)..(54): a, c, t, g, unknown or other
tagctataaataatttcataaatattcatgattaactgctaatttccaannnnnctaagcgggctttacaataatagtaataataataataataaataaaaagtctctcctacagtgtccactttgaggtgatgcaatcaatattattgagagggatacatataatatcatataaaaaagaaatattagccacttatgaaattaataataaaaccctatatactcttattctacttggaggctgtttaaaaattaagttattattagcttcaatcagaagcaaactaaatataactttctcttgaatttgttttttttaatatttaattgcatgatttatcaaatcaaatgacatatgtaagcatattatattaaattaaaattatatggaaaagtagactgattattatttattattcaagtatatatatgtctcctattaagagtacatattaattactataaacaaaaaatatagtgtaatcaaatcaaaacaaatcatcatacccgatttattatttaatattcggaaagattttcttttgcttttttttttttttttgtctgaaattatattaagttttatttattattggaggcaattacttgataatataattattatatatcacaataatataataattatttaagttttattt

SEQ ID NO: 98815 - DNA, 3357 bp, Cannabis sativa
aacataattaaatatattttattatatttagttctataatgtttaattattaaaatcttaaaatttttgcaagatataaaaaagaatatttgcggccaattttttttaatattgacaagtattgttatatgatcataataaaaaaagtggcagtaaaaatatatcatcttacaattttgttgcaatcatgttattttttggccatcaagtgtcaatacaaaattacgtagcgacatactattatactacatattaaataagttaaaaaaaatatgtcatcatttatttttgagttgacatttaacggattatagttaaaaaaagtataattaaaacaaaatagaacgttaaagtatttttaccaccattttttttattaagaaataattaaaaatattaaaaaaaattcaccataaatatcccatataaaaatgtgtaatcgctccaacttaactttatttctaagtttggccagtgaatacgaggctgcaacttgagtcggatggaccggccggatgatcacaatacaatgaatgtttctaatgatttatattggatgttgatttcatgtattaaatgtattatttgacagtaatttctaataatgtatggtgatcaggttgtcatgagtgtatcaggtccaaagttatataaatatgcgttttattaatatatatatatatatatatattttgctctcttgcattgcatcttcttcttcttcttaatttctttgaaatgactgcactcttgcatctgttgagttcttcctttcttgtttggctcttttttgaggccgtggccgtgcatgtttctctcaaagaaaaagaaagctaagggtcttttttgaggccatgcatgtttctctcaaagaaaaaagaaagctaccatttgttttatcttcccaagtttgccttttgtttatttaaatactattccaaatgtaagtaaatctcctaagttagggatgcagtttatgttatgatattgataaaactattattttcatgtagggctgtgcccgctactaatcataaaagtaacctttcaaaaaaaatcctaaaaaaaaacagatagcgtaaaataagaagcaaaataataaagttaaaaaaccacaaaatcgtgtggagccaaaatgacgtcatcttgtggggtcaaaattcataatgacccgctttgaccattcttcatctcaattcacccgcgtgccttctctcactcctcgcgatgcgcgcgtaaacaaaattaatcattatttggattctatttaaaaccatttcgtcccatcaatgaaaaccctccacctcatctaaagtatgatattttccctttttagtgccatcaataattcctaaatcacaataaagccccccaaaattccacgtggcactcaagaatatatgacaaaaataagccgatatgtggaatattaaagctctcccacctcaccctcttctataaatgacccctcctctcttcctctaatccttacccgttcccttctggtttattatctgactctctttctctctcttttaatcaacacattttctcattttcttacccatttccctctttgaatctttcgtttagcaagaactggctaactctcaggaaattctggaggagagtggttctagtaatcaaagggtggttcgggccctgtatgaagccttgagctcccgagacgtggacaaggttcacagccttctctcgccggatctagattggtggttccatggtccgccgtcacaccagttcttgatgcgattgctcaccggtgtttcatcaccagacgacgtcgttttccaattccagccccaatccttcgcctcattcggacccaccgtccttgtcgaaggctgcgattcagatctgtcaatagcttgggttcacgcttggaccgtgacggatgggataattacccaggttagggagtacttcaacacttcccttaccgtcacccgcctcggcgattcttcctcctcttacggcaaatactctccgctaggattcgcttcgtcgtcttcctcatcaacgtccgagattgcttcgtaccactgcccctccgtttgggagagtagcctctccagtcgggtcggaaagtcggtgccgggtcttgtcctggcgatttaagcgaccccgacgtaatctctctgatctagtgcacccgatcctattgtaatatactacagtaaataaaatcgggtgcttacgtggctggccctggttgcctgtgaacttatggtctgagagtttaattgagaagagttgagtcagaagagtcagggaaatgtaggtcccagtagcgtttggctttggttttcttcctttcgtgacttgtcgtttttactttgtttcgttttgtcttggagtgtgaactttcttattttattgtcgtgtttttatatagtgtgtgctggtttagggtggaaaccatgggggtgatgagttcctattggttgtttcccgaagcttctgtaatgtgttgttctgcttttctaataaacatgcgttttcataatgttattgtcgttttatctaaaactacacatttttttcctctcaaccaaaaggacactattaatttctcttaactagcgactttcgtgaatctcttacacttaaatctatatgagaaaattttagctaagttatgagaaaccaactaaacatggccatggtgtacaacaatcatgttagaatatactagcatattattctcttaatggcaatgtgtgtgcatgattgcaatattgtcaggtgagtagttcgcatcccgaccggttcctaatcattttatttatttatcttttttcggataaagtaaccatttttaacttgactgaaaaatattataaatttaataaaagccacgtggacggtggatatgctatactagcaaaacatgtctgaatgtggcccacacatatgggccagaattgatgaaatgaaggagaaacgacaataatgaagagagaactctagcctctgattctctttcgggtaaccaccaccaatttggtttagtcttcaaatttttttactattagaaaatagatttgtcacgtgtatattgtaatgacttaagctttatataataatatttcttaatttcttttttacaaagtccttgcaatcaccgtccaactatgaactattattccatgccggtattcgtttttcccctttttaagattatgttttgaactttgtcattagttaactttggctatggaaaaaaatttatacttcttaattttcttcctgaagataatcacaccatttggtcgtgattattttataattacttttgacattaaaattctgaatataaacataacttgaattttattt

SEQ ID NO: 98816 - DNA, 1805 bp, Cannabis sativa
ccttttgcaacataataggtagaagaagtagccaatctctaatcaagtttaaaagaaaaaattgacatctttaaatttcttaaggtcaagtcccccacattctctcgacatgtagatagaattccaattggacaagacaagaaacctcattttatctgagcccatgatccaccaaaacctttgcataacattgtccaaattatcacaaaagcatttagggagcgaaatgttaacatagagtaaataatggtaataggaacacaaatttgatcaaggtagagctgcctgcatgggatagatattttgcacttctaaccttccatcctaaagttaatactttgtctcatataggaattttttttatttctactattagagaagaagagggggttgatgaggagcttatcttgcttatttaactctttgaagcctaacaaagatgagattgatgatttgatattggcctatatatttctagaaaatactaaaaaaatatgcacattgagaaactgattagaccaacgataataagtttgtagggatatatagacaacatcaactttgactaaattagacttacaaaaaacaaaggtttcattcgcatacacaagataaaaaatggaggtaatctgagcacaaaatttaaatctatgaagtgagccctaaccattgtcgctgaggaacattctacattacacctcactacaaataatgataagatatcgagatattgtgtctctttgtcttaagcccctacaggaggagaattatttcaacccctttaataggactaagaaagccacgatgaaactcacttagaaaccaagtgtatgaaacgttaaaaaaaaattgaaggctttcaaagtttaccttaagaaactccattccagatgatcatcaattttagacatatcaagcttgagaccgaaaaatctccagcaaccaaacgattaggtacaaatgcaaattcaaaggatattagttttatagaatcagagagagaagaaaacttttcttattgattattctcagtggattgagaaatgagctaaattacacttatatagactatgagccatcaagaaagacacaactaaaatatagctagaaactatactgatcaaaatagaatcagtccacttatgataccaacctagctaacttaacaaactctactaacttttaatagcccccctcaagatagagtgtagagatctttggcacccatcttggagatgatgcatgtcttcgaaaggagtaggaaagagaagtttggtgaagagatctgtcaggttgcctttggatggaacatgaagcattttgatcattccttgtgttactttgtctcaaaatatatggcagtctatgtcaacgtgtttggtacgctcgtgaaaatattaggttctctgaaatgtgtattgcttcattattatcacaaaaaagtgtggctggaagagtataaaaaatgctaaagtcttttgagatggcaagaatccatgtaatttcacaagtggtatgtgacatggcttggcattcaagttcagctgatgagaaggacacaacgacatgtttcttaaatttctaggaaactaaggagttgccaatgaagacacaatatccaaatatggagcgtcttgtgtcaaagcaacttttccaattagcatcagagaagactttgatgttgatgctagtttcagcataggcagaaacatgagagttgcattgtgcagagaagaataatccttgtcctggagtggtttttcggtactaaagaattctgtgagaagcctgaaaatagggtagtt

SEQ ID NO: 98817 - DNA, 507 bp, Cannabis sativa
attgccacttttgcaaacacgcacctggaaaaatatgcacgaagtagaacaaaaaaacggcttgaatctcactgcaccagtacagctactgtaacagcaccaaaccagcaagaaaatggacttgttcgtccaagtatgcatcctacggatcacatagctgaaccgtctgctgctgtacaacattctgaccgaagcttcaaggcgtttccctggacaccaccaccagtttctggcctcaaattaaatgttgatgttgctgtaaacacagacttaaaaattctaggctgtggagcaatcgtacgtgaccatcatggtactgtcatagcagctctatccaagccagtccaaggatgctttcgatctgatgaaatggaagctaagtcactttttcatagtctcaattgggtgttacaacaacaacttccaattacacatattgagacggatgcattgcgtgtttcttcggctatcaatttagtttcccgggatctttctagttttactgac

SEQ ID NO: 98818 - DNA, 934 bp, Cannabis sativa
aggatgtcttcctactaaggttcagttacacactaagcatgtaaacgttgatcttcaatgtcctttttgcaacagggagaatgaatcaattgatcacgtactgctgggatgcaattttgcaaaatcctgctggtttttttcttctgcaacagtccctgctgctggtgcgaatatgaatttcgctggctggtttttcgagcttctgacagagagtcaaggggacattgtggtggatgcagctatggttagttggagcatttggaatgctcgaaacgaagtactttggcagaataagacacgggctgctaaggaggttgtgaagtcggcaagattagtccttgatcattggaaaatagctaactttgattcacctaacgcgtattttgctacaggtgaggttttaggaagtaagctttggaggaaaccagatcaatctacaatcaaggtgaatgttgatggagcaacttttgaagctcaacaaagttttgggtacggctgtgtggctagaaatagtgctggtaatctgattgaagctatttcgggatgcagaagaggctgtgttcttcctgagatcgctgaggtaataggcatcaaggaagcactgagttggataaagcgcaaagaatgggatagggtggttattgagtcggattctcttgttgctgttcaagcaataaagagttcaattcatatgccatcacaatttggtttgttggtgggggactgtcgttctatgttatcttctttagataatgttcaaatcacttttgttaatcgttctgctaacaaggctgcccataatgttgctagggggtcttgttcttcgtcagatcgaatttattttgagcattctgctccttcctctttacgagacattgtaattgcggaagcaagttgattatcaataagatttatcctttattcaaaaaaaaaa

SEQ ID NO: 98819 - DNA, 889 bp, Cannabis sativa
tgaaaaatgttccgccaatttcaatttcattttctccatttttacgtcatcgaaacaaaattctcagacaacaatgaaaatgagttttctttttatacctcaagttcagcttcaagctcctcacgctcgtgcccggtcgcaatcggcactacatcctcaaccttcttcttaacagcggtctccgctacaatacaacaaacagacatacaaacttcaatataaatatcgatatattcacataaatttcaacctcccgaaacgctgtacaacaaagttgactaaaaaaaactcgatcgaagcgtacctgaatctgaaaagttgcgggcgaagagagaagcggcggaggctgaaacaggcacccggtcaaccaatcgtgcgactccggcagcggatcgggagggagcagcagcggccgatgcggatgccgctagggttagggttttgaggtgggatgaagagagaagtctccgccacatgactaatgaaataggtcagagaagaatctctaatggtgttctggtctcaggtcacgcccctgcggtgttgagagttgagatctccggagagtgttggaagaaatgccggaaatgcaattgtttgagaagagaagagaagagaagccaacaaacaaagaagaaaaagtctaagaaagggacgatggtattggtgggctggaggtggccatgggattggggtcgggtcgaaagtttgaaggtgggactgggtactacgatgcgattcattcgcacgtgcaaactaacacgtgctaaattctttcattattgggctagggcaatatactcactcatggactctggcccaatgtcgtttcctttgaatgacccactaaactcgatgtcgttttattcttctctcttttttttttttt

SEQ ID NO: 98820 - DNA, 696 bp, Cannabis sativa
atatcagtgtggttacggtgttaccaacacgagtaccagggggtacgtcgtgcatatggtacaacacttagtgactcccgagagtacaataatggctctacatacacgagtacaaggttgctactttagtgcatttggtacagtggtcgtacttccctaaagaacgttcttaaccatttggggagctcggttgttgagctcagggcggcttaagcataaagccggtctagcattgcctatatatatgtattgcatgagtctgttgactcatcagtttgctaccttgtgtaggtaaaagaaaagctaagctggagaaatagtgagctggagctcggcagttattgtacatatctcggtagtgtaaacctggaggcattcggtctttcaatattttgagttgctttttgttattgcctgtcttttgtaaaaaagaaaaaggttaatggattttgtaatagtaaatgtaatttttaactatgttttataactcgagatcccgacctatatggttaattaattacagtataatataattagttttttttagtttagtaaattttcaaatgcgggcgtcacagtttgatatcagagccaccaggttgttcactgaagaccgatgcggtcttaagaatatttgaccactatcgaacctgcatgccttgtgggttcgcaggctaagttctaataatggacgcc

SEQ ID NO: 98821 - DNA, 677 bp, Cannabis sativa
acggcgaggtagtgagtccaacccaagaacatgtcggaaacaatggcggtaggcggcgaagggtgggttttgaaccagtgagtgagaggttctcgaagtcgagtgatggcgggaattacgaaacggaatgaggtggcgggtaagtccttgagattctcaactccatggggaatggaagggtgagatgggaaagggaggacgagggtttgaatggaaggatggagagagaggagtgggttgagaagagagaggttttttggggttacgagaatggtgatggtgatgagatctgggttttgggtaaggatctggtgtgtgaagtctaggattggtaacatgtggccttgtgctgggaatgggaagattaagatatgggtggttttgccttcttctccggcaccggtcattgaggccatttttctattctgtttttattttgtttgatataatataataatataatctaatatatatatatatacatatctgccagtgacgcactctcatacataataaaaaataatacttttcttttcacttttatatattctgacccattaatatcattaatatgggaaattgtacctcttaaggccatttccagtggagaaatttaaatttggtgttaaatcaacacccaaaaaactactatttcaacattattttttttttcaatt

SEQ ID NO: 98822 - DNA, 1783 bp, Cannabis sativa
aaaaaaaaatgagcataggcaagagcctcgcctcgcctggtctttcattgggttactctcttttttgtctatcaatccggtcgaatcatccaccatgttagcgaccttctcttccatcttcggcgttgcaactcctgctgctacctccttcttcccctttttgattatttcttattcctctttaattaatctcccttcactctaaatagctcctctcaaaatgttccaaatcttccttctgtaaatcaaccatattcaccatcaaactcaataacttcaattttctcatctagcacaatctacttctcaatgtggttgtttcccataacttagaaagctttcttgatggttttatacccagcaaaattttctcctacaaatccaaccatcatcgatttttaatatctcacttggaacaggtacaattgtttaataatgcctaggatttatgcttccttatcagtgttaggttagttttaggtgcattttataaagtgatttagatgcgtgtttcaattgattatattcattttgtgcaaaattatgcttgttttctacttgtttcaggtttaaatggtaaaattcataatataaattaaaaatgataagaaacatgttaaatgagatgaatatgatgaattattatcgtggaatttggagttctaagatataatggtgtgaaagattctaagttttggatgctcaacacgcttcgtttgtgatcgaaaatcaagtctgaagtttcaagccaatttttaggaaaaatatattgtgaataaaagctctagatctctctttcagctttccaaaatatcttgaatcgtcaaattctgagcaatatcgaaagtgttatggccaaaacattatcgatcatcgcaccaggaagcttgctatacccagaaagtgccaacccgcacaacatggtccagaccatattgcggcgcgctcccaaaaattctgtttttttgggatttcgtaaattggacacgagccacgacatgagttttattatgctgcagcccgcatgcttaaaagttgacccaattagggtttttaaaccctatttccaaaattcaaaggagcttttgattgggacttttgggaggacgaaaatagagagaggaagcgaccttggaggctatacaaccattgatcttcaaagagtttttttcttctatctttatttttatatttttaattagtcttaatcaattgtttagaatgataatgagtagctaaatttctaattaaagtgttaatggatattgtttgagatttctgtatggttttaatgcaattttagttcattctcaatttcttacatgcatctatttcatttatgtttaatgcttataattgcttgattgtgaattatttatttatgatttcagtgcaaaatttaaaaagtgagtgttaattatgctatagtgaaatagacattgatttcgatattggacaaaagtacttgtatggtctgtgtaacaattaggatttttatgcttaatgcaaattatatgtgtaatttaccacagaagtgttggacttttatatataatttagattatttggaggccaaaatagggcccaacatctaggttgacatggatgttgggccttacacccacgttgatatgcaacctggtttgcatgtttctactcctcaaattttgcttcaagaatttttcttattttggtcaaaaataggggaggagacctcgtttgcaatctcgagtgtcataaaagtatcaaaatgagccccgtgaaacaccccgaagagcaccca

SEQ ID NO: 98823 - DNA, 1287 bp, Cannabis sativa
ttagccacattccgccacctcagctcgtttttctcttcattaatgccagctggacgttctgccaaaatacacttactgggctgacaaattgctacgcgatgattatagcaatgctagtcagcaataagcatttttctgctccttttcttccttgtcccaaacatttccaaatacctattcttgtatttttttctgcttaatacattaaaaaaaaaaaaaaacaacaacaacaacaacataagtttatttaacacttactaacacacacagacttccatttattacaaagacacaacaaactaaacacaattacataatatagacattaattgctccacaattcaacttaaaactcaagcttaaagatataaaaataactctaaatcttagagttatcaataaccccacgttgaaaactcttattcagcttcgaattagatgggtgagctgcggtatgcccttcctatgtcgcggcccgtgtgtgaaatttctcacgtctccaggcttccatttgacacgtgccgcgacatgaggtttccatgcctaggtatgacccccattttgatacagttattttttatgtgatcttttttatcttttttttatcttattccttcgatattttctaatcttcttctgttttaaatttgtaaaaataaaagataaaaaatgtaaaattgctcaaaacaagagtaaaagtaaattaaaaacacattaaaattatcctaaaaatagtactaagaacatcctaacacgtgcttttcgagctagtctatttgtgcttacgtgtcgtgcctttcgtgcttcttgtgtcatgtcgtgcttaaaaatatatttttcgtgtcgtgtcgtgtcgtgtcgtgctaatttgtagcatcgtatcgtgttgtgtccaagcctatattttttcgtgcctagttgtgctcatgccttttggacttgtgccggtttcgtgtcatgtcaaaaagcatgacccgtatttacagcactagctggggttcaccttggaccctttgtaaatattataatacaagctaatacggattatttgttatgtattaaattatatgattcacattgtattaaaatttatggccgtaataattaatataatacaatattttattcaaatataatattacttattatttaatacaatacaattcttataccatctaccaaataaactctaataataatattataataattttaataataaatttcatctccatcttttcaatattattctccatctttttttaaactctctcttcattcatccta

SEQ ID NO: 98824 - DNA, 614 bp, Cannabis sativa
  modified_base (153)..(160): a, c, t, g, unknown or other
tattataatatatacgtataggacatacgtgtgagggaggtggatatttagactatgatctctgtcagccgacagcaagaatccttgataggaaaatgagatgcatggggtacgaccctccctaaccactgcacttctctctctctctctctnnnnnnnnctctctctctctctctctcgtatatatatatatatacaagtagcccactactttattataattgatggggttttgggtcttataagcagggtcggccgacccgaagaaggctggtacgccgtagggccccctcagctcagggctcctattttgaaaaagattaaaatataattaataataaaacaaaagaattatacttataatattaaatacatgttgtagttgagtggtaatttgattaaagtaatatccaagaggttcaatgttcaaatctcaccaatcggccctgcttataagcccaagattggggataaaatcccttttatttgtatttattatggcttgtaatttatagggtaaataacattttagatcctgtattttgtaaaaattactaattgaatcctctattttgttaaatgacaaaatgtactctgtattttctaaaatagta

SEQ ID NO: 98825 - DNA, 904 bp, Cannabis sativa
ttgctagaaggccatatgaataaacaaggtcattttgtgtcatctatatgcaaagcgagataccattatcccatgtcaatatcaaccgctttgaagataagattgataagtggttatgcgattttttagtattatctacacgtgtataaatgaaacgtgatcaaagcccacgtttcatgaaacggttatgtaattcaaatttaaatgtaaataaatgccaacctatattcctatagatagggcagattctacaaaaaaagggacggaaaatctttgagagaaaaagattactaattgtaatattgtattaaatatctaaaactatcttgaataagatagactcgtggagtatgcagagttaactacaaaaccatgttaattacttggtgtcattattattataatatatatctgtttttaatgtattacgaaaaaggctcattattcgttaacgaaaatatgcattaacagctaccaccgtcttccgcactatgattgagtacttgacttgctatgagtgggcatgacactctatcactatgggcggaataggtgaagaacaattaaggaggattcgaatcactatagaatgtgtctctcacctactagttgccagagaatcaaaactaggtttgatttggttgaagtcaatagttggatgagatgatagcatcatgttccttttataatgtttcaactagggcataggtttgacttatatggattaaaaaaataataaaatattgggcaaaaatcaccactaatggttggccatttaagggaccattctctagtcacaatgttgtcactttatttcaaccacttattcttctttcaataataccatattttcaatttcaatcctattaatgtcaaaaactatttatttaataattataagtaa

SEQ ID NO: 98826 - DNA, 1148 bp, Cannabis sativa
aaaatttgagaattagctcattaaatttatgtaatttatggattaatttgcccaaaaataaaaaattaaagttcaatttaccaaaatttatatcatttaagaacttgctatataaataagtcgtttaggctaaaagggtatttactttaacgggattgttattaggcaccagtggtacctagcaccttctcgacatatcgcgttacgattggctagcgatattctctaaaagctattatattaaattatatgggactcggtacttagttgcaccaatagcgatattgacacataggaaggtgctaggcaccactggtgccctttaacatttctcttactttaaatatttagtgtttattttggagaaaaagaaagtcaatacaataaatggagtattacaagtgtcacattctaatagattagacactaagttgggacacaaaataagacattagatttgaattcttaataaagtaaaattaattgagattccatgttaaattgtactagtaataaaattacaacttccaaacaccatacataccatttttaagctttttttcctaaagaaaagtaaaatagttatggcacatttttaaggaatacgtagctgagatgtaaacttgtatggtctttggaacttgaaaagaatacaaatcacaaggcagtataataataattcattatgactggacaaatgaatttgactttgtacgttttctcacttataaggaccactaattttaagactagaaaagaagggaagtaacaaagcaaaatatgcggttgtctttctctaattcaatttcaatcttttaaacaattctctttccgtaaacaaatttagagtgttttagttggcttttaaaatcaaatgtccctatgtcaaactcaacagcatagtcctaaattgatttttgctacaacggatagcacaaagttagtccacattgtaattttctacgtccatattattatattattcgtctataatatacatataatttataaaatatcatttttattttgattcgataacctaaatttttaaatgtttatatatactaattattttttttagaaaatgtatatatatacactttatgtgaagatggtgtgtgttaaaaaaatatatatttgcgtccaaa

SEQ ID NO: 98827 - DNA, 5837 bp, Cannabis sativa
  modified_base (40)..(64): a, c, t, g, unknown or other
  modified_base (4719)..(4723): a, c, t, g, unknown or other
  modified_base (4961)..(4963): a, c, t, g, unknown or other
ttacataaaaatattgcataaaatacaattcaatataatnnnnnnnnnnnnnnnnnnnnnnnnnacggcgttccaaacgaaccctaaaccttctattttgttgttcagaataaaataaggaaaccttcgatcagtatagtcaattatatacacatattagtgagaatatttctatttgctcctttattttgaaataattaaaatagctacacacatcattttactaagataactttttctaataaaaaagaaaaataaaaactaagagtatgtttgttgttttgtttttttaatattatattctaagaaatgtgaacacaatttattattttttttagggtaaatagcgtcataagtatacaaaattttaagtttgtaagtggcataaacccaatgtttatttttagcagcataagtactcaatgtttgtaaaactgtaattttcctccgtttaaatttattaaaggaatatttggaagtaattgatactgtatatttctatctagacccaatgatctaaaatttggaccttatatgtggcttatttaagaaaataacagagtttatactgatgaaattggagaaaaattacagttttataaacattggatacttatgccactaaaaataaacattgggattctatcacttacaaacttaaaacttttagaacttatgccactatttatcctcttttttaataattttcaaaaaacaaaaactgtttaattagtttttttaaaaacaatttttaaagaaaataaataatacggatttatttatattttagagtacaagtaaaaactcttcttattatagtaatattagtaattatgaagttctcttatttaacatcaatcgaatcaaaaaattaaatttctctagttcctaaatttatagctactatacagaaagtttttatttttttcggccgggcctgctgaccttttctagacataagtgtagcttgatcgagattgtattattgcaattcaattttgcgattatgtgacatgattttgaatattttaattttgtctctatgacatgattttgagtgctttaatcttgtctgtgtggcatgattttatttatttaatttgttttgtttgttggtgcttttttatttttcaatggcccgccattactgttagtggttgagaatatataacaagttctctacgactgaaggggtaattagtagtgtacgttttgcaactttttaaaagtaaataaataaataaatacaaacttccaaaatagctaataatcaacacccatcaatccaaatatcaaacactatagtctgcaacgaaattgatcgttagggctaaggagaaatcaactactctattttaattttttactaagaattcgatttgattaaattaatttgcttcaatagcataaactaaatcaagagtaatttacccaccaaaaaaaaaatcaagaaaaatttattctgaaaagtgaagaatattaaaataagttacgatctatagctatattaaaagtgatgtagaaaatatgctctatggtgccctctcaaagcgtttttcttattgtaggatacagtttatctttgcaaaattttgtgatgctatttacaaaattacatatcctaataagaatttgacttaaatcatgtagaagtcacccttcgttttattatataattgttgatccctcaaagtctataacactattattaagcgttaagcatgattcttgcatgttttggaatcaccaagatatcgtcaataaaaattaccacaaacttattcaagtaatgtctacaaattctattcataagatccataaacaacacaagtgcatttattattccaaacgggcatcaccaaaaatttcaagtctatagcgtgttcttaaagaagtcttagggatattatagcctaacctcaattagaaaataattttgaactgccaagctaataaaatgacaaaaaactctactataatacaaaaaaaaaaatcataaatcatcaacaacggatacttatttttaatagtcatcttatttaattttctataattgacacaaggtcgctaagatccactatatttcttgacaaataaaactgaaactgtccctatctttgtaggatcggtcaaactttctctataagacacgttcctaagcccccaattcataattttcaaataactttgtctctccaaaagttaatttatcctacacttttcaattaaaaatcattacaatgtactctttagaccgagtctaatgatatgtaacatgttaccatttaaagatggttaaagatctcacccttagttgtgcacaatgacaatttgcagttgctgatgacaatatttcgggaatggtgatggatcttgacatagcaatatcaaaacgacaatcttaacgagttgatcacgaatgtacaactcgttagccctaaaaagctaacgacaatcttgctagataatgcttctaaaaagacggagatacccataatctcactatagaaaaatggtgagtaaaccaaaatgacttagtggacgatgttcctctcgctacgcttattcaaatgatatcaaccattgtcaaatggtcgtagaatttggtcagaatgaaagttttgacgatgaaagttcatagcagtaattcgtacttgagcgtcttaactgtaattgccaccaaacatatagtgtgatgtccttgtcggttgatgattgtgtagctctgggtttccaaaatggtggtttgttggtggttagatttgagctatatacttataaatttttaatagtaattataaaaattgtgtgatattgaaaatgaaattataaaaataaagatagaggtctgacactcactagctaatcatagtcgttgaggggcatccctctactctgagaattgccccaataaaggagaacgacattgccctcatagagactatttttggtcatcaaccatacatgacaacttgtttgtaggattcacttcagggtgtgcggttcgtgaagcgacttacgttgattggccatcaacacccatcccctatctggagatgcgggagcatggccaagtcgtagaagagtacatggctagggttggtggagccgcatgatcaagatcttctcagtatccaacaattggacaacaaagtcagttataggattattagttatatatttatacattttaatttaattataattataattatattgacctactttaattttatgacaatttactttactcactattcaaatttactatttaatactataaatattataatttttgtattaattaaaatgttgctataattttatattttttattacgaatataatattaactattaataataaataaataaatagttgtcgttgaaaaagacacatattgcgcgtctcgtaaagtgattacatttcaaaattttaagccaaaagtagatgttctgccgccaaaaacttattgtagggttccagcgataacttttatcgttggaatttctattgacgacaatttatgttttgttgtcattttcatttttagaatttgtaacgatgagtgtatattttatcgttgttcaaaaccatctagtgatgatgtttaaggatgataaactcataacaacaaaaaattaaatatatttagaaatatataaatagatttgaaccacattagattttcattgtctattgtgagaagatagtaaagagatcaaccacttattttttacttgtccttacagctagaagtgcttggagatatcaaaatttggctaaactggaaggaaagtttgacaacattgttgaattctgcgttggatatccaaaaagaaatgataaaaggtaccagtgggtgccaagtaccttcctacatgtcaatatcgctattgatctaatttaatatcgggtgccatataatttaatataataacttttagggagtaccgctagccaatcgcaggcgacacgtcttaagggtgctaggtactactggtgcccaataacaatgctcatatccaaagctaaaaaattgagcaaaagccgaaaaggcatgatgttgtccatatatattagcagcaacggtttgtaacctttggcaggtaagggatagatgaggtgctatagaatcaaaattgtagcaagtgaagtacacagttcgaaaaattcaacatgattgtttaaataggctaatatgtgtattacatagtaacgatttccattggggataagaattagttttcgaaaatttgttcaaaaggatgtaattgatatagttgtacaggtttgttttcattgagttgttaattggtatttgtgaatgattgttgagcaatataatgaatcttatttattgaaaatatatatagagcaatttgtggtataaatacttaagtttaatttttagttgcaaataaatacttaaatttaatttttagcggtaatattacttaagttatatttctgaaactctgtaggtacctaaccgttaaatgttaagtcattatatccacgtattatttttttattggtatatttgaactaatatttttttaaaataataaaaattcaatgacttggaccaatcaggaattgtcacgtgacaatttatttaaccaggtacctacagaagtttcaaaattataacttagctattattaccgccaaaaattaaacttagcattttatgcaactgagagttaaacttaggtnnnnntgccgcaaattactcatatatatatatatagaggatgttctaatggttacatcaaatgtgtaaccatgatggttacatttatttttagccattagattactattattgaatgattgtgatatatttagaaatttaataaaaataaataataaataacttgtaacttaatagtaacttaatattttattttctaattaaactttaattaaaatcaactatattttaaaattaaattaannntaattattaattaattttttgtaatttgttactaagtaatgattatttaataattaattttttttgcacttaaattattaaaatatctatagcaaaatatcttataattttaaattataacacgtataacctcatcatttaaaattttattacacatataattataacacttatttatttattttatttaaaaattttaaaaataaaaattcttttgaaatcatgtgatgaaatgtgaaatggattgaatatattttccaaaaaataaaggaaaaatttcacgagacaacttcaatattaaatttttaggaatttactgttagctattttttttttttttgaagggaaaccgatacaggttaaaataacaaaggtaaccaaattacgcaactagaggagaattttcttccatcgataatagttcattgtctatcctaagggcatgcagagataccccaggagaactagacaataaaaccataatatcggaaaagaaaacctcaaaactgagagttgtcactatcgaaccactagtaaaacacctgcaaaataaagagaaaaaaattaatacataataaatatttaataaaaaatgaaatttcccttacaaataaaataaaataaagtatgaaattttatataaatagtcacatagaattctttgatgtagatacttatctattttcatcttcattgctgatggtgactacattacatttgatgtgttattattagaccaaactgatcttacaaaattaaaactagccctgtgacaactttacaaaattaaaaatagtcatgttagccttacaaaactaaaactagtcatactgaccttacaaaattaaaactagtcatactggccttacaaaac

SEQ ID NO: 98828 - DNA, 720 bp, Cannabis sativa
taaatgacatttttaaaattagatttaatctattgttatttttcagaaaatgaagcacttttgatattttgaaatcactataaagctgaaagaaagtggtcagaaatgacacgtttgaaacagactagtagtagcaagccatttactgtggcccaaattcaagagcatttcacctataggctccaaatttatgcctatgttgttcatttggatttttctaagtagaaattaggaaaaattataagagtttattattttatggtataaataaataatactataaggttataagtctttttattttatttttttatatttatatggattttttaattccatattttgtaaaaaagttagagattctatatttgtaaaacaataatcagtttcactcgaaaagtcattggcgctagaaaaattgccggtactagaaaagttaccgaaaaagttattgttgctgtaaaagtcatcatcattacattgtatacaagatcatctgtaattttctcaagaaagatagcctatgaaatgggctcctctttattagtctcaaatatattgaaaatgtcaagaataagtatgttttgggtttccaaaatcatttataatatttttatttttgtggtattattaataatgatataaaaatcatattaacatgaggaaattacacatattatgggattttaaaaaattttatgataaatatggcacatttaa

SEQ ID NO: 98829 - DNA, 956 bp, Cannabis sativa
agaagagctagctcttaacagttctcactagctagtttattggaaaaggaaaaaattttaggatcttcaaagatatatggcttaatcccagccaagcgacaacaaccattttatcaaagaatttgcctttagatgccaatgttagaatgttaaagaatgaggataatagtaggaatatatctcttatcctttataactttagtgttgaaaaagctagaagcatcctcgccattccttgttcgatatttcagctagaagacaaaagggtgtggtctcatgatcaaggagggaggtattcactaaagagtggctattgggcataaattagagcttattcaattggtgaagtgtctacgtcttaaggagattctgaatggtagaaagttttgtggaagcctaatattcctcgcgaggtaaaactcttcctttagcaagcttctctagatcggatcttgaccaaagtcaacctactaaaagtggaagggatctagatggtttatgtcatgtttgcggtgctcagtttgaatcaacggctcatgaattgatccaatgcaaaaagcttagaagtgtttggggttaatcttatttgcattaaccttacagcttccctcatggtattagcttttatgaaattattctcgagctcattagctctctttcttttaaggaagtggagctttttacgcactgtgatttgttggagagtttggcttaggagaaacaatttcatacataacatgagtgtacagttttacgaagggtgggacagttgaccttctctaaagttaagttcaaaagacttctcaagtgtcgaccacttagcccctcctaggcccaagtattgatatctctactttaactaactttaacggtattacagtgaaagtggatatgctgctataactactaatttgaaaattagagtgggggttgctatctttggtcttcatggttcg

SEQ ID NO: 98830 - DNA, 1189 bp, Cannabis sativa
tattgcggatgaaattcattaatctgtcttgattaaaatcaataatacagagggagtggtttatatatataaaccagctggaaaagaaggatacaactgttatcctacaattaaggaaaaggttataacaaatataaccgacattgacacataacaaacagctaaccaattgggaaggaaatctgaaacctattacccccccctcaagatggatggtagatatcatggacagacatcttggttaagtgtgtggtgagtgtagtagaagctaaaggtttagtaaagatgtcagcgagttgaagtgtgctgctaatagggataagccgaacagtgttgttgttgatcttctcacgaatgaaatgacagtcgatctcaatgtgttttgttcgttcgtgataggtgggattgttggcaatgtggattgcagaatggttgtcacagtagatgaaggcagggctggtttgttgaatgtgtagatcgtgtagaagatagcgaatccaagtgagttcactggtggtggcggctaaggcgcggtattctgcttcagcagagcttttagagatggtgggctgctttttagttctccatgagatgaggttgtctcccaaaaaaatgcagaagcccgtgacagaacgcctagtgattggacaagaggcccaatcggagtccgagaaacccctcaagtgtagagatgatgatgctgaataaagaattccttgtccaggtgagttcttaagatatcgaagcaagtgatgaagggcttggaggtgtgttgtacgcggttgagccatgaattggctgagattgttgacagcgaaagtaatatctggccgagagtgtgtgagatataggagtcgcccaataagttgcctgtaggaagatgggtgctgaagtatatctccttgatgatcatcaagcttggtgcggggatccattggtgttttagcaggcttactgccaatgaatccggtgtcttcaagaagctgcagcgtatatttccgttgagagaggaaaagactatctttggtgcgggcaaattcgaaacccaaaaaatatttgagtggaccaagtgctttgagtttgaacttttgatgtagcgtgtgttgtaattgatgaagagcagtgagattggggccagtaattacaatatcatcaacatagactaaaagagcgatgaaagagcttgctg

SEQ ID NO: 98831 - DNA, 590 bp, Cannabis sativa
tatatatatatatacattatataaattcatataaaaatgaagccacacatgaagttgacacgtggcaagcgatgggcatgcgcgtatatatgatctgattaattaagttattaataaatcggggagattttgtatatacatatatatagtcaaaggaggaaagttattagaaagttattattattatttgattaattaattcactgtcaagtaaggggaaccatatatattttggtgtgtcggattgtgcaaggtgcaatatatttttgttttgttagtacttatcattttatataattttataataataatagaccattttttagattttccacattagtggttataataattaagctgatttatgtgatggttataagtaatttgtcttcaagcctcaaattttcaaaccaaccattcatctcttgttgctagtagtttatatatattactcgtcacatcatcaatcatatcaatgctattattgctattatatatattaccattcaagtgttaataaattttaattcattaagtttttataatagtaattataattggatagggtttctgcactttaaatactaagt

SEQ ID NO: 98832 - DNA, 505 bp, Cannabis sativa
cggtatgtgttggggtccgggtcttgggtcgtggtttgtctcggtctggttcctagtctatttctcgggttcgagtctcaggtccctggtttggatcccgattcgggtccaggtcccagtcccggtccgggtttgggtcatagttccaatccggttcatgtcccggtctcggtctcgattcggtcttggtttgagtctagtttgtgtcaagagtcatgggtctcgagttcgagttctcggtcaaagatccgagttcaagtctaggttaaggtcctagtcccagtctcgatccagtttgggtttgtgtctcatttgggtcaagagtcacgagtctcgagttccgagttcttggtcaaaggtccgagttcaggtttgggtttaggtccgggtctgggttcagatcctgatcgggacccaaacccgtaccgagaccgggatcgagacctggacctcgactggaactgggaccgagacccaaacaaaaacttagatcgggacttgaact

SEQ ID NO: 98833 - DNA, 544 bp, Cannabis sativa
atatggatgaatatctagtcaccattgcctgtttaacaagttcatcaaaaacttaaagttcagttcttgatcatcatcatcaagtacttacatagatatacatatatactagaataaacaatcattattagtcaaatatattgtggaagttgatcttctaaaccaactcataatccaactcacttaaaccaactaacttaactaactttctgttatgttagttagttagttggtgctatttccttgtatgagttgtacctataaataagtctattcttttcacttcagtaggtagaataagagagaggattagagagagttgcttagggttctaagctgaaagttctgttcttgaagaaggtcaagaacaagggggtactcgggttatagagagaaaactgtgactgtttttctctggtgtgtctcgagagctacaaagttgagattgctcttaatcttgtaattgtattgatattctcttatttcacatattagtgaagaattggttatgtttttcagctggagtatggccagggatcatgtt

SEQ ID NO: 98834 - DNA, 1611 bp, Cannabis sativa
aaaatatttaaaattctatgaaactgtatttctttaattttttttgtgaaataattcctaaaaaaaaaatcatataaaattgtaagaaactacgaactataatttggactgaaataaatggaattgggcctgtgagacaggcccatgattttggttccttctgaactcagaaattagtttggaatatgaagttatgaacgtattggtttttgatttggtattagtattgattggagtgtaaaaattatgttaaatatttgttactgaactgtgttgaatatcactcatcatttttttagacaaaatatcactcatttatttgattctttatatattagcatggattcctttggttattaagggatagattattatttattttgttgatacttttcaaaaggttgaagtaattcttagtgtcggtttggttggtatttacagttaattatttttatctaaaattattttttttttcttaagaaccatgctaagtgtaattttttcttaagaatatattcataatacctaaaagatagcactataaatataaaaggatgttaaggagcctcaccccctttttcaaatttttttagtggtttggaacaaaaatacaaaagaaggtatctacctttattattattattattattattattagtttacactttgtgttttgcaaaaattaaggattagactccctattttgttaaatgacaaaataaatcctgtatttttctaaataataaaaatgaaactctaagcttaattttcgataactttttttaaacaaatataatcaacttgaagacaattcttaacacgaacatatatagaaaacataaatagttttgtataacacctttggatcagattattattaaattttattatgacaaaaaatatgatcaaagttctatttgtactattttaaaaaatgcatagttcatcttaacagagggtttaaatgataacttttgtaaaatacagggtctaaaatagtatttacctttattattattattattattaatagtagtagtagtattagcggtacttagcactttaaatatgtcgtcttgcgattcactagcaataaaaattattatattaaattatataatactaatgtttaattaaactaataacaatatttttttttaggatgaattaataacaatattaatacataaaaaaaattaattactatgagtatttttttaacatttcacatatattaaatataaaacttacactcaaaaacaaaaatatataaaatttcgtatactcaagtctcaagccaagtggagtttactgtatgcttagtgggtaggtgggtggggagagtcataaagttagcaatttgcattgactttttgtgttcctcaacttgaagatgggacacccaaaatataaatcaccaccactaatatattatatgttagagcattttttttttttttgaaaacgatatgttagtgcatatattcaagagtgctagatagtggtctattgttatgtttagcactttctataaaagacttttaatggtgtactctaaattgtaccaattttggcatatgttaaaaattgggcattgtccaaattttataa

SEQ ID NO: 98835 - DNA, 1342 bp, Cannabis sativa
cctaccacattcgataaggtagaaatagaatattatcaagatcaacaaaattatgttcactatgagaaaaataagagtagaagaccgaatattgaagcatttgcaagattgtgtatgaagtaaatgaaacctggcatgagctcgcttgttgggaacattttctgcaacatcgactctctttctataagaaaatcttcgggtgtaagagaatcgctaattcccgtctcttcaacaaagatcttagccgattcggttgatttctttcccatcattttggccttcaaagaccaatcaaaagtcttattaaatctagccagtataatttcttggacttcagtatagaacttctctgtgtctgcaacaccgttaaaaaaagccatcatactttactttttatcacccatcaaaattttcagcagagaaatattcaaattgaaatgagaaaacatttaacaaaagtcatttatctccaaaatattcttctctaaaaacaaacaaaaagcacattcattgtttagtaagaaaatggaatgtactttaatcaaaatgtctacttatcccccaaaaaccatcatattatatcaaaatgtagatcacattcttttctaacaccaagttcaattgtacattatcaatatgagtctgtttggtacaccgtattacatcacattatattgtatagacctattcatatttttatgtaatactatgcttgttgacttgtatgtgcataatattttgatataaatcaaaatttcacaatacaaaaatatgacatacaatccactttaatataatacacttaatacagcataccaaactaagaatatatgcttcaaactatatagcaaacatacacaactgacaagtaagctctcttctaattagaatcccatatcacattcatcttaatctgaagagccccatttatcaagatcacattttgaaaagaactaaaaaaacagaaaaggtgttcgatgaaattaccgagtaaaagaccatccatatcaaagattacatgagtgatgagtcctctagcagaaacgggtccagctgaattcgccattttgaaatgaatcttagttcttggagtttctagggttttcggtagagagaaacagaatgattttaaatgattggaaatcggtgatgccaaagctacgggttgccagaagaacctctgaatcagaaaattcaagccttgaaaaataaaaaaaattaaaaactgataagcaaattgttaaaataaattatgggttatctttatgtggtctgaaagaatcaaattacatatttaaaacaataaaaatggtatctttgtaatctgttgactgacagatct

SEQ ID NO: 98836 - DNA, 582 bp, Cannabis sativa
agtctcttttagagctggttttccatagcaatcaactgaaccatcttttgtgatatttttattattcttattatctctaataccttcttcttcctccattttttaatttctttgatatcaatatataaaattattattaaaataataaaattaatattaaatgcaaaaaattaccctacatgatttttgatcaaactaaaaagtaaaatatttggagattattatcaattaattattggatttttttaattgtgtataatttatccataattttttaaacactatctcaatttgttgtgggataagttgatgaatacatctctttgtatctattaatcaaaaacactttcaaattatatctattctatataaaatgtggctatataacaaaattcttggtttatgagaaattattgggtgactttttttaaaataaaaaaaataacaaattattagatattgacacgtaaagggtcagcctccatgtagttagttaaacctaaatgtaattaatccacttaaagtgttgcaattaataataaatttgttcatattgttgatttttttattaaaaattatttt

SEQ ID NO: 98837 - DNA, 800 bp, Cannabis sativa
actatttactagatctttaattagctcctaatttatttttattgaacaattaactttagctccttattccatcacagcaattaactttctaaacttgatagtccgacaaaaaaggttcaagatgaattttagtttcattttatgggacaaaattctacaaaataattcaggataaaagaaattatttactcaattatcttttcaaaatatattgacaagtgaattttttctctttggaaaatcacttcttcaataacaatttctttattaaaaaaatcaaggctataacttttaatatttggctaaaaacgataggtctaatatagggcctgatagatctgatgtcaacaagataatattggatctatcgggccctatgtcgggtccatcgtgtcataataaaactaaattatgagaaccatcaggcccactatcgtaccctatatcgaacctatcgagctatcttcttcaacctttaatcccttcaacattaaactaccattggattctatatcgggcctacatcgaacatgtattgggccaggcaaaaattgcagattcctcctaaactgcagatccgaacctaaaaatctcaaaaatcacatattctccactaaaaacacagacctaaccctaagtttaattgtttaaccctaaatcatgaaaaaaaaatgattacagttaaaaactcatgaaaaaaattaggaattacctttgacgaagacattgtcggtgttgggtggtggttgcagtggtccgatcgcggtggtatgtgggtcgtgtgggtgatgtggtcgcga

SEQ ID NO: 98838 - DNA, 2408 bp, Cannabis sativa
  modified_base (2371)..(2380): a, c, t, g, unknown or other
tttattttgtaaaatatggccacgtaggataattttttagtgacctgtcattgccacgtggacaaaattaggacttaacgaggttggacagataacatcttaaaaatgtaaacgaaacagtactttggaggattttcccaccaaaatatgatgttggatggttttttgtaagtaaattgatagttaagggggttttgccgcaaattactcttctaaatatatttttgaaattaaattgctagaaacagtccaaaatgcaaatttctcgaaaatttagttagtgatgtcaccaaaaaaaaaaaaagttccaagtgttttttttttttcttcttttgctgaaaaaaagaaatttaagttagagacagaaaataatatcttctcatcttaaatttacaatgggctttgatttttgtttagtagagacatcagtgcccagcccaaaaaaataggttactattcaaaggcccaataaaatacttttctcttttgttttatagtgattatatatgaaacctaatggaacaacatttttatatattggaagtttttcatttttttaaaaaaaaaaaatgatactgaagctacattaggctggtcctgaattttagtggactatgagaaaattaaaataagttaggctttttttaaaaagaaatatgatattttcaaatttagtaaaaaatatagagaaatttcttttctgagcttttggttaggtggatctaggcataggcttagtttgtctatactaagtttactaacagttgagcctccatatgtttttatatatgtgtatatatataattaaaaatttaatgtgggatgcatataaaaaagtaaataattttagaatacacttattactaataaaaattgatactgtaaatataatatataggtacaattgccctgaccaagttggtctatgcatgattaatagagggggtttatacattagaattttttattcttcttgtctcttaataaaatataggtaatatttatttatctaaatttttaaaaaataaattatttaataataaaactaaagaaaatacgatttaaaaaaattaaagaggaaaagagcactcagaatttttacgtagttgatgcgttaataagttttagtccacgagtcagtataggctaaaaaagtttgtgagttaagaatttctaaccctttgcatgaaggattcaatgtgtatttataaagtaatagatgtcatacttagttactatttccagttaatggatctttaccaataatacagtactttgggcttaccgagtgaagcccagtccatcaagcaatgactgtatgctgacttggcattttgatcacggtcgcaactgttattactgtgtccattgattgtaattaattaactgtgcattaattatgtaaagaccgcctaagattaatgttttgggttattaaataattagagtttatttacgggatttaagtattatttataaaattcatgttgtggaagtatatttaagttcatatatgtttattgtgctattttatgtaaattactcaatttctgtgattgtgttcggaagttgtggaaagcgacgttgggtctttagaaagttgcgtttatatgtttagaatattattttcggggtgtcattgttgggtattggaggtgttggaattttcgggatttgaaaaaatgactagtttacccttgggagttagtaactattttaatttaattaaagggcaaataggtattttccttggttaattatttggtctctagtggactttggaggggctggttatatcttttattaagatatatatgatttaatttaaattaggaaataagagaaaagttaaagtggaagggaaaaacctagaaatttccaagtctttttcctcctctttcgaacaccaagggcaccagctgagaacttggatttttcaacttaatttagtgtgattctagttgagttatgagcttcaacccaaggtatattgtcctagacttatcttcctttgatttctttgagtttttattagcctatgatgcaagatttgggttatatggtactttggtggtaaagtttgtttaattatgaattctaaagttagtctaggtttttaaatgttgttctaagctgtaatggtgggtattgatgtggtttgtgcaagttagaggttagagtgttcatctttagtctctaatggtgttttcaaatttggagttgtttatgatgttctattgcttgatttgagtttattaaggtataagcaggtattctggaagttttggaaagatttgggattgatttgagttagggggatcggttttagggtttcctgctcagaatcggtcgaccggttctgggaagcctnnnnnnnnnngtcgaccggttggtacccaagaactggg

SEQ ID NO: 98839 - DNA, 520 bp, Cannabis sativa
taactcttttgctcttattgggacatcttcagcgtaacgagccaagtacagaaaacaaggcttcaagtgacgtggtaactcgctgtaactcaaacccaacacccccgaacactacggtattttgagtcatcataatgttgttgaccaccttgacctatccagcgaattacatttgctttcagttgctcccaatcatataaggtgtgtttcttagatagaagaccagcgagcacaatgatggctaatggcagaccagagcactttctaagcatctctaccgcaagttctttcttcctttcttcatcataatttgagtctgaatttatatatccaatgaaatacacaaaaagaattatgatttaactaatgtattcctatcaatcgatgttagtttattgacaagtacatgcatataaagattaaaaaaaagggaatattatgatgattgagttaaaaaaagagtgaaatatattacttgatggatctgctccaactgagaagtactttttatgaaacagct

SEQ ID NO: 98840 - DNA, 692 bp, Cannabis sativa
atatatcccatttataaagcaatagactaaacaagagaaaaagaaaagtgaggaagaagtttcttttcgttttttttttttgtattggtaaaaaccactagtatattacaaattaccaaaatgattcactaccaaagcaagtgatttgtatactttgcctttctaccatttacaaagagcttgctattaaccaatacaaattaacttaatgttttataaatatataatttaacaattttttattgtcattaattattaatataacataagttaaatttaatattaaattgaatacattataaaagcactatgacattttataagggtgtcagttactatattgatgcgttttaatatttctgatcatttgcaaataatatattcgcagtaatttgtatatatataatatatagaacatttttatttaagaatatagttgagattaagtaaaatatatatatatatatattaattggaagagtataaccaaataagtagaaagaaaaaaaataacttcaaaataaaaaaaaaaatcaaatgtaataataataatattttaaaataatattatataataacgaaattacttcttagtaaatataatatttataattctacatatatatttaatgtaaacctaataatatatatatggagtatggacttcaaaaaatatgtaataagaaaagtgt

SEQ ID NO: 98841 - DNA, 541 bp, Cannabis sativa
atataatttaaactttgatgacatatttaacaaaggaacatatttttcggaagtggggagaggaaattaaaaaaagagtaaagcaattaattaccaagtacttgatcttgatctatcctaaaagtgatgaatattgcaacttatatatatatatataaatgtatgtattgaatacatatatgatatatatatatatatacatataatcaatatatattgttatatcatatataaattaattttgtgtatacatacttaagtttaactattggttgtaaatatctaaattacttgactatttaattttaagtaaattattacgtggtaatttttaattagtttaaatttttaaatttttattttttttaaaaataatttaaatatactaataagaaaataacacgtagataatgatttaaaatttaacaattatatctatcaaattttaaaattataatataagtattattaccgttaaaaattaaatttaaatatttatactgaatggccatctctactctagttatattaggcgcgtaca

SEQ ID NO: 98842 - DNA, 503 bp, Cannabis sativa
tatatatatatatatttcctctcttacttataatatttaagtaatcttggcttgcaagctcaatatattgaagttatataagagagagagataagagggcctacaattgactttaattacaacgtgactttgtttctttaaacaaatggaatatattaacatgatatatatatatatatactagtttgaagttacgtgcaatacacgtgtatttaattatatattagttagatgtttttgtttaatgttagagaaggaagcaaagacgacaattttttcaatatgcagtaattttgtaaaaaaaattaacaaaaacaaagaaaaaaaaattattatcaaaattcaaataatggacaattcaatagaatttaaaataaaaattagtgaaactaactattgttcaagatagtctcataaaatgaggtgaattacatgaatttttaaaataaaattattaagataaatgataaagtggtttgggaatattcattctttaattcatt

SEQ ID NO: 98843 - DNA, 1066 bp, Cannabis sativa
tatcttatatatgtattatattacatattaacaatttaagagtactctctaacaaatatagactttcacattcttagacaaagaaagaataattttctttattattttgaaaagtgaaaagtgtaataaaaagttacagctcatagtcccattataaatggaaaaagacaagaaagtataaataaatggggaacagcccttacaccaacaaaggataaagtatcattattaccaaacatagaaaagggaagtataaaaatacttggagagtaatttcttaattgagaagagaagagaggcttggttaacaagttagtaagattatggttggtcattgatgtggagaagcttaagctgtcctgttttaatgagttcacgaactatatgacaatcattgtcaatgtgttttgtttgttcatgaaagaccaagtttttggagatgtggatagccaatttgttgtcacaatacatgagagcttaagcggtatatggttgatgcctaagtctttgaaaagagctaagagtcatactagctcacaaggggtattggccatggaccggtactctgaaactgttgaagaacgataaatagcctttttttattttcgtgatatatgattgtcctaaaaatatgcaatactcagtaataaaccgtagggtgtcgagacaagtatcccagtcagcatttgagaaaactttgagttgaatattgttggtagcaaggtcagtctcggtataagccttgagttgaggtgaggagctactatggaagaaaaggcattgacccagtgtgcttttcaggtcttgaaagatgggttgggtagcatgaagatgaggttggcaagaagcgaaaggaattagcttaacctattaacaacataagaaatattaggcattcctatggtgaggtaaatgagcataccaattaaagtacttctatatggaatggggtcagaaaggaggtatgatgtttctttttcgagttggacattaggttccattggagtagaagccactgatgaacctagataacctatctttgttaggagttgtaatgtgaaaggtt

SEQ ID NO: 98844 - DNA, 791 bp, Cannabis sativa
gagagagagagagagaatttttagtcagtggtggtgggttcttcatgtttaaggcaccactagtgctagggtcggtggtggctcaactaagagacacacaaaaagcgagggagaggaaaagaagcaaaaaatatacctttcatggcagtcgacgtggtgggttgtgagccaaacaaagagagaaagagaaagtgagagacaaggtttttttttttttattttaaggattttttattttgtggctgagggggctagatttttgttagggtttcataagggttcattaggattttcttatgggctaaagaccatttagaagttcgcaaccctttagaagcgattatttggaaatgattgcatctgaagaggtttcaagatattttttccttttagctatgtcaatactttttttagtgattaaaaaaattacttttgaaagtactttttgtagtagtgatttgtctacaacgagctaggtatttacccttggtagaggggtggtttcttgggggtctagaaaacacacttgtatttctcattccacgacaaaagttgagttcataactctagctgccaagaggtggaatggttaagagctcttttggttgagattctaataatcaaagaggatgcatctacaatatcaatacataatgatagccaagcaaatttggctagaaagtatggagtgtacaatgggaagtctagacacattagcttaagaaatagatatgcaagcgattttattcaaagaggagtcatctcagtatcctatgtgagatcaagtgaaa

SEQ ID NO: 98845 - DNA, 1764 bp, Cannabis sativa
aaaaaaaaaaaaaaaattacatcacttgtcattttagtatgtaaatacacggtagtcaaccactatatatactttggcatttttcattaatagatttaggaaattttggtagaagatctttaaagggtggttatggtaatttttttttttttttttttatctcttttaacattaggagaactttttaatttaattttttttccataatcgcatacgttgtaattatttaagattacttataaatttttaaaaaattctaaaaataagatttaaacagttacttactacacgcataagaaaaacaatcgtgcatataataaaaatatataaatcttatttttaatattataaattactcaaaattttctaaaaatttaccgtcggtgcaaaataactaaaacgtacacgtaagagtgtaaatagatcgggtcacatttgattcagctatgatccgacctgatttagatcatgtaaggatccactccgccccgccccatcccgctaaattagatactcgaattggatcagatccgactcgaatttttcttaagaattttaattttatatcttatataattttacatccattttaattttgtattagtattatttaataaataatatatttgtattaatagattgtgtaaagttgtgatatattttaaataaactcgaccctaacaccaactacaggtcaggtctggatccaggtccgagtctaagtctcatgtctaggtccgggtttgggtttgggctcgagtctgtagtccgagtattgggcctgggtttgggtctcaggtctcgggtttgagtctaaacctaggtcctaggtcctgggtctgggtctaggtctcgggtccaggtacgggtccaggtctaggtccttgttctcgagtccgagactgggttcaggtcccgagttcgggtccgggtcttgggttcaggttcaggttcgagtccagatccaagttcgtgtctgagtttgggtccaagtctaggtctcggttttgggtctgggtctgggtctgggttcagatctgagtctcgggtcccgagtcccgagttcaggtttgggtccttagtctgagtctgtgtctcaggcccgggtttgggtctcaagtctcgagtctgggtctgggtccaagtccgatccaagtccaagtttgggtctcgagtctcgggtcctggtcctcgactcgagtttgggtccgtgtcccactcccgtgttcgagtccgcgtcccggtcccgtgttcgggtttgggtttcaagtttaggtctgggttcgcgtctaggtcatagatcccgattcgagtcccaatcttagtccgggtttggatctaggttcaggtctcggtcttgggtccgggtcaagtttgggtgcgaatctaggtcaaggttcgaatcccgggtctaggtttggatctcaggcgggtttggttctagtccgggtttggggtttgagtcttgaatcaagttttttaatatattgaaaccagaacgaatcagattcgatttagaaaaaaattaggcgaggtggatctgatctgatctaagatccaataagtatctgtatgttttggatcaaaattgatctgtcggatcggagctgtgacccgcttcatttaaatggatctttttaacatgtctacgtatacaatcattaaaaatagactaaaaatctttcttgtatgtcaaaatagactaaaaatctttcttgtatgtcaaaataaataaaagtgtaacgtccccgcttcaagcctcca

SEQ ID NO: 98846 - DNA, 506 bp, Cannabis sativa
gaatacattacttgaattttgcattaatatgttatgtatatatatgttatacaactatcaatcaactattgagaaaatattgaagattcaactgttttgttaatttaataagaaagcttttagaaatttacattaatgtatcaaatataatattactaatgctttacatttctgttaatatttatgatatgatatacaactctaaatcaactattatacgactatttaaaaatcaataatatagacaatgtataaatgaaaacatttccgccaatgtgaactctgaaaaaagtttaaaaaaaatcaaataaattttcttttattatctaattgcctggatgtagaaaaataggcttggatcgtcttttatcctcaatggctggtaaccttctttcacttggtattttaattgcagttagtgttttctttattgcattccagtacttgtttcaactttcatatttgcaaacccttgagatgaattcaccactagtttaataatttac

SEQ ID NO: 98847 - DNA, 661 bp, Cannabis sativa
ggcatgattatatttttcaatgttctatttgttttttttcttttttattttcaatacatgaatgtctaggtgataaaaaatcaaaatctttttatttatgtatttattttatttctttgcaggtttagtagcttcaagagattaattaatagagaatagagaagtgatcattagtttgaaagtccctaaaaagattcccttgtggtggttagaaaccattgattttgatgacttgtgccaagttcaaacagagccgttggtcttctttattaggaacacaggtgcaagtgtgtgatctctagtttaaaactcatatcttttttctctatttaaatagatcccttgaaaatgttcatacagttcactgtgtatgagtaagtttcatataagataagaccattcaatagtaaaaatcttattaagtgcttgactttttttgatatgccatgattaacccattttgaagataagtcagcgtcaatctgaaaatgggaaaaatatctaaacctttcgttaatgaagtggaccacatacccacatcaaattctttttcattgcataaaataaattgaaaaaaaaaaagtcaaaaagagaaacatattaaagtaaatgaaggaagaagattacgaacgtgtacttaattttctttttgttccaacaa

SEQ ID NO: 98848 - DNA, 1175 bp, Cannabis sativa
aaatgttagcaaaccctagtgtacaaatcaaactattaacacacaatggcggattctctctatttcagcaatgctttggcttaagaactgaaaagagggatccttttacaatggggtgatgccctatagcaagaaacactaaacaacaattcacaacaaccccgtatcagaaaacagagcagagaaaaaataacttcattagctaaatctctttcagtactaaaacaatgttaaattcctagttggtacttgtccagctccttaaaaagtttcaataaacttctcacattcttcacattaatttacaaatatgttctaaatgttgcagaaagtgtttttcctttagatggtactccctgaaaatgaaatggcatatttaacaaacttgtcaaaagacggtctttagaaaaaaaaagggccagggttccttaatcagcaacaaaatcatattgccacttacttttgtacatgattaaaatcaaagcaacatgtttactcatagactctagaattaaggataaaaaaactactgaaagattaggttttacattttatttacatatcttatgtaggccatgattaagctagcacattataatttaatttattaattgaatattggaaccaaccaaactgaatcgcaactaagcttaaaccaaaatccacacatcacaaggccaatagtgttgccaaccaaaaagatcacccttgctcaagataaaattcaatatacaaaatacgagagtcgagacccaaaaaaaactaaagaagaccaaaaatcttaagcataccacacgttgaaagaagcaaaaaaatgtaattgcagaaaagggattgaaaaaaaaaaaaaaaaagatgatgatgatgatgatgattacagaaaaggagtgaagcagacaaaaaaaaagtaattttacatgtcatccattgaaaaaataagaagcaaaccttgaatatgccggagctagaagaaaggcatcagcagtcggtgacggagaagagtggtgcgatggatggtgagagtaagtagtcgatcgtcagagctgagagatgattttgcgattgagaaagaaacctaggtcaaatgataattttcttatttaaatgagggcaatttggtccaacaaaaaattcattaaaccaaccgcatttatgaaaaaagccccactcatgag

SEQ ID NO: 98849 - DNA, 1012 bp, Cannabis sativa
tttcctatttgtatttagtaatttcccatttagtctcctagctttgtatatgaatatatactattctacggaataatacatacaactctattcaccattctctacaaaaaggttgaacaactgttagagggccatcagttcgtggttgatctttatgttctgcttatatggggattggatgttgtgttgggatgcaatggctgcaaacactagggtcgtgtgttcatgaccataaggctctcacaatcgaatttaattggcaagggcaagctgtcaaagtagcagggttattaggggtttaaggcacaacaactctctgttactcaatttcattagttgcttcatgaggaagaggttcatgacttgtgtcagttgagttctgtgatcgttggtagtaatagagagagcattgaaatctccaactgagaagatttgatgccaagggaagggaatggaattatcacagagtttaaggtggtttttgcaaaaccaacacagcttcctcctcagtgtagtgtggatcatagaatttttctatagccagtcaactccaatcaacgtgcggccgtatcgatatccttacttccaattatcgaaaagttggttcgagaaatgaattcttttggcttttgtcatccaagcaaaattctttattctttaccggttttgcttgtcaaaaagaaggatggcacatggaatttttgcgtggattgctgggcattgaatggaattatgatcaaggatcgctttcctatttccactatagacgagttgttagatgaattagggggtggtactgttttctctaagctaaatttacgggcagggtgtcatcgaattcacatagatcctagggacattcacaagacggcttttcgcactcacgaggaacactatgagttcctagtgatgtcgtttggccttacaaataccccatcaacctatcaggcagcgatgaatcggcttttccagccatatctatgttgatttgtgatcgtcttctttgacaata

SEQ ID NO: 98850 - DNA, 660 bp, Cannabis sativa
actagccaatagccataagtggttctgtgtctgtgaggggatgaggtcaaatctctattatatcaattaacttcatcaacataggcagaaggaaaacctataaatggattgctaaaagtaatttcattgcccgaacatgaaaacacaatctgcaaccgaaaaaaaatatatactccttattaagtttaatctactaatcaagttacaaaaagtagtaaatttcaaagtcagaattttttcttcgatataaagataagacttaaggttcaaatcttcttaatagtactgtacattgcatgtgatagaaaaaaaaaaaaaaaaatccattgtacctgttaattgctgaaagttcgagacttgaaaactgatgcagcataatcgaaatagtactcccacattttctctaataaatcaaaaaagagatttaggtaatgaatagtgcttaagggcactctcatgagatgcatcaaatctccattttctttaaaattcataagaaaagtaaaagtcggcaagatctaatctaatttaattgaatcgaattgatccaatctaatctaattataaaaagttagattttcaattacaattggtttatattgaatgttaaaagttggatgtaaattggattaaatagattattagatgtcatcaatttca

SEQ ID NO: 98851 - DNA, 825 bp, Cannabis sativa
  modified_base (592)..(597): a, c, t, g, unknown or other
aaagtaaaaaataccgcctggcagtatttttgtaaaaaaataacaaaagttaacatactatgtaaatttccctatatttatttattaaaactaattaattttactttttacttaaaaaactctctagatttgtagagcttaaaatatattttttacaaactaaataaaatctattaaagtgaacaaaaatagaaaaaaaaaaataagccttttattttttaaaattatttagaagggatctattccctttgatatgtttagaaaagtaagtctaaataaatatattaaagtcaataaaaagagggaacaatataggaatgagcagcttctttctttctttctttctttttttttttcttttttgttttttttttaaaggaaaaacgtttataaataaattctcttataaatacttaagtttaactcctaattacaaataaatatctaagtttaattttggcggtattaattatacgtaagttataattttggaacttttctaagtatctgactgttaattgttaagtaaattgctacgtggcaattcttaattggtccaagtcattaaatttttattatttttttaaaaaannnnnntaaatataccaataagaaaataaatagttaacggtcaggtacctacagagttccaaaaatataacttttattaccgccaaaaattaaatttaagtatttatatcgcaaattactttaatatttaattagttatatacatatttcatcaatatttatttaaaataaaaaataaataaataaaaagttggcacaatcccatttaagagattgggttgatctgattatgct

SEQ ID NO: 98852 - DNA, 546 bp, Cannabis sativa
ttggtaataatgactcagggagagagtgatttgtagctaggtatgcttttggtttatggatgccacacttagaccttgttttcatagggtgacgatttgtgggtggtggctgggataaagagggtcctggtgggtgggggaattggttggatattgttgagggcttgaaatattggcagggattactgtctgagatggatttgtggtttctgaagtgagtgtggtgggtaaaggcatgttggtgactagttctgtggtagggaaaccagatggggaatcagatggtgcagcagatggtaaatctgacatttgctgagatgttgctacagtaatgtgttcctcagtagcaaatggataagatgcattagtggtctgaggaattggtgatgtaaagaagctcaatgaagaattagtgttgtgagtaggggttgttacctgagttggtgactggacagcaagagcaggaaactcctcttcattgaattggacatttctagtgacataaattctgcctgttgagctttcgcacaagtaacctttgtgttg

SEQ ID NO: 98853 - DNA, 574 bp, Cannabis sativa
tgtgaatagatctaagatcctggtaaaataatttccaacacaagcatggatagaccactacatagatgtagaaactgtctttttaacggaaggctaattttatcattgtcctgcggttttgtcagtctatcctcacctgaatattggaaaaaaacctttcagatttttcagattttggcagcaatcaaaaggctttgtggagctaatttctaaggcttggaaagaaagagtacaaggcacacccatgttttagctaattgctaagcttaaaattttaaagaaagcgattagagtctttaattggtcggaggttggggacattgcagccaaagacatcaaagcccaaagtcttttaaaaacatgtcaagaaagcttgcaaagggatcctcttaacagtaaactcattcatgatgagagaatggctaatgagcaatataaagaaactcatagtaaatatctttcctttcttgctcaaaaagctaaggcacattggctagaagatggtgacgctaatacttcaatcttccatgccagcatcagagcaagaagtcaagagaatagaattctcttcatt

SEQ ID NO: 98854 - DNA, 630 bp, Cannabis sativa
gtctcttcgtaaaagaggagtgtcactgcaattgtgctgaccgcattaatgattcttcttttaaaagttgttttgtttttttttaaattcaaacgattcctcattcattcctacgccttcctttcgtaacaaggcaaataaagaatattttcaattggttatttaggattttttttggtgaagtatgagcaatgtattatttacagtataatttttttaaaaaaaataatctctaaattatttagagtcttgtaaattggtcattctgtcaaatctatctatctatccagacggtaacgtgacggtctaaaatctctccaaagctaattttcctttttttctttttaattctctccattttttaatatcttattaaaacataaatttacaaattaatattttactattattttaacaaattttctataaaaatatctatgttaaattaattattttttaacaaacacataataaatataaattaaattaaataattattcaattatttatatctattctctataacagaattcttggtttatgagaaactagtaaacattccgcgcttcgcagcgtatatataaaatattttaaattatatataaaaaaataaattgtatattttaatta

SEQ ID NO: 98855 - DNA, 742 bp, Cannabis sativa
tcagttctccattgttttaatattgtaaacactagtctaacttgtcattgttaggatgatttaactagattttatattcacaaatacttatctatcaagatttaatactattctttagggggacgtcaagcgtaacgaggtcccattaaaaataatcaactaagttagatcaacagagttcgaaattgatactatataatgaataacaaaaaacaatgcaagttcaattcatacacaatttttgaaaatttgtaaatattagcaagtaatgaagatatgaaaaaatacaaaacaaacatatctcaaatattttctgaaattttcaactagctgatatacagtgtcttatttaggcaagagtcaaagacatcatcagttgaatatagtagtcagctcatctaaaatgaacactattttagcaactttttattcgatcaaatatatgaatttgatgttgttccgtttagacgagtgtcaaggtcattcttattttatgagtttctaccattattttatactcataaaccaagtttaaagtagtcatcttccaagatgaatctactagaaattgaatccatgaatatactaatctttcgagatcttacagtgttatgtctaacgggtgacatttctttagggggatgtcacgcgccacgagatccctttaaaaataataatcatgtaagaccaacaataaagaccaaataacttgaaattgaaactcattatttttgaagaaatt

SEQ ID NO: 98856 - DNA, 1660 bp, Cannabis sativa
taattataaaaacaatgtcaaaaagaaaaaaaaaactcaattattggtgttatagctctaaataaattctcctccggcccacttcattctaattgggcccccattcaaagcctaacggcgttggttcctccgtcagcttgatgattgggtgggggcccagtgtggtccccacatcaaaattgtacagtttacgtattgattcttctaactcttctctcccacacaaacattatacgcctgcgttttgtcgtttttgtattttattattattaatttttttttctcttaaaaatgaatcacacgtgtcatcattctattgtaaaacgtcctgagatctaacggtctagaatggttgatgttgttaaacaaagtcaaaagcattgaacgactaccagagatttatgacacgtcactttaccgggagggacctgctgtatgtttcagaggtaataattagatagataatagtcacttcacctttaatattatttaatgaattgtttctttaggcaatattatttaatgatttacttttgattaagattttttttttaattttagtacaaaaatttaatatagacaaaaatttaagaggcacaatttaatacatatcaaagttcgagagcataatttggtagatattaaagtttgaggaccatagttttagtacataaataatcactgaaataataaaattgaatgaaattagacaaatgttcttaaatctaacattattcaggaggcatttttaacgaccttaaaagttcaaaagacatgatttgatacatgtcaaagttcaagagtaaaaatcttaatttgtctttatagttttgtaaaatttagtgatgacactctattttattagataaatttaattttatattttttaaaataatataaaataagttatttttttattaaaataaaatttaataataatcaaatctaaaagtattagactaaggttcatatgtctaaaattggtatcattttgaaaaataaagtctaatttatcatttaattagaaatgtttattaaaccgctcacactacacaaaatgcatgtatcgcacatcattgtataaaaaatacaatttgaaatcttgtgtggcatgattactgtttatatttttgccaaaccgcgcgatacagtgtggtttgcggctttaaatttaataattacggttcaaaccgtaccatattatatatattacaaaattactaatttttacaatatgattattaattcctttttcatataaaaacaaatatatatatataatacatgtgtatattactttattttttctaagacaattcaatgtactaaatgattattacatgttaaattttaataaaaatttttgttttgtattgctaaagctttattagtttaatttttagattttcattataatgtttgataatgatgatagtgtaaaatagttcaaaccgcaatgtaccatatcgcattttcgcagtatagcttttgcagttttaaaatctcacggtgcggttgcattacaaaaaccacatataatgttttatttgaaaaaaaaacctacaacctataccacctacccacactgcgaacacccttatatttaataaaaggctaattagtaaatttttccccagaattttgacatgtactaaatcgt

SEQ ID NO: 98857 - DNA, 582 bp, Cannabis sativa
aaaaaatgcacatgggtggtgttgctctgtctgtctggtgaaccgctgatgtgtggtggtggctgctaagattagagaaggtcggtgggtggggggcttcaggaagggaattgggggagaatgggaaggggaaatgagattaagatttctatttttgaaggtgggtgtgtgtggcacgtgtgtatggtgtgagtgtgtatgaccaggtacagtgaccaggtacagggtgggtccatgttatattattagattatattgtttataatcaacatacatgttactaaattaagatcctgctcaaataagttcaaacagttcttcctcaagatatccttgaacatcttgttcaccagacgttgatatgttgctctgacattcttgagcccaaaggacatgacaacatagcagtacacccttttgtttgtgtagaaacttgtatgttcttggtcggctacttgcatttttgatctgattgtagctggagtacatgtccataaagcttagaagttcataccttgacgtggcatccactatttgatcgatccggggaagtgagaagcaatctttcagacaagccttgtt

SEQ ID NO: 98858 - DNA, 540 bp, Cannabis sativa
aaaaagaaaatctaagtaataaatcaagtgatttatgtatgttttaaaattagaatatatagtatacagtactatgtttttgtatcatttactataatatatcatataacaataaggcccaaacttagactaagactagacctacgccttgagtgcactatgtccaaagccccaaaaacaattttctttgcaaaaatataccttattgttttggtatttttgaaattacatattaagctaagtatagttaatctcttattttcattggttcacatgcatactcgtgtttttctcctaatttactctaactacactactaaattttttacttttaatcataataaaatttgtgattaaaagtaaaaagttatcattaattataaattattattttaatgttgtcactaaaaaatccgtatttaaaagaattatttacaaaaatcacaatttattatgattaaatgtatttttagtcacaatactcgttgtgaataaaattaaattagtgacaatttgaatctaaatgctatattttagcta

SEQ ID NO: 98859 - DNA, 1436 bp, Cannabis sativa
  modified_base (30)..(31): a, c, t, g, unknown or other
  modified_base (1096)..(1108): a, c, t, g, unknown or other
gaatggcactctcaattatatagaacgctnnatatgttccacaatatagatatgttataagattatccatttgttgttatcaattgtgcatcccgttcctcaaacatgtcgccaattacctcaatatcccaccccctttctcccaccatcatcaagttagagaccattttgttatcaagaccttgattagcagtaatgacatatggattactgtcatgtggcagccaaggctcattaataatactaacagtagagccatttccaatagatcttctcgcacttgctgaacaagaaattgagcttcctaaatactttgccaaatgaagctaggattttggcctaactcagtagtaagaaaagacaccgtaaggtagtaccaagctttatagatccttaccacaagtgactcttcctttgtaagcaatctccacccttgtttgcccaagaaagaaaggttataatgtctaagatctctgaatcccagcccaccagcatgcttgtgttgacataatctcctccaactaacccaactaacacccttattcgaagaattagactgagccttccaccaaaacttcaccatcataccttcaagattttcacatatttctttagttaagagaaacacactcattgcatagctttgtaatacctgagcaactgacttaagcaacacctcttcaccttcttttgaaagaaatttagtttcccaactaaagatcttcttcttcattttctcttttaagaagctaagaggaatttgaatttttatttttaaattaagtacttaacaaaaaatagagtaaattgcggcataactcctaatattagcaattaaccccaaaatccaaattttgacgacaaaactcctaaaaccaatattctgttagcatttagccattcccattcatttttggcagttaactgctatgttggttgtccatgtatacatatgatattatctacatgaacacaatgtacatatggcacacaatattattagttcacgtaaataaatatttaaaaacaaaataacaataaattaattaaaaattttaaaaaaacattaaataaaaaactgttataaaataatatnnnnnnnnnnnnnagtaaagaagaagaagatgaagagagaaaaagaaactgaatgagaatttctcagttgtttattctaatgcggtgaacccctatttatacaaaaatatgactaaaagaatgagaaactaaatcaatgtaataaaaggaaaatacaatcaagaattaatgatgataattaatttggtgatttggacatccataaataatatttcatagcactcctccttggatgtccataaaaagtgtctcattaaaaatcttgctgaaaaacttggtcaaaagaaaaaacagtgcagtgtaaactaactctccctcatttaggcattcgtagagatctt

SEQ ID NO: 98860 - DNA, 605 bp, Cannabis sativa
tgccgattgatatggctattcgtatcttttttctcaattccttgcgccgtgttgtgattaaatatatttcagtctcaatatacttatattatattgttgagggttttatatttttggtcactattttgtattattacccattttatttaattttgtaatagtgaaatatgtaataattataaagatgaacgataattgattactggattgttttatttttttttagtagtgatgaaagacacatatatgttaggatttataaaacactcaagaaatatatatatcatagatccaattatatttctaaaagtgctttaatatagaaaatcctaaatcataaatgcctttgctaaattaaagaagaagatgataaaagatgaacggaagcactaacctgaagctattattggtgattgcagagaaagttttgattttccaagaatacactattttcttaaatattttctctgatgagaaatgagagaatacaaggagagaatacagaaattcttggagaccactatctatttatagactcatcttagaatgagttttgtgtatttataatttgacccctcaataaattataaattaacttatagtat

SEQ ID NO: 98861 - DNA, 814 bp, Cannabis sativa
ttgactttatagtcaatagcgagataagaatagtaactattaatctgagattaatgagacatatacatgcctcacaatatacttataagaaagaaaccttcatccatctgagcgaagtgagtgtatcaccataagatgcctcacatttcaaacagcgagaaggtcaccttgcattacaaatatcacaaagagaatatagcgagatggaaaccttcccaacacttagcatattttcttatcaagatggatatggaagataactcaaatcagagaagatataaccttctaagttagcaataaccatctaaaagatagaagtaaagagcggttgggtagttattagatattatcccacacgtgatttggatgaaccatctaaaggatagaagtaaagaacggttgaagtgtagccaaatctgttcacgtgtagttagtagttatccaacagatttgaggtaaagagcggttgggcagttagtagttaggctgaacctctagtttccataacttgtaagaaagttctcgattttgttatcaagaacatcatttgcagatttggaataccaatcaaaatagtgtctgataacagaactcagtttgacggcgagctgttcactgaattctgtgaaaggaataaaattattaaaagcttctcatcagtatcgagacctcaagcaaatagacagtaaaagctgttaataaaccttgaaagatattattaaaaagaagctggacactgttagactatatatatagtgtatgtaatatagcatatacaatgatatgaaatgcggaaaataaactgtaatcatat

SEQ ID NO: 98862 - DNA, 576 bp, Cannabis sativa
gacccagaggcagactcgtactggaactcgtactcgaacccgagacttaaactcgaacccaaaccgagatcaacactaggacagagccctgaagcttcactgggactagaaaggagctgggccctgagaatcgaatcgtgacctagatgggggacctgggccccaaactcgaaactagacccaaacctggactaaggatccgaacctagatcggggacttggaaccaaactgggccccaaaccgggatcgagacccaaaactagaccccaaactcgagacacaggacccgaccttggacccaaaaacgaggaactgactaccgggacacaactccgaacccagtccaaaaccaaaacatgggacgcggtccaggacccggggcctgactagaacaagaccaggatcctagaccgagatctgaatcttgagctaaggctttgtcctgacccatagtcactgtttgaatctaggacccaaaccaagatctgtaccaagtcctggacacgaaccgggatccaaacccgatctcagacccagaattagaatctgacacggactgggatgagaaaccagac

SEQ ID NO: 98863 - DNA, 1110 bp, Cannabis sativa
tttttttaaaataaaatctaaaaatattataaaattttaaaaatacaataacaaatataagatgcctactaaattcttgtgtactttcttttgtattcatataaagatgtagaaggcatataattaggtttgtgtccgaaatgagaaagtgggtatatttttatacaagtaaaagctattttgtctctttgaaagtgtacatgtgtcatacatatatatatatttatatatatattctgttttgcccccaaataatgattattattagattcggtgggggatagtagtagtactatagagtatagtactaataatcaccaaatatttttatatatatatatattggttcacaccaccaattaatagtgaaaaatccaaatataataatgcacaaaaggaaatatttatgggaccccagacaaataattatgatgagttcgggaaacaagactacctaactgaaaaaagaagagagaaattaagatgatggtatggtgaagattttaatgcagtcattagaaatgagaagaaaaaaaagtcaaatgtggtatcaaactctggaacaaaattattgctataacaatgatagaggagagtgctactacttattacttcaagctacctgcagattctagtaatatgaatgtaattattataatatatatgtctcactatataattactagctaatatttttaatgatactactgttaacatcttgcctcaccttttcatatctattaatattctttccttcacaaactatctaatcagtacaccatcacggcctccaaatattagtaagttaaattaataatacatattatttatttattttgtcaaggaaatatattttcattaattaaactcaacagggaacgccccaagcatttctcttacaatttcttcacattttttagcaccaatatatcaaaatttgataattttctctttgatgactgtctatacatttcggtggcaagcacttcttctcaaatatatacaagttgcgatctaaccaaatatcgtatattgcttctgctaacactgcattaaaaaatctctatgattatcaccttataggcctcttagaattcagccaactcctta

SEQ ID NO: 98864 - DNA, 594 bp, Cannabis sativa
attataattaatgataataaataaaaaatttagacatccacgtaattattaatatttataacacaagtcattttttgctaaatatagtacatattaaaaaccatgttaaaaaatacatttaggtgtcaatatggtgcatttcaatattaattcttacacaatttaatttaatatgatttaaaaagctattaagtaattattttgtatgtgaatcggtatggttttacgcaccttaaaatgctacgtagttatagtaatacaaaaattcatttaaaaaaatattacaaaattcattcataaaaaataaaaaataaaaaaacacaaaagataaaaaaaaaaaaaaattaacgtaagtatgacatttaataattttttttttcattgtaacatcaatttatatatatagatggatgattttttaatgggtaatacctattaatgcgtactaaaaaaattgatgaggtggcaatttagtgacttgctagagtaggttaacagcaagttttttttaaaaaaaaattaaaaaaaattatatttccttttttaattatagagaatgatgattttgagaaattatttttagaaattaattta

SEQ ID NO: 98865 - DNA, 839 bp, Cannabis sativa
caaggactttatgaaaagatgaaagcatgttatatcaaagcaaacatggcggtagccccactatcaactatccatgatatagttttactagtaaggtttaatgccataggagtgttgatgacagcggttgactgagtttgttggatctgttgagtgagttgggaaatcatgtcctgaagagaggccagcttgtcgaagaccaaaggagaggtagtggcagaagcagcatggggcacgagctccttaggagaacggtccttagaggactgacctcgatctgagttggaacaatttgggggatcaattttgtgtttattaccaaaactaggaggaaaaccatgaagaatgtatcatttctcctttaagtggccaagtttctcacagtgagtgcaaaagaggcactgtcgtttatttcgtggagggtttgaagatattgcagcaactaagttgggaagggcacgaatcttttactgtctttcatgttgaatgatggtggagaaaacctttgaaagagacggaaaaggctcaagaataagaacactcgctaacaaagttaacttcttaaagttactctttttcaggtccacatgcgtacacccagtagcatccccaagaaatttccaagacaaggtctatgaaacttggtaaattgtaagtgaccaagagactatatttttgcgtgctcactaggggacaaccacactatacaatgcatcgaactagcacggggaacttatgtagagaaattttaacgcttaaaataagctactaaacctgtctctaagtcaagtgtaagcatacttaacctttgtataaaaaaaagtaaatccagatactta

SEQ ID NO: 98866 - DNA, 906 bp, Cannabis sativa
acaagacgataagaagtacattattgccaaacgcattatattgggagaagtgaaaaaatgtattcaaaatcaattattagtcttaaaatgccatgtcatgtcaacaacataattaataattatattaattgatttctttcttctatgaaaagagcttattgtttttctctttagtatgtgagaaatgttagtggtagtttgcgttgacgtgtcgtgtttgaattgtgttatcggtgtttttggagtgatgatatgtataattttaaagcccaacaacaaccaaagcaagctgagacctagacctggtcaggatgacaatctagtccattagaaaaatcatgttgtggttctagattcaaatgtaagtccaactctccaacctgacaagtccagatcctcctaattcggaagaggatgttcagcctagaagtgaaaagtctcccaaggccaatccagacatcttcaagaggtgacgcgaaagcgagtagtcgaagagttgctaatatggctcctgaacatcacctaataaactagctagccaggcactaggccccacaatatcagagtttgtcccctacgtaagactgatggagtgcacgtgctaccaaaagaagatcacattttttgtccaatgccatattctctgacattctcgatacgaacatagctgcgcacgacacctacatcttcaaataatcgctgcttgtacggacaatcttcacctagtgaaatgggcctcactcaagtactggcccaaagttaataactattgtatttaccccatcagagggcttatagttgatgttgatctctaaaaaaccctatcggatctgagtatgtccatacccgattcctccctataaatagaacatgaccccttaatgcaaagggtcgaagattaaattc

SEQ ID NO: 98867 - DNA, 781 bp, Cannabis sativa
  modified_base (37)..(44): a, c, t, g, unknown or other
ccgaaatatacattaaataataaaatatttttgtcannnnnnnntgccaaaaatggaattaacatcatgcaatttgctcttgtgtttttccttccataatggcacactaggttttcgacaaatcattttattgtgaaaaatatatctcccttgaataaatcccctagttttgagttattagcaagaatgattctcaatcttgtatacatcatattcacagccactttgtataacacattacaacacgcaattggtctaaagtcactaaccaatgcatgttggacattttccctttgggacaagtattaaggttgtagtattaagctcatttaacgatcgacatgtgaataagaaatccaatacaacaatactcacctcatccccaatcaaatctcaattgtgttagtaaagttgacatgttaggatattacagttgttgacatgttatatatcttctgggtctagatcctccacacgattgctctggttaataaaatcgttagggcagtttttccatccccggatgttaggcctctatacctgagtactcgactctttgtatcgcacgactctgccctgtggaatattgattggttggcctaaccctggggcttgagcatccagttctttctgctggggttggtcgattgctctttagttgttctgtggaacattgtgtgtgggttatctcgaagggtcgcccattacaccctttcctttgttattttctagagcagacaatccaactccaggatgattaaacttcttagcatgagggttt

SEQ ID NO: 98868 - DNA, 1153 bp, Cannabis sativa
  modified_base (34)..(47): a, c, t, g, unknown or other
tcatattaagatgttaatgaaacatacttggtannnnnnnnnnnnnntggtaaaatatttccaacagatttcccccaccttaatggtcttggtgggatcttcatcacaaatgctaacttcctccgcatcctccatcagcttaatcattctttccatccacactcgggggtttagctcacctttaaagtcttcctgaatggcttcagcttccacttgagtttccattctgggagcaataagtgtctcttcccggaccatgaatatcgtttgaatggagacattgtaacaaattcttgctcttttttggtcacttctaactacccccacagatccattgtcgtatggaaacttcatgcacgaatgccgtattaaagttattgatccaaaatctactaagactgggcgtcccactatggttttgtatgttgtgaggcaatccaccaccacaaaagtacaatgcttaaaagtgtaaacattgttttctcccttaagagtgacaggtagttggatctttctcattggcattacagtgtccctattaaagccttgtaactggatggggcaagctgacaagtctccctcggtgagcccaatttcttaaaagacagatttgaacaggatgtttatggagcttccattgtccaccataactctaaaaattctcttgtttcctatttgggcttcaatgaccaaggggtcattatggggaaaatgcacatgtcaggcgtcgtgataggtagattcattattcaaggattttaggctagtgactgtgctacaatgcatgtttcctgttctccatctaactccctaaagtaccttttttggaagttcttggtgcttcttgcaaggtgcggtccaccagagatcgccaccatatgtccatcaaccggtggcaaagctaagcctggaggatgggtttctcggtcccaaagacacaaaagttaccgcagtcggagctagcagagtagggagtgttagaagttacgttcttgggacctgagagtgacctacccctatagaggatttatagtacccttgtgtccaggaacaattttctgtccatgaatgaccccctgtttaggatatatgtgttagaaatattttaccaagatctagatttactaccaatatgtttcattaacatcctaat

SEQ ID NO: 98869 - DNA, 3506 bp, Cannabis sativa
atagcattggggctatagaaggcttatcatttagaccagggcaatgcaacaaaagactatgatcctcctcaagggtattaggataaaagagagttgaggatttgctaaaactaactagctgaccaaaggctttattgtaaatgttaatagcacccttaattgttaaacatgaaatcctagcaactagggtaaataacaaaataacaagtttttgtcaagaagatgagaaatagaaattctcataacatgacactgaccaattacatctctgtttggtttggtttacaaatcttgaggatgatattcctaatcatgttaatgaagagggtgaggtgaagagggagtagaggaggatatgaacatgaggaagttgaaattttcgacatgcatgtaatcataaatgactctattgataatttccttgaatttgataggactgcatctaaagattcatccttactatgggaacaacatttcccttacaagatgtgttattgtcctgagtcgcttaagtggtcagcatcagacgatgaatcaagttatcctcttgataaaaatggggcctcttctagcacagccaacaacgcgtcccgactggaattcctagcctcaccatgtgacagtgaaggaagcaatatcactattgcggatgagtagtacctttgtagcttatcagtttcatgaatctacatccaatcatgcgtatcattttaattcactagtttatgccaatccattttcattatcaaagactaaatatacactttaattatatatttatttttgattatgtaatagaatgtgcactttaatttccatgtgttttgtggggtatgcttcgtggttaggcaacaagatcctcttctcaatggattattgctctttacactaaatctcgcaaacgagacctttcaatcaaacacatgaaaatgtcttttacaatcctctaactcactcaatttctcatttaaattatcaatgcaacacactacacatggactagctagtatatatatagtgattggtaggctcacatagtacagaggtggtaattaacttaactatcaacttagtctgtttgaatgaattaaaaactaaacctaaaactttcatttattacacaatgatttaaagtaatacaaccactcttaacattatgctcatgcactgattattatcataacatcaaaagcaacacgagcaaataataattaagaagttttaatgatccaacatctttaaaagaaatagctcatgagatagtccatattgtttttagcaaataaaaaaaaaatagtcaatatcatgaaataggttataaggttattctaaaataaagtgttcaggtaggggtcgatctcatcttgacgatgatcgcattgtcatgttcccgtttgtgtttttaaggccttcattatgttgatctttttatccttcattattgcgaaacaaatatctactgagattttttttttgagagaatatctaccgagactttgattattggatttctaagaggagtgagtggttgtgatgatgtgctttgcttgatggtggtgcatccaacatgggcacattgccaaactttgcttgaaaatcttggttcatttcatcagacactacaacctttcgagaatttgtagggtggctaagtatagcaccgctagaaccaacatttcttgatcgaagtctaattgcaacaactttcacaactttcacaacttaagtaaaatataaagtaaaacctatgatgttattgtaataataaatatttgggtaggtataaacaacatccgctttccttttttagagagattctttcacaccacataattatatatttgtgagaagacacaaataattttaacaattgaaaaagtcaatctaagtactctttctttgttttaaaagtagtaataaattaaacttataattatgcagaatctactatctatccatcgggccttaaacttatgacatgcctatccacatctaccttaccaaaattcctaaggatgtacctattacacagagggaggattaataaataacagttaactcatatttaccaagtcaaacaagcaaatttacccttcattcagtccatttgagaacgtgaatctagaaactttgtatacaataattttgataggcttctcgagtctgaaaggtccaacaagtttttattgaaatttacaaactctataacgcttctaagcaccacttgtcctttcttggtttaatttttctatcttggacaccatcatcttcttaataatcatcaaggtcaacaaaattatgctgtacttccggctgaacgacctcagtctccttcccattcttcttaggttgtgcttcaattctctcatctttatcaagtacatcttcaggagtgatctgattcacatttgaagccacatccttattgttgtcttttttcttctattgattggttacattttgcttgggtttttggccagttggagtttgatcatttttaacatccttctcctcctctaggtccaccaagcttgggctttagacagattgttcatcgtcaattgattggtcaccctcttgcaaagagacttcagtcttcaacttatcacccttttacaaagagagttcaccctccattttgtcaccttctttggaaggcttctcagtagaagaaactccaccagagttcactaacttaaccacttacctcaacattgctttcatagcttttatctcacacctcaactctttcagtccttcattgttatgggatttttctcgcccaaacaacacaaaatgttgtgcgaggcaaatcccttatgcaagatctgaaaccagaagttattatggcatccttctactctagcatcaattgcttagagattcataatgcgcaagttaagcaagttatgagaaacaaatagaggtgaaaataggatatacaggaccaaccctcaaagttgaagtcagaaccttcaaaattttccatggcaaagtccaagaagtcctcacttcctaaaaagttattatattcaaattaagccaagacaatacataaaatgagttgggctctcttttgttttgtctacccgaagtaagtatcttctctcctaataggctactgggaatgatctaacctaaggaagtagaaatcaaactcatcttgtttgatatggtcaaaatccacgggagcatgaattaaatggccagaatgaggtgttaccttgtctgtaagtgctaccccctagaattttctcgttaggaagtacgttagcaaactgcttcacaaacctcatgacctcactcggtattttttgatcctcttggagctccgccatctagagcttgtctttttgcacaaccttctttacttcatccacgacgatatctgcaataccttataggacctcttaggttcagaatttattccctgaaaactaggaggatcaatattttggtggttagctattagtccaacttcctagagcttggaagtggtaattaat

SEQ ID NO: 98870 - DNA, 694 bp, Cannabis sativa
tattcccaagtttgaaacccaaatttgtagagaaggtaatgaagaggctcccaataattaaagacctcatcacaatcgtgtatgatgttcgatgtggcgctcatgtaccttaacattcctaaagcaaacaacggcaaagcccagctcaaacctttatcgacttcttctttcagctccgattttccaggcttatgatcctttgaatacgaagaagatgatggagaagatgatgatgatgatgaagatggatcggagagtaaaggtcttctttgccttgtggagagagccatgattgaagctcaaattttgacggtgacggtggtaatcaacgccggtccggttgaggaaaaattggttctttgctttgttgagaagtaaagatgatatgaacccaaattcaaatatggtttctattttctaaacactttttttgttttttttgtatgaaaatatatattaaataaatatatttgggaaaataattctttttttaaaaaaataaataaataaaattaaaaaagacaataaaaattactaatttaatgactttcacctttagctttagcttcagcttttggcttgttaagccacttcaattttcagatgtattaagttgtggctttaaattcttggagatattaaaaattctatttagttattgaaattattggatttaataacttttgttaatttt

SEQ ID NO: 98871 - DNA, 621 bp, Cannabis sativa
  modified_base (536)..(544): a, c, t, g, unknown or other
ttcattgttttagaattcataataggatgttaataaaacatacttagtagtaaatctagatcctggtaaaatatttccaacaggtgctcacgcgcagatttctcagacatcccctgtctgaacttggcgtgctgctctttcagacacacaatcgagcgcatcaccctgcaaatgactgagaaacctcggtcaaggtgtatgcaaattccattttttctcagttgtgaccgagatttgtggacgagaagggctgcatgcagcctccagccacggccaaggtgatttttcaccaaaaaaaatttgaattttgtgattttttcacaatttttttttatttcaaattactaaatatctaaataaaatataatttttaaacatttaaacgtaaatatcaaatttataaattaataatattaacttttaatagattattatgaattttgatattttgaggtttaaatttaaaaattgattattttgttttttaaattatggtcagattttaaaaatttaatttgttaatatttatatattannnnnnnnnaagattagatattttaatattagggatattttaaattaattgatagccttatctttttaatttgaaatattatatta

SEQ ID NO: 98872 - DNA, 708 bp, Cannabis sativa
tttatttttagcaaagtgaaattactatgagttttaccacaatttactttaaaaaaggaaaattaaactaaaaaaatcttctaaatttttaaaaacacccaaaaattatttttcaaattattatttttatttgtaaatgaagcttaaaccctcacttgttaatttttatccacgtgagtagaaagagcactcaaaaccaaaaaccctttctttcctttttccctcctttctctttctctcttcgatttatatgcaatttccccaaatttcaatttcaacaccacactcccattctatgtaagcctccttcttctctaatttctccccaaattatcatctttctcgctttttctcaactttccattattagggttttttgaattaccttttccacccttcaattattaaatttttggtcgtttcgaaaacgaaaaaccagaaaagtttgagtttttatactgtttggtaaacgttttttctgaaagttttgatttttttttttttgggtttcagtttcagtgttctttgcagttatgtatggaggaggtgagtacattactacacccagttcaagtttttttttttttttttttttttttttcaatttttttttttatatttagtttaccaataatattcaaactatgaagtatactaaataaaactatttcatatttgtgcttattacttcttatattatatatatga

SEQ ID NO: 98873 - DNA, 866 bp, Cannabis sativa
atccttcgtattatatgaagaattgtacagtagaattatataacacctacggaccatatattatatataccaagtaccaacctcatctcctcatagaggctgagggagtggtcctccatctccaattcgagagattgatcaataaaattagaaaagaaaaccatacatatgctctcacaagtctctttctttaacattataaatattactttttgagttttgttgagtcatgaaaggggtccacgatgttcaagtccaactggtagtagtgcaaaagaatatctatgcatatttatttgctattgctactatacatccacttcacatgtattattaatttgtactgagattttattacagccattttgtttgagaatgaaaacaacctaaccactgatgagaaatatcaatgtggcactgtagtaaaatgctgatgcctatgaaagcttaatttcatagaagaatgtatatgtagtaaattgcaataaagaaacatttgtctttcgttctaaattgtcaactggaagaatattgtgtcagcggaaaacaagggttttgccaatttgtttttgtgttttccgatattcaactacattatgatgatatcatttgttctcttgtaacctacgcctacttttgcatatgcacttctactctcttcttcttatttagaccactcataatgattcttttatctattttggaccaaagaacgacaaaaaataattaaaaaaaagtatatgaatgcttctctacatttataacatacttttcacgctgtaaaatataattaattttttatgcacatttctatattctttattttcggtattgtctatgtcttctctctctctctctcttttttt

SEQ ID NO: 98874 - DNA, 738 bp, Cannabis sativa
tacatattatcctacacaaccaaacacagtttacacatttctctataatcatattctccttcataatattccttataatcaatttattttgaacacctcgtaccgaatgccccttaaattatttgttttacagtcggaatagaaacggttctgtagttaaaataaaaaaaatgagaaacttttttctttataaaaaaataaataaggaaaggtttaattagatggttaatataatatgtgattaaattgaaaaatgttgagtattacagtatggcaacaaaatttgaatatgggtaatattaaaatatacaaaaaaaaaaaaaatatgtaattatttataatatagtgtctaatagtaaattttgtaaaaggaaggggtgatcaaaatatgcaggcccggcaagagttaatccttccaaattttcttcctttattatttctacatttctatcctcccaaacaaaggaaaactacactccttcccattctttccctttatatacctttccttcctcttatgtttccttcctaccaaacatactgtaaaaaaaatatatgaaaatcagtgagggagagaatacttaggaccaagagagcatgctatttcgaactctgatctttatatatatatgagccaaatgtgctagttaaattacaattgggcaatgtttttttttttccttttgatttatttatattgttattagttcaaataaataaatggggtgaatactaaaa

SEQ ID NO: 98875 - DNA, 5122 bp, Cannabis sativa
gttttcttcaagatatcaaccattattaatgacatatttgttgcagaaaaaagaaaatagaattccagatccaccctgccatcaagtttggttaaaatcctgtaagacaataattttttagttacaaacttagatagggtgattgctgcaaggatagtaagtgataactaacacaattcagtaacatgaatatatggcttgttattattaagtactaagtactaactataatcaatcatactgcataggctgaactcaaggaaaaagtaaactcgggtgaagttttggccagcagtcggacgacatattgactcaagcattagggacacccgagcaccctggtcggatcagagctgctgggtatgctattttcttgatttaatgttagatcattttatttattttacttaattttttattgaatgagtgttccaactgttatttgtaggttcactacaaaagccactaagatatttggtcgaaagaaaagggctaaatgtagtgacttatcctcccaaaaacaaaaaattcttcaactcaaaaaagaaattgaagagaaaattgtctgctgcacaacaagaaaatgatgggaatgacaactcctcagaagaaaatgttgattacttggatgatcagtaggagtttggtgggtacgaagatgataattaggcatctcctgtcatgtatgacttctcatccactaataacaacgatgtacttttgcgttcagacaacatccataatatagtagcgaaaggtgtaattctgcaatctgttagtccagtaaaagttcatacggtggagtatgaagaagggattgcatgagttttgattatagaaccacttcaagaggaggctgaaatcgctcactctatccaaaatgtctgatatgttcatgggataaatgacacattcctttcctggctaaaacatatagttctaaatttgaataaggtaaaaattatttatttattgtcatatatgattaatgcataattattatatattgatgtcataattcatattttgtaggttcccatattcccggatgtcgcaaccacccatagatcaccatataaggggaaacagatgtcagatcttcctgctatgtctttgactggatcacaatcaaatgtcaggagagatccagtggaaaagaagaaaacattctcctcgaaggtttgggctcaaatacctacatgtctctactttttggttgaagaatttctaaggaggaaagggatgcacaacattgttgaagttccaattgattttgatttcatgccaccttgcataaatattatcttgacatgaggggatgtagagcaagttgggactttgaattatattggatgtcaaggcatgatttttggaattaggtatgttttacataatgattttttgaattaagtatgttttacataatattcttcccaattgattaaaatataacacttaaccatggtaaatttatgcagatgcatttgggatgatttaacgaatatgcggggttatttcaagttctttgacccagagcttctcaacgccatggacaaagatggagttatcgaccaagaagttatcaaattggttgaatggttgaatacaatgaataacaattcccaaatgttctttataccgtggaaccacgagtatgtacacgtactatataaggactatctaaatatagtttcattttttaaaattaacatttaatattttcttattaatttcgtattagtgatcattggatgcttgagatcgtttgtgccgggaagatcgttcacttggaccctttgtcaggacatagacgcctaagatgactattgacctcacactccaaaggtacatttcaatttttattttcatgttataatttttattttaatttataccaactatagctaattgaatctagtataaattattgaattttcattactttggttatctttctataacaatatagataggggttgaagaggggggtcaagtgtaaaagaacgttgggacctaaagttgtttgttcttgatgtatttttgttgataaattataatgagctgttcttagctctcctggaagagcttgtttagatttgtggggttcctttttagaccaccacgcaagccctcaagtattctattgggccatttttctaccatgtccactcacaagacttcaaagaataagtcatggaagttggccacttgttagtaacatacttcaattatgtgtttagatggtatttggactaggtagtttagagatataagagtaaaatagagataaaaaatgatattgagatgctatattttttttaagtgtgtggagttcaaatgatacatatttcgtcttgataatttgatcttttggatataatttcttgattggattttttttggtggtttttgaggcatatgattatacattcggatacagtccttgtaattcatatttcaactgcagtccaaagagtaggtattgctgtagggagtaaaaatgaatgagatcaaagatatcggtttaataatcaatcatggctttactatgctttttttagttttctcttagcaataatttttgcaggattgggattttattaatcaccttttgcaatatgtataatgtctttttgtttttatttgatttggtcttgtgaattgtttgttgcgtctcttgacaagaaaaatcctaatgtatggtgtgttttttattctagctaggataatttccaaacaatttctcttgagatttttctttttaagctttagagatttgagaatttttatgagattggctctttagatcaaattttcaatgttgcccagatatattcataagtttatgatttctcttatgattagagttcaattttttttagatgcagatgacaatcctacgaatgggcaaaaacagcaacaaaaggaaaacaagcttgaagtatcaacttggtactcatgacttgctacataccacttggtaaaaaaaaacttctctgtgtaaattggctgcaccatctactagggttgtcaatgactcaccacctgcgcttagtacaagggtgctaactcgtcgcatgattctaattgattcacctaaagtagtagaggctccaaccaaccaaagtataactgattctcctattgtgactcagaaaagctagacacttgtagaaaatcagctcgattacaaaatacaagtattgcaattcaaaatcagctggacgcaacacctcaggatcgtaatgcaaatgaagaattagagatgatcaccaagaaggctagaggcagaactatgctagctaatcttactagaaggaatggtgatttgataaaaattaattggaacatgaatgggcaaccaattagtgatgattcaatttgcattggtattctcgtgaaggagattgttccttacactctatccgattggaggaaaatgacagcaatgatgagagatattctttgggcgtctattcaggtaaccgttaattttagataacttactttctaaatatattatgtgtagttttaacatttatatcttattataggccaaatataatttgcatcatgattgggataaaagttttgctttcaaatgatggttgatctatagagagcctcaaaatctagacttgttaagacattatcaatgctaaaagtgataataaacaacaagcacttaatcaaattgcatcaagagcgatgtagagtggaggagggcttttgttaaataagaaattcgcttttgttaaacaagaaatgagtaaagaacacatggtacatatatatttgtctctttatttatttatatatttttctctttatttagtaacataaaaattgtatattttgtatatacatataaagtttaaggtgaattttatacttggcattttaaagttgccaagtcttatacttttttttagtgttctctaagctatgtcaccactattcttttttgctagtaaattgaaaatattttcttacagggaaatatttttagtccactataactagcctttgaattttttttagatataatactctttaatataagtgtgaaaaagtattatgaaaattaaaataataattatattctaaacttatgaaagtgataaaatacaaaaagtattattgtatagtattcaataatactttcaatataaatgaaaactaagagtttttaataatattttagtattatgaatatcaagttttcttgaagtgaattattcattttaccttatgagttgatttattttttttttaggtataatacctgcaattcaataaatcatctcagataattaaccaggtaatattccttattattaccactattttttaattttctttgaaatatacttgatcatatatgtttttcttggctaaatatacctaatcatttatattgttgattttcattgtgtgggttttgaattcttgagatatttgtgttattgattttcagttggcaaatcatggaatgaatttgatcttgttgattagtggctaacaaatcgttgagctcttcgtttgattgattttatcagcggccattaagtttttcttcttgaattgtttacttacatatacttttttttaagtcttctgtttctattggtaccccataccattagtgtttttaacttcatgttaattttatttaattgttaaatgacttttggtacttgatgatacaactttaatagaattaactaaggttggggatgcatgtgtgaacttttataaaccattcacttcacatttctctctggcatactctatcaatgactatgctatatattaacatccactgcaaaaaattttattgtgactaaaaataaaaaagttgtgactaattttaaatcatcattcttatattgtgactaaaaaaatccgcgactaaagtattacacaacaacaaatactattattaggggcggaacagtctgctagtaaagatatgagattcactggtaataaagggtcactattcatcattaatactggtgggttaacatcatgctgcttattcattattaataacagctggtctcgatggtatatttattactgttatgaattttatattttaaataattattttttttat

SEQ ID NO: 98876 - DNA, 717 bp, Cannabis sativa
gcatgttatcatattttgtcttgttgtatctattcttatcattgttgcttctctcctttgagtacgtaatttgtgttccttagatttcaaaggaaaaatggaaaataaagggcacatgtgttagttacgtgggtctttctgttttgatttattttataaaatgaaagcaaatgtaaagaaaagtaatggtataaaatctcataattgatacttcataatttggaatcatggtatggatttagaccacagtacactatatgataatcaagtacactttcttgtgttagatttttttgaccaatagttgtcttgtctatcacaatggcagtatgaaattatgcaatattttcattaaaaaatgttttgtggatgaaatactatattatctctataatgtgttattaattgggctatccatagtttatttcccaagtgatcaaattttgttacatgtattataatataatagctatagttttctgtagtgattgtggtgtgagaatcttttggactgtattggacaatattgtcccacatggatcaaatgtaagaatattgagccatatataagaacatgggctactgcactcattgccaatcggttttgagatggaaccccatgattcccaacttggtatcatagccatatccctaacgggctttcgatccacgcctatcaaagagttagccagccacaagcgagcaaaatggtactcc

SEQ ID NO: 98877 - DNA, 845 bp, Cannabis sativa
agatgtagtagcatttataatcaataagctcctcagccaattcatccatgctccaaccacttctcactgggaggcttgcaaaaaactaatgagatatttcaaaggcataatatcacatggcctccatataacaccagctgagtctttaactctacaagattattctgatgctgattgggcatcttgtgtggatgacaaaaagagcactggaggttatggcatgtttttttggtgggaacttggtatctttgtttgcaaagaaatagaatatggtggctaggtctaacactgaaagtgagtttagatcacttgctaatgctactgcagaaatcaagtggttaacgtctctactttcagagcttcaggtcacaactttttcttgtcttatcctatgggtggacagtcaaagtgtacatctactgcagcaaatcttgtgtttcatgctcgatccaaacacattgaaattgacatgcattttgttaggaaacatattctatctaagcaattatctgttcgatatgtgccaacactagatcaaattgtagatgtccttgcaaagtcactatccacagagagatttatgtatctcaagtccaaacttaagatgtcagaaatatcttttcgtttgaggggggatgttaaccatattcttgattctattacataaagtcttgtatgttgtaatagttagtagttaagattattgtggttttagttttctgttatgactgtttcctttcagctaagtcttgggcttgtacctctctttatgtatataaataaagatcgagctactctgttgagcaatgctcttcattcatttttcttggtgttactttattttt

SEQ ID NO: 98878 - DNA, 1788 bp, Cannabis sativa
accaatagcgatattaacacataaaaaggtactagccaccactagtaccctttagcatttctctaaatatatatagctacacctctatatatatctaagtatctatattcaattatattggaatgtaaatttgaatttgtatgtttcatattatacaccataataaaaattaataggcattgaaaattttgagtttctatcctttgtgtgtatgctttttcattcaaaaaaatctcactaaataacaacacaaaaatatgtactaaaaatatattttttcataatattcttaattttttttattctctttctttttctcattctctcgtttctcattcgtaaactaaaaaagcccactcatttctcttatgacgactcatttgcattttatcatccttgaaacctaggtccctgaaacctcacccccttcctttatgccatccatgaaactagaccactaaaaccttgaaacccaaatctcggaagcgtctagtcatacaaccattgaagagactattcaattttacaattgcacaaccatcactgccacctccattgcacaccgacgatcaatagaattgattttgagtgtgtttgtgaaatctgtctttgttttaacattttttttacgtttagactttataggttcgatataaactcgatgaaagctcaatacaatctcgacgagcttgatatatactagatggagctttcgttcgaggaatgaagatgaacttaatgggttttcgaagaaagctctgtggtatagttactccaaatgaaaaaatctacataagttgtgaaaagttagctgtctttcagaagtgtgttcccagatagctaacttgtccatccggaagaaatctcatagaatgacagttttcatctggagggagttcccatatgactatcatgtccactccgggtgtaatctttaagaaagctagtcctcctccgagagggagttctggatagttgactccagctggctcttttccattcgggaagtcccttcagcatacacttttcaagcctttttcctggaagcgtatgtctcatccagaagcaccttgtcttgtgctaacatggagattctgttataaggagcttgttgagtttgttaagttgtaactaacttaacaacctatcagttgcagccaccgatcttaggatctttatcctgagcctataaataccaccaatacttatcatttggaggaggctgggttaagacgagtttcgacaggtggtcttgagagagaaagattgagaggtagatagagagatttggtttgggttatgtatgaagaatcttctgtagatgaagaatattcttgagtaagaatgtaagagttggaatactttgagagaatccaatagagaatcgatctcgcctgctgcccatctcaacttggtatattggccacacattatccacactactgtccatctcatcaatcgcactccatctcgcctattagagttcaagtctcccttcgaactactcaacaaaatttcaccacaatactctcaccttcgggtatttggatgtcttgcttacccctcaacacttctcccaacaaggcacaagttctctcctcgagcttccctttgtgtcttcttgggctatccaaatggcatgaaggcttacaacctcttagatatccaaacaaacaaaaactttcattcctgatatgtcatgtttcatgagaccatcttccccttaaaaactagcaacaacatacaaagtccatttgtagattatctacttcccaaaataccatcacc

SEQ ID NO: 98879 - DNA, 703 bp, Cannabis sativa
acaacttaatctattaccaataaggttcagaacttaaattagaatgacaattatactcacaacacaaaaattcccaaaattaagctttaaacctaattttttcttactaaaatcaaatagaaaaggctaggagttaataccttagattgaatctccttaaacaggttacaacactacaatttcagcaacaaaatcccttcccttgctggttctttgggttgcacgaaagagagaggaagagagagatgcttctaagttacttcaatctatcctttttttcctttctttccttcttcttctaatattattaatattaactaaggataagcttaataaaaggcagcttctaatacccactaaaagccaaaatataccttgtaaaatgacctttgcccattcaattaaaaccaaagattaaacaacctaaggacaatttggtcatttcaaatcccgatataactctagattatataaaatacgactctataaaggcccaatgtcgctttccacagctttcgaacacaatcacagaaattgagaaatttacataaatagcataataaacatgtacgaactcaaataaattccaataatctgtatttctattaataataacaaaatctcatacataaaccctaattatttaataatccaaggtattaatcatatgcggtctttacaattagctattatcagaataaat

SEQ ID NO: 98880 - DNA, 2044 bp, Cannabis sativa
  modified_base (288)..(300): a, c, t, g, unknown or other
ttttttttgccttattttattatatggttatgtggtaataattaagctttctgtgtgtgattgaatggtaagttcaatcatttgatgaaagtaaacaaaaaaaaaatatattaaaaagaaattcaaaaatatcattaaaaaaagatattcaaaataatttggtgtatctcgctcaaacatctttattaaatgtcgtggcgcgttctcattgcctcttagacaatccaccgataaaatcttttttagaagtcctataaaagaaaccccttataataataataataatannnnnnnnnnnnntaaaataataataatacttttttttttaaaaaaaatcattgtactaattcaaatcttcaacaacaataatattgaagtaacaaaaaagaggattacacgttaactagatgatattacatgatatgggtaaactatatataaattaataatctataatatatcaatcaattgatattactagtaagagagtaattttagcataaaagtaaatagatttacaaagctgcatgcatgcacaaaataataaggtttgaaaatcacctaatgcctatatgatcagttataatcaggtctattttttccaactaataaattaacaagctacagtctcatatctaatgcatacaaaaagctaactaattataagaccaaatgcaacttctatagcccacgccaccaaaaaaaaaaaaaaacgaagtcttccgttttagaacaagaaacgcatgagccactgatttttcacaaacaacactatatgcccttattagtcacatgaacaacccccaacactgacttaattatattttctattaaattactgtacctaggctatatatatatatatattacaatactttttattactttgacccaatttctcaacgtaaatatatagcattgatatctattttacatatatatatatgtatatgtctgtgtgctggtggactggtgcgtacatatacctgtttactaataaaaatgaaaagaagaatcaactgtctgatcaaggagagggtccaccggcagatggcttcaacaaaccgacctctctttcctatctttttcctttttcttatgactttatttcttttttctttttcatatatatttccttttccttttttaaggttttggacaaattactatataaacatatatttaaaaaatttattttgtcacaacacaacatgcatgtgaaaaattatgacgtcaaagatcagaacgtgtcaaatagtgtgatcagtgtagtaacgagtgaaattgtacatttatgtcattaatataatattacgtgtattgttatggtttattctatatatatatatatacagtacgtatcactataacatatcctccaatttagatatatgtgaaaatatttatacattttttctcttcctcatcttctaatttcttatttgttttaaatgataaaaacaaaaaatacttgtaaagatgatcccaagcgcgtaattatattttaaaacagaatgatctttaggaaaaaaataattattaaagagtgggaatagaatcatccttatacaaaaatggtgtccaattaatttggtgctctcttaatattttccatttacgacatatattcatctaaaaaagtaccatacataatttctatagctcattttcttttgctttattattttgattatattataaaaattcattgtggggtttcaagttttgaatgtgtgaaagcacaataagattctttcaaaacacacacacacaaaagaaagaaaactcaatcaatatcataactttacacctattcatattcatggccaccccaacccactatgatttcttatctataaatatcataacaaataggcgtgtgtcctccacactccaaatatatccatccataattccctctctcttttctctttcttccttaatttaattaccttccaccatggccgccaccacccaatcttcatctgagcctaaaccctccgccgtattccccttaaaagacattgaaaaacaacaaccactt

SEQ ID NO: 98881 - DNA, 765 bp, Cannabis sativa
aagtggttaaattggaaaaatagcatttttgagaaaatgagatgaaaaatgagaaaatggcaaaattacaaagtgggttgctccaaccaaagtatagatcttctgggacacactccccttctgcgcacagtagggaaagctccaaatgtcaatacaatcatggcacagtttttggtaattaatgtaccttctgcatttaatgtcatgttaggctaagcagtcttatatgatttgaaggaagtaacctcaatttaccacctgtgcgtcaaatttccaaccaaaaatggagtaggttgtctaaaaggcaatcaaaggactccacaggaatgctacaaccttactttaaataaggcaaaaaaagaagaaacaatagaccaaagctcgagaaaaggcaagacaattgcaacataggggtccacccaaggcggggacgaagatatggatccccaccttgaggaaccaaatacaaatgttaggctggtcgaagagctgaaagaagttgaaattaaccctgttatgtcgaccatgaaactcaaaattggcaaaggtttgttgcttgaaataaaattagctttgataaaatttctaagagaaatcttgagattgcttctaggtcacatgaagacatggtcaggattgacccaactgtcatttctcatgccttcaacatcaatcccaattttcatcccgtatagcagaaaaggagactactagataaagaatgtgcataggcattaaaataagaagtaaaatggtgtaaaaatt

SEQ ID NO: 98882 - DNA, 552 bp, Cannabis sativa
aacttaattagtatcttattatttaaaattcgtccaataatacaattgcaatagattatatgggctcgtttagtatgtcgtataaaggtcatattgtattaaataataaataacattatatttggataaagtaatatattgtattaattattacgaccaaattttttaatacaatatatgttgtattatttaatacataataaatggtctgtattagcttatattataatatttacaaagaatttagaatcaacatcaatcttcaacccagacccgaacccagacccagacccagacccaaacccatacccagacccggactcggacccgaaacctggactcggactcggaccgagacccggacctaaacccgaacccgtagttggtgttggaattgagtgtattgaaaatatattataactttacacaatcaattaatacaagtcaataccaaatattgtattgtattaactaatactaatacaatacaatacaatacaactcaatccaacaccaatacaatgtactaaacgagccctataagtgtatata

SEQ ID NO: 98883 - DNA, 675 bp, Cannabis sativa
acatcataataatttaagataaaaaaatttattcattgaaaataaggtttaaactgtttgttgcatgcatgcgtaattcattgctaactatattataaattattctgaatttttcaaaattttgtaaaaattagagtaaattttttttatgaatgtcaaaatagatagaggtgtattagtgtactattttaagaagtgtgcaccgcaaattatataattattataagtaatataatgagcgagctagtcataaaatctacactcaattttttttttcttttagtttcaaaaaatcgttcatatatatttaaaacaaatatcttgactcaaatttaatttaattttattctttttaaatatatatttcttttgaaaatcttaattttaatatctttttatattttaaaaacaaatgtatatatactgtacattagagtacgaatttatttgagtactctaatagcaataaccatggacacgcctccaaataacaatggtatactttctttctcaatcttaatttccaacaaaaccaaattaaccatgtaattatataatttattattattattattttcttgttttatttttataggtacttcatcatctaataattcatatggaaataatttcacaactcataaaataactgtaactaggatcaggtaataataa

SEQ ID NO: 98884 - DNA, 1571 bp, Cannabis sativa
tatcaaaaaaaattactaattagccttaaaagaaatagttacttaatagttgaagaatggaatcaacaaataaccccaaatctttaatgggaaaacgtccaattagcccccttagtcattacggtaaaaaaaattacaaattctactaatagtttttagtaattagactagaccaatataagttagaactattcaataattattattcaattggatggtgaaacaaacatgttaaaaatgtaaaagtatttgatttggatttgggatcaataatcgcaacgagcgccacaactctgtgactctgatcgacctccatacacaagtccctattccctagaggtgaagaaaattatgattctggcagtcttgttcgccaattctgagggcaacatcctcgttgaacggtatgcatagatctccattttcttctttttgtttctgatggatttcaattgggtaattctatttgtagatgatttgggttggtttatgtgtaaatttacaagattggatgtgtcgaaccatttatgctagaaggaaagatgttatatgaaatttattatggatttgtttgttcattggtagtgggtgcaagaaaaatatggctaacttttaggttagaaatcgcttgatggctctgcaaaaaatggttctattttaaaagaccatattatcaataaagagttgatctgaattgtggttattaaaaattttcactgcttaagaaaatgatgaaagccatgcataaatgcactgcctttgcccattcattggctttgttaagttgtcaaatatggagtaaagaaataaaggttctgaaatgagagattgcttgactactaaaaggaattatgagctgtacatctacttaacaattttctttagatattactgcactcatttatttgttaatgtctttgtttagttttaatggagtccctgctgaagaacgacttcattggcgatcgtttctggttaaactaggagctgataatcttaaaggtgtaaagaatgaggagctcttggttgcttgccacaagtatgcatattcgtatctttctttctttgttttgtttttttataatatatgtagtagcttttatacacaaatgtttagtttgtcaacaatgagtgttattggaatcatattaaagcactgttgtcttggtcatacctttactggtttcatatctgagtttggtagggtagattggtcctagaaaatggataattgaactgtgaacaacatgtagaacttgggcttcactaagatttgaataaaggaagaaatcagagatggatgatctaagttttcccaacaaagatgtaaaggaaccttaagttttcttggttgctaaacatcttagtttgtctttccttgttcacatggctcatattgttgttgggttccaaccaggatagttctttctctttttctttttacattggtatgttgctaaatatttgactattgcacatcaaattggatgccaagtaaattaactttagaataactgagaactgtagttggatgccaagtaaattttgttccaaattattaagcgtgaaca

SEQ ID NO: 98885 - DNA, 1262 bp, Cannabis sativa
  modified_base (26)..(27): a, c, t, g, unknown or other
tacgtgtgagtagatctaagatcctnntaaaataattcccaacaaaaagatcttgaagtagctcgatgcaacaaagacatttctatctcccatcaagcttttgcaattcaacttctccaagaatcaggatttggcagcaaaccaacttctacaccgatggaaccaaacttaaagctcaataaaaactcgaatactctcttgacagaccctactcaatataaaagtctcattggcaaactcacttacctaaccatcactcgtcttgacatcaactttgttgtcaacaagctcatcaagtacattaaatctcctagacaaccacacttagatgtttcttatcgcattcttcaatacctgaaaggctcccctgggcaaggcttattctttcatgttgttgctccatccacactaactttacaagcctttgcatgtttatcttgataattctctcattttctagaagtcaaaaaaacaataaatagtttatcgatcttttgctgaagccgagtatagagcattagccaatgtgacctttgaactcacatggtcatctccatctttaaggattttcatgtgttaaacatctctctccctgcaatattattctctgacaacagggttgctctgcacatatctgagaatttagtattctatgaacgcaccaagcatgtagaaatacattattatatagcctatagcctgagagaagatcaccactagcaccttcaagatgaatcatgtgtcttccaagatgaacctaactaatcttttcaccaaatctctttttccagctcatttcaaagagcttattttcaagatgggtgaaaaaaaatttactccatcttgaaagggtttattaggataagtagttatattttggtatatacaactggtaagattagttatttcctaaataactcaactcctttccttagcctatataaaagacaatcctttctttgtattggtttattggtataatcctttctttctctccgctaatatgttccacggaaataatgtttctgactgatagctcagtacgcacttaagttaggttagctagcgtaaaatagaaagattcgattttggtgagactattattgcaggtggtatggatattttttttttttagaaatggaggtagtatgatattcattacatatatttatatataagaaatttttagataatacaccaaaatttttaaaaaaaattacaaaaatacatcaaaaatacatcggaccactggattgaccaga

SEQ ID NO: 98886 - DNA, 841 bp, Cannabis sativa
cttaggtatttatctgctactcgacataaaatttaagtattgataccgcaaattactctaaatttaaatataataaatattgttatttaatattccctatagtttgaacacgccatactaaacaccaagactgaaatgagtacaagatccatatgaaatgtcgggatgaaggtgcgtgcttttattgactcatagaggacactttgagatgaagccatgcatgtgttcccaacccaagaacactcatataagagtttcaactttgtgtctgaactaaagaatcatatataagaaatctaccaagttgaaaatatcttagtgtcaaatgatgtcagaaggagaagccagctagagtggcttgtgtgcttgtgaagggaaatcattttgggtgtgtcttttgattattattataattttgctgatatagggcatgtggattccattctttatttatttgagttaaatcagaatggctgctaatcaagaatttaaggggacagcctgttctcttaattcatctaactttttcattgtttaatactaataataataataaaaagcagtcgttactctttctttttattagaataagaatatatactctgtcctgacaggagtttgttgaattcagtataaatactatactttgttaattcaaaagcatattaatgcttcaaattagactcattgttttgttattcagtcactggaaacagacttgactagaacagtcattacattcaaatctgaatatcagcaaacaatctgtttcaagtcaagtgaacttaaatctgtcaaaaaagaaaaatcaagtacatttatttttggctatttttaactc

SEQ ID NO: 98887 - DNA, 788 bp, Cannabis sativa
aatttgtttagatcttattgattaatagggaaatagagtcgtttgtgggtagtttgggggaaaaagaacctagacattgcctaattccagcaacccattcataattagtcaattagatcaactctaaaccaacaaaatatattaatggtccttataatatatatatataaacaatcaacaattattgtactttattgaggtggttcatatatgtatatgataatggtaccacttatatatgttatagcggtttcaagatcatagagctgaagagtcaagaacccaataagagtaacatatactaacatctttatttcatgcctagctagctttagagaaaactttaacccattatattgacttttccatgcgcaaaaagtcctacccatatgccaaagtcttctttcaaagtcataactactactatttgatgcatttacttcagcaaatatatatgtatatatatatattaaataaagaaaaaaaagaagaggaactacatggatgcatttacagcaaaaggacactagagttgcaagcaagcaattaataaaagcacactcttcctcccctacataaatgacattctcaactctctctataagtaaatatataaaattaaatatcaccaaaaaacctatctttttcttctttgttttaatgcaaaagcgttacgattcaccttgtaaaaatatgtacccgccgctagcagcaggtaaaactgcattcactctattattctccaaaaaagtaactgcacatttatttattcttatttttataaatta

SEQ ID NO: 98888 - DNA, 962 bp, Cannabis sativa
acaattcgttttcatttaagtataaatttatgaccttttcttctaatcttttatggacatagaacaatccatctccataatttgagattgcatactggacagatattgcacaccccacccgacaatctataaatatatacatatatatatacacaaatacaatcacaaatatatattatatatatctcagcaaaatatatatataagagtaggactaactagcaatgccaccctcctcaagttttaactcgattatgtgccataaatcttgatctataatttcacagttccaattacaatacaaaaccagagcaaaaaccagctatttttttacttttgcacattatggatcgggaaaaaaaaaagagcaaaagtaaaaaataattataaggaaataaaagtgaaaacccattaccccaaatgcaaaataaagcttaagaagtaatgagaaaagaagaataccagtcagtcacagtggagccgtcgacgttgggtcttcttgggtgggtggagccgtcaacgtcgtcgggccttcgccgagaaagaaggctgcctcctcccgctccccgctgctacaccggagatgtgctgattgctgacggcgataagaagaagaagaagggttttggatacgatagagagaggaggagagagtgcgaaatgatctttaggtctgatagggtttctctctcttttttttttttaattattttatattttataatttatatttatgttacaataaaagctaaaagtaaaaacaaataatacccatttgggttgggcgggttatctttggttaattgggttggttggacttatttttaacccgttaataaatttgacgttttataataggaaatttgattttttatgcttacatattcttgaaatttttcccttaaactcataatatttgatatttgtgggatatgacacattttataatattcctaaaatac

SEQ ID NO: 98889 - DNA, 518 bp, Cannabis sativa
  modified_base (115)..(136): a, c, t, g, unknown or other
aatacatatgttctggagttaatataatttatacattatatataatcataaaataaattatgtgaaccatgcaacataaaatgttatttcttatctttattaactagtaaatctnnnnnnnnnnnnnnnnnnnnnntttagggtacaaaacccaacaagaggctcatatccacacttcctatgaaatcccaaagagagctcttcaactctcaaaggtccagaaccctaaagaaaaatttcaccctctcaaaggtctgagatcccaaaagagaaatgatcatctatcaaggtaagagttcataagtgtacttttagggcaagtattgaacccaaaattctccaagtaagaatctcgaaatcatgatgagaaaaaagagattcgaagggagacttgaagaccttctcgcatatgcatatcctgatgtcctgacaaaggctgtgttgcagccactacctctagttgtcggtaccacctgacacccaacaaggggcacattgcaactactacctcctacaac

SEQ ID NO: 98890 - DNA, 1465 bp, Cannabis sativa
  modified_base (1407)..(1407): a, c, t, g, unknown or other
gtcattttgcatcttgacccttattttattgtagagtataattttttcaaaaatatcctgtactttttattctgtttactttactgtgttaagtttcttctattaataaatgttcatacccaagttggaaatttggcggggaatagatacccagcctaaacccaccccgatatgatatatgtatatatactactacaattaaaataacttcatattttaggctttttattgattatagtaatgagacatttcagttttcatgaaaatatttgcagtgatgcatattaataatcacacttaactgctttaaaaaatgacacttaactatttattttcgattgccaattttgtattaacttcatttactatgcacactatttcactcatgtttattgttttaatgaatttttatgattgtttttttttataagttcctctttgaggcattatttttttttcaaaaatatatgtgtaatggatacctgataggaatcatttccccgttgggtaattcccgccctgctcccactttaatttaaacggatattaaagcgagtatgggggtgaatttaggaaacgggtataagggtcggggagcaatccctgcacccgccccgccacgtttacaaccctacatgtagcaatatcgacacaattttctatggtagcacctatttatctctattggtatagcatctttgtgtttgccaaataagccatccacataagagcaaacatcctccaaaatttaaccattggagatgttctaacgtggaagcattaccaccctaaaataatatcactacatagtaattagacaaatcactccaaaacgagatatttttattattatttataggataaataatagtataaatacttaaagattaaagtttataagcagcatatactcggcaattttttttagcgtcatgtgtatctaatatttgtaaaagtgtaattttgtttagttacctcaatacaagctctggtagtgtcttaaacagaatagtacatgtaaaactcatattttaaattgatgactctaaacggaaacatgtaatatcaattacttctaaatctaataaattcaaaacggagtatgtattgatgaaattagatgaaaattatagttctactaacattggatacttataaaaagtgatccaaaattagcataatgtaaaatttgcattgaaattaatgttatgtttttatatttatcattatgtcatttttaatattttattattaatttttagttaacattgtcatgacttttattattattattattattaaattttatattgagtgatcagtggttaaaaatacatttttatttattttaagtaataaaataaattgagtattaattgatattttcatgaaattattgtaatatantttataaatgaaaatatttgattttgattcaatatatgtttttcttgtaggaattaaa

SEQ ID NO: 98891 - DNA, 959 bp, Cannabis sativa
  modified_base (658)..(658): a, c, t, g, unknown or other
  modified_base (780)..(781): a, c, t, g, unknown or other
  modified_base (830)..(830): a, c, t, g, unknown or other
  modified_base (899)..(911): a, c, t, g, unknown or other
ttttaatttgacacaatttttaaggaaaactcctttgattaccaaaggtggcacatcatttaaaaaatccatgtagcgcgtctaagttttagggcgttacatgaataatctcaattgtgaaggcccatttcccttaattgaataattgtataggttaattacactaatttaacttaataaattttattagcaacataattaatttttaaaatatatgaaattaattttttatcagattattttgaaattaatttaagaaaacaacacttagtttaatgaaattaataaactatatgtatttttttgtacttaattaaataaagaagttatgactaattagatttttctagatacttaattatttgaatttccttagaaatatatttaagttaaaaattaattttccaaattaattttagagcaacttaaattagaatatatattttttttaaattaataattaagtagatttttctaagaaattagttattcagatattcttttaaaataattttagttgaaaatttgttagttttaaatcaacttaaatagggattttttttttcaaattaaggtgattagttcaagatacttaatttggtatttaattaaatattgaaaattatttaagttgaaaatttagttattttagaacaanttaaattagatatttttaggaatttattttattatattttatgtaatttcaaaattttatatatatatttagatttttgaaatttaattttgaaaagtatttttttttaattaattttagannaacttaaattaagtaattttcatcattaaaatatatagattaaaataantgactaattaaaaatacattattttcaataatgagctttaagcaaagagatattcgatctccattgttnnnnnnnnnnnnntcttgttttagtgagattcatccctaatagatgttcgttcattagcaa

SEQ ID NO: 98892 - DNA, 1031 bp, Cannabis sativa
taaatgttttcaatttataattgaacattattattgttgcggcgccatttaaattagcgatattactgtaggtgacgtctcacgattagttagtcatattttttaaaaaattatttttttaaattatatgagactcgataattaattataccaatagcgatataacataaaaaagggagctaaccacaagtagtacctcttaacaattttttaaattatttgagatttaatacttaattatacaccaaaatatgatacctagagaagtgttaaacactttttatgattttcaacatttctctttataattgacataaataagtattcaatattaataaaaagaattaataatattattggtataattagacatcaaatttcacacaattaaatttaattgaattattgctatccatttataaagcaaaaaccaagatacctaataacttttagtaatgttcttaataaaaattctaatttttgtttgtatgtacaaattctgttatcgttttaatctataaacaaacttaattttaaatttattaaaagaaaaaatagaagtaattcatacacgtggttctactcaatgaattaaaatgaaaaatactaaaatccattactaatcgagtctcatataatttaatagataacacaattaatcaaacaaaaaattacgattttaataatattatgtacttatgcactgctaaaaaaagagtaatttacgacataaatacttaagcttaacttttgattgcaaataaatacctaaatttaatttttattggttttaatccttatgttataattctgaaacattcgaaagtatttgttcgttaaatgtcccatcattgtctatatgtcatatttttttattggtatatatatatatattaatttttaagtaaaaataaaaatttaatttactagactaattaaggattgccacacaataatttatttgatttgatatttaactgttaaatacatacaacaattaatgttaagtagttatttgtaattaaaaatta

SEQ ID NO: 98893 - DNA, 579 bp, Cannabis sativa
tgaagttcataatcttccaaatggacaaagaagacgtttcgaagtacctctaactttcccactgcctacagacatgattaccattacctaatttattaatagtgacataagatcaatttaagattaattggtactgttgggagtcatctaagctatcaattgttgtttagtgaaatgaagttaattggttgttgattactatataaatatatatatatatatatataaaacaaaagtcatttcaatttgagagaatagaaaataaataagggcatatgaggtaatgtgtcaagcaatgagagaagaaccaagttaattttgagtgtttttgtactttgtgatctctatatgagttgagtgttttctctaaaagagttgaatgtttctcaatctgagcttttctaagagaattttcttcaagtgagtattgagtttcctctagaggaattcataaattttgatgcattgttgtaactccattgaaagcaataaagaagaaggctagtgtttgttcttctttatagagtttttctaattattttacttttgtttatgtcagcatcaactttaattttgaat

SEQ ID NO: 98894 - DNA, 1514 bp, Cannabis sativa
tataataatattataaaattattagaaaatattctgttgactaatagtatattcttaataagttaattatattagaatagatattaataaaaaaaaatatatatattctcttaaattttaattttaattgaagcacaaccaccacaaactaacccttccaaaaactaataataactcatagtattactttattatttgcctataaaatgagagggcaaggtatacactaatcactacacacatcttctaaactatataaatatatatatatactccacacaaaatatataatcttgatttgctatttagtccctaatatacaacaatggcaagttcaattatgaaggtactttggttggtggtattggccatggtgatagcatcaccagtggcacatgccataacatgcagccaagtgtctagcaatcttgcgccatgcttggattacctaaggaacggcgggactgtcccggatgcgtgctgtaacaatattaagtcgttgagcaatgcagccaggactcccgccgaccatcaggctgtctgcaactgcttgagcaaagttgcaagcggttccaaaggattcatgagctacaatgcttctggacttccgggcaagtgtggtgtcacctcctgcaacaggtaacattttatattgcattttattatactttaattttaaaatctaaaaaattacgatttaatttaatattaaatcttacatatttaaatataaagaaactcaatattaaaattgttttacagagaattaaaatttcaagttcgaatctcccaaaacataaaaaaaatatatatatattatattggacaccataagcaatatagttagtaattaacgtgatgattaaataatattttcaataattattaatgatataataattagatttatacactatatatgctcttttttgataaatattaatggtttattattttttatttttcttgatgcagaattcggtaaactccatggtgattttttcagcttatatatataaatatatatatatatataattataagaataaaaaagtgttggtgttatatatatttataaacctcactacgtgtatttggattctctttagagactcgttttgtaagtttatagctttaattagtattatgtaattttttataattaatgagtaaatgaagtgttataaaattgtaatttgtttttaaatatatttttagtatatttgttattcatatgtttatttctacatataacatataatataatcaagtaataacctacaataaatttttaaagaaaatgttaaataatttaagatttatacacgagatttttatttgatgagaaaagcaattgtacgacatatagttattattatactatctttggcattctaaaactattttcaatattataagtcaccaatatttcattaattaaagtcagacatcatacatacacttaaataatctgaattatagaacataaaaataattctcgataaataatgagg

SEQ ID NO: 98895 - DNA, 1580 bp, Cannabis sativa
tttttttggtttattaaattacaatttagattttatgttttgtaaaaaagaacataataatatttgaatttgttagtgatgcgttacacgcacagttagttagtaaacatttgagtggttaagtagagtattttttttttttttttggtttttgaaataaattttaagagtgcaacacgaggactatctaggaggtcactcatcctaatactactctcgcctaaatacgctttcatcctaatactactctcgcctaaacacgcttaattgcagaattatgatgggatccaatacattggtatgatcgcacccgagtggttagagagagtttgttaacacttctcagttgatattcttcttatgtaacaaaatttagttataccattcttgtattaattatctatgtatatgattttacaagttcatttcatcatttcacctttgcaacttggtatcagaattttaggtttcacttttttattccctttctttgttcttctctttctctcaaagcatttatcaatagcgtccacatccaactctactcctaagcttgatggctccacttccgctactagtatcactgcaccacccgttgccattctagtgattccgaattagattgttccactcaatctacaactagatcgcaacaactatttctactggcaatctcaagttctttccacaaattaagcacattagcttgaaggatttcttataggttctcacgccaggcctctagcaacaattcctgatccaacaaatgcctccaaatacattccaaatcctaatctgggagattggttgcgattggatcaatttttgatgagctggttattcaactccatcttagaggccatgcttggtcatgtagctcgatgtgcttcttcatttgaactctggaacatcttgattaagttgttctccaatcattctcgtcccaaagttcttcaacttcgtggaatgctttagtctacaaataaaggatcaactcatgtagaagaatacatcttgaagatgagatatctagcagatgccttgctagctactggtcatgcaatcaacaatgatgagcttatcctttatattcttggaggtcttggaagtgaatatgactcgacaataattgctcttacttccaaagacaccataacactcgtagagcttcaattcttgctccaaactcaagaaatgtgaattgaacaacaacactccattgtgcattggatcttcaaaatccaacaaacaattatgcctctgcaccaaagaaagggtttgctccttctgcatcctctggaaatcatggtcgtggtcgaggaaatccaagtggttttcaaggcagaggaggtcgtttaaaccccaacgacctcggtggaaattgacctatatgtcaagtttgtggtagagatggtcatattgctctcaaatgttttcacataattgatctcaattatgaaggtgagaataactcgactccatctgactctgcatctaatgagtctcaggctctccttgcatctgctagtactgttctagatcctcactagaaccttgacagtggagcatcacatcatgtt

SEQ ID NO: 98896 - DNA, 625 bp, Cannabis sativa
aggagctggaaaactcgaacactataactttcattggtgatctgaacaatgctcttaaagaaacagtcatgtatagccttacaatgagtgtaattttttcttcttcttataactctaattattatatggtagataatttaaccttagaaaatatacaagctatgaaattctaagcatatcaaataaagttaatgacttgtacttttcatttacaaaaggattcatgcagagaaaagctgtagaatcaatagattgaatttgaggtacttaaagttttgcctgtagttatatttttataggacttggtgaagcataaataaaaaaaaattgttataaggaacgatataattcaattacatgctggtttcaatactgttgaacctattgtgcacaattatggtcagatttattaaaaatatcagcttaccttgcctagagcaaattttttgaaataaaaaccaagtatattgtaccatactgaaactaataccatattcagtatttcattctatgattaatgtgtaaatcttttaatatgcttcagtctcctgtgtatattctttcttcagttgttattgttgtttattttggaactttatgttgttgaattaatcttatatattaa

SEQ ID NO: 98897 - DNA, 518 bp, Cannabis sativa
tggtgccctttagcatttctcttacaatataaggcaagggcacaactaaattcttcttcacttcttagaagaagattcttctcatgatcactataatgttctccatataatatatgttgttagggaatattctgcaggcatcaaaaaaatatttgagtctagcaagctaattttgttaaaagaggaaattttgtggaaaagggggttgcattgtatggaacgatgaaattgtgtactcttgatgtcaaattataatattacatcttctttgtatatgtgattgactttcaaattgaggcaaaacctccaaacgttttgtggaaaaataatccatttaaaacttttaccttattttttctcccaacagttgttccaactattttttctgttacaaacattccttatttagaaagtcggttatgttagttaaaaatcgatttgttaagtgttggacatgttagctactaacagtatataaggctctacatttcgattcatggtgagagagagagagagag

SEQ ID NO: 98898 - DNA, 3310 bp, Cannabis sativa
tgcagcagtaaccataacaaaccagcttctgaaatcactcacagcaaaggagctcgagttaatagctgatctattccagcaagatcgagcaaaatgacactcgatcaacacatggataatggtctctctctcgacattgcagaaaggacatgacagaggaacattaacatgttttgtctgccattgaactttagttggaaggcagccagtgatggctctccagccaaagtgaagaaccttttgagggactttaatttgccagaagtctttccaaaaattgtcactgttttgaacctcactcccctcattctgaagcattctgtaagagctctttactgaataaaaaccagcagcttctctactccaacaccagcagtcgggtacattatgttgggatagaggaatacctaaaattagagctttatctctgtcattgaacaggtcagaaatcacctccacatcccagcttttatgttgaatttgcatcagacttgccacagttttcccttccaaaccagggtgagtagaactgacataaggttgctacagattaggtatccaagggtctgtcaaaatgcttgtgttcaaaccagagccaatgcgaactctagcaccagttttgatgacatccttcgtttcaactatacttttccaaataaagcttggattgtttccaacattggcattgagaaaagtatctttgggaaagtatcgagccttataaatcttagtaaccaacgaggattgatctgttaagagtctccaagcttgcttccctaataaagcaaggttataatttctgatgtctctgaatcctatccccccagagttcttatgtttacacaacttcttccaactaacccaacttactccttgcttatcttttgaagattgccaccaaaatttgctcataatactttcaaggccatgacaagtttctaggggcaaaagaaagacagacatagcatagctaggaaaagcttgtgctacagtctttaaaagaatttcttttccagcctttgaaagaaaccgactctcccactggtttattctcttctgcactttggttttcaagaagcccaaaattgcatttttgttcctaccaactaagcaaggcaagccaaggtatgtactggactcattagctgccttgattcccattatctggcagaccaaagtacgaacagcaggcagcgtgttactactaaagaacagagaagatttatcaaagttgacaatttgtccagatgcaagctcgaaaattctcagaagttggatgacattggaggcttctctctcattagctctgcagtatacataactgtcatcggcaaacaacatgtgtgaaataactggggctccatttgccactttacaacctctaattcttttgctagcttcgaattgtttaatcaacgaagaaaaaccttcggcacaaatcaagaataagtaggaggacaatggatcgccttgtcgaatgcctcttttgggaataatgggacccatctctctaccactattaagaatggtatatcgaaccgaattcacacatttcagaaccaactgaacccagtgagcatcgaatcccatcttaagcatcaattccttgagaaaaatccactcaactctgtcatatgctttactgaaatccaaactaacagccatgtaaccttccttcccgcgtctcttacgctttaagtagtgcattatttcataggagatcatgatgttgtccgttatcagtcttccgggaacaaatgcactctaattatcagagatcaactgaggcagaacatctttaaggcgattagcaaggaccttagaaaatattttatacaagacattgcacagtgaaattggtctaagatcactcatcgaagtaggatttcgcaccttgggaatgagaaccatatgagtatccttcagcccttgtggtagctcgccattagagaagaaattccgtaccatttgagtagtatcaggtccaacagtactccagcaacgttggtaaaagccaggtgtcatgccatcggggcctggagatttgtcggggtgcatttggaacaaagccttacggacctcctcattcgaaaccggagctagcagatttgcattttgcatgacagttatggtggtggggatattgtttataacccccgaagtatccacaccagaagagcaaaataaattctcaaaataagaggttataacatcagttagaccatcttgccaaccaatccaatcaccattagaattcttaagtttggtaattgaattatgttttttccgagaagaagcaagggagtggaaatacttactgttgtgatcaccatcccgcaaccatagttgtttcgacctctgtctccaaaaaaattctcgcttagcgtaggtctcgaacagctcattttgagcatcttgaaacttggctatggagatagcatctcttcctttcttccacagctggacttccttcttacattgctgaattttacttttaaaattgcccatgtaacactgcccctaatccacaagagcttttccgcacaaatcaattttttcagtgattgaattagagttgctaaattcccagctgtccttgactatttgagtgcacaaagactctctcaaccaggcattttttaatctaaacctcttcttggcaagggtgaattcaggtgcgcaaagggaaagaagaataggtgtatggtcactgctagaaatttccaagttaaataacctagcagaggtgaacatatctagccaattttgattaactacagccctatcaagccttacttcaacccaattagtcgtgcctcttcccttctcccacgtgtaggggtgcccaataagatcaagatcacacaagttgcactctgaaagagcagtattaaaaccttctataagccaactaggatattgattacctccctttttgtcttcttgactcaccacattgttcatgtcacctattacacaccatggataatcatattgtgcagcaagagttttcaacaaagtccaagtcttatggcgaaggcttctgttaggctcaccataacatccagtgagacgccaagaaccctttgtttcatcttgaatcttgacatctatataattgttagagtagccaagtaactgaacttcatcttgaactttccaaaggagtgcaataccaccacttctaccacaagcatcgacagttaggagaccctcaaagcctatagcacttttaactttctccagagtatcttttctactaagagtttcacacaaaaatacatacttgggcctcttttggattataata

SEQ ID NO: 98899 - DNA, 505 bp, Cannabis sativa
aacttacaataatataatgaattatatgtaattaaacataacaactatcattgtataataagatcacaattgtcaagattcatcacaataaaaatacaaacccaataaatatatttaagatttttaattagaacattagcaatttcgctccttgaatttaattttgataatattgaatttgtctcctaaaatatacaatttgttaaaaattctcctaaacttttatgtttacgaaaatacaatccttctgttagattatgtgatattatttcgtttaaatactgacgtgcctttgtaaattagtaacattgtcccctaaactttaataactatcaaatcacactccctcaaaataaaaaaaaaaaaaaatatatcaatattttttttcagtaaatcttaacgaattaatttagatcttaagaaaatattttaaataattaagaaaattaaaaaataaattaaaattttaaaattcacttttgctacgattttggtggtccttact

SEQ ID NO: 98900 - DNA, 1002 bp, Cannabis sativa
aaacagttttgtaaattataagtttagtatttattataaaaagttttaatttgacaagtttttcgagaaaaatctttgattagcaaggatagcactgtcattaaaaaaatactgtagcgtgtcttagcattcgagcgttacactaactatctcaggattagaatctattgacctaagatcaactaaatgatattgacttagaaagatataacagtaagtttatgatatcttttctactgtcattatcagtccagtctgatgtataatccatacatctgatactagcatattttgctaatgtcctggaaagaacattccacttatacaagtgtcagtgtaaatctagtgcactaataaatcataggactaagaactttgaaacatataatcatacttacttttcactgtgatgacatcactgtgattgtaaataactatatgttatggatttaacagaaattgtatattaaacaaataataacatgaaaactacatgtaaacttaaatgacttctaatcttctattgatagaaaataaattatattgaactgggttttatatagggcatcaaaacccaatagtcccttccatgttttgtttgtgtgttgttgattcttctattggtggtgcatttccaatcagttttctgttgtatatctttgtttaactaatgtgttgctcatttcaaagaagaatggattgttggttgttgttgtgttgctaaccacgctcacacacaatggataccttataaagttaggttctttcagttttagttctatgtagaagaataagcttggatcgcctttatcatcaatggttggtgttatcccaattttttcccacctgatgtggcatgtccacgtggccaacatccatgacacgtgagaatacaactctccaataagaagaacaagccatctactcaacacttcaaccaacgaggggtctgagtacttagaagggatgatgaaatgacaagcctgttggaaattattttac

SEQ ID NO: 98901 - DNA, 631 bp, Cannabis sativa
ttgtgttttaaaaacttcaaaaactatttttttgttctcatttctaaaaataattttttaaaacaaaaaacagaaaacaataccaaacatgctcttattatcattaatgtaatatcaatgcttcctgataaattctatgaccccggccaagaaggcctcagtctgggcagccgtggcggggtcactatccactgcgatcttgttgagatagaagatgtgactcatcccacagctcatcacaatctcaatctccttattcgctttcttcatagcctcgtagaactccatctccgtttctaaaagcttatccttatccgcaaggcacagcagcatcggtggcagcttcagctcctccaaaggtggcgctgcaggccccatcggacacgtcatcgggtgctccttcgtcgatcccaccggtaaagccaatgctatgaacttgtccaacatctctaacgtaaggaaaggagtttcaggctgctccatctccgaccggctccgctcgggccgaacgaatcctggctggatcgggatcgctcctgcaacccgaagcggcctcagatcctcctttcctgcccggacagccgtctcttgaactaaattcccaccagagctgtctccaattagaaaaacc

SEQ ID NO: 98902 - DNA, 516 bp, Cannabis sativa
atggtggaactcctgtgtcgacacgtttaacagattcttaataaacaaattaactgattacgatataaactatagagtttttcttaagtatatagatttttatatgatccattgggaatggagcattaatgttgagattatttattcccaaatctcaaagagtcaacaatatcaataatggaaaaccacatatatacataagctagatatatatcacattaaaaaatttatccaataacgtctcttaaatgcatgttttatttcgttaaattaattagccctagctagctacatccatatcaaaaaattgaaccctacttaatcactccacctacataacatatacttaatcactacaccttcataacatatacattagatattataagtagcaatgcatgtttgcttgtattagagttataattatttaattattaatttaaataataataataaaattaaatctaatacaatttaattatatttttaaatatataaaatttaatttaattttaa

SEQ ID NO: 98903 - DNA, 898 bp, Cannabis sativa
gtattatgcattacaaagttttggtaaccaaaatctaaacatgaaaactataacgatgattccataaagattatgtcaaaccgaattaaagttaaaattaagcctacaaaaacacataaatatattggtagaataataaattatattagtgaatagagttctcaataataacattactaatatgttaacaatgaaatattctatgtaggatgataacaatgtattacaaaagaagcatataaatatgtttcttttgaactataaaaataatagatacaacaaaaccacattttctcttttctttcttctcaaatgggaataattttcaccaagaaactagttgcaaataatctcactacctcttcaaatgaattcactaaaccgaaaaaccagagttaagacttggttaatgcaggagctttactcatctaaacctccttttcgcttctccatatgcaacaactcccatgacagtaatcgtatacccgccaatgccaacgacagtcaccggatttctgaatagaagtatggaaataactacggccacggctccttttgcgttgcctaatacctgatcacgcaatggtatcagctcgaaaaaggaaagttacaatgaaaaccgaaaaacagaaatgaaatgattgttggtttttaatgagacatcgaaaagcaggagccccaaaaatatattttcttttagtaaagggtctaataatttttcgtttttcctaagactcactcaatctcagggccgtcctaaatctgagctcttaaaataaatttagcatgaaaattagatatgaactattttcataacactataggggtactttaacaggccaatttactgattgtgaatccttagaaccttctttttagtcacttgaaagtgcgaaaa

SEQ ID NO: 98904 - DNA, 4427 bp, Cannabis sativa
cttgtgattattgttctgtcttctgtttcagatgattccaaatggattcaatatctctaactgagaccttggatggaaaatccatttccattgttcattttttagttaataaagaaatagagaaacattttcccttcttctttctctgtttttctctgttttcctctgttttcttcccttttagatatgaactccaataccaataccatatattgtgttgtgttcttcctcttcttcttatctttggcatttgttgaaaccaaaaacttggaatcagaatcgtctgtggtgtccgaatcttatgtcctttcgtgtggagctcagatcgaaagcacagatattaatggtagaaaatggataccggattcaaaattggtaacgccttcgggtgtttcaataaacggtacagcaatgcaccaagacccttctctaccatctcaagttccttacatgacagcaagaattttcacctcagaagccgcgtacaacttcaacgttcaaccgaagaaacgcctctggataaggcttcatttctatccatcttcttacaatgatctcaatccaaatgatgcatttttctctgtcattgcaaatggttttactctcctcaaaaatttcagtgcctcaattacagctgaagctttaacacaagcctatataatcaaagagttttcgtttcttcctgtccttaatggcaacctctcaatcagcttcaaaccctctccacagaaaaatggctcatttgcttttgtcaatggaattgaggtaattcccatgccagacatatttgagcctgccctggttggatccgaacaaggccaaacaatcgatgttcggtcttcgttggttcaaactatgtataggcttaatgttggtggacagtacattccaacaacaagtgactcaggtcttagccgtacatggtatgatgattcaccttacatgtttggatcagcctatggaataacctcagaagctggtaagagccttagtattgattatccacctaatatgcctgagtacattgctccaaggagtgtgtatagatcagctagaacaatgggaaatagttcagaaacaaatcaaaactacaatctcacttggacttttgaagttgatgcatatttcacctatgttgttaggttccatttctgtgagattgagcaaacaaagatcaatgagagagtatttgatatatttctcaacaaccaaacagctcaaccttctgtggatgtgattgcttgggctggatcaagaggagttcctgtgtatagagattatgctatttatgtcaatgacagcagaattggttgtgcaaaattatgggttgccctgcatccaactgtgtcatcaaaacccgaaaatctggatgcaattcttaatggcttagagattttcaaggtaaatgacacacatgggaacttagcagggcctaatccagtgccttctgagatgcgccaagaggatgaggtagaggttgacaccaattcacctccattgggattacgctacgaggctattggcggtattgctggtggtgttgctggtgctgctgctggtttcgccgttgtttcatctgtatgctttcttgtgtaccaccataagagaacaaaagataaaggaatggattctggacctgctaattggctgccaatctatggaagttcatactcatcaactttcaccagtaagagtactaataatagcagccctctttctaatctagcaagtctttgtagacacttttcgcttgctgagattagacaaggttcaaagaattttgatgagtcacgagttattggggttggaggatttggaaaagtttataaagggactatagatggagtgatcaaagttgcaattaaaagatcaaatccaacttcttcacaaggattcatggagttccaaaccgaaatcgaattgctttcaaagctgaggcacaagcatttagtttccttgattggtttttgtgctgaagcaggtgagatgattcttgtttatgattacatgtctaatgggactctaagggaacacttgtttaagagtgaaaatcctccattaccatggcaaaagaggttggagatttgtattggtgcagcaaaaggattgcattaccttcatactggtgtcaattacactatcattcatagagatgtaaagactacaaacattttgttggatgaaaattgggaagcaaaagtttctgattttgggttatcaaaacaaggtcttagtatcaataatactcacattagtacagtggtaaaaggtagctttggatatttggatcctgaatactttcgcaggcaaaaaataaccgaaaaatcagatgtttactcctttggtgttgttctttttgaagtgttatgtgctaggccagctcttgatgatagtttgccaaaggaacaagtcaatcttgcagattgggttatgtactgccaaaagagaggaactttagaagaaatcgtcgatccaaatcttaaagggtcgatgaacatcgagtgtttcaagaagtttgctgagacagctgagaagtgtttgagtgatcatagtgtggatcgtccttcaatgggtgatgttctatggaaccttgagtatgcacttcaattgaatataaatcctgaggctgcaagagcttttgtagaaagaaatgtgagtaatagtgattcttctataataaacattgaggaagaggtgaataaagagagtccagctgcccagataactaatgatttacacactattccagttttttcacagcttgtcaatccaagaggaagataatgcttgaatttttgttagttttttctttttgatttctgtttataggaacttttgtatagttggttgtaaaatatgatacctttttcaatgtcctcacattgaaaggaaaatcagaaacttgctgcatataattgtcaattgtaaataaatggttaataaataaaaccaaaattcaaaaggtgtcattgaaagttatggatctttcttgtcaaaaaaaatttaaaatcatcaattttgcatgtgcatggtcataacatgacattttccaaatctaatgttactgacaattttgttcaccacagtttctaactcaagacaaaataaagaaaatggaacttatatctctttgacctatagagtcaaaggtcaaagagaaaatttacaacataatcacagaaaataggtagatgaaaatatatcacaccattggcaaaggaagaaaagatgacaatgattctcaaaacttgggattttattcactcatctgttgaatttgtgggaaattttaactcagcaaagcttgacagaccttaatgaaagagggtacatgaaagagttagagtaagtgaatctgataatctggctgtttttcaaaggctttccaccattaactaagcaatcatcataggagagcctcttgaacatcattgggctaattattcttgctgaggcaaaccaaccacaatggagatgaatatttgaaggagcacatccacaaacacaagtgttgactatttgtactatgaattgtgggattccaggtgttgtatctctgctctgagatatgcttatgtctctgcttgtacaactacctgatttaagatcatagaacaaaaagttaaaacacaattatgaaaatggccaaaacaaaaagaacttgtcatgatgtgttttaccctgaaccaaaagctttctatggtttgagtgggcctgctcaaatttctttgctgttgtctggttgttatcatcaagaaatgaatgcaaagaactttctgtaaaaagaagacaaaaggaaattaagattatcagagaagaagtgaaaaggaaaggaaaggttaagaaagaaagaaagaaaccttctagtaatgacattgtactgccagaatgtgtcccatgattgcagaatataatcataagcataatgaagtagagaaaacacagaagaagagaatagctcatgatgggattctttttttttggtcaagttagaaggagaaattgtaaggcatgggggatcttttggtttcttatgtataacttgtttggctctttcctagttacttggtggattttttttttttttggtagggttgggtgaactcccaactgattgttttatacaagaatggttaatgttccctccacaagactaagtaagtacaaaataagacagttcaaagaaaaggtttaggaaagaggaccacatcagctaggtaagtttcaatcttgacagtcttctttttttatcttgtttcactgttttgttccttattacttatcaaaaaatttgaattgacaaaaaatcaaacagttggcattcaatatcaacaccccaaatgtctcaaaagcttttctttttccatgactaaataaacaaatgggtaaattggtaattcaattcaagtctatatatctttcctcct

SEQ ID NO: 98905 - DNA, 916 bp, Cannabis sativa
aaaaagaaagggatgggtctctatcaagaatcccttttaaaatggagaaccaaacaaagagggtatgatgcatgaacagtaattattggctgtgaccactgtcctatcttaccaggcactacagtcaaattaatgtgttttatgcttcatcttcaaattactactttacccttcaacattacttcaatttcattcaactattcttcttgataaagaggtatttcatatttatatctcaaacacattgtaggattttagggttgatttatatatatataaaaaaaaaaaaaagagttgaagttttaaatttaagattatttcacatcaaatatacaaaaataataaagaaattataaaaatatgattttacgaaattttaaatattttacgatttttataattttacttacagaaaatacgattttttttatgtagtactcttgttaatttgttgttaattttttattaactatattttatttttgttgtacttttatataatttttttattattttcatattgtttctatagaaaacaataaaaatgtaaaaatataaaaatataaattttttataaaaatagtgttttatataattatcccttaaaatttgttcctttaaaataaataaatagagattgtttatattaagatcacagttttattactagtttttttttttctttttggtaagatacatttataaactttcagttataatttttttgtttatgtatgtataatagaaaaaaaaaacaaattttagaaattgagagtcttgtataataatttaagctgcctaatatttaagacgatgcttgtatgaatttttgtatttatttgatttatgagaaatatattttgctgaatatacaaatgagacaatgtaaaatatatattatctattaggttaaata

SEQ ID NO: 98906 - DNA, 618 bp, Cannabis sativa
ttttaatcccaaatcactctaaaataagtccaaatatctattttgtcaccctttagttttttaagaaaatttacatttaacacttttaattacacctagtttacaattttgacgtaagcttttttattaccacgtattttgatcacatttgacaaagttttccaagttttataacgtttttattttatttattttcctctttttcttttagcccctcgtttcctctttcttcatttttttctcttttcatctttctctcttcttttttacttttaaaataatttctggccacattatttttcggttaaatctaaaaaaaaatatcattatactaaagcatatgttttctttttcactatttccatattaaagaaaccattaaattacttatgataccaattatatactaattagttactattttataattagtttctacaataagcttaaagtaatcaaaaatgtaactttaaaacaactaattagcaatttaaatgtttataaattttactaataagttatgtgaattttttttttactttattataacttatgagtttcttaaataaatttgaaggaaacataatttaagttacaaaaaaaattataaaataaata

SEQ ID NO: 98907 - DNA, 539 bp, Cannabis sativa
gtttttgaaaaatatttttactatccacttttaaaaatagaaaactgattaaaaaaatgttaccaaatcaccatagggaaatcatgtaagggtaatcatgcaaaggtaatcaaatacccttatgtaaccagaaagataactagttaccataaagggtaaccagacaccttattcggtttttttttttttaatttcctacaaaataacttttttttagaaaaaaatatatttctacgaacttatattttaaaaacgataaaatagaatattcttcaaatttttctttcataacttgttctgtttcattttttagcaaaaaaaaaatagtatttaattgatgacattatacaatctctctaaattagttttaaaaattaatgcatataattaaagatctaatcgaaaacttagagattatatataatagttgcctatttagttttatatagaattgtgattaaagtattttgaaaattggacgaaaatggtgaagaacaaaatggtataatagtatacatatattgaaagtagtcattagg

SEQ ID NO: 98908 - DNA, 1271 bp, Cannabis sativa
gcacttatttccagtttttatatatagattgcccttcacttgtgtgctagcagacttagtaagattttattcaggaagagaaaaagaaaaaattgcatatgatgggtcacagttatttatatttatttagcttgaatgtttctcgagtacttgtttctaatatttggagtgtcttacctacaagggaacataatttcttaccttgcagtctgagaagcgtaaacaagatttactatctgaaattgtgttagaggaacaacgtagcagagagctctctaagatagtgaaggaattgattccagaacccaagatcagtgctgttgtagataaaccatcacgagcaggaacaagaagggtattttttttccttcgttctgctaattacaaatatttggttgtgattttcttgattccctacagctagcttgtttaactggttccgtaatattctgttctcggccaaagggaaatgattttagtattgactgtattttattcaacagaggagtaccgacaaaggtaggatgtcaaaaagactgtcagaggaggcagagaaatacattgaggacttcatttcaaatgttgaagatacagatatatcatcactcgacggagaaagaagcgacacaagttcaagtattggaggaggaatatcaattgcaaagacacgaatttctcaaaatcctgcaatgtcaacacctcttcctattgactcggatggagttatacttccttggttgaagtgggagactagtaatgatgcctcacccattttaggcatgaataaaatggagtccccaataactccaaataatacttcattcaaaactgttcaggtaataacagaactgcttatgcaaattcttgtgacaattaagtcacacatgcattcttatcgaataagatcattgttttggcttctaaaagattggtgacttgttcttgcaggaagtaagtaatgaacagaatccacctagtcagtcagccagtagccgagggagctggagtccagcgattatggcttcacttcctatgaaagtagtagaaggcaatggaaattgtcgacggccatcatatccagatggatcaaaaacaaatcagtttgacatggaagattatctgaagcttcaaagagatgaagatcttctctttgagagatttagacaacaacagagagttaattcaggtggcatgtttatatgtaaccgaatgtatttttagaagtaggaaagaagtccttgaaggagttcattttgttgcaaactacacta

SEQ ID NO: 98909 - DNA, 500 bp, Cannabis sativa
atccgattggaacgtagcgattcctttactctcgcctctcgtttctccatcttctcccaagacgctagtcgatcggacggtggagaataaatctagagacgaccatcatcatcttcatcaccatcagcgtctccgccagagtagcgagtcggagaagccgatcgtcttcaaaaagtggcagcatccggcggctcctttctgctacgactctactccgttggtccggccttttgttccagtttagaaagaagaccatgagacctagggtttggtctttctgtaaattgatctttgattatctttgacgaatattagcaagtagatctaacgctgtatgtttcaccatacttcttcttctaacagacacaactatttttgagaaattgtacacatgaaaccattttttttcttttaaggctattatgcctttttttttttttaatttattaatttcattattaggaagtgaaatctaaattgtttaagcagaaaatttcatt

SEQ ID NO: 98910 - DNA, 753 bp, Cannabis sativa
tatttatctttgtgttaaattatctaaactatttttgatctataattttgttattatttttaaattttataatttactgtctatgatgtgattaagtgaatttgtggtacaatattttgtaatttacttattataaatatgattgaacattatttataacataaatgctaaaagatatttatagtgcctaatatttttgtgagttgtaatattgctattagttaaatttaatgtcgggttttacttattttattttaataaatattataaaaattgctaaccatcgtagtgctaagtaccataaataccacgtagcaatcctcattatatatatatatatataaataagtagtagtaccattaagtcattaatcatgttgggtatcaaagaggcacttagtttgatcaaagttaaaaattagaaccatgttgtggtcgagacagatagtttagtcacagtccaaacgatccgaaattcttaatcaatggggtctacttttggtttgattattcaggactgtcgtactgctttattatctttgcctaatgtccatttgtattttgttaaacggtcagtaaatcgtgctgcacaatatgttgctaggcagtctcgattttatgctagtagtagcatttttgattttcgaattttctctgaacttcagaatatcgtattcagaatactaatttatttaattaaaaaaaaaatcattaaccatgagtcacgaagtctaattttctctatttatccaa

SEQ ID NO: 98911 - DNA, 910 bp, Cannabis sativa
agagctcaccttaaggaattgagtttgtgaaaaggtgaaggagaagctaagttgggcttggaagcgccgagtccagtggacttagaagcttttgaagcgaaagctgcaggagaagaactccaaagggattttgcagaagccgacgatgctcgtagggtttgcctcacacagttagccgccattgtttgctttcttcgatttcgaaagcttccctccctcggtcgcagcagagatcgacctctcgctagagaaagggttctttatgggctggacctcgatatggatcaaagtccactctttctttttgggcttggattagtataatttgggccttattatcagggttttgatgggcccattgccaattccatggactccttggggagtcataagtggaaaatggccaaaaaaaaaaaaaaaatggtttactactcctcattttgtaaatattttgcaaataataatatcttataatattaaaattagaaaaatttacatgaattaccagaaatttgaaaaaaaaatataaaaatatatcaatacagattattttttttttttacgctttgaactttttatttgcaaaaatacatcttcaataaaaataataaaccactgttttgattattttatagtttatttatagttatattataactgtcataagatttttttttattattattttcggttgttttatagtttatttattgttatttatccttattttttagttgtctttttacattttgctaaacaaataaaaactttaggctgtaagaaattgtaaataaaatataaaaagggtatttttaaaaatttcccttaaaatgatgtgtccttacttttttttccttgctattatttcttttctcccccttctttatgctaccaaatatagattaattta

SEQ ID NO: 98912 - DNA, 1717 bp, Cannabis sativa
  modified_base (174)..(185): a, c, t, g, unknown or other
aaacaatattatgtaacaaaaattaaagaaaatgtgtgagaggaaagaataacaatgtatgtgcacacttagtggtgataataaatttttatcatcatagtaaaatatcttagaatgaaaattaactgcatatatgagaacttgacaggtaaattattaatattattattattnnnnnnnnnnnnattattattattattataaattactttatattaaaattataataaatattcccataatatcgaaaatttgttaaatgatggtgtattatttaaatatctgcacaatgaacgaataatagcatgtaaatgtctccacaacagtggcttttagtttttgactggaataataaacataggatatttgttcgttgctcactcttttaaggttttatcaataataatagagccttaattatgacggtaaagacatttctacaattgataagcataacatacaaaatcttcttattgtgaggcaaaaattaaaattttacatcatatataacacaataagtacattttaatatttagatcaatatgagtggataaaaaatacctgatttcgaatcaagtagaacaatagcagttgacgttgaaaatggagagacaatgaccacaaatcgtattgaaaattggataaaaaatgaaatgaaagactgataaaataatatgtgagagataagtgaaaaaaatggagaactgaaattaagtataaatatcataatctaaaaataaatttacattatcatagtaaaatatcttagattaaaatcattttttttcacaatataatttataaaaatatttcttcaatatcaaaagtttgttaataacaagtacaaggttcaaattttaaattttaaatatattttataaataatgacaccaaagtatatatgatattaattttattttaagaaaccgctcctcaaactcaggaattgccagtgctaaacgaaatgacaatacaataaaaaaatacagcaagcatattccaataaatttcagatatcaatccttttgcattgttaaatttcggttgatattcagatatcaatccttttgcctactccacacataaaaatcaaatttgtcatatataatataataagatagaattcagtaaacatgaatacattcttaagtattaattatttttgcgggtaataaaaaaaacacatgaatacatatatgcaatagaaaccaacttctgcctgcataataaagctattttataagctgtgatacattgaatttaattgactaaaaaaatcaagtttaattacctgtaataagaaaatatcaccatgaacatcccttggttttacacctatgccttccaagacatttgttatggcatgaaaggcatatcaaaaactaaatggtttagtatctaacaaaaaccaaatggtttagtatctaacaaaaaccaaatggtttagcatcagcggggtatgatgccaatgtcattgcctacaaaaaccaaatggtttggtatctaacaaaaaaaaaccgtgtaaaagtgaagtatggataggtacttcatggtgaaattctctcttacttgaaggataatgaagactgaccaggttacacaacctgatgcgatcattaccgcgcccttaaccgaggcttcattgtcagtatcttgtgtagaatcatgatgaatagttgggtttgcccatggcagattcaacattggtccattgtac

SEQ ID NO: 98913 - DNA, 602 bp, Cannabis sativa
cataaaatccaattcaaagtaaaattaccttgagaagcgaccattatcatttatcatatgcattatcatatactcattattacaatctcatttgcgctttaaataatacattatctcaaaaaataccatagtatatcaataatcagctaatgaggaacaaaaacacactagcacgtttactatacagtattcagaatcggaataaattaatgaagaaatgtaatggaataaatggaatacaatcggaatcaatatttgtaatatgttgtttactaaattttatggaaatagaatagttgtgattaatcttgtttactttattatgaaacgtaatctgaatgcttagattgattaaattgcccttttgacttttttttttttgaataagtgttcttttattaaaaggagcaatcgctctccaagatagacataaagttcaaaggaacactgttaatgggaaacatacattcagcgaaagtaacagagtgccgggcaacaaagtgcgcagcaccgttcgcagaacgcttaacaaaagaaattgaaacattgaccaaatctttaagaatatttttgcaatcttcaaccaccaaaccgaacacaga

SEQ ID NO: 98914 - DNA, 692 bp, Cannabis sativa
tatatgatctagcggggcggggtgggaaagatccttacatgatctggatcaggtcggatcatagccggatcaaatccgactcgacccattgacactcctagttcaaacataccatatttagaagcctgatggttctctgattgtatcaagacattctttaatcaatgatattttttgccactattttctttttgaggttttccccactgaatttattagggtcaaattttgtaaggtttttcccgctaactttattcgagtttttagcggctaaactctctcaattattgtttcacttaaatttaactttttacgtttaaattttagtagtaaaaccctctaaattactgaattagtagcaaattaagatctcatttagttaaaaatgagtgcattatacacatttttttatgtattctataataaaatagttactgtttaaatttagtgtacgtgcctcgcacataactttttactagtataaatatatgtatatattatttttatataaatgaaataattataatatatatcttcatatatatatatataaaaaattaaacttaaaattattccactgccaaaaacataataataataataaaaaaatacatccatacacttatatttgaggagtgcggtataggttagaactagccaatattagctagttaaattatgttggactcgtt

SEQ ID NO: 98915 - DNA, 506 bp, Cannabis sativa
gagagagagagagctaccactctattttttaatatacataaagcttaatctaaaaggttcgagtcaaggggtatgacgtatgaaccatttagctgactcttgtattatctttctttcgtttaccatacaggggttttgtctcacctaatatattacatacacatatatattcgctgcggctgttcatataaactggagaaccgcggtttgaatctggatataatccgaaccattataaactataactggcaaaatcgtttttagtggtttggtcaattcggaccgtttacggcgtaatagttcagttacggtttgtaataaataattaacggttaaaccggatcggaccatttatcataaataattaatttatatatattttttttatatatgtgactacatgtataatttagaatttttttgtgggtcaagttttttattgtacgaattttttatttttatgttatgtttgacttttgagaatatttttatatcattatttatat

SEQ ID NO: 98916 - DNA, 794 bp, Cannabis sativa
tgtaatattttaatttttatgaaatttaatatgtttatacatttatatttttttaaaaaaaattctaagcaaatgtattacactaatattattctaaaatcactttaattatttaagggttacataaatatggaaaaaaatattcttataaagaaagatacctcataccaaatgatgatgtgtgtacgagacatcataaaggaactttgtattgaaattttaatagaataaaaaaaacaagttatatgcaatgaaatgatgagaaaaaaaaattgaaaaaataagagaatggccaaaactatggggtgcagaaaactaagttgagtagagggaaattagtaggtttggaatggcataatttttttcatttcttaactaattatgcaaggtgaccactcatctttatataactcttaactaatcttacactaaattactaactagtaactaaattactaagtagtaactagtcttaattgtaccaaaatttcggcagcataacagctataattgaacattctccgaaaaaaaactattaataacaaaaaacacaatataaaacaattacaacaacatttagaaatataaaaaatttcactcatccaaccgcagtacatgtattcgcagaacctacttcactacggatggatatttaagatattcaaactcatctaacatgcaaattattctacccacccgaacgcagtacaatatattacagaacctacttcactatgaatgaatatttaagatattactggttatataatttatgagtaactagttagtaataa

SEQ ID NO: 98917 - DNA, 1183 bp, Cannabis sativa
ataaactgcgaaatggcctttcgggacatcaaaaacatttgatgctcctctgctcgagtttgacaaagatcgtcgtagaaatttcttagttggtgctactcctggcaaagaaaaacccattatgaatattggagaagaaaattgtacaaagaaaagattatagaaagtgggaaaaagaaatgtggatttgtttggctattggatgagtagttgagttgtttggttgacacaactaaagatgctcatatttatagtaagttggaatacaaaatcacatggtattgtctctaagtacccaaataatagtcaatggataaaataagcacacactctagtaccccacaccactaaccttgtttataaaaatggtagaccctttagagaataatatatataaatatatatatataatcaatcatacagaaaggtactattatctactacattaaatgaatgttgtaggtactaatgaagaaataattagagaacattttcgaatgatgagagtgagaaatcctctccatgcttcttatcactatattatatatgtgatttggaaattaattgattaaataaccttttataagcaatttaatcaatatatgtagtttgcataaaatattttatatagataaattaggctttacagttattaaatatatataataactactcgatcgaatattagaatattatatgtattatatatttgacaatagcatatatattgatttggaccttctttgttgatacagctcaataactactaattaatatcattattaatttgacaagaatatgtatgaagatttttttgacaagactaatcctactcatcaaatatttctcttaggtttatatatatttataatttgtatataattagtctttttcaactttgagctgttgatatatattaatttataatgtgctatgtatatatagtgtgcatgaggaaaagggtcaaatatgtgtatataaaattgaagaaagaaaatatttgcagcaatatatgtattatagagatatatatatatatcacacatgcatggacatgtgttctgactattactgaatatatggttcgagaaagtgaaactgagaagatttgtacagatggccacttcacattttgatcgataaatgctcacatgaaaatcatcagcctttgtctttgccggat

SEQ ID NO: 98918 - DNA, 587 bp, Cannabis sativa
tcttgccacacaagagttttgatgagtggttccatgttttgcttaaaagctttgagattttgttcttttgcattatctatcctgacagatttgatattttgtttgtagtggacattgacaaaagtgaaaaaaaaaattaaattattgttggggcatctaatttagccagaagtaggtatatccatgtgtaccttcaatggtcatccacaatggtgagaaaatatttgtatccttctgtagaaggaatagggtatagctctcagatatctagatgtatgagatcaaatattgctggtgaaaaattgttgttggacacaaaaggtaatttcttttattttgagaaatggcaagtgggacagttatgtacattagatgcatcaaaagaaaattgcagtcttttattcaatttatttgtaattaatacagaagggtggtcaaggtgtgtgtgccattagtttttgttttgtacattacaagagtctgttgtgtaggcttgatagtggattgtaataagcttgatctgtatagtgtaattgcagaatttataatgacagtaccaataagtttgatatgtacagtgttaccat

SEQ ID NO: 98919 - DNA, 684 bp, Cannabis sativa
  modified_base (297)..(303): a, c, t, g, unknown or other
  modified_base (422)..(425): a, c, t, g, unknown or other
aaggccacctaggatttattttactgtcttgtaacctctttgtaaaattctggttttacagtgaatggttaatatggggtttacttcaacagtattctctcctataaactttatcactttgataagattgctcgtctgaaaacttgtaggaaaatttgtatatatattaggataacttatagggcaattttcatttatatacaactaaatgtataatattacaaaaaatatgcaaaaaaaaaaatataattacataattctatataattttatgaatatttacaaataaacatatannnnnnnaattttaacttgtttattactttcaattaattttctaaacaaaaaaacgcataaagctaaatatgtaaatataaaagttaatatttattatttgatatattactaaaataatatgtttnnnnaaatttaatatgaaattaaaaaaagaatatacaaacacatttataaattttatttatactttatgaacaatgaatatacatatgtcactacaagatatattacttttgccagcacagtttgctactgcgctggcaaagaggtcaaactttaccagcgtacatttgcattggctaaaatctaacttttaccagtgcatttacgcgctgagaaaagtcatttttgccagcacttttcattttatgttggcaaaagttctaa

SEQ ID NO: 98920 - DNA, 11596 bp, Cannabis sativa
  modified_base (58)..(61): a, c, t, g, unknown or other
  modified_base (245)..(247): a, c, t, g, unknown or other
aacttataaaaacacagtaaaaaagtaaaaaacaccgcctggcagtatttttgtaaannnntgacaaaagttagtatactatgtaaatttccatattctagatccttggtagcggaagtgtcaattatataagtcttaaaataatgtgtatcatgtaattaacgatacataactattcatcacatcaataaattataaaaaaacacatattgggctcgtttggtacgccgtataagggtcgtatnnnattaaataataaataacattatgtttggataaagcaatgtattgtattaattattacgactaaattttttaatacaatgtatgttgtattatttaataaataataaatggtccgtattaggttgtattataatatttacaaaggatttggggtcaacaacaatctttgacccggacccggacccaggacccagacttggacccaaaacccgaacctgaacccgaacttggaatccggacccaggacccgaacccataattggtgttggaatcgagtgtattaaaaatatattataactttacacaatcatttaatacaagtcaatatcaaacattgtattgtattaaataatactaatacaatacaatacaacacaacacaatccaagacaatacaatacggcgtaccaaacgagcctattatgcgtaaaataataagggcagaagagagtccccgtaatgggttcctatttataggatcagtttagcacaaattttgaaaaaaaaataattgtatctatgttgcaagaaaaatcagttgcagctaaactatggaaaaaatacgagtcgagtatttagtaaattataaattttaaagtgttgcaaattgttaagattctataataataataatggtattattatctagttcatataatcataaatatataaaagtttatattatacaaaaattttatttttatatttttatttattattttttttcaaaatataaatttatatgcatttgataaaagtaatttatagtacttttaaattatatttttattaaatgttaaaaaaatagaaacttaagtataagtctatgatatgttaatataaaaataaaaataaaaaatataaataaataaataaatataaaatatttttttaaaacaatataaatgtttaaaaattcattattttattataattatttattggaaaaattgtggtaaaagtctccaaaaagttcactttgatgcagagaagtccccaaactcgaaaaaataacggtaatagtccccaagctcgacattcttgtagtccgttggtcttctttttaacaaatttgttaatttttccctaaaatgtcacgtgttgatattaaagtgcaacataagtctcaaaaaaatttattttgatacaactaaatccccaaaaagcttactttgatgcacataagtcctaatctcaaaaaattatggttatatttccttactcgatattctcgttagttcgtagatactcaatttaacaactctgattgtagttcttaaaatttccacatgtcaaaagtttattagttcacaatataaaaattatttaaataataaaaatattattaaaaaattgaatattttttttcattttcttttattaaagacttaaaacattatatatatatatataaaaacttctataatttgccacccaccattctcagtggtggaggcttactgccgataagtgtcatcccttcatctccactatatttctcatcccaacccacaatcccatgcaaaaaatccaaaaaagcaattaagcaaaaaaaaaacctaaatacttgcacattgctccgaccctctccctgaatctattccgctagcccccgtcttcggtgggtggtgggttttggcggtcttttttttttatcttagcttctctggttcaaactttacttagatttttttttagagcaatccctcttactaatacaaattggagagttttagttgagcagaccaaagttgtagattttgggctatgagtgaattagaagaagaagaaagataaaaaaaatagaaaagatataaaaagttaattaattttaaaataatttattttttatttttatatttgttaaattaatttaattgaaattataatttggaccaataaaaaattaacacatgatattttttggaacaacaaatggagtagttaaatatagactaacgagaatcttgagctttggctgttatcacaattttttgagtttgaagacttatctgcataaaaaagaattttttaggatcttatgccacaatttgatctcaacacggatattttagggagaaattaaaggatatgttaaatagaggatcaacgcacttataaaaatctcgagcttgagaattattacaattatttttcgaaattgaaaacttatctacatcaaataaactttttgaaagttttcaccgcaattttttcttgtttatgtcaaatatttttttactgtttgtattattaataaataagtatatatattttagtacaaataaatttattataatcttttagttaacaaaacttttttataaaggtttggttgtactaactttatgttttaaatgtaatttttccttaaattttttaataagctatttttaactatttacaaaacaccctttaatttctctaaatgctgtgctaaacagagtaatgcaggggtagaaaaagaatgtctaattagtacacttgacaaacattttttttttctatttctcctttcattattattattactacttaaacaataaacaccttaaaaagggtgtcctttattcagcaaacaaatccccctacaacctcttggttgggaatcaaatttcccctacttcatattattggaaaatatgttttaggaaaattaatctctaacttttttaaaaaaaaataaaaaataaaaaaaaaacaaaccaacttgcacatgatgtttcttggcctagctagctgcggtctaagaaagattaacaactagtaacaagtttaaattaaggtgagattttgttgttttgacaaacttgcttcaattgacttttaagttctcaagttcccacacacaaacacacaactaaataataacaaaatagctagtaataaaaaaataacactcatgcagttcgtgcgtatgtcaatagaaaaataaaagaaaaaaactaaaagagatgatgaaaaaataggttgctggagttgactaaagatgggttagtggacaagggcaaaatcttggatcttggtcactcgaaattaacattaacaataacataataacacattgttgatttagcaacataacacagcacaagccccattggtattccaatcccacttctctcaatttcaacgcccaataaaccttctcacatgccaaaactattattctctttatatgaccaattctttcttgagttaattcatgagactaacaccatttactttcatcttttttttggttgaggtgtgaataacacatgatttttgtgacaataatcaaagtttatgattagagtcaaaatgggaaattttagtgtgttcatactcttttatttttagcaatgaattttttgtgaaaataaaaattaaaaactaaaattggggtcaatgaggtgatcccaattccacgcacaaagaatgtgttacatgtctgtttctttgctgtcctattaaatgtagttgtctattggttcagactgtaatatttcatgaatatgaaaaccacatcttcattcttattttatgttattttatatttagtttgcttataataatagttaacttttcaaagtagcatagggttaggatccccttccttacctcacgaatctttgtctgctatacccatttctataatctcttagtttgaaaaaaaataaatattaaataaccaaatatctttttgagttgactaacaaactcattaaccatatattaatttacacatcccaaagctaagttagtgttataatacttcatttttgttcatgtaccagtatttgcggcaatttcataggccatcaagactggttgaaaattcggaaccagaaaatagtttaaaagataaattattatatacataaacagatcctagagcgaccaaaaggtttggaatttaatatgtattatccagatatattgggttcacttttaaaacaagacaagagtttgtgattagttgagttgagttgagtagaccagagaaaaagtcaagtaacaaatacaagggtcttgatattggtgctatgacctcatacactctattaacttcttcaatatgtatatactggtaggttattacatgcccaaatgaatgcacaatttcagtgactttaaaaatataacactgattaagatacccaaagatatttatgttatatggtttaaactatttattcatttatgtgtgataagacttgatttgccatcatagttttattgacaatataataatgttactataaaaagcgtgtgaataaagcaaagtgaaaagaatgagaaacatgaagttaaattacaaggctagtttggttctttttgtgttaacagaacataaagtatttacataacacaaaacattagagacaggaagttgtttaaagaaaaaacatatgaactttgttttctgggaaattaaatcatcaatatccaaaatgaaacaagtcaatcttatcccacaaatttttgttgtggaataaaaaaaaaacatgaaattataaagactttttaagtcatttcagctgtacaattcaaaggagagtttctcatatgttcctaaagtttcactgcctgggatccgtgaggatggttagccttcttactgacttcaaaaactcactgccacaaaagaaacaacacaaatgcaaaattattagaaccatcacaatgaggactcaataatgtaaatctgaaagaagatcatatactaataagttatgaataagataatacctgaagggttcctctccggtttgtttaacagaacctgttgcgtccaggtatagaagatttttaaaaagccctgaaacctgttctataccaaacatgtcacctagctttctgtacagttcttgatatgaaccaagaagagagagatcaagggttcttcccacatcatccgattcaatgaacaccttgcagtgaccagtctcctgaccatgaagttgatcacttctcccatcatgatgaaacttgtaccagggtgaccttccatcagatgagttcactgttgaaccagagccattatcagaatgatttgctgtcttgtctaaattcccctcagatgaactgttttcaccagaggaactctttgagagttgttcttcagtcagtataacctgtccaaacaataacaactgaggtgtctttgtttcctcatttgccttcaaactttgattgggatgccccatttttagccagcaagaaatattctcactgttctcggtgtttttcatgaaaccaccacttggatttttaagaggatcagagatatccaacttccgaagaccaagtggaagcattcccggctgcagttcatttcggtggaggtccactggatatggcccaaattgagcatgcctggctccctgtatgcctgcaggaatgttgtcttgaatacaatggaaggggctgttgaggaagttggtgggaagtaatggcataggatggctaactagagcaaaatctgggttctgtggaagccgcatcttctttctaggtggtgagaatggagagacatgcatgggcatgcttgagaccagttcgaccaaccacggattaacacatttcacattctgtagtaaatctggttcgtcccatgtcacctaaaaaagatgtattaaaatgatctttcagtaactcaaaccaggaaaatcacccaattgaaacctgtctactagaagtaatactactgctagaatatgtccaaaatgccaaaactacagacctacttaatgcctaatgattgcttgaaatgataagctactaagatgatataaaagcagatacaaaattcaactgtcctttgctaataactgtcatttgttttaaatagagttgaaaaaagtcatcttcatattagtttcaaaagttcactgatctaaattagggacaacatctttctaagactgaactttacacatgtatccaaaggacaacatccattgtaccacacaacactaccaagcaaaaacatcaagaaaagaggcacaacatagtccagtcctaacagaaatgaaataaaattactaacctgtaaaagacgccaaggagaatcaggccaacggattggatcctcaatctgggcattagaaatagtacccatgaaccagcttattcgagaagaatcctcagtctcaaagggcatcttgaaccgcatccctgagcaccacctgatttgcattgcagccgttacagccggggctctaacacaaaactccggggtgcttgcccgcggatagtacactacttcaaatggttgtcctctagctgcaagagttgcagcttcaacaacagattcaactttcacttttccccttgcatctctcatacctggttttggcaccactctactattctcatattgagaaccatagtttccagctaaaggattccaagcataagggtactcatgtccacaaccaacccccttcttagccctccttattccaacacagagatcaccattatcagccctcaaaaacacaattgaatcaccagcaacaagcttcttttggttcacaaaattactccaaccggtagtcaaaaggtgccggcgaggggtacctctatagatatgtctaaacctccaagtctcaccatgaacatccttagccagaatgttctgaacaggaggcacagctgaaaaatccaaaggtggaaagatagtctcagcacagtaacgagggacagaaaaaccacccccattgttagcatcagattgtgttaaagtcttggcaaaagatttgggtttctcagaattctcaattccattgtttcctagatacccttcatcctcaacatcaaaattactgttgtcccttaaaggagtcaaccccatttttgcaaaaacctcatccgtttcaggatccgccatgaatttaatcgcagataccctacaaagaacgtgtgaaggaattctagaattcccaaaatccacattcccttgggcatgttcaacgtggccttgaggaaagtaaatgaccttagagttaatggaaggcatttgaaccagaggaccagcacatgcgtgccataactggggatccaaacacttttcaaaatccctcctcattggttctcttccagaatccattactctaatcatctttagctaaatacaaaaggcctcgacactgttatcataccaaaaatctatgtcagaaatcataacagaaaataaagacaaaacccatatttaattcgcaataaaagggcaatcaataataactactaaaatattccaaactaatattcagaaaaccaaccaaaacccactaaacaaaattcgaaaaacaaaatatatgaatgtttacctctaaactcaaaaaatcgaatactgaataactagagtacccagaaagcttcaacacatacaccaacaaaagggtcttctcttctcttctcttctcttctcttctagtctaaacaaacagaagcattttcaggaaacatgaccgtaaattcagagaaaaggacaccaaaattctaccaggacaggaatttatcaaaattccctgaaaattaaaatcaaagcctggagaatctttctggtaaagaaacgggtgtgtgaagaagaagagtaggttcaaagtgtgaaatgagaagtttgcctatatatatatgtgagaacaaatacatacgtatatattgatgatatatataaaaatattaatttttgtatgtataatcacagtacccgacacactcacacaccctaaaaacgatataaatcagtgaagcttcgttgccgaccagactgtctgtgtgtgatagtgagcaagaaagaaagggttctttatattatatgcattaacaaaataaacaaattataattacatttttaataattaattataaattaatttaaatttaatttaagcacagacttgcctgattttttttcttccttccttgttttcggatcgagatattgcatagacttgtaactaaaattcaagtgaattatttcactttctttttttttttttctttttttcttaactgctaataattataatattattattaatttctggttgttttcttggtctctactctccattttaaggcgcgtgtacttcgctcatactagacagacataacacaacaagaatatggcatttgtcaaaatactattggtgtcagatttggttctaatcatccggctgtccacgtgtcagattaaacataaatatatttagaggaatactactctcaacctgctgttacaatctctacgctcaaaaacatatatgtcggaatatttttttcaaattttttttttcacgggcattcgatatgtttataacatcattcctgtaaattttttaaaattttcaaatagtttatagtgtcgaaatcaaaaattttattttcggtattgcaaactatttgaaattttttaaaaatgtaactataagaaatactgctatgaaaaaaaaaaattaaaaaaaaaaatatttcgatgtgcgattttaaacgtaaaaattgactaaaaaattataatataagatgttgtaattaacactcctcgtatatttatattttgacaaatacaacaaactatactttttaattaagtaaattactgaagaatcgtttttttttttttttttgaatggactgaataatagttggttttaccattattgaacttattctatctctttctaatagattttgaaacatgttaatgtaaatatggatattgcttttctaatgaaagatttgttctatattgactccaaaccataactgttgttatttattaagatttaaaaaatattgtatagtgccttaggtgctaatttaatgctataaaagtgtgcacactcttcttatagaccaattacttgttcattgataaaataatactaatcatcatcatcattatgttatttaattaagaaaacttgatgctacctatgcttgtgtcaattcctcataaataattatgttaatttatattgaatgatccttatctatttatattctattattatgatatatgtttaactaatatttatgtacatgaatgagtaggttctgaatcagccttttttttttttttttgaaagatgaatcagcctttttagttgctacatttttctcatagtaaaattcctaattaagtaaaacattaatgtaagagaaggctattattattccttacaaaccaagcagtactgagtatttgttattattaaggatagaaaaaatattacatctatagagagaccaatacacctaattaaggtacatattacacaaacgcaatatacattttccatagtcaacgctcaaagccaacatataacccaaaaaaggaccattaaagataattagcgcgtgtgatacacgcggctcttaggttgtaacaaaacaaaataaaaaaaaaaaaacagaagcatctaattagtaattaagaggtaatagcagtagtgaaaaattagtaggtgttatattgagaaatgttaaaggtaccattagtgtttagtactttttttttatgtgttaatattattattggtccaattaaatatgaggtctcatataatttaatataatagtttggggaattaccatatatactatttttttaacttttttttaaatttatagtttgggtttctaaaatagttgcaatgctagttgcaataggagtttctatacgattttttgttgcaatttaaattgcagcggtagttacaatagatgtttctatgtaaaatttcgtaaaaatgcataaaaaaattattttaaagtgtaaaaatgaaaaagcacttatatttaggaagtatcgctagtcaatcacaacgcgatatgtcgagaaagtactaatcaccactggtgtcttatagcaatgttcttgttatatttcattgactaatcctttgttttaaaaaatatttagtaatccttgttaaaatagtaaattggaaaaagagagataatcccgaaattgatgagatttgagcgtatgaatcggcaaaatatatatagttagttaaaagggcaaaaaatattgtcagcgaagttggaggaccgctttgctgaaaaagaggaaaatgcttaacttaactgattacttaaccatggttagtgaggttgatgtgtccgaggccattaacccaattattgagttaactaaccacatttttagacctaacattaaaccgtagtcaaaccccattacatgtttgtttgtgtgcgttccttgtattaagtgaggacacaatggtaaaatcatctttttaattgctgtcttgggtgagtttaatgttgttgttggaccaagactattcaacaacactaacttcaagagtactataattattattgttaattaccattacctttctcattaattaggtaattaatttgatgtgtaattgtgtatgtgtttactgtgcagccactttcttactttctttcatatcattaattaccataattatcttttttattattttccaacaaatattagtataattaattatcttactttctcattcattttacacttttttaagagggtttgcaatacgaattgtgtgatttttgaccattttttggaccgcatcctaaaaatatacagtaaggtgagctatgagcggtttgaactaatttgtcaactaatttaataatcaaactttaattaaaattgcatcatataattcataaacaaatattataattaaagatgttcaaataaaataataacagaacaaactgttagatttattacttgtttgggtataaatttcgcttatttttagttggtgtaccattctatccatgtatagggatatctcctacttatccaataaatatatagaatatgttttattgacctgaaccctaatgtgatagttttcatatatcataaatacagcttttctctctatctctctgtaaaacctattatggtattaaacttttcaacacatccctaatcacgcttctgccattgtagctggttctcttgccgaattcaatggcacacacgtgcagcagccaccctcctcacgcacgaccactggggccacctactgttagctctcacgtcgcctctggatcaagatccacatctttcgtccactgctcatccagatctggttgaattgcctccatctcgtccttcgatccatcaagatccaccatctttcaccgttggtgacttctccgttgacgatcttcgtgttggaattttatgccctaaataaaatccatttcaatataatctgatttgttatcgattaaagattaaaaatcatttacgtttacatgtagttttcatgtttatggtttattatatacaatttttgttaaatccaaaacatatagt

SEQ ID NO: 98921 - DNA, 1422 bp, Cannabis sativa
gaggcggacgagctttgctccaccctgatttgcacccaccaattggagaagattgtgaccgtagctggcattaagccgtccgcgtctggggtctttcatcgcttgtctcagaatgaagagatgcccaatcaaaactacaggggttttgaagcctcgatccagacccatctcatgtctagagccatgcttccccttcaagactactttataaatttccttgtttttgttggccttgcaccttacaaacttattcctcaagcttaccgccttctctcaggcttatttatttgttatgtagcccgaggctgggcttcacctagcccagctgagattttatatttttctgaacttgtatttgtccccaagaattgggacaagtttaaagacgattttttcactccccgggcccatcctactaacaagggcccggtcccgtataattttcaaaagaatgttaaggagtaccggcactgcttctttctcacttccggcttcaaagccatggatcgcccagagcttctcacggagtgggtaaggatccctcctctacatcgcactgctgctacccagcttttcctctagcatgccaaggttttctccacttatgacagaaacggtcttaacgtgggggacttggtcactgcggagaactgccggaaagccaaagtcatctccgggagccaatccgtggacgactttaacctctccaaggtcctctgcccaaacattcgtactccagatgctgaaacggtgctttgggtggacatcattgcttcagcggaggatcagtactagaagtatctttttaggagggaacaggagttagcctatatcaaggcttaggctgctgctgggaggacccttcgactggaagcgggtaaagaacagacgccttcttgacctaagttgctggtcctggttcctaacacttgggctcctaatgccagcacatctggatccagtgcgtctcccttaatggttcatcatgttccgtctggtcaagattattctcggtgtaggcctataggatttgaaaaacgtcttcttagatttagaatgcccctacttagtagggtgatcatgccaagggcttttatttttccaacttaggtcatattctaggccggtcccggatggggtccggacctcctgcatctattctcctggatcattcagcttatctatcttccagctggtttctcccctcagacagctttcttggggatgatgaatccaatattgtagtacaagactttgctagggctgacacttaatttgttttcctactttgctttcgtgtgtatattttcttgtggccactctgacacttaatttgttttcctttttgaagcagccaaaccaatgaatgagcttttggcaactcttgcacagacctatagccctgactccgctcttcctccg

SEQ ID NO: 98922 - DNA, 602 bp, Cannabis sativa
aaaaaaaaattaaaaaaataatatatatatggtaattcttctaacaaatattaatttctaattattaattattttgttagataaaatattacaaattcacatatcaaattcatatctaaacgtactttaaaaagcacttattagtagcctcccaagggacggacccataagtaagcccccattaataaaaatattgtcttttaaaaaattaaatgtaatatttttaatttgataattatagaccaaaataatagaataggtctcataaaattaaataaatttagtaagattgattataatatatgtataaatatttttttaatgataaataagtcccacaaagtaaaaattctgggtccgtaactgaacccagattttcttaaatttaagaaaataattttttagagaatatcgctaattgtgaccaatagcaatggtggagttgctaaggtgtaaggtgtgaaatagaatggtgatgactcatcctgtgtaactcaatttgtattatgatttcatattaatctctttcaattctcaattctcaattctcaaaccaaccagatgtttctacgtctctctcttctttctctctctaagctcac

SEQ ID NO: 98923 - DNA, 2161 bp, Cannabis sativa
aacaattggatactcatacaaagacatttgataggtacttatttttaggtactctttttttctactagatttgtcattgactgtttaatgaggttatttttctattaaaaaaggtattaagctaaattcaccacttaaaaaaaagcctaaattcacaatttttcaagggaaattcagattttttatgtgctatgttttcatgctgttttattagcacttacgtgtcatatttgaagtctaatttatattcgttttttgtcttattctccttatacgtattgttattgtttgtttttttccttagaacaaattattctcatttaatttttttttaatagaaaaagttttattatgcaaaatttgtgcttttaggttgacaaataataataatttacatttccctagtggtaaaaacaattgatctttcttcttctttttgaaagagaaaaacaattgatcctagtaactaccattgctcaaagtagaaaaacactcattgggcaagctgtagactttataagcaatatctattaaaactcctattaaataaaagagacaatggtactgtagaagctaataatatatactttgcatcattaggatatgatgataattaattatgcattgatgaatgatatcattgtccatgatgagttgaataccagaaaggcattatatatatgtataaagtagtgccctcacattagtgtaaagttagtaattggtaccccatgccatgagtgacaaggactttaccaatatctatttttcaacttttcttaattcaaaatccctgatattaaggcaactcaaatcttctccataattatgttaggaatcaaaattatttcaaatttaatgtgcaccaaatcaaaaataagttcaagcaacatttagtgtcttctttgatcacttttgaaactttgcttttcaacactaatttttttgataaagaagtgagttgttaaattttatgaatgacaagtgttggtaaataaataggtgagtccatcaattttttttttctacaccttttccattaaaacaaaagggttaaatgggtggaagtaaaatggtgaggacaaattttaaatgtaataattgaagaggaaaatagatttgattgaagtgagttgaatgagtcataacaaattgactttacagccagattccccttcaaatcaaaacaaagatgggaccaatgatttcttggttttgccttaagcatcatatggtatgtctttatctaataattaaaaatcaatagaggtgacttaatttatgatgaggatttattcatgactagctttaatcacacccccaaaacaccaaaataaagaaaaatagtatccatcactgattatgataaatgggtattgggtagaattgaaagatcaactttgttttttttttatttttggttggaaaaagatcaactttattaaacccatgattttttttttctttttttctttctcaactcattgatcgagacatctcagatgaacatttagaaattcacattaaaagaaacaaacttttttttccaaaaaataaaaaattaaattagtgcctttagccaccaccactaggccttgcctcattaaacccaaagtagggcttgtttattatgaatattgttgtcaaaaacaaaaattacaaatattttaatataatggcatggtattctattcacctgggaaatctctagccttctctttttgtccatgttattgttcatgctcatgcagatgctagtgctactgatgtagaaataccctctgcccatgcctgggcgggatttctacacctcagtgaggaaggaaatttttcctgtcgcgacatgggagagaggggcactccaaccctgtctcctaattgtcatataatacaatatgaaagtcttttctctatccccttctattttctgttgtaagttttgaaatctttttaggagtgggaggcttttttacatccttttttttctaagtatttttcaattaatgaaccccgttgaagttaagaccataacagggggctttctgatacgaatgtgaggcctcctattaagtttacttatgctagaaggggtaagcaaggtaaattggcttaggagggggtattttggtaattgtctttagtagtgagctaccttttgtat

SEQ ID NO: 98924 - DNA, 1272 bp, Cannabis sativa
atagatttggagtctaaaacagccttgaaacctttgtaaatgagatcttcttctgctgatttgtcatcatcatcatcagtttcttcaactaatacagcatcgttgaaatactcattcacacaaactgcaaataataattaatgaataatattaatataattttaattataattattaatgtagtaatagtatatagtagtagtagtaccttcaattgatttggctatgcattcaagtttgaaaacagtgttattgtgaagatcttcaccagaccaattaggaaaaacaagtagactcatgagtaaacaaataccacacccaattgcaattgtgtaaaatcgttcatgagcaattttcaacacattatcaactctgtaactcgacacagttatcagattaaatgtcaacatgaatatcacaactccataatcaaagttcttctttatgtatggaaaaaatctcaagtatgttgataatcctcctgccaaaataataaaaaaaaaatatatacattatatttttcttaaaataaatattataatttgtacgtgatttatgtgtgcacatattaattaacttaccaataaggaaaaccgcggttccaataaaaacagctcgaaaaactcgacctgtttcggtggctatgtattccacaaagaatgctaatgatccagcaatcaaagttcccaatcctctgtttaatcctttacacaaagttgctcctaaacgacaacataaaaatatatgttattatttttttaatatatagtactttttattacgaaaaatatgaagaaaaaaaaatagaaaattataccggcagtgaattctagaacaacaacaacggtcatgacggcccaaatggcgttcgagccgatcccgtcgaacaaaggttccatcaaatatagcaacgaaacaagtgttagtgacaaaccaactttcaatgcatgaattactcttctcggatcttctttcccaactttccacatagtcttccacactatcttcggaaaccttttcagtttctcaacaaaatacctcattttcgcgccttttacagcactttttccaccacaatcttcactattcttagccatattttccacttccatgcctgcatgaacttttggtaccattttctaataataattatagagttattatacctaggtaacaagtattttgggtaggagtaataataatcaatgaaattgattgtataaaaacaatggtatatctatgttgaggcaaaaagaaatgggttatgggagt

SEQ ID NO: 98925 - DNA, 686 bp, Cannabis sativa
aaaaatgtaaaaaaaaaaaaatcagtaaacttaaaaatataatttgtttacaaaaaatagtgtctcatgtaattatcccttaaaattaagttagactttattgttacgtacatatgcatgcattatatatcaaaagtgaatactaatgatgatcattagaatatttggtagtacctgtgtatcattggattcaagcaaatgatactcggtcatcttccatagagttagttttttatctggctccataaaatctatagtctttttaaaacctatctcaatcttttgttgattcaagattgacttctttgttgcattaccatgccaagttccatttttttatttttcgattcaatctcttattattcttcgttgtggaaaaagaatcttttttataatataaataccactcattttcagtcatcgacgggtatagatctgtaaaattattgataagataaactttatgtgagtagtaaaattaaagaaaaactaatcaagaaaagaaaataaacatttttgtattgaattcttacgagtgagctcttaaggatgaaaatcacaaatattcacatgaggaatgtgattgggttgaagcaaatgagcgttgaaatttttgttatatagggttatttgcggcataacctccttaagtggtcaagtttttacaactaacccccaattctaaa

SEQ ID NO: 98926 - DNA, 1044 bp, Cannabis sativa
  modified_base (760)..(763): a, c, t, g, unknown or other
  modified_base (886)..(892): a, c, t, g, unknown or other
tggacaaaaaggtagtttccttttggtggtgtgagcactccttgggtataacataggggacaaagtctgtgattcagtggaatcctatgtcagagggatgtcacgtaggatgctttctagatgtctccgggtgcctcttcatttgtcctttttagattatcccatgaggatatctgaatatatcctgatggacctttcatcttctaggcaaaacaatctttcccggaccaaagtggtctggctttatcatgcatgtaagttgggctcgcatccgaatctggaaccatagcctgattttgatgtgggttgatcctttaacttgattgtgcctaggaatgggcccattctggctaattttgagccttggaagtacatatgtcattaatcaaaaaatgtgaataacaactggtaatgaacaagtcaaagaactcaaacaatataattaggttaaagcttaaccatcttatgattgagatcaattgattatgatcaactaagtgacattgagttagaaaatatatcaatgtaaatttatgatatctttttcattgttaatatcagtctggtctgatatatatccaatgcatcatatacgagtttactttgctaatgtcttggaaaagacattccacttagccaagtttaagtaaactacatcactgattatcacgccagtgtaaatttggtgtattgataaatctcaggactaaataaatttgaagcatataatcacaattattttccactgtgatgacatcannnnaattgtgaataactatatgttcgggatttaataaaacatatatattaaactgatgcgtgtcgtaagccacaatacttctaatacttccgattattttagtataatcgtaagtaagggtcgatnnnnnnnggactatgtttatttaattattcacaatttagtaataagattagaaaaaaaggggggtccgatgattagaataaaaaatagtagtaataaaaattaaagaaaagaacaaatttaaaatgagactacgatatgagaaactagttaaatgttat

SEQ ID NO: 98927 - DNA, 2687 bp, Cannabis sativa
aataaatatatgcatgagaagtgaaagaacattgtcctctgctcttggaaatgatatttttgatgtgatatcgggttgatactgagagctgagagtatgtaacattcgggtgaacacatgattttgtaaagcaatgaaaatgactttacaattctgctttctttcaatttgtgaccttacggacatcaagctaggcttgagaagggaccatggcaaaaatctatttgttttgtggttttaattatctgactaaaactttgtcctactgaataattagatttttttttatatatcggttggtctctggtctcttaccactagtgaatgggatgctttcattttaaatctaatatttgttttcacttttttgtttcattcagggctttgtttctgctgtaagtcacatgcgctcgtttgttccagctgtttatgacgtaacagttgccattcccaaaacatctcctccacctacaatgttaagactcttcaaggggcaaccatctgtggtatgttactacttcactaaagatttactaaaagatgtatcagtagtcaacttatattatgcatcccattgcattgcattgaacttgggttcaggtttttgggcatttaaaataattttaggactatagaatagatttattgacataaatagttttagttttcatttcttgttgcttgtctagatgattgttttacttattttgaatgataaaaaatgtcatgctgaactttgcaagtaacggtcccttcccactaaacctgtctttcaattacttgaaaacaattagatttctgagaattaatgtgacaagctcgaagtcatcctatcctcatcaataccaatacgtgctaattttcgcaccctttctgtcattcacacacatgttagtttggcattcataaattaacattctccgattcctttacattactttcctgcaggtgcatgtgcacatcaagaggcatgtgatgaaggatttgcctgaaagtgatgaagctgttgcacaatggtgcaaagacatattcattgccaaggttgataatttttaattcaacaaaaagtggatgtcttttcattctgtagtcctactacatcatataaaatttgaactttgaatatttatatgtatacacataagtttcggagtcatgcctcattcttctcttaacttttctgtatttactaatttatatgtagtttctgtaccattattataaaacaataggagaaattataaattgatcatcgtggctgttgtttattgaatgctaggattctttattggataaacataaagctgaggacacttttgctggtcaagaattgcaagacactggtcgaccaaaaaaatctcttgtggtgggaaacctttttcgatttttaaaatttctcaaccgttttacttttggtagggcttgttttagaagcactaatcaactttgtgttctttccaccaggtggttgtatcttgggcatgtctccttgcattcggggctttgaagttcctccaatggtcttcattcttatcctcatggaagggcattgcactctcagccttccttttggggttagttaccatccttatgcaattcttgattctcttctctcagtccgaacgttcaacccctgccaaggtggctccaacaaagaacaagaacgacggagagccttctgaatctgcaaaacaagataaacagaactaaatcaccgctccgatcccctcccaacattccttctgtaacagaaaggttcaaattttaaggtcatgatatgaaacttggtatagcatgtaaccctctcatgtatgtttgtcaaaggccttcttaccctagtgtgatctcattcttaaaaattattttccttaaatattatattatgcttctccccccttttttgtacaacatagacatagtgggtatgcatactttctttgctctggttgattaggttaaattttatagactctttaaagggtactgtagaattatttactgaattagcattttaggtcttgaaaagccacacctgcagcagttcttatgtatttcattttcaggttgaaagagtattataggtgaaaaatggactacttaaacttacattttctttgcagatttatcactttgctagaaaggtattataggtgaaacacacacacatttttggtagtgtttataatatttatcttggaaattaatttaatttagctattttgtaactatttgtttatataaggaagaattttttttagcaaattatggtaagaattagtcaactattgaaatgagattacaaacataatcacagatattacaacagttattcttcaagcaactatttctaaagtacaaactctattcaaagcttctcttgaatcatacaccttaactcccacaaaatactccattgactctcaaacactcttaagaatacatataaaattgtgtcaactcaaatgaatcaaccttccaaatgaaattaatgagacttgtataatgccacaaaactcccaacttataagcaattgataaattttgagaattatgccttttgctaactttttgaagtaattttagggtgaaattgtgaaatacaatctgatcctagagataaaaagaagaggaaattacactctatactctttttatattgtcctcttttatttttaccctctttttta

SEQ ID NO: 98928 - DNA, 515 bp, Cannabis sativa
ttatttttaatctaattgtcaaaaataacttggtcaaattttaataacgtttttatttatttgattatattttaatacgcttatttataccccctctctctcttttcttaccatttttcccttctcttacgttatttcttcatctccttcttctttctctctttcttatttatctctcttctctcaaactttaaaattaagttatgatcacctcgttactcggatgagcctagaataatatcattacgatttactattcaatgtgaacatttcaaaatgtaggaagcatatatttttttttcaaaaaaaaaaaaaaaccatttgattactaatataatgattaattaatgttttatatatttttttaaatcttagttagcattcattttagatttttgttaattgaattaattacgacatgctaattagctattaaaataacaaaaaggtatataaaataatcggtatataaaattggtaatttgttatattacatggcaactcattagtttcga

SEQ ID NO: 98929 - DNA, 546 bp, Cannabis sativa
tgtatccaataatctacacaacaacaacaagtaattagtgtcaagagtttacaaagtcaataactaactaaaagtaaatgctaaatatagagacagaatttgtctaaccgctccaatagttgaaggggccaacaatgccttgagatttaactctctaaacagtttcaccaaacgtagttgttttatccctgaactttctgagtcccccacctgcaattcaactcaagaagatgattaatgtgattaattgtaatttagctaaagattgatcatcattgtgtacggtctttggcagtactttttcttcacctgcaatgcaacatcctcaggggaaggaagtagtagtggttcttctaatgattccctcgaagacttgatgtcatttatacttgttgaagatacacgaacaatgttatacacataagaccataaatatatggctccaatctgaaaattcatcagtaatgatctgtaacactctgagagatgatgtcaaaaatgataaagcaaaaaagaaagaaacttacagccattgaaagggaaaca

SEQ ID NO: 98930 - DNA, 6928 bp, Cannabis sativa
agtcctggatatcatatgtatacttcatggaactaacaaaacacaccaagtccttgtagtggctctccagcctatagaaaccaaccttttctcaatggtttctcatattttgtgctttgataatgtgaaatacaagatctctcttggagttggagcagcctccttctttttgaagcataatgccaactctaaacaccaaaaccttcttcaaagcattggttcagtttttctcctaatacaaaaaattggttccaaaacagtcttggaatacttttgagccctctctgtgtctcgtacttctaaaggttgtcatatgtccagaacttatttttgtattgatcaatatcccatggagatgaatttaataccaatttgggagcaagagcttgctccaccttcaaaatatcttcatcaactaatctttgttgatgtctcgtacacatcatggaagctgaaaaaagtaccaagcagttagttacccgtaccaactaagatagtaagggcaaggggaagtcctacctaataactacttggaagagatccccacctgattcactatcttgaaacaaaatcctcaaagagtatgtgttcaaggtagctgaatcaggaacacaagaataaatggaaacaaacataattcaagcaatatctagaaccataagggttccagacaaggaaataaaattttgccagcatttcagcagcaaaatagggttttccaaaaaaaagtttaattcttatttagtctaaaaattactcaagaagttattcaaaacatcctacgcgtatcaaagacagaatcccggccaaaagcctaaagctatagttttcaaatcgaaaataaatcacatgtaattctcatatctcaacatgcaacacagttcaagaaattaacaaagaggaaatttacctagtgatgaattaggtgatgactctgaaatcaaatagagatgcggactgagagagcacacgctaacgtcataagacgattgtagggaaactctcttaatcaacggatcttcaagtcaatcaagtctctcaacaatggcattgtcctggtccataagcgagtaaattttagaactaatatccagattggtgacttcttccagtgctacagccaaaatcactaggggtgtagcacttggaaattcttgagcttttattcttagaagaaggaaaatacagaagttgatgtcacacaccagtatggtttgatttgtgaatgatataagttttgggttttcactatcgaaggttatggttttgaaatagaaaaattcaaaatttgatttaaggttttaaattgtcaaattaagaagtatttatactttcatgaagcgaaccgtgtagatatgagatccactgttgaaattgatcctccaaaaacacaaagcagattcaacgattaagaaaacccttgtccaacatttaatgcattgttctgaactgagacaaaatcacacgattatatgttgatcgtgtaaaaataagtagacgtcaaaatgcttgggttgccacgcacgcatcatcaattgaacggacacctcgcaagccaaagaaacaatgccacatcagatcctaaaaccaaataaatgaacgttgtctccatattcagtttcatttggaaaactataaaggtttcacctttagcctccacatgtcaacttatgtagattgaagcaagcttccacaatccacaacattccagaaccttgaggaaaaatgttattcgtgtttctgacaagggacacgtggacacaatatgattatgtaaagcccatcagtaggccttaaacgataaggattgagctaagcccaatatcaacctagcctttcgggaagacactcgcattactcacccatgaaagtctccgccaagtgtagcccgtatccggaggacccttggcttcgtgtagccggaaggttctatcagtgtatacttggaagatagttgtagtttcctatctaataattcgtgcaaaataaggcagttattctctccagatctcggagagggaataatatcaagttaaaacaagaaactacataattgaagatcaaataattaatgcacaattaattatccacaatcaaaggacacgacatgagcaactatgaccctgatcaaacctgcctagttagcatacagtcactgccgcatgggtcgggcttcactcaataagccctaagcactgtaatatttgtaaacaccccattagaaaaaaatggtaactaagtatgacctctatactctataaatatgcactgaatccttcatacaaagggttagaaattcttaactcacaagcttgagaagataatagagcaaatattctcattgtaatccctttggcttttctagcctaacaggtaataacactaactggtggactaaggctcattaacgccccaacctacgttaaaactctgagcattctcttcttatttgattcttcaaattgtttttctttagttcttatattaaaaaatttgttttttggaaaatctcaataaacaatttcaatggtacaaaagtattttatccaaagggttccatcaaattctgggtatcgcctttagagaaacttttaatcgtgtgaaataagcctccatagtcagaaatactggccaatgaaacgattggacatcaaaaatgccttcttcagtggatatctctaagaggatgtttacatgtcacaatgtgagggatttgaggtaaagaacaaactaggttatgtgtgcaagttgcataagtcgtagtatggagtgaaataagcactagaagcgttgtttgaaaggttggagaaaactttactaaagatgtgacagatattgtagtgctctacatcactaactccaagtatgtcgaagagctactacacaagtacaaaatgctcgtcttttagccatgcgctacgccgatagttgctgggaaaccaacatctattaatgatggagaagagcttactaatccatgtatttacaaaagcttacttagagcactacaatatctgtcacacacgacccaatattgcatatgcagtcagcaagttgagacaaattcttcaagctccatcaaaaaccaactagattgtagcaagataggttaacagatataattcaaaggcactcttaaccatggtctttacataatcccaagtgacaaactcaccatagtgggccaatctgatgcagattgggtgtgttgtcaatatgataaacgatcgattgttggttactgtgtttacctaagagatactctagttgaaatttcctttatttctcaaacgaacttcctgatgtgataatgtcattgcgatggtgttagcatgtgacccagtgtatcatgttaggatgaaacacatagatttggatgatcactttgtaagagtcagcatagtctacatgacccaatcatttcaatcaggcacttgctctatcacctcagcacaacacaaggaattggagtggtcccaaaagtgtaacgattctgtaagttgtaattttgttagaattatagtattgatattcctcctaccctatcgtgtaatgagttgattggcttaagaattatgtaccttgcgcctttggctatataatgaatatgatatctcaacaaatgttaaattgagtattattcattctgtttatctctaacatatttactctactttttggggcccaaatttgtggtcaagacagactaaaagaatctaaaataccctcttgagcagggagtcttaactccaaacactcaaaaatgggtgatatcaagctgcttggttatgattttcagattcatcatcgacccagcaaaggtaataggcctgcaaatattctatcttagatgccttcggtggagtgtactgtgcttactacaacatcatggcaagattaggatgttagcgccaaagaaatcagtcaagagattttttgaaattgcattctcactgatttgaagcgaggtgatcgtgttatggggttcacttttaagcaggggaagttgttatgtaaaggcaggttagttttgtatgatctaccatgtgttccccaatcattttggtgaactgttttgactccaagagacagaactaaagcatagcataatgtatcatccgcaaagcggtggagaaatagagggctaatgtaccatgtgttgcttggaaacttaccactattgctttacttcaaagaaacctcgagtgtgagctaagtggctgtcacaggaagaatattggtacaacacttatttccacttatttatatttatttacagtgaaattttcttatgaaataattttatacatttaactcatttattgatttttttttttcgaaacaatcttatgttaacttttctttgcaaatttgaaatgtcagctagattaatactgtattaaatttgaaattttactttcacgtattcacgagtgtatacaatggtcatccaattaatatttaataatgatattttaactggtatttcaaatttacaaaaaaaaaaaagaaaagaacttaaaaagatttcaccataaaaaaaataaataaaagagcgctgtgtataaaaattaaaatataagaaatttcactaccaattactataatatatatttatatatgtatcatcttatataattattggcagtcactcaaaagtcataaaaaataaatgtaatttcttctttattattttgataaagttacaatatttggcaaatttaagcacataatcatattatatgataaatcctatcaaattataattctatcattacaagtgttttaatcattagcaaaattttggttgtatgtatccatgtcgggatcacctttttaagatgggttacaattatgaacctcaccgtagtaatagggaacggaagaaaattttaagtgcaaaatatatatggtattcatgaaaagtatagaaccactccatcgtgtatacatatttccagaatagcaactacaaaatactttttggaagttaggatcacaagtacaacgttatttggaagataactgaaactaagtttgtaaactttgtgtaaacaacctagcttactatagtacaataaataagaatttcgtactgaagcaaattgggaaactatatatgctgcagaacatgtaaaaactaatggttcaaaaaattgtagaaatcttgagacatttggaggtcaaacttgctaagttttgctagatgttattgagttggtttaaatcgtagaaggtatatacatgttttccttgtcaaaatgatcatgttccttgccatagttggcttctcttatcacatttttgattgactgaaatagagctcctgctcctcagaagttcaacccttctgtcaactcttcttttatcattatttcatcctaatatgttatctcttgttatttgcttcaatggcaaaaggtggaaatacatctccaaagagtggtgactcctcttcctacaactaattctcaagaatcttcaactccagtcactttgctcccatttgatatcactgttattccagtgaccagtcacaaactcaacggtaagaattatcttcaatggtctcaatctattatgattttcataataaggtcaggggacatagccaagtaaggtattcttctttgcatattctcatttacatttaccttctttatagccactagccacccaaaaacctttactttttcaggagctgagcttttccacaacatttttgcccaatcaaagcaaatggtgctttgagtcaaagtaaagtgatgaaaggatgtttgacaagaaaagacaccattgccatctaacaccctgctatcatctaagatctcaactatgtttacatgtttcagctgacataacaatgaagaaagactcaggatctccctatccaagaggtttctacgaaaattaagattccaattcaccaccaaaaagcctcccatctctctcagacaaatattcttatctttgatgattcaggctagatccggaaacaaagtccgaaaagaatagttctcatgccatacatcttcccaaaaacaaattctatcaccactcccttccttgaatgaaacaagtttcagatactcatcgtacaactcagaaattcctttccacgatcctttatagttcacccgctccccacttttggtatccctaaatttttaagccttcccgtaacgacttcttaccactctatgccatagtcatttggtttcaagtggaaatctccataaagatatctctttgttccagtgtgaagtatgtgctttagctaaacatcataagaatatgtatccacctcgtccatataaaccatctaaacccttttctctcttatacagtgacatttggggtgcatctaaagtgtcaactaataatgaaaaaagatagtttgtaacttttattgatgatcacacaagagtcagttgggtgtttttattaaaagaaaaatttgaggttgaaaatgtttttagaaggttttataatatgattcaaactcagtttagtacaaatattcaaatgatttgaagtgataatggaggagagtattatgttcaaacccatggaaaattttttgaagaaaaaggaattgttcatcagagttcaagtccacatacaccaccacaaaatggtatagcagagttcatcagagttcttggtcatcagaggaatttttctgagcatgccgcgacccgcctccttttggggcacctgggatgtgtcccaggtgtcacggcatggcttgggcatgtcgcggcccgccctggtgtttttgggcagttttgagttcgaactttgaaaattcataagttttgattccgaactccggtttgggagttctttatattgttggaaagctcgttctgagctctgtatgattatctaaatttcaaatgctatgattgaattttatgagtatgga

SEQ ID NO: 98931 - DNA, 641 bp, Cannabis sativa
caagcactaaacccatctacactcctggaaggagattcgtctaaaagggagagcatgttccaacatagacctggaatgtttcggaatccgcctttatctgagtcactggaacatatcgtagccctagaatttattcttgatttggttcatttcccaaatggacgagttgtatacaatcaaaacatttttctttttgcgcttccgttttggggcctctttcgggactgcatctatttttggctccttgaccagagcatgtacctcaacatcctcgagatccacaacctcaaggtggaactcttcattaggagttgtcattggaagaaaaagaaagatccaagcagttaaataccctaaaccacgaagacaacaaggctaccagggaaggcctcccctaaaatttcttagagaagtcccctctagacctgttacccgaaagtacagtcctattaaaaccatacctcagagtagcagattgggaacttaaaaaaattaggaagaaatctaaaaagacccatccaaagctctagtagctttggatgtggagacctagggcccaatccagttcaaaacctacatacacaaacagggactatcgagctaacatacccagaaaaatagcatgcattgacaattcaaca

SEQ ID NO: 98932 - DNA, 783 bp, Cannabis sativa
tctctctctctctctaatatgtgtgtagtgtgttgagggaatatctcacactattctgcttgatactttgatcacactgtgaagaagaaaatattttctttgacaagtacttgataatactctgctattatgagagaattaagactaaaaacagagaaagaatgagagaatgatttcttgttattgagctgagctgaaaataagcctttatataggcaaatgtcaaaatgacatgtgctacaattccacaacttgacaagaattaaacagaaaaataactagctcaaaaaaacagttggagtggcctagtaacaacttctaataaacagttggagtggcctagtaacaacttctaatagcccccctcaagatggagtgtaaatgttaattacacccatcttggaaacaatatttgagaagggattaggaagtaagggcttggtaaagatatcagccaagttttgttgagaagtgacatggagaagctgaagagagccttgctgaattttctctcgaatgaagtggccgtctatttcaacgtgcttggtgcgttcatgatacacgagatttttgctgatgtgaattgcagcggtgttgtcacaatagagattagcaggttgtttgtgagagacgccaaagttgttgagaagggcacggatccatgtcagttctgaagtagcattagccattacacgatattcagcttcagccgagaaacgggatactgttggaaattattttaccaagatctatttactatcatgtatgttggattaacaacct

SEQ ID NO: 98933 - DNA, 720 bp, Cannabis sativa
gtgttcaacacgatcaacacatttaagaaggagccaatgtgataatgatcgaaacctagaagctgggaataaggaaacaaacactaatgttggcggttctatatctatcagggagggtgcctatgatcctataggtacgtaccattggttgacactactacaaaaggtagaattcgcgacggtttcaaagatgctttgttctggggaccgtcgctaaaaaaattaactgtgtgttgaaaaccgtcgcctatactatactataggtgacaatttttaacactagtatagattaggcaacgttttaaaagtgaggagaattttttgaagaaaaaagataatgcactattcttgatagtttaaaacagtcgcgaaaaatattggccacaattttaaactgtggtccattcttcgcccgacggttcaaagccgaagactatagggctaaaaacattgattgcacctctcgacttactcactccctccatgtccctcgatctcactcaaacccgtcaaactctctcaaacactcgcacctccaccttctctgatctcactcactcattctgtccatctctctcgatctcactcactcacaaaagcccattaaaaataacaaagtctaacaaaagccccttaggttttaccaaatagcacattacctcactctcctcaccgagttcaccccttcagcgttgtagttgagcagatgactaccagaca

SEQ ID NO: 98934 - DNA, 3366 bp, Cannabis sativa
aaaaaaaaaaaaatttgctcttaaaattttgggttagttctttctaaatatctttttacctcataaacagattagcaactcccattttgcatgataaattaccatttaaagtgtatcataagaaacaagattatcacttattgagaactttaggtgtagcctgttttccttgcttaagaccatatcaaacacataagtttcaatttcactcaatgaagtgggtaaacttaggatatagtgaatcttaaaaaggttacaaattcctcagtaccacagacagagtatatatttctaggcatcttgtctttaatgaaaaagaatttccctttaaatcttgttttcttaacacacatacccctgaagagtatctcactgtccaacatgaaacttggtctcagcttcccaatctttatttgactcctcacatattttcaacctagtcctaccacacctgctcaatctttctctccaacatctcttagagcagtacctcccacaacaagcttgtctccacataccagctgccaagacaggtactcttctccttctctcaatcttagtgataatactactgaccatgttcatattgtctctacatcgacatcatcagatgcttcaacctcatcatcatctctagcagttgtttgctctcctatagcttcagttcatgatgtgtcctaggcatagcaactagtatctcttccaatgataactcgggcgaaggctagtacttttaagctaaaagcctttgtgaatcatacttcatacacccttcacatcagagtaccggtacctattgctgaagccctcaagaataaggggtggaataaagtcacagatgatgaaatcctagctcttaaagccaacaagagttgaaccttggtcccttattcagaagagtataatcttgtggggtgcaagtgggttttcaaagagaaattgaatgttgatggttcatttcagagctataaggaaagacttgttgccaagagatttcactaaagggctggatttgattttggagaaacttttagccctgttatcaaggcctcaactgttagaattgttctaaccattgttgtgagtaagtgttggagcattcaacaactagatatagacaatgctttcttcaatggccacctagaggaagatgtctatatggttacaccagaggtgcttgaagaccttccaaaccaaatcatgtgtgcaaattgcacaagtcacaatatgcacgggactagtttgataggttgaagggcactttacttggctagcatttaaaaaattccaaagttgacacctcacttttcttctacaaaaatgacaaactaatcatattagttcctatgtatatggaatcatattagttcttctacaaaaatgacaaactaatcatattagttcctatgtagatggaattatagtaactgggagcaatgaagctacgctaaacgagtttatttaatcagctcaacaagttgttttcactcaaggacttgggagctctggatttcttactatgaattgaagtaatctgagatgacacatggctatagtaaacctaaagccctaaccaactcctatagtaacaggtaaatctatctccttgatagatggagaagctatacacaatcccacttcctataggagtctcattagggcactttaatatcaatgccacacaagaccacatattagctttattgtaaataagcttagccaatttttaaaggctcccacaacagtcaactagggaacaactaagcaaattttgagatatttaaaaggcacattgaaccatggattacacatatgttacaataacaagttaaccatcgcaggttacctctcatgcatattggggtgttgcattaatgataggagatgtgttggtggttattgtgtgtatcttggagacaccttaagttcatggtcctctaagaaataggcagtaatctctaggtccaatatagtgtctgaatactagcctcttgctcatatagctgctaaaatcacttgggttgaatttcttctcacaaaactagagtttctattgccatcgacgtttgtcatgttgtttgataatgttagtgctagagctttagccgtaaatcacctctatcatgtacacactaaaaacattgaaatagatatccatatttgttgttataaaatcttaaagaaggaacttgaggtaaggtacattccgttctctgatcaaattgtgggttgtcctacaaattccttatcaccatcaagattctagtagcttgtttccaaacttagagtgacacaatcacccctgcgtttgagaggtggtgttaagacatgagttctcaacctgcccaagtggtctgttaatgcaaagtagaaaaatcagatcaatgacagctcatcaatcctcacaactctagaatattcctcaaacagttttatgtgaatttgtgccaatgatttccttaattacggtaatgattttctattattattgtgcctattttattttgtcatttctccacattatactggttctttccttccttgtgtaaatctttctaaatgaggtgaaatatctcttttttttaacattgggagaggagaaatttgaatttaggacctcttctttgtgaggagaaatgtagaaccactaggctatgcctatgacaacaagatgcaatatctaagacaccatttgagctgacttttactatttctaaagccaagcattttgttactgtattagggggtgctggtttggttggcttttttttgtgtgtgtgaagaaatgcgagcacgccagtttttgaaaacaaatctctcaacaaagggttggaggacaaagattcatttttaagaagcatcagccacgaggttgttcctgatataggttggctgagtttctagaagccacttttgggttctaaaacaataaaatcacatttaattattataggagtttctcatgagttttacagcttgataataccgtagtagaaaccttacctggttttgccaatttgtggaaacagttatgaccaaaaagaaaagtgcttgtagagttgttcctgtcattattccaatccataagcctttccctcttagcttgaacacaaaacccagcaaagcagctaatggtatgccgacaacataatatgccccaagatttacataagctcctatatcctgccacccacttcctctggcgacccctaatgttacaaaatcaacacaacatttcaatattatgtgcctgtatagttcatataagttattttgtttattttttaatttaattaattgtacatgtacaaagtttctcaagattactaaaaataccaataataataataataaatgaataaaaaa

SEQ ID NO: 98935 - DNA, 851 bp, Cannabis sativa
attaaaatacaagttaattttcaactatatattactaattggttttaagatataattctataaaattatatttgtcatactaataaatattataattcataattaattatattttaatttacggagagagagaatttcggaattattgtcgatgagattgactatatatttagattgatgtcacaattgagaaaaaaacaaaataaaatgtcagttcaatgttttgataattaggtttcaaatggcatatattattatatatcaaacgtctaatattgccaaccattcatttagagttctatttttatgtcttggctttctctaggttctcattagggtaaaacctataatgatttgttcaaagaacaaaaactaggcgcacaataaaatacaacatcaataaattaattatttctcaataatattggccatactactattctgtataataattcaatttttttggctccatgagaaattagacatgtggaaaaaaattaattaggctatcagcctattacttaaagtaaaataattaaaccttaattaataatgattagttagataattaataatgatatatatatattttaattacagtgtttataattagtccattttaaataaatttttatacttccatccctattttaatagtaatttttgtatttatatacctatttctaattattattttttatttttaatctccccacagaaaaaaagacctctccactaatttcttatgttttcaacctgaacagtgtgatgagtgttaattttccatgattatgagctaaccaaaaacacattaaatgctaatcttcattactcataatcattaaccaaga

SEQ ID NO: 98936 - DNA, 619 bp, Cannabis sativa
aacaagtctgccttcttcataccaattttggttctcttcctgaatttctcaaatggattcatcaactgatacaagcagcatacaagtctgccttcttcagaccaatcttgggtatccttcccaaattctcagatgaattaatttttgagatgaaaagcaactagtccctgcacgcaaaaatttcaaaatgtaatccatactaacttcactatccagataagcgactacattattaactgagattataaaatcgatataagaaactgattttcataattgtaaatgtcgtgttttgtattgagcacgtgttgctgaacatgcacaacaaagacatgctttgtttgaaataagactgatcttcgatcttatctgagggttttagactaatctgttaaaacaatcccgtgtatcaaatggtagagtaggactaactcccaaaagcaaaactagcctaagagaggagggtggccaagtagttatatactactaaccaatcccatacttgtcaatgtttcctaacaaaatcccacaatattttagaaacataaaattagaacaattattatgttggtacccaggaggaaatgaaactttcgacctagtggaggcagaacatatg

SEQ ID NO: 98937 - DNA, 775 bp, Cannabis sativa
tactctcatgaatgagctacatgcatatcactataaaagaaacatttactaatccatccaactaatgaaataggaataaaatttactatcaaaatcactctctttacgaataacataaggacaaatattgcttgatccgattctcatatatatatattttattcgcttaatcttttcttctattataaccttaatgattagatttcacccttaccccaaaattcaacctagttatttctaaataaaaagtagagcttaaaattatctatccattaacactttaaaaaaatatcaaacttaagaacgtaccaatagctctatatgccaaatttattaaacttgaaacatacactctgttagaaatgctaatataaggactaaacttgtttttaccataacatactctatttcaatcacaatttttcttttgagaacactcctcttaaactcttgattatgaaaataagtaaaacctatcaaaattaaacttaatttacgtaatatacctacaccttgaaacatttctttaaattttcaaaaaaaatatcccattgatataatcctacccatgaaatactaagacatattcttctaaacacaaagaaaatttttaatcacactaaactcgtacacctaagatgtaacgtagcataaaacatgcaaaaccaacacgaacagattaactaaaacttacagtacagtgagtcgagctcgtctcgtggcaataaactttacatgttagggataaccacattctttaggaccgtattgctct

SEQ ID NO: 98938 - DNA, 660 bp, Cannabis sativa
taaaatgatttccctaatttataactaatattataaaaaataattttattttaaggtacaattgacttccaaacaccttaaaacacgcaaacatgggacctttgttgtcgtctcctttttttcattttttatttcttaaaagataaaaaaaatggttaaaaaaataaaaataaagaagaaaccaaataaacgaagctgcgttcgacttcaattatgaatattgtaccacttttataatttgtttttaacgtaaatggggtattttatttcataatataattatatatgccatgcattattaacaatcgtgtgattttttttagttaaaattttatttaacctttgattccgaccaaagagaatgttagataaggattcccaaccattatatatatggctttaagctgatatatatatatatatatagaataatagagataaattgtatatatatatataaatatataataactctaaaagctcaaaatttgatttgggtatatatattatatgaactcgtatatgagctggccagtggccaatatcttcatgtgccttgattttggttgatctgaattttttgtaccacccaattatacccatgcctcatgttttgttctacttatacatgtaaatatatattagatctatatatatata

SEQ ID NO: 98939 - DNA, 649 bp, Cannabis sativa
ttttttttttaaagataatatggagtcaaaataagaatgttgaaatgtataaactgttacaaaaataatatatttcataaaagagaagctgaaatgaagaaattgaaacttttataataacttaataaggcgaaaattgaattgtacagtttggccttttatcccagccctggggctgcacacgggaagcccgaaattcggcacatctctgtctggtctgaacccagtgcaactgcacacttaaaaaaaaaagattagaaaacattgggtttgggtgacatccgagtggtgttcggtccgtatcagctgaaatatattttgtataagaggactgctaatcactatattttacaccctcttttgcactctatatatataaaataaatatattttaaatattaaaaggaagtaaaacaagaatatatattaaattctataagagtaaaaataaaattaaatatatatattatttgtaaataatatatgcgaaaacaggattaaaaaataatgtttactgtatataaaattttggccttttcattatattaattacactgtatataccattgcttaatattaacaaattataatatgataaatgtaatttaaaaaaattaacttaaatagagcttattttcgcttgtaaata

SEQ ID NO: 98940 - DNA, 646 bp, Cannabis sativa
ggaatgttgaatgacttgaaatacttcaattatgaaaaacaaggtaactcctctcgatacgcttttgacttttgccgtatggttcaacaggttggtttggttgatttgggtttctaaggtcctggttttacctgggctaaaggcggtagaaattctagtaaaggaggtgcaatgaagagagctagattggatcgtggtcttgtctcaactaaatagcgcattctcttcctgaaggcaattattaaccacctctcctctacggcctctgatcatcggcccttgctactggatactacaggtggagttaattgcgaaggtaggactttcaagtatgagaatatgtgggccagagacccccattattttttggtcgttaaggaagcttggatcacgagactacatcacaatcctatgatcaacatccataggaaagtaaaagttacttgtcgacaacttcaaagttggaacaagaagcaattcttggatataactcggcaagtgaaattagctacatcaaatcttgaggaaactgagattaaatgccttgataactctgatgcaattaaccatgcaaaacaacaactatcaaaggcttttcttagggaggagattcattggaagaaaaaataacaggttcaatggctac

SEQ ID NO: 98941 - DNA, 557 bp, Cannabis sativa
tttctcgagggagtaggaggtgaggtcgacgtcggggtcgttggagggatgtaccttggctgacggaactacaatgggtttcgcctcctccgccgctttcgacatcggattttcagtttcccggtgaggttgaagtataaaaagggctacgattgaaactctctacgaccgagaaatctgtaaaaatgtccatctaacaaattgtttaggggttctagctaacatttaattacaaataaataaaaaagaacttatgataaataataataaatttaatataaattatggcagcatattttgtgcccatatgtgcaaaacacggattggaatccgttgtatggcaggggtcccacagtacttttaaatgttttttaatttttgaaattttggtggtaaccggttgggagtttatttttttaattaaaaaatagttaagtacgaaaaaatacaaaatggtactgtttgtgttagttagaggcagtgggtccatgttgtcggattgaggctattttggtattttccttcattcataagatcatatgtatttgtgggatggt

SEQ ID NO: 98942 - DNA, 743 bp, Cannabis sativa
catgcatcaaccacaatgttgacataaagaaagtatgcatgaaacgtgaaagaagaggtgaaaaaataaaataattcagatttgggggtgggggatttgaagctcatctcaactgaaaataaatgcaagagattgatgaatgaattatgttttcattccctacatccgttaactagcatgaagtaaaaagaaagtttgatagaggggcacaaaattagtgcataataaaaggtctatctaatagtggtaaaacaattgacctgtaatttttgtcatcaaaaaaaggacaagtcaattaaataacttcaagactgtaaattatcaaaagaatccattattaggaattgtctaatatcgtagtccttctaaacattgtgaatcaacaagtcctgcctcgggtatagctcacacttgcatgtacgctcatttaacacagtaagagaaatgtgaaccttttattgtaaagtgaacaagctcccaaccatcgcacctactaaggtttggagttttgaaattaggccccctaaacctataataattggggaccaagaaactacggaaattgttgtgtaagtacctcctagactctaacctaagaccttgtggtttgagctacccttcttggtaaataaggtttggagttgatgttcaatataattaacaagtaaactgtagatattccaacaaggaaataattacttgtacttggattatagatcctatattaagatatacattaattg

SEQ ID NO: 98943 - DNA, 1597 bp, Cannabis sativa
ggcccaaaatttttattttgtctatagtccatttcaactcaaggccgactccgataataactaacaactatacttgtctcttagtacatgaaagagacaaataccatgtgtatgtctttcctagcattcttttttatttgggtgaagggttccaattagcttattataagaggaattatgctttgttttatagaaggttaacttgatgtagtagtgtcatttttataggatggaaaactttaaagtacatattaataacctaattaaaaaatgataaagtataaaatctccaggtggtctcagaattatttaaattaatgaggaaagaatctctaccagttattataaataaatattaagtaaagtataataaaataatgactaaatatagtggtgtttgtaggtgtcaaaattatttaaatcattatttaatttcatctccaaatcactttttatatttatataaatatgttgaaaaagacaaaatgtgactcatacatacttttagctaagaatatatacaagattaattattgaaatttatctaagtaatcatatcatgtatcatggcatctcattatttaatgtttgttttaaaccttgtaattattaatacttcactcctaaatcgaattttttcacatgcaaaaataaaatatattaatcgaaattatttattggtaggaaacaacgtaagacatattttaaataaataaaaaaaaaaacaaaaacataagacttggtaattatgatatctttagatctatttctccatctcatctctaattattaattatatatttagtttcaagatttgtatatgtgatattgtttattaattacaacttgtctagttgactggttttcaacataatattttgacttaataatctatactaaattttgtatgaacttagtgtataattataatccattaatgatattattattgtatatacagggaaatttttctctattgtttcccattgatataaaaaatatacacaaagctatccatagtagtgactctggcgtctacgacagcaatggaaggtacatattttttaaagacgagtagtaacacgagtcatgtaaatttttctaattattttgtgcctcgatcgacatttttataggtttctcgaagcgattcgaatgggctgtccagtatttttttttaaattaattatttttgttttaatcatagagataattagagagtaacataattatgtgtatttatttttttttaattaattttcaggtttgttcctttaaaatttgatgaaatgttcaagaaatatgctcacacacatcctaacgcgttaacatcagacgaggttatggcgttgttgaagggaaatagagttcccaaagattataaaggatggtaattaattaattaaatttcttaattatttatttaattattattcattcttttggctctatctatgtagctatttggtcaattattgattgtttttaatcaatatcggtaagtaagaatttttggtatattataaattaataagttttttttttgaaaaatgcgtttataaataaaactgaagttagacctcatggtcattataaa

SEQ ID NO: 98944 - DNA, 703 bp, Cannabis sativa
attttatttttcactctaattattattttctatataataacaagttattatatttataaatatattattatataaattattataaaaataaaaaataaaataatttaacaattaagtataccactttctactttttttttcttcgactttcctttgtaatgactcatgagaaactataaattaatgcatatgatttttggtcattaactataaattatttttagaaattttgagggagccaaggccaccccaacgtactatacacctacacccgcccctgataacactcttgtatataacttaatacttttaggacactctttagaatacttagattacacttacttgtgcactagaattatcactcaactcaccatgcaccaccaaagaaccaactcccctatttatactactcaaaggatggtgcattattatgctagaatgttctaccgaattgtcaatttattatagcctaaaatattcttgaaacttcttatgactattaactctctatgattctagaaaattctataatattactaaaatgatagaaaattctagacacttatagagtaggtgttgatcttttaacacttcccctcaacactgactcttcatattgagttggtctctcagcttctgaaatctcgttctgctgagtcctttagtgaataagtctgctacttgatcttcgctcttcact

SEQ ID NO: 98945 - DNA, 1477 bp, Cannabis sativa
  modified_base (47)..(55): a, c, t, g, unknown or other
  modified_base (989)..(989): a, c, t, g, unknown or other
gggtcagtcatcagtccatgaaccagccagagtgacgtactcgtgtnnnnnnnnnattcattctgtgggtgtaaggatccaaagaagacttgaagcggggacgttacaaatactccatggtgggataatgaggttctcagcacaattagctggtcttggaagaaaattgtttaggttaaaaattcgcttaaagcttgttttagttcagcaaaatcttttgctagcaaaatatagcattcaccatgtctatgtataacaaactaacaagtctaaaccatcaatataaggtgttaactttgcttttaaatggagtttaagccctctttcattctttggttagcttgtttggatatattgaatgttagagtgagccttcatcatactttggtgtgaaaatgattatgaattcccaatgtgttgtttgtgaaaaatcatagggaggatgtttcccatttgttctttgagtagaatgtgtcttgatcaaaatcaaagcttggttgagttagaggactcgagaaacaaatgtgcatcgattgttgagatggttgaggcaaggcgaggccacggtctatccaaattttggcgggtttggaatgaggccggccgtttgggacttaaaagtgcctagagttgattgtatagtgaattaagttaagagagatgtcttagctcaaattgatttttttttttgtgaatgatatagatgataagttagtttcatactttactttgcaatgataaaaatatggcaattatgaattagaacacaatattaaaaattaatttaaatatatatcacaagtcatatttataatttaatgggatgatgtcactataatttttttttttagttacaacaaaacttgtggctaaaaatgaaaaagttatgattaattttaaattattattcctacattgtgactaaaaagtctgtgactaaaagtatattagtcccaaaaatcacaatttgttgtgactaaaactaaatnagtgacaatttgtatctaaatactttatttaatcacaagtaattttttttattatgactaaaagtcacatttagtcagatttttttttttattgtaactaaaagattgtcactaaaaatagcattttcgtagtgtgtaaggagggtttcttgagtgcaacacaagaatattgattatatagttacccaccttatttctatctcaatatattattagtctcaaaatgaaggaaagttgtagttaatttgaggctagctaaactacattattaattaagtctagattaaattaattgcagttcaatttattattaattaatatatcttgaatatataaaccacatatactttagcctcatgcatgtgcacaaccaccttattaacttaattagttcataatcattagtcaacatctaacgatatatattacctaattaaataacactttaagcaccccacaaaattgatagagaattgctttattttttt

SEQ ID NO: 98946 - DNA, 737 bp, Cannabis sativa
tgaaaacttaacacagtacacagtatataacttacatactatgtaattttgaaaaaattccgctctacagcaaaacaataaaaacattaaatttttaatatttggtggaaaaactcttatagataaaactttagccttttacaaattttggtggtcggcaaaatcacacgtgaaacttaacataaattataaagtgagaaagatttgatgaaatactgaaaagaataaatcaagaataaaacaactttgatttttaactttatgttagtatcattcaattttgctcacgtgttttattacaaagaataagttagtaccccaaaagcattaaaaatcaaataaaattggttgttaaatatttcacaactaattagtatttaattatattcaattttgatgttgaagatagttttaagatttttgagtagtaaattcgatggaatattttgcagtttgtacagattttagttatattggttatgaaaatttgttaagtagggacatgaggttatagaaatgaaagaacatttaatattattggaccacaacaaaaaaaaaaaattggtgtatatataacaacactagaaaatgtcatatatgagaaatatcattagctagaaaacgtttatttggggtagtgaaaatgacaaggagaggatattttatattttagggttaattaataagatcaatatttattttattcacataaactaatttaaatacaaattatagga

SEQ ID NO: 98947 - DNA, 907 bp, Cannabis sativa
ttatcactctttttcttttttagatcgttttcggcactatatattaacggttaaattatataggtgtaatgtaattacggtagggccgtcggggggatgagttttggagttaaaactagagttgtactaagcaataataatctgcaaagacaagaaaacaaataataaaaaaagactagagttgagttgaggtggtttttttgagataagagaagtaggttaatgttggagtgcagttggaggcatatgtatatagttccaaatatgttgattagaaaatcaaagaaaagatatctaatgccaagtgttccgaccagtactgcgcttttgcagtaagagtacgtagtgaattatattagagtagaataaaatagaatatatttatggagaaggagggattggtttagcttggctgctggattgatcggaatctgctgcaactggccctgccgcagagtgtttccgttaattgcagatatcttgaacgtaatcaatgatgcatgttgaattatatttcttttgtaaagttagttttatagattcggtatatatttacttctggacatcgatcaataaatcaaagcttgtaagtccttgtttttcaaaaaaaaaaaaacaaaattatttctacaataacaattaataaaatcagcaaacggaatgtaaaaaattagagaactatagatagtatcggtattctttcgaatattgttagtttactgggtaagcccaaagaataaaattaattagtgaagtatcaaaaattacaaatgcaattgacttaaataaagtttgaattcctctaaagcttgtcgcaactttttataatttaacttgttaatctaatttctgaaacacaccaactagtgaaatccctttagccattgatgtgtgctcacttcctccc

SEQ ID NO: 98948 - DNA, 571 bp, Cannabis sativa
gttaatgttcatatttcatcttacttctttaatcatgtggatagctttgtaacttttagtgataatataaattgccatgtttccctttatttattatactagtaaaatggatttttggattttgcttgattgtttacataatgttgcccttttgctgccatggattacaatgggtgacttcaatgattacctttccttaaatgatagaagtagtagtaatagcccccctcttatgaaattcagttgaggattgtttcatttggaggcatcgttcctcaatcctcatgttgttttacagttaattcggcttaccacttagcaaattcttctttcttcccctccctcttcttctaatcccaactatattaaatcttggtggaaagttatgtggtctcttagaatgccctccaaaattaagcatttcatttggaatgtcttctttcatatagttacagttgctctaaacctcttttataaaaaggtttgtgttctttttcaccataaaagagccgaaatagtcactcatgctctccttaagtgttctagagccaaagcaatttggaaatgcact

SEQ ID NO: 98949 - DNA, 671 bp, Cannabis sativa
tgaattaatatatgtatatatctacatataaaaaatttaaggtatatatttgagtaagggctttagcctacatatagactaaagtctctcggtccatgaataataaagaattatatatattgcttattaattaatgataagaacgtacgtacgtattatttgattttacttgtttctatatttttcacatttttattttactatttcagccatgcatgtatgatgtttcaaattggaaattctatcaatgatcacaactaaaacaaaaaaaacaaaaagtaaataattaatatattgaaattttgtgttgcttagaagttttattttaatgtcatattgtcgataattacttgcttttgatgaattaaaagaataaaaatgttcattttttaacttcttgaattatgatttatgtagagatttgttgtctaactgttttttttttttttttgtaaaaataaaattccttcaaactatatatatagcaacttttcaaatttatcttttgatggcattttattcatttttctaattctatatattgatgcagtactaatgaaacactagcacacactacaagaaatgtactggcaaaagttggtattgcactggtaaagaatttacttgtgatgtgttggtaaaagggagttggaaaatcaatgttggtatta

SEQ ID NO: 98950 - DNA, 954 bp, Cannabis sativa
tgaaattactctaggtcaagcacgcttaactgtggagttctttcatgatgggctaccgaaaaataagatgcacctaagagaaagcaacatttgtaaattttgtactttaattacatattagtgtaaattttgtgctttaattacatactaaccaagatgcacctaaaggaaagtacaaaaataatgatggctcttataattttgcaatgtgaaaacaacattatattttttagaaaaatatacgtaaaaaatctgaaaaaaaaaaataactaaacacaaaaatgtaaaaataaaaaaaaaattaaaaaaaaaacggtaaaaacaaaagtacttttaggtgttttttgtaaatttctttttttcaaacacacatagtaaattgaaatattaaaaactctctatccgtatcgtaaattattcataaattttcaaataataaaaactaccatgaaataattagagaagaaaaaactactctaacatgtttttttgtagcaaaaattgagaaagatgcaataaataagagttgaccttaacactcatctcataccaaatgactaaaatcaaatatagtgtggtttcaaaagaaaaacaagaggttgtgtattacaagttggaatcttaacaattttattttggcatttgtactttgtgtggtaaaatgttactaagaattctaaagttgaggctgccaccctataagtgataacattagaatgtttagggatccaacacacatatttgtttgttatgactttaataaggccaccaaacatagccttagggaaatgttgtcattctttggaaagatcaaccttcatacgaaaactcatgggagagatttgatgtgatcaacactcaattactttcagttttgtatccagattctcaccattaataaacaagtaattcagttccatccatgtgtttctctttattattgctaagatctgt

SEQ ID NO: 98951 - DNA, 1731 bp, Cannabis sativa
ttacatcaccaacttccctagtcagccaaatctataaagctaagtattaccctcggtcaaattttctcactattgaccttggtaataattcaagttttgtctagtggaacatttggcaatgacaagatcttgttaaacttggtgctagacgtaccataggctcgagaaccactactagtattctttctcattcctggttgcctaacccttccaattcgtttgtgacttccactcatccaggcttacgtcacaagatggtcaactctttattcgatcacagcaacatatcttgagattatgagattattcaaaatatgtttaatgatcgagatgtgtctctgatactatgcctacttttgtgtttttctgctgatgaagattgctgatcttggataggggaaagcactggcagattctcagtaaaaagtgcctataatttactgcaaaagtcaagatccctccaaaagttcaaatttcatttggcgagcagtttcaaatgcgcttcccacctatccagcttgttactaagcatgtgaatatttctccaacctgtctgatctgcaagggccacccagaatctataactcatgctctcaatagtggtccttttgcctaggcttgctggcgatgtgctcaactatctgatttggaaacaaactgtcgcaccctcatgctatgttgggcaaattggaaaacatcaacactcaccttgacttcattcaccacacaccaccgctcagcaccatcacctagtaataaaccagtccaaaatgcttcttgatcagaagattgaacagccttcgattgtgcaagataacttccgcaaatgcatacaaaaaaggagcattagttgacttgttctgctacactttttcatttcttacacttcatattgcacaacacagttgcaataatgcaagcgtttttcaaagtatatattgagagtatatatttacaaaagtggagcaaaattattgttttgcacatttactgctaaaaaaacttaattagtttatgcctcatacaactcaaaatgttaaatacttgtacctctatttattctcattattatttttaatgccaatgctaccttaaatttgggcaactttattaatttttgatagttgggtttacccaatctaaattaaatattttcaccaagtttattgcactgcaccaaatctgaaacagaaatgttgaaacactattgcttcagcttattcctacaacgtcgtaattaattctcgccattttcagttcttgatttttatatatttttcctttttcagatataaaaaaaccattaataaaaatgtaataaactttgaagacataacaatcacgaattagaagctttgacatgattaacctttcccttaattataaggttaaaaaaacaaatctttctgtgccaattaaccatcaacatataagtcctccgttgttaccactagtttcagattagggtggacatggccggttctgacatcctcacttaggaccgggggcttgggcagaagagagtcgagagacaatactcggtctggagacatagccaactgagatgatactattggggtatttgaaattgaaatcaagtctagacatggttcctctgttgcttatacaaactacaagcccaaaataaaaacagaaaatatggtctgacgataacaacagtcactaaaacctcaagctgaaggaacaacactagcatcgctgatggattca

SEQ ID NO: 98952 - DNA, 578 bp, Cannabis sativa
caagcccgcgtgttaggaatttcagtcattggctaaatagtgggtccagcaacaggtttctcttctagtcggacctctgtggtagaggtgttggctagttggcctagccgagccgtggtagccagataaccacattcaggttggtcatagttgggtggtacttggacattggggtccactgccatagggtctcgtggttcagtagaacctccgcatcttgtgacagccatatagaatgaaatttaagaaaatggatgagatgcaagctttctaaataagaattttgggctctcaatgaaagcactaaaatattgattgtgaatttagccaaccaatccagagtttgactaggattagattttgcttatgactgccatgtgcggaacaataataaatgtaaaagacacaagaatttatagaggttcgacccctttgattaggtaatgacctactctcctttagttgtatttactcttgagatgatactacacaaattacaggcggaaatcttgtaatttctagctatgactttctttagtgtttttttttggtcaatcaatcatgaaattcattactcc

SEQ ID NO: 98953 - DNA, 557 bp, Cannabis sativa
agattcaacataaagtggtccacaacctgatctgaacccgggcctatccagttttgcttaattaaagcagtagtttgtgcatcatttaactagattttttcgaatttgaagcgtgttttcttttttgtggctttgtagctgaatggattggtataacttgagcactaatggcacgatgattcgaatgatagtaatccaaatgttgtgtgatcaaaggctaaaacggagaattccatttgtcatttatagaataccaatcgagcatctctttgattgtgtccatatgatgtttgcttttaatctaagtgtatggatcttcttcaaaaggcaactctaaaagtgagcaatagtcaagggcgcttcagagattatccatttacaattcattccttagagctccacctattttattttgattggaaaggacattaaaatcgccaatgaccattcatggaattaatggagccacatcacgtattccttttaaaacaatccaagtttctagtcttttgtgaattttaagtgccccataaaagccaataaagtgccaagtagag

SEQ ID NO: 98954 - DNA, 683 bp, Cannabis sativa
aatttatatttaaatactatgttttagtcacaagtaatattttgttgtgactaaaaattacatttagtcacaaaaaaattatatcgtgcatgactgaaaaattatcataatattttttttatagtgcatattaatttacatttatttttatggtcatgctttgagttgtaattttcatcttctacttttttatattatcttctttatttgtaacacttattttatatttttttagtccttctaaattttttgcagttgtaatcttctgtctcattattattttctctatatttcctaacagttttcatatacacaattgagcatttattataaataataattatcacaaacatttatgataactattaaaaaataattgaagaataaaatataaactataatatttatacatataataataaaaaaagatatttttgaaataaaatattaaaattttaaaatatggtatttttcaaaaaaatacattgaaactttttctttttttaattttaccaatttatgtttttttggaccaaagtggaaagtcttgtacaacgggccagctcgctcaccatatttgggccgggtttgggccaatagggtaccttgtagcaataacccaaaacaagtttgagtcaagcttaagccatataacgccagaaaatttggttggagagttatta

SEQ ID NO: 98955 - DNA, 825 bp, Cannabis sativa
  modified_base (782)..(782): a, c, t, g, unknown or other
aaattctaccattgtacattcatatatattaggtattcatataaaccgcagtctttagttttaaattcaattaatccggactaaaccaaccaatctatgtaattattttacatatacataatatataatttttggacgaaatattgatatttgtgaattaactttaggtagaatattagtattgactttatattgttatgataataattgttttattgttatttatgtattaaaatttattaaaagtaaaaaatacaccaaaaatgaataattattgtaaaaaaaaattgcttcattattattcaaaacccatctattgaatttgtgtcattcaccttcgactctgacgtctcctccatttcaaaccatgacagtgatgatgaagctactgctttttttaatttactaattacttttcactttcatcttctatatatgtagtatatatatatatatatatcgcagctgtaggagattaagctatctttaaaattggcatcaaatgtagaatttctcaaatttcccaagtaaaaaagatcttagtgcttcattgattgttcataaaaagctcgtatatgtaacatgttcaaaggttttagtttcagaagtgtctactggatcagtttttactccaagaaagttaaagcagcacataagcaagtttgtttatatttatatacaattatacaattccccaagtttgtttgtttttactccaaaatttatacagtaaaatatgatacattatttgaaagtgatcattaaatatgatgattttatantttggggatcataactgatattaacatttaacaaaaaatagtt

SEQ ID NO: 98956 - DNA, 1257 bp, Cannabis sativa
taggggtttctatacgattttttactgcaatttaggttgcagcgctagttgcaataggagtttctatatagaattttcgtaaaaatgcaaagaaaattattttgaaggggaaaaaaagaaaaagcccctataaaatttagtatttttgccacaaataattattattttttatagagtaatttgcagcataaatacctaagcataactcccagttgtaaataaatacctcagtttaatttttggcggtaataatacctaagttatatttttagaaatctgtaggtacctgaccattaaatatcaagtccgaatccacgtgtcattttcttattgatatatttaaattaattttttataaaaaaaaaaaaattcataacctagaccaatcagggattgtcatgtggcaattttcttaacatttaacaactaggtacctacaaagttccaagtcaaaaattaaacttaattatttatttgcaattgggagttaaacttaggtatttatagcgcaaattactctttttttatataatattacttatatgttgtgatgtgttttaattttgcacgacatctttgaagctagaagtgaaacatcagatgtaacagaaaattaggctatggtagacactataagaaatattacttttatcagcgcaatttgttattgtattgataaaagtaacttttaccagcacatttcacaaattgcgctagcaaaaggttaaaattttactagtgcacattgtggtaaaagtctaacaattatcggtgtattgacgcgttgggaaaagttatttttgccagcactttttattttgtgccagcaaaaattctaacatcaacgttgatttgccaatctcttttgctaacacatcaaaagtagattccgttttgccagtacaataccaaacttttgtcagcaaaaaaatatgttggcaatagtgacatttctttgtagtgagaattgatgagaaatccaataatgatgaaaatggctgaagatgaggtgggttagttgatgaaacatcaatccatgagatgaaatacttaaaattaattattaaagaaactctaaggttccatcctcctgctccatttttacttccaagggaaagtagtgaaaaatgtgaaattaatggttatgagatacctaatggaacaagagtattggtaaatgtttggagaattggaagagatccaaagtattggaatgaacctcaaagttttatgccagaacggtttgatgatagctct

SEQ ID NO: 98957 - DNA, 544 bp, Cannabis sativa
  modified_base (154)..(161): a, c, t, g, unknown or other
taacaataaagcaattcgaaacgaatctattggactaaaagaaatacgcaaaaaagttccttgttggtcatacaaattaattaatagttttgaacacgccgactgcccaattgaagaaatgttaagaaaaactcctgaaattcattcaagaaannnnnnnngtgtagtgatttttaatcatgacataagaaatactaatatttctagtgatacatctaataatccacaagatattactaaaaatattaaaaataacgacgattatgaagaaccaaaggtaatttctttaatacgtttttcataacaatcagattttcttcgagacataatcataggctcgatgcgtgcccaaaggcgtaaaacgcgtatttcgaaatcctttcaagcgaatagtcattcccccttttttgggacagaatagacgaagaattttttttctttttccgcgccggtgaaaaaaaaattcaaaattggttatggaaaaacaaagaatttccagtttcagattatagagaaaaaagagaaaacgaaaggattaaaaaaa

SEQ ID NO: 98958 - DNA, 1172 bp, Cannabis sativa
aaaatgaaatttcatgctcatcattcttaggaatcggccaacccccccccccccccccccaatttaggggtgttcaactatcaaaaaataccacctgaacaaaccatatacatatttattattcagatcatgtaagtgagaaactctactaaacttagaaataaacagaacacaaaacaaatacccaaaatctcacctttggccttcgattttcagttactgccttcagattggaggacaagacccaaaaaaaaatggcgatggcggaagtttatctagtggatgtgggtgggggaagttcttctcaggggaagttcttctggtggtgggtgggggaatttcttcgttcttctcgtggtggagaaaatagggtatttcaaaaccctgaactgaactaaaatgaaaaaaaaaaaaaattacacgtgtacagccacgtggaatggataataggagccacgtcagccctccatttttaaaatgaacggaacaagacagaataccacaagtttaacatcgtcaaaagattagggggaatttttaacgtcaaaaatagtttagttcaggtggcaaaatttggtatgtgtcaaagtttggggggaaaataccaaatagcctatatataaatagcaatttagagagaaaaatttttttaaaaaaataaagaaaacgaaaaaaagttggaattttttctatgtaataaactaaaaatgaatcaaatttacatttatgacccaaaaaagggaaataaacaaaaatagaaactaaaagttgttaattacaaaaatactggccaaggaaaacggaagcctccaacttcttcgtgacccagccgtcgaaccccaacaacccatgttacttgcaaaagttgttgctggaaagagttgtttattagttgttttgacagattgaaatagttgtttgtaactatgtaaactaaaacaagtaaataatttgcattatttcaggatacggaaccattacaaattttggtacagagcaatgggtattgggatgacaacaaaaactatgttgaatatgaatcaagtggagaattaatttccaccaactacacttttgatgaactactgagaataatgatggaagaactccaatgcaaccctgaaacaacacaaatacaactgaaatatcaactgaaggaaggaggccaacca

SEQ ID NO: 98959 - DNA, 635 bp, Cannabis sativa
tcttttggtgatatgggtgtaccttcacaaacacgaaatcaccctcattaaatttcacatggcggcgagaagagtcaacaaaggatttctttttcttttttgctaggtatgcaacaagtgcattttccattcatcaagaaagaatcacattcctctagcagttgatccatgacaatggtagaagtggtacctgaagaggttagaactttagagggggcccctgtccatacattaccttgaatggggtaaaacctaaggaagagtgaaaaggtgtgttacactaaaacttagaattttcttaggctagtaagttgttcggtgcttcaattccataccatggaggtgaaagagttcggtccaaaaatggctacccgatccaaaaatggaggtgataagctttagaatgtcatgtagcttgtccatattatggaggaaggcttcattgacaatatgaacagtaaaagggtgtttgaggggcatggaatgagagtacttactcattcgatccacaatgacaaagatggtatccacaccctcagacttaggcaacccctcaaataagatccatagtcaagtcctcctacacacactcacgtagcaccaatggttataacaacaaacttgtaggtgacatg

SEQ ID NO: 98960 - DNA, 527 bp, Cannabis sativa
gtaaaaaagttaaaaattccgcctaacagtatttttgtaagaaaatgacaaaagttagtataccatgtaaatttcccttaattaaaggtgcggatgtgcactggattataattctgttgtgtagcccataaagttggtaaatgggccaacgttcgggcatcttgaggtggcgttaaagcagatggctagattttttctttgtttacttctgttgttattttcctttggttattttaattacttaagctttgttgttgtttaatcgtgtaattgctttgctttgcttagtttgtttggttcctcttctatttattattctctctgctgtggcgtggcccagttagacagatgctatcaaaaaaattaagtgatttttatgaaaatactagattttagataaaaatttacaattttactgtcagatagtaattttttttataaaaatactattttttaaaataaccataaaataacataacaaaataattaaaaataaaagtaaaacaaccgtagaacaaccgtaaaaa

SEQ ID NO: 98961 - DNA, 899 bp, Cannabis sativa
  modified_base (27)..(28): a, c, t, g, unknown or other
actaatcagattgtaaagagttttatnnagggcataaaacccaacaccatgacccagtcaagggctggccagggaacttaagcctaggcattggctgacctgactttaaggtaccccctatggccactgaggtcttaaacaagaccctttatggcaggccaacgtgtgttacagatcaaagtgtacatttttcaacaactcaaacatgttcttcatgactcaaagagtgaagaattacaatgaaggtcaaaatcaaatcttttttgtcaggaaatcacacattatacatcctaaaactatcatgcggatcaaaataccaaaaagattaaaatataatgtgggagtcaaaaaatatttacagcgaaaaaggcttcaaataaccacggaaaaatcaaataaataagtgaatagccggatttgaaagcataccactactgaaaaccattgatgaagaagatggaaaacttgaatcgtcaaaatggctcaaaaatatcaggagatggagcactatgggcatcaacctctagggagaaggaagagctttcaagagttactacttgtcgagagattgaaatgtgggaagtgagaagtgattttcctcccataagcttatataactatcgtgggaccccttttcacttgccatgcaaagtgtaactaaaaaacatgtagaagggtaatgcaattaacttactcctaagaatgtgatcaaacatccaagaacaagtattccaaagactaattatgggatatttagttaaatatataaccttaaaaactttttttattagctaagtaaccttcatttttaaaaatttagctacactaaccttctcttttaatgaaacttttatatctcaataataccctttatcattttatatttatttttaattaaa

SEQ ID NO: 98962 - DNA, 736 bp, Cannabis sativa
  modified_base (294)..(299): a, c, t, g, unknown or other
gtgtattttatatttagatatatactttttaaatactataaaagagaattaaccgtttatctcagtgttgtcagagatccaagggctaggaagatctggcggcaccaatcccaaaactaaaactcagataccaaacaaaaatgagttggaggggtcagatcaagctagcgttgatggaagaagaacccactgagggagaaaatcgtgaaaggaagagtatataattgagtaatttgcgacataaatacttaaatttaactcccagttgtaagtaaatacctaagtttaattttnnnnnntaataatacctaagttataactctaaaacttctgtaagtacttaactgttaagtattaagtaaattgcgcaattcataattggtccaagtcattaaatttttactttttttaaaaaaattaggtaaatataccaataagaaaataacacgtgaataatgacttaatatttaacaatcaattacttacagagttttagacatataacttaaatattatgaccgtcaaaaattaaacttaagtatttattcacaactgagaatttttttgagaataaaactgttatatattagatgtttaatgttaagatacaatagttcaaagaggatggggtgtttcctccaaccaaatacaatttgtgtccaccgaaagagcatacttagctaacttatgaacatgagtattgttgggtttttgtgccctaaataaaacccattac

SEQ ID NO: 98963 - DNA, 533 bp, Cannabis sativa
tcaacattcttagtcagttcatggcttcaccacaaactccacacctgcaggcagcccaccatctcctccgttacttaaaaggcagccctggacaaggattactttacttagcctcatcttctctcaatctgcgaggcttctcagactctgactgggcttcctgtcctattactcgccgctccacaaccggattctgtatcttcattggggattgtttaatatcatggcgtaccaagaaacaacctaccatatcccgaagctcagctgaagccgaatatagagcacttgccgccactggaagtgaactcacttggctgcaatacttggttcaagatcttcaaatttctcaaaaccaacccgccttcatttattgtgataatcagtccaccattcacattgccaaaaacccgacctttcacgaaagaacgaaacatattgaactcgactgtcattttattagagacaaaatcaacaaatccaaactcagactcagccctgttagtagcaatcatcaactcgccgacgtcttcacc

SEQ ID NO: 98964 - DNA, 2002 bp, Cannabis sativa
aaaaccaataaaatttaatgtaagcccaaataaaagtctaacagtaattaggttaaaccttaactcttaatgagtctaactcatccaaagtttaattggaataatggaggattactcttacacaatcatctagctaaagcttctcacataaccatgcaaatgttcatggcgaaattgaatagaactaggagaactcatgaactgtgctagagaagataattgtgtcatgatcgatatatcatcatctagctagggacacttcaaaggtttaaggttggttagttttattcatgtgggagattgttagaaaaattaataaattttcacaagttcaaaggcttttcttttttttttttaaatatacatctataaataaaattgaagttagatctcatagccattacaaaagatattaataagtatagtaaatatctctaccatatccgtaacattgttggcaaacaagttcaaaggctacacactctctagtctttccttatttgtttgttctacttctagtacttcttttgccaattgaaagaatattcgattttgaattcatatatattatgaagtaaattagttttggtatgatctatagtccttatattatgaagtaaattagttttggtatgatctatagtccttatattatgaggaatgaaggatgtgtctccaaaggcttttaatttgtgtaaatagagaatactatatattactactagtgagtgagtgagtgtgagtccatatcttagtcttaattaataatttgttaattaaaattttgtatgtgccaaccaactaagccacataggataagagtaagacccaccaccaaataaagacttctaaattagggtgtgtatgatgtgaccgcacccaacagccgtgaatatatagataagataacattatggaaaattaataaattaaatttacaactatacattacataattcttttctttctttctttttgtaagtaattttagaaaatatcaattcttaaactaaaggtttaatttatttttaataaataagatgtaacactaatgacattaatgtatccaaattcaaaagtctaaacaaaaactaaatgcataacatatacaataatataagtagtcttttagaaattttttattagattggcattagtaccaactaatataaatttttgggggtcttgaaatggatttgtagatgccaacatagcaagctgcgaaaaagaatttacattttagttcacaatatcgtgtttatgatttgaagaactaaaaataaaatacctaaatttggacaaaaaaaatgcaaataacgatcaattttgttcaatctgttaaacatattgtaattgctagaatatatagtcttaaacatattgaaaatagaagaaaaagatagaatatggtttgagaatttaagttaaaggatttaataagaatttgtgagattattgttatctggttaatagaatttgaggtttgacgtattgaagttcttatgtacaatatagtactgattggaataaaattgatttaattacccaaaaaaaattaaatacataaattaataacattctaaattatgaaaatatgtactatttgcatttttagagttgtttgttttaatgttaacaaactgaattttaaataatttaaagttgttaaataactttttgcaatgcaactatatatacatgtagcttatatatagtcacataaagtaaattctttttttgaaaaaataaagataatgtaattatagggagatatatttgtaacgatttataatctcagggaatttttataataataaaaactaataggataaaactctataagaatcataattgaatttttaattttaaaataaaaaactatatatataataataattattaattactatatttataaaataataataataaggaacttttttatttttacacttctaaatatttttttttttgtatttttatggaattttatatagaaact

SEQ ID NO: 98965 - DNA, 613 bp, Cannabis sativa
gctcatgtgatagaacaccacacttgaaacagattttgggcattttctcatactggtattgaatccataggtccttaataccctttcgacgaaggtaaaagcttgagaacaaaggtttatttacgtccaccgttgcccgaaatcgaacagtacccatcccaaatgagcctcgttcaaagtttctctcaatgtgtttgggtagatcataggatgctgagacttttcctgcaagctcttgcaagtttgttttgttccaataaaaaggaggtatactcttgagtcgaacccaaatcggtgtttgatcgaaagccacctctgccggagttagccaggatggccacggcataaggaccaataaaaacccacaaaccacccagggtcttctaagtaagacattttccgcatcaaacctactccgaaaagtgaattgcagaagtccatcatccctttccttccagctccatcctgatatggaactccacgcatttctgagggagccataaatggccttcctccccaacctagaacagcagtataatttccccagtagaattcggtttggttcctcattatggtcaacttcaccagggtgaaggtcacacgtaatatcctt

SEQ ID NO: 98966 - DNA, 848 bp, Cannabis sativa
ccgtgaatttttggagtgaaaacatgaactataacggaaaaggtttgagcaattagaacctgtcataaataaaataagattattcaaaatcaaacatggtaagttctgtaatgcttttaaggatgctaaaaatttacacatcatttataaatataatattttattttatctctctttcacattatttttggcttacttctaaaaatattttaataatatataatactctttaaaaatattataattaccaatcctataatatatcatccatacaaatttatacaaatttttaaaatgacattattttcttcgtataacatctcaatattttacatcaatattttacagatgctcttaaaaacgttaaatggagcccaataaagattcgggtcaaattccacccgagaacctttcgttcttttagtccaataataaaaatagcattattgcataaaagccctttttaattaattatttttagttattttcctttttcatgtcaactcttctgcaaggctaacctttttctacttcttctctcgatccctttcaatctcaaatcacggccaactgaaaccctaatttcgtctcactcttcaggcgccatccaagtcttcctccatggcccgtcgagccctccctatcatcagacaactcacggctcggccaacacccgtcgcctccttgggagccaaacccgacccgcacactcgatccgtcacatacatgccccggcctggtgacggagctccacgtcctgtaaccctaatccccggagatggtgtcggaccgcttgtgaccaatgcggttgagcaggtcatggaggctatgcacgccccgctctactt

SEQ ID NO: 98967 - DNA, 3616 bp, Cannabis sativa
attgaatgaaattagacaaatatccttaaatctaacaatctcaatagttcagagaaaatttttaacggctaaaaaagttcaagagacatgatttagtacatgtcaaaattctaagtgaaaaaaatcctaattaatcttaaatatataatctttctaagtggacttatttctacatcatcttttaagatagaatgtattttttttttcaaaaattaacaaattgtatatcaaccttaggagcttctaaattaaggaataaggagaggtgaaaaggtgagttggcattgtggggacagagaggcatgtaaaaggtcctacagtagtaacgattgtgggtcagcaccataaaaggtagcaacgtacaagaaagaactgctactgctacctcataacatatcatatattatatttaactcttctcaaaaagtcaaaactcaaaaccaaatccaatctcgcgcctcagatcaaaccacttaattactttctttctctctccttattttggtatgtgtgacataaaaaataaaaattaaaaataaaaataaaaataaaattgtttttttaatatacttaaataaatgtttaatttttcttgcacatgaaaaactaattcttcatcttcaatttaagagcgtatcaaccaaacaaattatgatatttgtgatatcatattaaataatgtgtcctaatttgattaaatatagtttgtttatagtttaaataaacagacgttatttatacggttgggattttttttatttttttttattttaaaacagttttgttttatatttttatgaaattttttataaaaactcttataccaactaacggagtaacttaaatcataactaaaatctacatagtaacccacataaaaattacttgagaaactaccagaacaaacccaaaccgtaaattttttttaaaaaaaaaaagttaaaaaatggtatgtagggtaatttttttttaatgtgtttgtcaatatgaacaagtcttggctagctccttgtcaatagtttcttgatgcttcattatgttatttttttggcaatctggtctttatcgataggattttggcaatttctcaatgttttatcgatgattttttgttttagttttagcatttgacaatctgtttaattatcgatagtttatcgatgatctttcgacatttttttgataggttttcatgctaaccgtggttttttttttttatgatttgtagattctttcaaagcttatagttctatcctcagagtatttacatgtcgtgactgtgacatttagccaattttgataggttggtactctattcttttcttcagtgttatttcacctgcataaaatgaaacttattgctgagaagacggaagatatgtggtcttacattggaaagaatgagattagatttgtgattgttaattaagtttgcactaattacaggccttaacttcacacaggggctaaaaaatgaggagaagagtgctcacttgggggaagaccggttgataaatgtctatttcaacaggtttgatagtgtgaagatagaactacttcgaaatcaattcttaaactgtgagactctggaagaggtgcacaacttaggtttgtgcttatttatggaggcagtgttactgggacgtgagggtaacactcacatttcgtctgatatacttagatatgttgaatatcttaatttatttttcaagattctttgggggaagtacttatctgccacacttatgtccaccctacaaaaaaacatgttcaatgtaacaccctattctttggcatgctactgtgactttctaattactgtacactcctttactaataaaatttttttcttaaaaatcgtatcaaatttgaactttttaattaaactttaaacttgtaattatatatctgaacataaaagtcgggaacccatttctaaaatttataaacataatcaaaatacattttataaacatgtcgcacaacgactataaaaataaggcccaagtcgtcccaagactgaactctccaggtcgaaccatcttgacatgtataatcatctccgagctctggactcactattgctcagtcttagcctttcctttactacacatgtaaacaatatttgtgagtcgacagacatagtaagaaaagcatataacaaataacatattaccgacttgtatttaagcgctcatacacctatccacaaggcttaacagatgatcaagaagattcttaacagaagtacaacctctgtaccacatgcactaagtactcatcatgtactagtattggtagggatgaaccgtaccctcagtactactgggtgttgtacgacatgcactacgtacttgtctgtactagtgttgataacaccggatcataccctttgaacatcatatattgtaccaatgtaatttgtaccactactgtactagtattggtagtatatgattcacataacatagcatgtaatttatgtacatacacatgcatatacatgttttatactaatattatctcgttaacaaattcaagtgtgtcggtcaatctgaatgaaaaaatcatgcattaaacgaacaccctatgtcacaatcacataaatgggtaaacaacttgctaaaactttctcggggacctaaactcaaaactaaaaatttttctatcgataaatagcatggcaatactctaaatattgaggaaataccaaaactaaggctcccaaaactactagaatcggtaaatccaatctccaaaatagttaaccatttctagagaactggttgaccagtttcctacaaaaaacccaaaaaacttcaaaacatgctcaaaacttccccaaatatgcttatgtacttatttgttccttaatttgttagttacttcttcagctgctaatattactgctaacatgaactcaattcctatacttaatggcacaaactttaagggttgcaaggagaatattttgctggttctcgactgcatggatttagactatgcattaaggaaagaacaacccgcttctcctacagagtaaagttcactaaggtaaaagcaaacttttagaagtgggaatattctaattacttaagtctaatgctattaaagcgcaacgttctagaagcatttagggacggtatgtctgatgaggtatctgtaaaaacttttctgaagagattgaaaaatattttgcaaagaatgaaaatgttgagataagcaggcttttagttgatcttgtccagatgaggtgtaaaggaaaaggaacattagggagtacattatggagatgtctaatatcgctttcaaacttaaaacactaaagcttgatctctttgatgacttacttatgcatttggtactcatatcccatcctgcacattatggccagtttatagtgagttataatactcaaaaggagaaatggactcttaatgagctcatttcacattgtgtggaagaaaaggatagattgaagcgagaaaagattgaaagtgctcatcttgcatctacctcaaaaggcaacaagcggaagcagactctagataaggaaactacaatgggaacttcacaacccaagaaataaaagactcgggatgaaggacttaccttc

SEQ ID NO: 98968 - DNA, 792 bp, Cannabis sativa
ataggttataatgtacaaatagattgaaacatgagcacgtaaaattgataggaacacatcataaagcagagctaaaacttacttcaaatatttgtaatacagaatagagaacacattaagaaagaagataaagaagaacaaaaaaaatctaaatcctacttcaaacctacaaaaaattgactacttagtaaaccttttacgggataaaataacttacttccaatctggttataaatacaggttgcccttgtctctgccctgacaaatttccctgcatatgtatggtgatatattggcaaagcaatcaaagaaacaatcatagcttctttggaaaagatatctttcttgataattcactaatgaaacaaataattagatatattattttccgaatttccctcttacagcatgcatgcacattctaattatgttttgtcaaagttatattttaaacatctcaactatgataacttgtaataaaaatccatctcccataacgacgagctctaaaccttactggatcacatatcctgatttttcacaccagtctaatacagaatactagagggtgatgtttggtttggactggtaaaatgactattcccgtgaagaattttaaatatactattctggtacttattttttttaatttaaattatataaaaatatactcttttttttcgatttttcgaaaaagagaggtcttagacagaccaatctttgcccaaatgtacattagtataaactataaactttgcagatccaattccagtggcaccacatatattatga

SEQ ID NO: 98969 - DNA, 1572 bp, Cannabis sativa
  modified_base (564)..(564): a, c, t, g, unknown or other
cttgcaactcgatcacaagtggttcttttggctcacagtagctcttttaggcttactatccctaaatcacaagcggatcttttggctcgtctttttggatcgatttttcgggtttggatcggttactcgttaaagtttagtttggctctgataccatgttagaatgcaaaagtgtatggttaaggtagtagaataggtgagtgtatggtaaggtgcacggggttccatctcaaaactaattgacaataagaggagtagcccatgcattttatatatgctatttaatttcaatacattatcaatgtgagactctccaacatttctcctcaagatgtagctattttttttactcaccaatcttgcacgactcgatcacaagtggctctcttttggctcacagtggctctttttggcttactgtacccgaatcacaagcggctcttttagctcgtctttttggaccggttttttgaatttggatcagttactcgttagagtttagtttggctctgataccatgttagattgcggaagtgtatggttaaggtagtagaataggtgagngtatggtaaggtgcatgaggttccatctcaaaactaattgacaatgagaggagtatcccatgcatcttatatatggtatttaatttcaacacattatcaatgtgggactctctaacattttccctcaagatgtggctatttttttttgctcaccaatcttgcacgactcgatcacaagtggctcttttggctcacagtggctcttttgggcttactatccccgaatcacaagcggatcttttatctcgtctttttggaccggttttttagatttggatcggttactcattagagtttagtttggctctgataccatgttaaaatacgaaagtgtatggttaaggtagtagaataggtgagtgtatggtaaggtgcatgaggttctatctcaaaaccaattggcaataagatgggtagtccatgcatcttatatatggtatttaattacacatattaatgtgggactctctaacacagaccaaataaaaatttattatgatttgttcacactagcagcagagcaagcaaacccagtccctaattgaaatgtcaagcgccgacctgagatgtcaaccccatccctagccccagtcccaacagccttcgttaaagaggaagaaggtggaatcgtcgaccttgcagaagtgtcgattctcgtctgtggcggacaaaaaacgagaactaaggatggggttttcatgatgcagggaagcaattcgtggtgctcatttacaataccaatgcaattacaataaagcatttctgtatagtagttagtggtgaagcttgctgtccaaatctgttatagagctagtctcacatccacaattaatataaacaatgtagttctttatataaagaactgtccactatcaaattgtccctttatgacatccgacaaaattagaacattatagagaagatgcatatcaagaattaatttgtatttcctttttgttagttttgtttgttactactgtaagcttcttttgttggttaagttagtta

SEQ ID NO: 98970 - DNA, 696 bp, Cannabis sativa
gcccccggcaattccaacttaaaaaactcataatccttggcgggcccaaattttggtacccgcctttagctcgtttttttgaaaaataccaacttccacactatcttcccctgggccgaaataattatccattcccccctcatttattttttcaattaagcccatttctctttcagccacatgggcctttgtcaaacccttttcaccactctcattatccaccaattgatgggccggccctaattcttgaatagtaacctggcccaactcacctacctcttcaacccttcttctttttggatccgtgaacacaaaaccaccatttgcacaaagactttcctttcccgcttccccactgattggtatccctccattcacggcaccagatcttctcccttgaatcccgcccacaatcccatgatcctctccgacgatcactccctcaacatcctcgttaatctccatgtcctgtctgtcaccccgatttctcggatctgcctctctcctggagctgttagcagacgccggagtaccactgctcctaggaacgccggcctcaggttgtaatggtctggccatgttgtcacgaagccaccgtgcaccaatctgtttttgagagcgtcgatctggggctttcatgaataagccatatggcttaacaaccttctctaatggtccgtcaaaaacacgggggca

SEQ ID NO: 98971 - DNA, 740 bp, Cannabis sativa
cactttcaatgtgaggttgtatattagtaagagaaatactgaaaggcgtatagccctaagcatcctgtaatcatattgttatttgtgtaattatgaattgagtttcacataatttatttataataataatttataaagtatcgttaaacaatcgtaatgtcctatttttaggtgatgttaagtactattattgtctaatagaaatcttctccataaatgctaaaaagacattatttgtatttaacattctcttagatgtaatatcactgttagtgtaattaagtattgaatcttatataatttaagataaatactattttggaccttgtattttgcaacagataaaaccttttgttttgttaaataataaaatagatcttgtattttttaaaatgataaaaataggacctgagcttaattttcaacaattttttttaaaaatataattaacttaaagacaattcctagtagagatacaaaaaaaaatgtaaataggtttgtcataacacattgagatcgaattattattaaattttattttgacaaaaaattatttgtaccattttaaaaaatacaagaccattttattatttaacaaaataaaaaatttaattaataagttttacaaaaataatatttacctcatcatttaaaataataatgtttaagaagtattaagcaattgtaagacgtgacactcataggaatagtaaatggtgtgatcttctatattttattat

SEQ ID NO: 98972 - DNA, 522 bp, Cannabis sativa
ggctgcctctcccccattcctaacagcttgtttagaacctgttttacgaggagtaatccattttgaatcatcagagttgttccctcctttagtctgcttctcatgaccaccatcaactattgtttctgtctggctgcccctaatatccttagctacctcttctagtactttctcaccattaggcacattcttctctaccataggagtcttatttttcagctcaacagacccttttttcttccaaacagtcggtcccttctccttattgcaattagcaatagtatgtccaagaagaccccatgccccacactttgaaggaagccattcatactccacaaactgttctgctagttggtttctctcattgatatatgctattgtttttggtgggcaatctgaaatctcaatgttcactaaaactctagcatatttaatcactgttctacttagagtgaccttgtcaaccataattggtttgccaatggtactaacaagcgcactaagattgtttctaccccaata

SEQ ID NO: 98973 - DNA, 1018 bp, Cannabis sativa
tttttttttttttgtaaattaattcatttgcgtgttctaaattgttgaataattttatactcttttacaatagaaaataataatgagaatgtgaattattgtaattattgaatgctcaaaacattattaaacctaatcaagtgtttttgattgagccaaaatgacaataatgacaaactagaaaataatttgtagaagattgttcaagaaacaaaaccacttttttgaattacttgatggaaattttattatacaatttctcaaaggagtaactcatcatgacatttattacaaatataaaagaaaaattaaaaggaaaaatattaaccaattaataatattattgagtaataataataaataatccaatgaatattaagtgcttttgggtattgtttttcacttcttgtcactcactccaagtgtgctcttcacagtttccatagcaccttgagtcatgctcttcatttgctctccagtctgggaaaattcatcatacaacacacaaatattaaaaatttcacaaaatttaattcaataattattaattattaattattcgatcaattaagacactaattgaataattgtgaagccaaaatattattagtacctgctggaggaatccagcactttgatcctttccatgttgaatagaatcggttgctgaatcagttgctgaatgagcagcatcaacggtcttatctttggtttcgattgctgagtcagttgctgaatgagcagcatcaacagtcctatccttgacttcggtagttgaatccttagcacattgtgacatctcttcggctttagcctaaaacacattataaaacaaaatttacataaaaatatagaaatatttgatcacatattgaaagctttcttctttttcttttttttggtacctcagccttggccttggtttcctgcatgttcgacataatgattttatgggaaaatttgaaaaaaaaaaaaattggatgtgtttggttgatttcttttgtagtgctttgttttt

SEQ ID NO: 98974 - DNA, 606 bp, Cannabis sativa
ataaaaaataattataattataataatttaaatattactattatttgaatggataaaggtttttaatgtgttaggctttcaagttaatttatttagtttttcatgtggtgcttttagacttatcgtatcgtatcgtataagtctatatttttttatatcatatcgcgtttgtctatattttttcgtgtctaagaaaatatttttttgagtcgtactcgtgtcgatttggtgttgtgtcaaaaagcactaaccagacccataaatagaatattaccttactccaacaattatccaaggaacactcttaacatacttttgaaagtaaaatttacttccaggagccaaatgcacctgtaaataaaatcttgtaagacataataggatgcatgattcaacgaaaataagataagtttgcaacctcaacacacctacataaatttgttgtgcaatgtcaagtaatcccgacttgctaacagaataaaaaattgtggaaagaagcatcccgaataaatagccagttacatttgttatttatacatatacaaattgcatatttagattataaatgttatttacatagaaatagattgaataattgtgatcata

SEQ ID NO: 98975 - DNA, 1238 bp, Cannabis sativa
ttaaataaaaatttatttctttaaataaaaatacatttccttaaataaaaatattcttataatatcatctttatcttctttttctagtgccaaggtttatcatattcctagagaaatcaatactatggcacatgctcttgcaaaaaaagctttaggaatgaataaagattggatttggaattgtaatggtagcaatgtgtgtattttctgattttgtaactgaatttttcaaattttattaatgtacagatcagttctaaaaaaaacagtattttatttaattataagataataataatattacaccatagaagtggccttttagcatttctaaagagaggccaaaattttattgggtccataaatatataaatacacaatgatgatgattacgaccagaagtgtagcaccaaccaacaaaaaaattaaaaatatatataatggagtatgaatttattagatttataatagtgagagtgagagaggagtaggagtgggaccaattataataggtcagaccggcgtataagtcgccgactatgtttttatgtagaaatggttctaaaagcagcctgtgtgtctactctttgtggcgctggctctactacagtcacccaaaccccctactcctctctctctctctcttcatcaatgacttttcttaataagctgacgctacactactactactaaactatctcttgttagggctacccactcaaatattgccacctgtattcttatttttatatctcagtaataattgagtactagtagtgcccaccacattttttaggtaacgttttacaattgattagcgatatttttaaaatttattttcttaaattatataagaactgatatttaattacacgaagaggaacatgacactgagaaaaagtactaagtataataatgttttttagcaattctctaaaaaaaataagaaaaatgtcaaaagaaaagtataagagcatctcccataattaaattttagaggatgcttactacaacatcttcaatgattaaatttttaaaagggatattggcaacacaatcatccgaatcttatattttttaatacttaactacaaaaactaaaattttggtggcaaaactacccaaccctcttttctgttagctatttactttttctgtccaaaaaactatgttaagtgtcacagtctgtacacatgacaaattgtttgtaacgccctaatgctaaggcacgctacagt

SEQ ID NO: 98976 - DNA, 722 bp, Cannabis sativa
  modified_base (31)..(43): a, c, t, g, unknown or other
aaaaaaataaaaaataccgcctgacagtatnnnnnnnnnnnnntgacaaaagttagtatactatgtaaattttccaaaaaaatatattgatgtataccatgtaactctagtggtactgcaaaaggtgtactaaattaatttggcaatatataccaaaaaaaaattattgatattaactagtttaaaagatgtaattcttaacttttaaatctcaatattctttcttattgaaatgtatgcaatattcaaaagaattagttgataaaaatcacttttttttttactaattgcatttttattttattttttaaaatgttatttatcatttttgtcccttaaattatgatgaatacattagtgtgcttcttaattattatatatgttaaaaataattctcgaactatttgcaatgttgtaaaatgatttaacagaattatagttagtctggttagtggttagaatcttactaatatttgttagttatagttggttgttaggttaggtaagttgattctttactctagtttaactagttcttgatttggttatgtaaattaatttcactaacattttgtatatataagtccttatttcatctttgtaatttaattcagttcagtatcacactttcattttatttcattttgttctttctgtccttcctctaatatggtattagagaagaagaagtgaagttttcccttgatcttggttctacaggc

SEQ ID NO: 98977 - DNA, 1222 bp, Cannabis sativa
tttgggtcccaggtctaggtctgggttcaggttttgttcttcgtctgggttctggtcgtagtgtgagtcccagatctaggcaccgactaatggtctgttccataccccgttacctgaatcgcgactcaaaatctgaatcactgtcatgggtctcggtatggttctcgttcaggtcccaggtcccatttcggagtttgggttcgggatcgagactggggtgcggttctaggtcccgaccctagttctttctccctagtctggttccatgtttgggtctgagttcaggttcgggatcgtgtcccgagtccaggattcgagttcggatcgtgttccttttatggttctagatctaggtccaatttcaattatgattccatgtccaagtcctaggtctagattcggatccttgtcagggttcgggtccagtgctgggtcccaaatccagacaccaactacaggttttgtccaagccctaggtctagattcggatcccaatctcgggtcccagtctggttcgatttctgttgccaggtcacgagctgggtcctaggttcaagttaaggtctgggtcgagtactaggtctggtcctagttccgtttccgaggtccctatcctaattctgggtccagaacccaattattgtgtgggttttgggtcccggtctatgttcaggttcgagtcctagttttttttaaggtttagttctctgtgggtttgatctggcttcgggtttgggtttacgtccctgtcctagtcctactcctagttcgctttagttccatttgcaattcttagttcgtgtttgggtttgagttcgagtcaaagttcgagtccttgtttgagtttgggttcggatcctaatttaagtttaggtccagatcaggctctgcgtgtgtgttcgcgtcctgggtcttggtctaggttgggttagaatcccaagttccaatcccgatctaagtctggattcaattctgcgtctaagtccttggttttgatcttggtctgggttcgagtttgggtccgggttcgggtgtagctttttgtcttattctaggtgtgggtgttggagtacaggtgcgagtctgtgtccgggtttgtgtccaggtctggaccccgatctgtgtctaggttcgagtccaactccaagttcgggtccctactgctggtccaagtttgggtctacgttaggatctcggtccagatctaggtccagcatttcga

SEQ ID NO: 98978 - DNA, 507 bp, Cannabis sativa
tttgatactcgggatcccgatccgcatgtttattaatatataaattattaaaattaatttccgagtttattattataaaatgcgggcgttacataaactaatttgtttatatgtttgtattatagagggattaactactgtaggaagtgtatatttgaaaacctatcatttttttatattttttccttcgagcttattttgtttaaacacttgttgtgaacttgtgatgtgccattttacagtattgtatctattttctcatgttgtatttttactttctaaactttatatatatatatatatatatattgttaacaaaataagttgtgatattttataatagttattaaattaaattatataaaacttaatacgtaattgcactaataataatagtgcactcctagatagttttaggtactattaatattttttaatatttctcaaaataaattatgtaattcatgccctcgaaagaattgtcaaaaggaaaaattaggaaaaaga

SEQ ID NO: 98979 - DNA, 664 bp, Cannabis sativa
ttaactatgtgtgcctttttattgtcattaagggcatgggttattattttgtaattattaaaaagtggggagtgatatcatcacttctttttaaaatttttggtcaacttctgtgtccaaaaatacatgtgagaatatttttttcaattttcgaaaataagtttcaagttttttaatgtaagcatgaaaaattaaatgaccccatctcccttcactgtagaatggctgacctaatagtcattccaaggaaagatcttgagttgcatgctgcggtgtcttggcacaattgaaacattaagaataacttgaaacatggcaaggcaatttctaatgcgttgtagcaataaaggttcgaaagcaaaggaaaacaagcctaaacagaggtggaaaccccaccactaaacacaattaaaaccaatgttgatactgctacaaatttcacatgtggtcagttttgttgggcctattcttctaccttgtcggaccaccacctcaatctgattccaacattagtataatgttgtttgttttgggtctaagctcttacgcttttatttttaggcacttttccaaaaaacctcatacaaatggaatagtgtcgatccatatatactcatgatcatttccatttttagtcaatgactttgattacacacccaacaag

SEQ ID NO: 98980 - DNA, 3984 bp, Cannabis sativa
  modified_base (1069)..(1074): a, c, t, g, unknown or other
tcctttttatagtaaaaaaaaaaataacaataaaaagatagaaaaatatctcatttttcaaataaagggaggcaggcctcaacactaggcccttagtgtcgcggcctgtgtgtgtgatgctgatatttcttgatcttttgtggcacacgagcctcaacactagctaagagtgtcgaggcatgcattaaacctcaatttttaggcagcaagctcctaacgaatttctacttcaactctaaactccagtgttgaggcgcacctatatatatatcttggtaaaaaacgatcctctttgttaaattttggcattttaaatgctctggcatggaattgtagtgttgaaatgctactccactgtttttaatttcttcgccttaagagctccaaccgcaccggaaccataagatttttttctcaaatgaattctctagtgctcttatctcgagaattgatttatttgatatttttcttatatttttttcaatatttttccatttttattcaacactaaatttgtaaaatattaactactaaaatcgtaaaattgcacaaaattagagtaaaattatttaaaaacatactaaaaataacctaaaaatagtactaatatataaacctaactggatagggctccaagagtatctaattttgtacaaatgggtgaagacacacacttgactacacacgcgataactgaaactttattttttacagaaaatttatttaataaaataattatttttttgttttattattttaattgtttggaaaacaatatatattgttaaaaaaattaaatacattctttcataatttttcattataattaagaatgctttatatatttttcaaatgataaaatttcatttaatataccgaataatatatatgagagcatgctaacatcacagtacgagtcattgccagttttcacactcacagtaacacaaaacaaataaacaacttcttttggctactgaaaaacaattacaaattaacaatttgttagccaatacaatactccacttttacaagtttaataaaaaataaaatatataataataataannnnnntaataataaataaataattaaataaatataaagtggggttcatatgcttatttcaccgttaaataaacttataaaagaaggggaaatatatttttaaatttttttgatattaaagtttttaaagttttattgttgtggtgtgggtgttatagtttttgattgttttttcaaactaacttatacatgcggtttttttaatttctcaaaccgtactcgcactacaaaattaaaaaactgtagaaatcgcaccacaataaatggagtggtgcggtgctttacgatttggactatcactaaataattaaactattataaatacaacaaagtttaaacaacaccggtcaaaaataccataaggttttaaaataaatattaaaaaagtttttcaacaatataataattagtggactttagactgggcttttacatattagatgtaaataaatataaaagttgtattgttataatatgtggtgcgttgtgattttaaccgtatattagcaattcaaaattgcaaacagtactgcattgtgcggtttaggaaaaattcaaaccgtgaccgtactacaaaaaaattcaaacgacatttgttgcaatacagatgatttgagtgatttaaacagtttgaacaatttgatgaataacccaatttaaatggaaaacttacaaaaatattagaatttaggttaacttttataaaaatactgtcacacagaaatgttttcaaaaatactgtatttttataaaacagtagaacacagaacagaactactcaaaacaacagtagaacaactataaaacactagtgaaaacttaacacagtatactgtaatatgaaacttataaaaaaaaatacagtaaaaaaataaaaaatcccacttgacattatttttgtaaaaaaataacaaaaattattgtaccatataaattttttatttaaatttacaagagcattcctaactcgcgatgaaagttggcccatgaaaaaaaaaagaaaaaacttataatagaataggaagaaaatatgaatattccaaaataaataggatgcttttattggcttgtaagttgggtgtgagagagtgagtggccctcaatctcaattctcaccccttcttcacactcgaatccaactcaccaaacattcattccttttatgccataataattgttcttttctcttttttccttttattattcaaaacccaaaccctttcaatccaatcctcccaccaaaaatgacctcctctcaccaccactccgagctagactcctacgccaccgactccgtcgcctcctccccacgctccgatcatcagcctcacgaccttcacacacgtgtccgcttcatgtgcagtttcggcggcaagatcgtcccccgaccacatgacaatcagcttcgatacgtcggcggtgatactcgcattgtcgccgttcacagagccaccaacttctccggtttactcaccaagctctctaaactctctggtatatattttatttattcaattctaatttctaattcaactctgccatcggatggtgggttcgatttaatttgagttcatccgtatagattaattgttgttcatattttgggggttttgtctactgaaggcactagcgacgtgatcgtcaagtatcaactaccgaatgaggatttggatgctctgatctcagtgaccacagacgaggacgtggaaaacatggtggacgagtacgatcgattagttcaaaaccaaaacccgaaatcgacgcgcctccggattttcctattttctaaagacgaggaatattccgaaaccagtagtattacttcgatcctccacggctccactaatcgggacacttggttcatagacgcgctcaatagcggtggcgcgtcgaccggtcttcagagaggccgctccgaagtttcttcaatagtatccgaagtaccggattatctatttgggcttgataatcccgatgatcctcagaatcgcgggggtgatcccaagcataaattccgacccgttttgcacgattgcgtctcaggttcggatcctggatctcccgctccaagagtttcttcgccgttttgctccacttcatctgttccttccgtccatctaatccccaacctcccaccggttagaaccaaatcagaaagccaattcccgatgaccgaaaagagcgaaacacccatatcacaaccggctgggtacacagaaaactccatgatgcattacgtcacagctgcggacactctttatccggctcaacccgtacgccaagtgcccctttactatgtcccaacttcgataccgccgccagaaaatttcccaatccaacatgtttctgttccaatacgggcgccgtatgttccggtgcagcagtatccggtggtaacgggtcagattccggtcgggtaccattatccggttcaaggtgtggatgctcaggtgtatggtggtggaggtctgaggcctgccacgtcactggatccacgtgatctttcgggggccagattggtccctgatggagtgagccagcagcagcagatgctatatggtgtcagaaatcaagttccagtgtatccgggtatggcagtacccgcccaaggggaagatttgcgaggacccgggtttggactcgatttaaagataagtaaggtcaaccattcatcttgattcttgaccaattaaaaaaggcaaaagaataatcataataataaacgtcaatggggatcattgattagtgattgattgtttggtacataattttctattagctatatgtgtataaacattttttgttttgagggatcgatgattgtatgttcaactgtaattagcttcttgatttgtttttctttctagtgtgatgaacgtgaatggttatctgattttgtttttgttataataaaga

SEQ ID NO: 98981 - DNA, 1841 bp, Cannabis sativa
caaactcccagaaataataaattcagagtacttacatctatcaagccattgataacccatgggaaggagttaagaggtgaaattaaagtattaaagagagcaagacaggtaaagacctgcataagagatcaatattattgacatactctactttttttattaaagataaaccaaggaacagaaattgaaaaagaagatatgatgcaaatgaaattaagcgaaccagagaagtagtaatctagtatacttgcttgaaggaaaattagaataccattgcagcatcaagttgatgacccattaatgcaacgagcccaaatgtgaaaagagagaacagggttggtgttgtagcccaaaaaaatacacaccatgcatccaagtacttccgtgtctattaatacagataaaacattattgttaaaaacttactcaaggtattcataaaaaatccagtagattgtataacccttaagacactccaaaagtaaacatcatacgcttaggtgcatcacttccaaagttcttgtttccatcaaccagttagagaaaagaagctcccagccatacatctttagagtgcgaatataagtcaaaagttcacctgttctcctaatcctggccaaaaccgaaaaaaaatgctacttattgtttaaaatagtaaatattactaattataatgttgttgtaatagttattagatttctctaaattttgctaaaaataaatcagctagccaggacaaggtctttgtgagcaattcagccatacttctgatttgcataagcatttcattccagacataaggggacaaccaaaaaaaactaaaggatggatcaaaagtaggtgaagaacaaagaaaagaaagaaagtacttcaagaattatttttttttcttttgctctatttacttcaagaaacaaaaactttcacaatagaatatcggctctccccaacctgctgctcatgtcatgaatgaaaaaataatatttaacaaagcatgatgagaacacacttcatcttgctacaccagaaaggaaaatgagcatacctttcatccttttgcttcatcattttctcactagcccttgcaatcaatttagatatccacttattaactgcaaacaagaaatttcaagcttcaaatacgagtcctcttaaaataaaaggcataacaacatcatatgtatcatgcatgagagttgaacatttgaataacatagcttcaactaccttcccgtctacataatctgacagaaataatttacaatgctctaaaattcattatttctagtttgattaaacttgctcaatcaaaaattggaagtacgcaggcaatgcaaatatatatttatatgtctaaaaaagataaccaaaaattttgcaccaaagttaacctggtccttagcatgaatggtttaatgtatcaccattatcttctatttagtagtacttccatataggggctttcatccgtaaatgtgtacagaaaattcattcaaatatacaaaggaaagaaagaaaatctgctcattactgtacctgtgtgccaccataaattaggtaagatgaaaataaatacctggtatcaatgcgatggtaatagcaatcccagaaacaaatgcaaatttgacttgtgtatacaaaaggaataaggccactccaatttgaaaaggcaagctgaaacattcacaaaaactagtaaccaaactacggagaaaaatacacaataaaatgcttatcaaatgtaacaaatctatttttacttgctcccaggctgtgatcaaatgagaatggataagaggattctcggaatgacgtgagggggtagggatggctatatttct

SEQ ID NO: 98982 - DNA, 1741 bp, Cannabis sativa
attacctttggatttaagaacaaaactagcaccagcatctagttgatctgtgtgatcatcatgagttttgtgggcattaatgtttttgtttgaaacttcatcttcatcatatatagttcccataacatatattcttatgatgatctctcttttagtttctttctctcaagaaaagaaaatgaaagagaaaaagagagagaggatatttatatatatagagaaagagaaaaggagaggataattttgattatatctcactacaagacaattttgaagtaagaaatttgtgactaattataaattattatttttatgttgcgactaaaatgttcatgattaaaagtattagtcataaaaattataatttgttgtgactaaatatgttttagtcataatacttattgtgactaattaatttaaattagtgacaacttgtatttaaatgttatgttttagtcataagtaattttttattgcgactaaaagtcacatttaattacaaaatatttatattatgattaaaatgttatcactaaaagtaattgttttttgtagtagcccgaaggaacaaaggagatgattaaataaaaacattgttattcagcattagtggtgactggtgtgtagtactttctaagtgtgtcatgttgagattagttaacgatattttttaaaaattattatattaaattatgtgagacctgatacttaattagacgaatagcgatattgacacataggaagatgttttacactaatatcactttttagcaattattgtatataatatttgtaaaatatatattatacgcacatgcatttatttatcaattggagcattagctgtgcaattattttaatctaacttcaaagtcaacgagtgtgttcatttaatttgttgaccatgtcactataatatgagaaaatagagagcaagttggcaatgtgaatacatttttttttttatcttacttattttgtcgatattatactatttatttggatggtgccgctaacaatttagacttttcttttgttaaaaaagaaaaatgatgtcaaaaatagaattgatattattatatgttataattcaggtcattttatcttgaaataattaataacaagctaataatatgttggggaatttatgtaaaaactttgagaaaaagaaataattattaacactgtcaaataataactaatagcttaatgaactataagaaaaaaaatactaaaaaacaatttcttccctcactgtcaaaaatgcttctaatttttttgccaagctttatgtatatacttaatctagtaccatatagagcatcatttttattatttttacttatgctccctactttaatttgtatttaattattttaataattttataatttaatttttaaaaaataatagtattttttgttaaaataatattaataagttttaataaaaaaaaagtagagaactcactatatttatagaatttcatattcattctttattatagggaattactttttatatgactgtacttgttcaaacacattttttattttagctaaagagtgattagagatgatcagtatgttaataataagtattttctcacgaagtacgcgtaactacacaaatgagtatatatgatctctaaatattaattgaatttttaaattttaaattccaccaactcttttggctgtaattaaccttaacttgagtatttttttagtattaaattaag

SEQ ID NO: 98983 - DNA, 602 bp, Cannabis sativa
atcaaaacaaaaagtgattcaatttctaccattattatgatattccgtattccaaattccaattgaatacaagaaatgtattcaggatttgatctgttcaatgagataataagataaagacataataatcagaaacaacatagaatttctttttttgcacttaacattttcttcaattgttaaaaaagaatttatagagaagagaaacatttttacattttttttagtcgaattcgtagaagatatgaaatgtataaataatgtgtaagtcaaaaaagcgaatataactatagctatctatatctaagctctctcttttctattacagctttatttggaatagcacatgctaggctttatcaaaaaatctcgtttatatattcaatctattttagaaaaattataaaaattgaagtgaagcacgacaatttacttaaaattacctagagactcatgtacatataagatactcgattagataatatttttgtaataagttatgttatgggatttacatatacccataattgttgttataattcaaattgagaaatcttattttattgacagaaaaaaattagttatgtatccatttgaatttt

SEQ ID NO: 98984 - DNA, 731 bp, Cannabis sativa
tataactttaatccaattaataaattaaatctcttaaaatgcgttacacaattttattataattattaatcttagatgattaaagagaaaattaatttaaacaaaataataataattataataaatgtaaaaaaaaaaaataaagaaaattggggtgaaatggccaaaggcagagcgttgggttggcgagaagagtaacaggcagaacacagaagggcattatggtaatttaacacaagttcattgagccacccaggttttcttcttcttcaaccatagccactctctctctgaaaccctaatccaatccaagacgccaattgttacgcacgcactctccgaacactgtaagctcttacaccttattcatggcgttatctttagccttaaattttcagtccttttctttttctcagaatttgatttcaataatttggtgtttggagaggtcggagttcagaaaatcgtctgtttcttaaactaaattaatttaaaaatgaatcgctccttttttttgtgttttctcttttcccgatccgaaacccgcgaggttttttattagggtttgttcgacccgatcggttacgactcggtttgaattgattgggtcagtcggagccccgattactccgatccggcaaccttgaggtttgcttttctgtacccaaatcccggattttacaggttgacccggtcccttcatcaagaacacggacctgggttgaataaga

SEQ ID NO: 98985 - DNA, 1708 bp, Cannabis sativa
  modified_base (39)..(46): a, c, t, g, unknown or other
tactttatatgtgtttatttaatatcgttttagaagttnnnnnnnnggatgtttaaacaacatacttgttagtaagtctaagattctggtaaaattattccaacacatttttctattctatgttttcaaaggtttacaatataattagattttagatttaatttaatttaagtttttgttttacaaggtatatctttatattaatgatattaaatttttatttttaaatttatttttaccgtaaggtccgtaacagttcacattacgtggctatttaataaaataatgtggcattgttataattgacgtgtcttgctatctagtgaataaaatgatgtggtattgttataaaggccaataagaatttttgcctcttgaatattgatgtgtatcaaatcacgttctcttaactttgaagatcgttaaaaattctccttgaattattgaaattgtttgatttaaagacttttgtctgattttagtaagaaaaactaacatggatgaatgctcaagggatataatttggcacatgtcaaatttcgaggagtataatttggtaaatatcaatattcgtggagtatagtttattagatatcaaagtctgtgaagtatgatttagtaggtatcaaagtccgtggaacatgatttagtacatggacaatcaccaaattagtaaaattgaatgaaattagaaaaaaaaatccttaaatgaagaatttttaacgataaaaaatttgaaaatataatatagtacatgtaaaaattaaaaaaaaaaatctaattagctatctaagtatctagtgcttagggttcgtcgtattgtattgtattttattattttgaattgaattatatatcatatttttatatgatactgtgttaagaatatgggaatcaaggaagcactaagttgggtcaagaggaaaggtattcaaaatgttgtcattgaatcggatagcctactttcgatccaagcgttggaaagttctattcgaatgccttcggtgtttggtttaatggttgttgagtgtcaaactcttttactttctcttgtcaatgttaaaatttgtttcgttaagcgatctgctaacagagttgcacattgtattgcccgcaactcttgtttttggtcaggttgtaattttgtagaagggacagcgcctgctgctcttcaaactcttattcttgccgattcggcagtttaatggattgaagcttttcaaaaaatactaaatataattttaaataaaatagaataccatactgaagataaatatgtatgctgaaaacaattaatacgtgttatataaaaatcctattattcccctgtagttttcgtttgggaaagtgcagagcttcctaaaattgggaagcccggccgtgaagtgtactgacatcacgaaagcgatgaagttcacagactcgccggtgatagagctcccggtgcacaacgccattctctctatacagcaagacaacggctccttccacgtcggcacctccgtctggccctgctcccttgtcctcgtcaagttcgctgagcgttgggccccacttccgggcccaaacctaaggcccacaaccacacccaacccttatgcccaactcctcgacttcggctccaagcggggcgtcgagctcggcgccggctgtggagccgctggcatgggattttacctactcggtctgacagacgtcgtcctcaccg

SEQ ID NO: 98986 - DNA, 989 bp, Cannabis sativa
gggggccaaaatattaatttcgaaggatcataatgtaaaatttaagaaatttaggttatgtcatgctatgtatcagtccttatacatcaagaataaagattggtggaactacgaagctccacatgtgagcagttggcattggaaaaaatgtagtaatcaaggataaattaatggagttaaatgagttcaagcaaatgcatttcaacatatcagaactctatttaaaagtttggctaaaagatcaaactcaatggagctggaactcttttatctgaatagacagagttttcccaagcgctgtttcatctcctagcttgctggttggagaagattgtaaatttatagaccagagagcgaattgtaagacaatatgaacttgatacaaaactttattgaatcaagagatttaaacactcttaagtttcatatgagaattctatgttgttgtcatcaatgatctaatgcatcatatttggggtggttaggatgttgctttatggaatcaacagatgtatattgtacaaacaattgttacaaatgcaatcaacatagaagtgaatgtaagattttctaattttaagaaagagaaaattagtagggtagattattcttagtaggcagattattcttagcattcctcttttatgatattagaatgataaaataaatctatgctaaattttatttgcactcacaattataaatgtactccaatattaaaataaataaacttaaattaatttaaaaaatttatatttaatatttttttaattgttttaccacattattttgtgttaatattaataattattttaatttaattttttaaataatgatatatattttttattctaataaaatttcatgtaatttttttgaataatttgtcccaatatttatagggaaatttgattttctatacttacatatacctaatattttatttctaaactaatacatatcataattgaaaatatatgaccacttta

SEQ ID NO: 98987 - DNA, 1089 bp, Cannabis sativa
  modified_base (777)..(779): a, c, t, g, unknown or other
ttagaatgatataattgttgttattcgtgtttttagaagagtgacacgtgacatttacaaagtatgattaatctcaaatggcctgaattaatgtccttaaatgagggaaggcccagtccagacgtaatgggcccgggcccatctgaagcccagaaggctcacctccgaggacaagactcatccaaattcggaaggtcttcagccttcctaaaaacagaataaataaagcccttcgagtgaatattgggacacatccagagatggtattccaagaggcccttccggaagccttttgtagagtgatgtggctgccctctgacgcctaatccctgtatcaaatctgttctcttatgtcagaacattatagtgtgcacaccacaaagggaaagcatcccttttgtccaacggcatgtatgtgacacaacggtacactggtacgacatgacatatgtcacagaccgcgtggtccctagttgtaaggataccttcaccccacgagtcagaatactgccagtgggtcgaaaagtcatgtatttcatgtatttactccaataataggcctagtttgcacaaaaccctagcaagtcacgagtatgctcggatccgaatcctagcctataaatatacccatttatatcttcatgcaagggaggattcacggcacatcttttagattttcttcttctctaagctagaaaaagccaagtgagaaaagatggcaagaagctatggttcttgaacttgtaagatcccattgtaatatatatatatatatannnatatatatatatatatatcaaagccttttggcctaatacatggactcgtggactagggataactaacacctgagcacgtaaaaatcctcagctattatttaaatcagttttcaaaaatctcaataaacaattgtaaaatattagaatatcataactatatattaagcaaaaataaatcttgctcaaaatatggtcttttttatcatatcaaaaaaagagtgcaaaagagagtggatagagagttttattagtactcctctaatattaatagctatatttagagcacttgcccaatagcttttagatgtat

SEQ ID NO: 98988 - DNA, 1490 bp, Cannabis sativa
cgagtcacagctgcaacctctcttgcaattgacattgtaatctatattaagagatggcgtaaaagaccaacatcaggaaatatataaataaatatatatatattatatatagatatatatacataaatacgggtgaataaaaacactgaaaactcaccttcggatcaatgttctgtgcctgatccccggcaagtgcttctccacttactttaagtaagaccctttgccatttatgcgatgatcttgacacacccccttcgttcattgtcaccccaaatggtgacatagatgacatttgggggtgcctgttacaaaccatggaagttaacaaaatgagtacgaaacaaaatgtggaagaaagcacaaaaattcaacgaaaataagcaatataacaataataaccaaatattgaccaaagaacaagcatatcaagtacgagagtcaacaacctataatgtctacctcccttttgataaccacacctttccctacccgacaaatttatatgcatttctcatgacttcagaaaaattccaaccaacttatacactgaggtagaagaagcttcaaagtatcattctttaagaaaggttcattcataacaataattatgtgctatccttcgtatcatcaactaataaacaaactagcctcgtgtatagttcaaaatcttctgtttgctccataaaagaacctgggttaatcttagactagcgtaagccgaagctaaaagtaacaagagcattaccaaagtaaaaacaaaaaaaaacagagcaactgtttatggctgatatattactcccgtgtctatttaaagcgcaattttcataaagccataactctatttctccaattgtactatagcaataaagtttcagtcacttctcgaaagaaagtaagggaattcccatgcaaaaaattcacaatgaataacaacagcgccaagggaaagggggaaaaaaagtgctgccggccattccacttgggcatttttacaaacagttaagacacccaacaaaaaattcactcaaacatgacaaagaaccataattgttaatacaattattgacctttaataccttagactcatggagtcaggggcggaacccatatcggaagtggaacagcaaacaaccagtggcttattggagatcggagtagccagagttaaaccatggaaatgagtcttgatagagcagagatatggtttcgaaaatgaaactgaagaagcaaatgacgaagatatggggttgaaggagacaacggaaaatgccattcgagagagactttaacaagataagaaacgcctcccctgccgcccgactctgtattcaattttagggacttgttaaagttttatgtcatactcctaagataataattatctcaatgagagaaatatctcaatttttgtttttttttgttttttatatttttttgaatttgctcccccaattttagtttactccttcacatagtattattttggg

SEQ ID NO: 98989 - DNA, 860 bp, Cannabis sativa
cagggagttcaatgtacttggcacaatgctcgcaagggcactaaaaacatcaggaaacggttagatcgcggcctggcaaacccctcttggatcacctcgttcccctcggccaagatttctaatcttcccatccttgggtatgatcactcgcccatcttgttgtctctatggaacgaatccgtgaaattaaacttcccttttagattcttggaagtttggacgtcaagtccagagtgcgaagtggttattgataaagcttggcagcagcaggctcctgggaatggggaagaattactgcgcaataaattgaagagaaccaagtcagacttgaagtattggaacaagcactctttcggtcggtgtgatcataagatcagagatctgacgaacgaactgattaacatccagaacgctcctcccagcccttcaaacctcgagcttgaggcttgtgttcaactagagatccttgagatgaaggccaaaatggagagaatctggaagcagaaatctcgggagctttgggttcgcaagggagatggcaactcaaagttctttcatgcttctaccattatccgaaggcgaaggaatttcatctcaagtattgaggatgatggtaggtggctccgcaaccgtgacgagattggcgatttctttcgacagaattttacccaagttttcacttcgattgatctagtgattagcagtgactttgatgatctcttcaccccggctgttacggacgccgagaaccatgatttatgcaaactctcttctgcagaagagattaaacatgtggtatttgcgatgcaccctttgaaagtgcctgggcctgacggcttctctggaattttctatagaaa

SEQ ID NO: 98990 - DNA, 1523 bp, Cannabis sativa
ttaacggcaaaaaaagtttagggggcacgatttactacatgtcaaagttcaaggggaaaaattattaattagcctttaatttttatgtgatagcgaatatactaaaaaaatttatattcgggctatgccatataaatcttaaccaatatgtaaattttctactctcgtgataaatttaaatacataagaggcattaaacataaaaatcctaaagattacataaaccatataggtactctcgttctatatcgaaatctatgtctatttcattagaacataatcaatactcatttttaagattttgtattgaaatcataaaacaattaattagttgtcaaacaattaaaaaaaattaaatacgaattaaatagatacacataaaattgaggaagaattatatcacattaaaattagaataaaatttcaaacaatctttattaacagaccaataaaaatctagttactcataatcattgaaagcatctgataacatttaagtaagaacataagaaaaatagaggaaaaaaaaagaattcttcaaaaaatgttaaaagtctccagagccgcttttgcttctaattttcgtactctctcaaaatcgcatgctgaaaagtgttgaaaaagagcctttatataggtaaaaaaagattagaaaaactttaattttttacaattaaaataggcaggccgcgacactaccttgtagtgttgcgtcccgcttgaagctcgaattttggcagcggactttctggtgcgacgactgatgatgttttggtcataactctttcaatattgcttgaaattgaacgattcaagatgttttggaaagtcgaaacttttattcatattattttctctcaaagtaaacacatcatagtcgaaaaatgcgcttgaaacttcatacttgatttttgattgtaaatagaacgtgttgagtatccaaaacttaaattttttcacaatttatatcctaaaattccaaatttcatgataattcatcatattcatctcatttaacatgttttttttctcatttttaattcacattatgaattttactatttaatcttgaaacaaatagaaaacaatcataattctgcacaaaatgaatctaataaattgaaacacacctttaaaatattttataaaatacacctaaaactaccctatcacccccaaactatgaccatcgtattttgttctttgaagttttacttccaccataacatgtcccttttaatgataaaatttcaaagagcaaaatatgatagtgatcatactttgggagagaagattgttaatttttttgactgaagtctaacaaaatttgacagaagtttcataaactattaatgttaaaagtagaaagagaatacttaaattagtgataaagtttgagaaacaagacaccttaaaaaataataataatatgaatcatatatcggtgtatgtatcaagtagtaaaggtcatggaaattctcaaaaaaaaaaaaaaaaaagtcatggaatactttaattttgtg

SEQ ID NO: 98991 - DNA, 589 bp, Cannabis sativa
ttgaaaaacttttcacaccaaaatcagatttcatccttattttgaaaataccacatgtaattagttttatcatttttaccaaatatactaaaaattttataaaaattaaaacataaaattagatgaaaatgattgtagaataacaaccctttcagtggtagagaactttccaaccactaaccatgctacaaaaataagactaaaatatttaaaaacatgtcatagaggcaaaactaatcataatagcaaaaatcaaatagcaatagcgaaatacaatttcgaccaagctacatctatactcaagaaaagtcaacgggcattatgggagaaaaaaaaataacctcatgtaactataaatttaagaataaagaaacctaataaatgcatactaattaattaattaaaaaataatatttgaatataaatattcactattttagtgataacatttattataattaaaaaaattttgaaaagtcaaattttgaatataaattacactctatgctctttttatattgtcatcttttatttttaccctcttttttaaagtttatcatttttacctctttttttaaacattgtacca

SEQ ID NO: 98992 - DNA, 1483 bp, Cannabis sativa
cgaaactcaagtggttcagtctcagatctacacatctctcatgaaaaataaagtcatccctctccccaaccttctgcatgatacgagagaggtattccatgcccagaacaaaaagaagaggagacatgaggtctctttgtctcagacctcacttagattcaaaaaagccatgtagagaactgttgaacattaaagagaacttaggagttctcacacaaatcataattagcttgatgaatttcggaggaaactgaaatgcatgaagcatctcctcaataaagtctcattcaatggtgtcataagctttttgaaggtccaatttaaacatacaacttgcttttcttgatttccttccatagttatggatgaggacttggcaaatcataatattgtggccaatgattctaccttgcacatattctccttggttttgagcaacaaaataaaggaggacagttttaagcattttgcaaattagattataccaataaaattatgttaattttaagtatacttactttctaaatatttatttttatttatatttatatatcaagatatatgtaatctaaagataaaagttgtattttattttcggtatttcagattttaatacgggccgggacagatacgtcatcagtgacattagaatgggcattatcaaatctacttaactatccagaaattttagaaaaggctaaagctgaaattgacgaaaaaattggtgaacaattgatggatgaagatgatatttcaaaattaccatatcttaacaacatcatcttagagactttacgcttgttcccatcggctcccatgctcatacctcacttttcatcagaagattgtactattgaaggatatgatattccacgcgatacaatagttatggttaatgcgtgggctatacatagagatcccaaattatgggatgatcctacaagttttaagcctgaaagatttgagaggaacaacaacgacaagtacttgatgccatttggattaggaagaagagcttgtcctggatctggtttagcccaacgtgtgttgggcttgactttgggttcattgattcagtgttttgaatggaaaagaattggtgaagaaaaaatagacatgactgaaagcaaagctgttgtaatgcctaaacttgtgccattagaagcaatgtgcaaagctcgacctattatgaattcaatttttttgaaagctcattgaaaatataagctaattagagaaataataaagttccttatgtattatatttgctattattttcaatgagtaattatttattttggagtactatatattgtagaattaatattattttaaattttgtattttacaaaagttagcgattaaagatctggcctctattatattaaatgataaataaaccctgtattttttaaaatagtataaataagacattgaattcaattttatttttttaataaaatataatcaacttgaagataat

SEQ ID NO: 98993 - DNA, 1029 bp, Cannabis sativa
atatcaaaacttttttttttttttatatttttgtaaatataaaaaaaaaataataataatgagaagaagagagaaaattgagttttctctttttcttacttattgctaaagtaatatttggaaaacacatttgatgatgttattattggcatcataaatgaaaataaagatgtgtgtgtaaaacaccaaaatttttatacgtggaatcacttattactatgtacttaccaacgaaaattctataagttagtctaataccaatcatcattcacttattacttagaataaacgaccgaaaaaattggtaaagtaaataaagaaataaagaaaatattttgttcaaactttcgtttacccattatttttttaaatgtgtcatcattcaaaaacatttcctttgaaaatgcatgttaacatctatctaatcatcatactaaactgaaaagtctttgaacaatcctaatatatcccaccaatcaaattgaatccaagcattaaaccacataggaaaatatagtatattgaaaattttttggtagggtcattgaaaaattcttttagtatgggcatggttattttgctccattggtaagagtttctatgtgttttgtttttagcttgtaaaagaattatagtttaaattttttatatataaatatatgatagcatgtagttgaattttttaataatctataaattagaattcaaaacaacttatttttgtattttcagcacattgaatgtgaatatgtagtaggggtgtttattggatcacattcaattgatttgaactcatccgatccaattcaattatttattggatattggattttttcatccgatccaatccaattgaactgagtcatctgatccgatccgatccaatccaatggatgtattggattagatcggttccatccattacatgttttaactggttttttattagattggattggatccatccaataaatctcatggatgaatccaatccattttagccactatttagagtgatttcattaaaaa

SEQ ID NO: 98994 - DNA, 505 bp, Cannabis sativa
  modified_base (466)..(470): a, c, t, g, unknown or other
ctggggtttagagtccagtttccatggtttaggatctaggtttgggtctgaggtctaaggttcgggtttgattctgggtccgagttcaggatcggaggtccgagtccagggccaggtctataggatctagggtccggattcgagtccggatttgggttttgtgtttgggattgggttctggtcgggttttggggtctatggtcggggtctggcaacttgtgttttaaaattttaaaaccaattttttgatctcatttctaaaaataatttttttgaaaacaaaaaacagaaaacaataatgctaaacatgcttttttattatttttattatgaaagaattctctcaaacataattaaaattaggctaattagcaattttttccccccaaactttgacatgtactaaaccatgtctcttaaactcttttggccgttaaaaatcccccctgaactattaagattgttnnnnntaaggacttttgtttaattttagtaaaaaaattct

SEQ ID NO: 98995 - DNA, 679 bp, Cannabis sativa
tcaaatctattatgattgttatgtgtgtgtgtgtgtgtgtgaatatttgttcaattaagttggctggagttgttgctgttgaagttactggaggacctgagatacctttccacccaggaagaccggtactaaaaattacttctccagttctatttcataacacattaataaatgtgctcatagtgtttatgtataaagatctttttgcgttgtttttttgtgccaagcaagtttttgatgggcttatgttctgtctcaggataagcaagaaccgcccccagaaggtcgcttgccgaatgccaccaaaggttagtgttactttgtgttgtttaaattaaatcagagcaagatcagtttagatcattctatatgattaccaaaagaatgggaatcttaatatgttactaaattgcaggttctgatcacttaagggatgtatttggccacatgggtcttagtgatcaggatattgttgccttatctggaggtcacaccttggttagtcacataaacatacgagctatttttcttctaattacacaaatgtattagtttatgacttgaatccttcttatatgcagggtaggtgccacaaagaacgctctggatttgaaggaccctggacaaacaaccctctaattttcgataactcttatttcaagtacgatattttgatata

SEQ ID NO: 98996 - DNA, 548 bp, Cannabis sativa
cctattatccagctaatcttcaaagccgcgtcaagaaagggaaaatgacacaagaaaagtttgacaaaaccatatctctcattaagggtaccctgggttacgagagctttaaagacgtggacatggtcatagaggtaaaaatatttggtgaaattcttttctttcctgttttttttccttctctttgaactttgtaattgcacctcatttcaaagctggagaatgaaatgtttacatgtgtttctttcatttgttgaaacaggctgttattgagaatatctcattgaagcaacaaattttttcagagcttgaaaaatattgcccaccacattgcattcttgctactaacacttccacaatcgacttgaaccttattggagagaagacgaagtcccaggatcgtattgttggagctcatttcttcaggtaatgtttacttttacctttcttatgctttaattcgttttttttttcacttaaaaaataagaaaaaagagaaaaaactcagtctttgagttatttatgatgcagtcctgctcacatcatgc

SEQ ID NO: 98997 - DNA, 1043 bp, Cannabis sativa
gtatggaagaaaaattgtataaaaaaaaatactcgatttaacaaatctttttatatcaaacttaaaagattgatttatttattttttgttctctacacatttcttttcctatagtttccatatttattttttactaaagttcaacttctaaatatatatagcctaaataaatataggtgtgaactttttttttttatttcgaatgagactaatataaatttacacacatgtttattattttgattttaaaaaaatacaacttactaaatatttataatgatttatttatatatatatataaaaaaaacttgtcaaataatttattttataatccaactatgatgaatattgaataacattatttagttaagttgcatttatgaaataaattaaaatgggcattttagtgttctgcacgttaatttgaaatttttcattttatacatatttttttcattgcatcaattttatcaaacaagagtataaattaagatcatgattatttatgaccctacacagttggtttatgcttgaaaatagcttgtattatagtttgtttaaaaattcaaagtatctacattttgtatttacattagaaaagtaaaagtgtagtgtagaatgtctattgtaagctaaacctattgtatggaaatatataattttaatttccatattagcatttatttatgtaaacaaagtaggttgagaaaaagtgttccttttttataagcaacttgcaacccttttttttctctcttatatgttaaatcaatcattattataattttgttttaaaaaaagtcattattataattattaatatgggttgtgagcaagttggattagctagttggcattagtgttataggcctttgtagcaaaacttgagggaattactgaaaaaaggtagttctatttggtggcaaaaattatgtattaccttttaatatttatatatatatactagcaaaaactaagacacgtatactaaattttatgctaatttttttctacgttagttgaaagtgatacaattaaaaatt

SEQ ID NO: 98998 - DNA, 501 bp, Cannabis sativa
ctattaatattctattggtttagcttttactcgttgcctaactcttatatttggaatttatagccgaaattggtcgcggtttctaattctataagctttgcaaatccaaaggcccccctttatcctcgtcttgcacaagggaagtcttggaacgaagtaagtttaagtttctttttttttttcttaaaaaaaaaacgtatatagcattcttatgagtgtgaagacctgtccaaaatatcatttaaagactttattacaaaacctgttacattagcctacaccagcacaagtcactgcatatggactagggtagccttgagtatcccagacaaaccatttagttgctgaaaatgcacaaccatgagtatcccacactagatgattcgttacttaatatgcactaggagagctctaagtaactgacaccaggttatttggttactgatttgcatttggatagccatttagctgctgctgatgcattgaaagcccttggtaacc

SEQ ID NO: 98999 - DNA, 1852 bp, Cannabis sativa
ctctaagttattgtcgtcccccttttactttagggttgaggtcaagggcgcaggctattattcttcaacttctaaaatctgcttcgcaacatctctctcttggctttcactaaaaatttccttatacaggctttacccgtctaaagagacacaagagaatgatcaagtagtcaagaatcttactcctgagcgagaggttttagagaagaagaaggagaataaaaatccaaccaagcaaagtttggagccagtagaacaacctattcaaatcagggatgattctgaagcagcagctcgcgtggttgccgaaaaagggaaggcagtaatggaggtgtcagacaaaggagactcctccaatgaggatgctccatctttgcttgatcaggagggtgctctagttattatgaaaaactagacgaatggttgagacggtatcaaaatctcataagcagaatcgagcgcatcaggccatttgtcaacttgggcgttgggtgctcattttggagctttcgagatatcgttttgatacttctaaggttatagatcttgaggatgagatctcgtaccccatttttaaccatttggaaagaatgctcagagcaaatttgacatttgagtgatcgatagtgaaaccagtgcaccaggttgattgtcaacctaggcgctggtcttagtttccaagccctcgggattgtggttttctccccgagtttgattttatctttattatttctaatgacaaaaaaaaaataccaagaacactttttcaaaaactgattggaaagggtccaggttcacaatatcttaacttgggcactgggtctagcttcaggccacctgaaagttctgtttggtctccaaaaatagtgaacctcaatctttgttgaaaacgaagaatatgcctagaagagttctcgaaaaaaatcctcaaaaatggcccaggctgacaaaatgttaacttgggtgctggccttaattgtggtgcccatcaagtgttgtttcctccctgaaagcactattttccccatttttgatgaagacgaacaagatgcacgagtaagatttttgattagatacttcgaagtggtctaaattgataaattgtcaacctaggagtcgggtgcccaggcactaggtgcttaaaaataaactttctccgaatatgattcggatgcctcaaatatgtttgtggtatgtctaaaagacggtcctaaaaattgaaaccctagtttaggatgtcaacttgggcgctgggtgaaaccctaagtgctcaggttgactttcagggtgttggttcgtgtatttttagctctcggggtctagatttggttgatcgatgtcttcatgggacaaaatactgagaaataatgagttgtaaatgagtcatcgaagtccgaacttccattctagagttcccgaagtcaacctgagcgtagggctaagaaccattctcaggtcgactggtgtgacttggaactactcaactttaagaggtcatctttcttatatgtgtcaaatattcatgttcacgtcactagaaaaaattttagattgataaaataaatcacgcttttcgttaaaactctttgattagcaaatacttaaataaatagggtgttacataatcaatctccagtcttaattagagtgatctttaacaatggttgatctcgaacattttgttcaagatcggaccctctctctaactctcttattttctttctccttctctctagaatgatctctctaactcgaactaactctctaaattggagtagtctttaaatagttttaagttcgagtgaaggaagcaaggtcaactgtcataacggttgacagttaatttggttag

SEQ ID NO: 99000 - DNA, 520 bp, Cannabis sativa
cttgtcctagatttattggtcctcttgtaacagctgatttgctttgatttaataacatactttctttcaaaaaaaaaaaacgcattgaaaaataagactagtaatatatgtgcactaaactgttatgttctcaaccaatcaaattcttaaaatgagaaatctaaaagtacttacaatatagtttctctaaaaaagagaaattttaaaaaatttaaagaatcgtactaaaaacaggctatagcggatgctttaaactctgtcttcattttaattattttttttaaaaaaaaatgttctatttatgtactatatttatataatattattcattgctctaaacatattttaattattttaaattttaacaataatttttgtatagaaatatgtgtatatatggaagagattttaatggttacatttttattgtaaccatcgtgcatatatttttttaagccattggattattattaaagggaaatttgacaatatatgcttaaaaataaatagtacactaaaa

SEQ ID NO: 99001 - DNA, 503 bp, Cannabis sativa
tagttttctagggaatgattatttcttttggagacattaatgatgttggtataaataaaaataatgacatatataaagttggatcccaataatatttctttttctaaaagtttattccaatttctctttaatcaatttatgtaatgatgcaacttcaactctcaacagttcattatgggaccattttttttttctttccatcaacttttgcaatctatagttttatagcatatatatttgataaattaaattagtaatcattttattacaaattattatattattttgtactcatttttataaagaccccagttaaatttttgcccaaatcttctaaatctgttcgaactttcgataagtatagtttacttttgttacataatatcgaatcaaaattaagataaatgatattaaaacataagatcagataagaaaccaatattaaatgatgacacatacaaaaatttagataattatcatgatcggtttaagtattttctgaa

SEQ ID NO: 99002 - DNA, 1628 bp, Cannabis sativa
  modified_base (1165)..(1167): a, c, t, g, unknown or other
aaatctaacccatttattaattgtgtcaaaaattaaaacttatacagtttatagacgagttaatctgattgtttaactcgtttatattaaaaatcgtacttcaattcattaaaatgttatgacatattaattaatgaataatttgatatgtttatgttttatttaactaaaaaaaatataatttccatgtgaaaacaaaaatgatccaaacccatttttattttgtggaattttcgaattgtgccttgtgtgtctgacccacattgcaccggcccctagataaaatatccatttcttgccattcattctctctctttctctatatttgagttgattcttgtattgctaattgaacattttcaaccgattatctacttagtggtgcatttattcatcgagttaaacaaattggtattaatatattagtccactttatagaattaaacacggtacatcaaatataattgtacgtatatgacatttgattatgaaacgaagaaaagaaatagaataaactcaactaaactaaaatcatattatcaaaagaaaaaggagtaacaatattgagtcgaaataaggacctaaaaaaagcatatttgtacatagagattgctatgagctctctatctacaatcaaataccgaaaaatattcaaaaactaaaaaagaaaaacagaactattatgtgcctaaatatctaaaacgcccaaaaggggttgagttaatgaaatcaaactctgtctgcggctgagagctgtacttcagcagcaggcttggttggagcatcaatgccctgtttccccttcttaggagttgtaccatagtagcatccgtacaagatgagttgagcagcaccagaaattgcacccagcccattgcttacctgcatattattatatacatatatatccatatttattagagtaaaaaattaatataattcattgttgagataattattaatgattacataccaggacatagatatcgaacttgatgagggcataagcagtccagcaggaaccgttgaggaaattggtcaaagataggtaaaagggcatgtactccacgctctttgtttttataacttttgactgttgtaattcaatcagttatattttcattaattaatcaatatatatgtatgaagagagagagagagagannnagagagagagagagagaaaagggggtgtttgttaccatgatagtgagtggagaagtgtacattatgatgttgaaaatatcacaaagaatcccaacaaagagagaccttcttgtagtgccatggaaagccaagagtcctatggcgacaacagcgccgaagaagacaacttcaataaatagccatgtcaccaccttcttctgaaataatattaaaagaattccaataatccattattagtacatgtataataatacacatggcatgtatattgtatatatacataaatatgtttgataatacttacacgtccttgattagtagcataaatgaaaaaaatggtgaggtaaatgagttcaagaacaaggccaactgagttgatagtgacgacaagaaggctgtcagggtgaataaagggcatcccatagaacacccataacgcacaattaagcactgttgctaga

SEQ ID NO: 99003 - DNA, 729 bp, Cannabis sativa
gtagagattacagtgatcaaattcttgaaaaaatagatcattttttctcctaggaagagctcgacttttactgggaattgtccagaaaaccacaaagctcttgcaaattgacagtccctaaagagatgtaaacaactctcgatagcctcaccacacaaaagacagtctttgtctaaaacaaagttgagtctatgttttgtaggaatttcttccttaagaactctccaaagaaaaacaaaaattctgggatgaatttccgactgccatatccacttccacacatctttttttgagtcaaatcttatgccttgatcaactctataagcccccttgacagagaaggatccatcttgagcaactttccaaactattctatctttatgggaacttggtaatcttggtatgtctagaatttggttacccaactcagacccaaaaattgaagttaccatttccttgtcccagtgatgaccctgagatatatctgctatagttttgactgtaaacctctttaatctcagcaatgccattagattcctgaaatctggagtctccatccaagggatccaaggttggttcccgaaattaattgaactctcatcagccaccatagccatagaccctttcaaaagaacacttctaacacccataaggcatttccataagcaggcctggccctggcataggcgggctaggcctgtgcctagggcccacctatcccaggggccc

SEQ ID NO: 99004 - DNA, 603 bp, Cannabis sativa
aggtcagcactcacaatttcaaaatagttttgtaaatcccaacaaaatattgagccacaaaatgataacttattggaatttggaatagaccaatatgatttttgtttatacagctccttcaaaacctctacaatcattgtttactgggtggactattgtaaaagaaacttttcatctattatcattgtatggagaaaaaccaggtttaaacagcacaactatttagatcctagcttcaggtacactagtccaaaaatcaattaccaatctccaatctagaaatgcttttttttacttcctaatacatgcattttagacagaaagtttgaaatgacatcttcaggtacactagtccaaaaatcaattactatctccaatctaggaatgcattttattacttgctactacatgcattttacagaaagtttgaaatgccatcttaacaaacataatccgtgagcatctaaacacgcaagcatgtggttactatcttaattggcaaataaagctagtcaaaagaaaaaggcaggtaagctaaaaaagaaactcttcaatatagtgaatttaatataaattgagacatacagcatcttggaacatacc

SEQ ID NO: 99005 - DNA, 511 bp, Cannabis sativa
cagatgatgcctcttacaactaggacattttgggcaaatatatcaggttttggaactaccctgacaattgccttgaccatggttccctgggaacctcttgttctgatttgagccacaaggtacagatggtgcctttctcttctgatcaacggtcaagtcgctaccacccctaccatagccagaggtaggaggagtagtagccccaccaacaacctgagtccctcgagactccttgatccactcaattgtgccctcagctcacagtgcttttcacactatatcaacatatgttatcatcgattgtgatcatcaggtcgtgttgaattttgggatttaatccatccagatacttttctttcttactgaaatcgattggcacaattcccaaagccaacctagctaatctatcaaactgggttgtatactcagtaacggtcatattatctttctgagtcaactgagtaaattcttttctctttgcgctacaaactacttcattatattactttgc

SEQ ID NO: 99006 - DNA, 528 bp, Cannabis sativa
tattatatattatgatattaaattgtattatacatatttaatattgacttgtaattgtatatgtatataaatatacaatattaaaatataaatcaaattttaaagtagtattatataaaagtatatacaatacacaggtcaacttgggttgagacgaactaaaactgggctagaacctatctagctcaggagcccaaaacaaaataaaattattaaaatacttgtatttttttagtaatttttgaaaatatcacctttttcttataaagaaccaaataaatcatagggtcggctttgacaatacaatttaatataatattatacaatacagtaaaatctaaatatactacctactaaatgaattgaagatatagtaaatatgaagggccataaatgaaatggtgaatattaagttttataatgaatgtgtagagcagagtccaccttgagttgatgtgagtcttaaagaaaaataaataaattttgtagactattattagaagaataaatatgtgacagtcagtagtc

SEQ ID NO: 99007 - DNA, 2193 bp, Cannabis sativa
  modified_base (1577)..(1578): a, c, t, g, unknown or other
  modified_base (2132)..(2133): a, c, t, g, unknown or other
ttgcttaaaatccaacacactacaatcaccttcacaatctaaaccagttatcaatgcaaactcctcaatgctaaacctaatcctaacaccacgaaatataacccataatttaacatcattaggttgttgaaccacccgcaacaacagctcatgaaaaacttgcggttgaactttgaaatcaagaagcttaatgaaatgcccaaaacaggtttttgaaaacatttcaagctgcttagatgaaagacaagtcttaatattatttataaccttgtatgaagcagtggagacggcttttgcaagaaacatattcttttggtcatatatgtaatcctattcctgcaacagttcaacaaaaacatgacaaaaataataaaagactaaaaagctaaattacaaaatactaaacaagtaataaaaacagaaatgtactataaaaaaaaacagattcaaaaatacacaccttaggaggatttttttgggaagagtaagtcttcaaacttctctgaaatcttaggagggacctgaaagtaggtataacaataaaaatcataagcaaaaaatttgaacaactaaataaataattttcaagaaacataaaaaaacaaacatcatctaagcatccagaaaaaaaccagaaagcaaccacaaaacaacattttaaaaacacccaaacataaacagcctaaaagatgaacaaccgggaaaaaacatattaacaacaagctgcttaacatgaaattactataaaaattttcgactgtgaaattaaattaaacaacactgaaactactgaaaataaacattaaaacaactgtttagaaaaaaccaatacaacactaaaagaacaatcaaacaaagaactaaaaatgaggggaaaatgttatgaaacacaaaaccttcgtacaaaaaatgagaacaaaaacaacaataaaccctaaaaaaacacatttaaaactaaaaacaactaataaaaaaacccatacttataaacattaaaatggtgtagtttggttcaataatgctacaaactgtttaataacagaaacaaaaccaaaagacaattaaaaaacaatacaaaaacaacatcaagataaatacataaagaaatacacacaaaaatgagacaaaacataaacccgtgaatataaacaggtaaaacaaaaacaaaatgaaaaataacggttgattaaaaattttaacttaaaataatgaaaaaattcaaggtaaaaaaaccttgggtttaactttaggcttcacttctaaatcaggaatttcatcctcgaagtcagaatcagagttaacctaaaacatcaagggggaaacatttaaaacataaaacagcaacgaaaaacacagcaacaataaaaaactaaaaaaaataaaaataaaaaacaacggaacccaacttacatccttgacagatttcgaagatttggttctctttgcattacaagattcaatcttatttggaagaggtctttttttagaaccagatggctctgcaacatcacccattcccttcttcgcaatgcgtttcaaactcattttaggatcaactttagaggactttgaagganntttcttagtattttttgaaatttttttagcatgtgaaggggacttcgaacccgacctagtggtggccatttataaaagaagaaaagaaactttaagaggaaaaatgaaatgaagttgtggaagataggggagatcgtagcaaagatgataagttgaaaatagtgggttagggcttcacaagtgatgatcgtgagttctggcaaaagaaaaagctaaaaaaaaaaaaagaaaataaaagaaaaattcaaaaaaataatgaaagagaaaaagatggcagagatgccgtgtaatatgggagaaaactcatgacataagcatgcatatgtatttttgtaattatcaaacttttaaaaatctaatattgaaaaataaaattttttataaatatttaaataactgaataaatacaaaaatgtaaaaaaaaaaaaaaaaaagcaaaatatgacacaaagtgtaaaaatctcttaattttttttagtatagatattgatatactgaatataccattttaagaaatgacatttaaatgatccccaaattaaaaaaaaaaaaanngagtaaataccattttggactctgagttttacaaaagttacagattggaccctgtgtttt

SEQ ID NO: 99008 - DNA, 2814 bp, Cannabis sativa
  modified_base (2475)..(2487): a, c, t, g, unknown or other
attaagttttatttaaggcataaagcccaacataatttcccttaaagagccacatttaatataagattaagtattagtaatatgcaatacatgtttcttgtattagagttcttatctaattattaagttaaataataataataaaattaaatctaatacaattcaattatattttataaatacatatacaacatttaatctagttttaaatttatttctaaaaaaatatatttaatgaattttattaaacaataaaataaataaatacatttagatattttaaataatataactaataaatatgctataaaatatggttaattaattaaattaaggtcttttttaaatttaaattaagatttatataaaaataataattaactaaattatattgttaaattaaatttaaagatttaaatatatattatataaaaatatataattaattgattaatttaatttaatggaaaaatagaaaaaaaatattaaattaacaattttcgtgaattagtcacacttaaatataagagacaagatatatatttttacgaagggttgtagttttgcgttttgctataatacaaatggtgaggcattcgcttgctagaaacatttgaataaacaagcgtggaggtggccgtggctcattcttcagccagaaaacgatattgttattcgtaagtggggatattggtagaaaagtttaacaaaacgtaattaagtaatcagctcccttgcatgtgaaagtgctagtaggatcatcgtaggcataactataagacgtgggacaagcagccttgaaaatttttgagtaatgatttggtttgcagttttgaggacccccatactgtccagtgcaacaatactctggcttattaaaagccatgcatgcactcttgcacccaacaatgggtccattatttttcctcacctgcaagccattagggcacctccggttcaagtccgaaatgcaccgaatggtcttgcaggagtactttgaattggtagaaccaaaaccacctaaaggggtaatggaaataggcatattatagccatcaacaaggctaacatcgtagaaatccttgggactatcaagagtaaattctgccagtgtagcaggtggttttccaccagctcctacacacttcagcacacctccacaatcacccgtgacgcaggttcctttgccaaatttatcaaaggaacaccacttgcgaccccagaatcggcctgaccatccttttggggcattgatgtttacggcttggccggctctaagctttagcccgccgtccattagttgaggatgtccagctccagattggatccctggccatattgtgttcttacatctgttttctaatgtgaaaacagttgcatccgaacctaatacattcaaaacaccattaaaagaaaaatggaagccaagaaattagtttggtcgattaatgatgatggcaatgcattatttatacataatgaatgaatcttgttcttgacgtaccttgaaaagagagtgccaataagtaaaaataccaaaacaccatgatagcaatgagagaatgatctcaaataataatcatatataaagggaaggctctgctgataatgtaatacaggatatgaaccacctatatgataaaagggagataatgtgacaagtgtttctgtacattttaacaatgaaagatgtgattaactaactactggactctgtttcaattgaacggtcagccataaccgaaattttgtgtactaacgaagacgaggctaattcttatttattctgttaagctataactctatatctataattatataactatatagaaaaatgaaaaaaaaaaacaaaaaaaacattctttaattttgtcttattgtacaagtttattgttgtcatattgtttctcaatttttgtcttgttatatcatatttttctccatattatcattgagtgatggcttatattatgaataattttattgctttcttttttttttttttatttctctttttgccttttaatgtactctaaaggattgaaatatatagttcttttttttttttggaaattggaaaatataacttgctcattattttaattattttttgaaattatatgtcatatcgttttacttattttaatgtgaacatgttaaattttgataatttatattacttttatcattttataaatatttatatcacttttcttttataactagagtgttgactatttttattggcttcataatttttttaaattatcctattaaaataattagttaattagtgcaatatgataaacttaaaagattagttatattatgaaaatagttttttttttttttttttataaattattttactgttttttttattcattttatataataggctattataagtatatggccacattagtatattgttcattttgtttttatgaatatatactattattattattattnnnnnnnnnnnnnttattattattattattagttatagtaatatatattttttcatccacaaataatttatgatttgtaaaattataattttagacatgtaatttttttcccaaaacattatagatgtaattatatttggagattattatgtattatatttgtaaggggtgcttggtgtctttaggcacctatacattttgtatatgtatgtgttgcccaactttttgtttagtatacgtggcagttgttgtatatgacaagtggtatgtattgtaacgccctaatttatagggaccccacctgtgtgattttataaactagtttaatactaatagaata

SEQ ID NO: 99009 - DNA, 822 bp, Cannabis sativa
gctttcccggcgcagtcagtgtacttttgccggcgcaacaatgcgccggtaaaagctggttttcttgtagtgcactatcgatcggtggtcatgtagctcctgcgcgtgtaatcgaacggtaaccggaggtgggtcgtcaatgctccataggttgtggttatgggggtttgtctttggtgttttgaagagagagaaagaaagagagatcgaagatacagagaaagggccggtggggggtgttaaataaattttaaaaaataattttgtgggtcccacccgcttcttttattaatcttttttttatactcggtttgaccgagtcttcacatatagagcattgttatttggtaccagcggtttctagtattttttataggtagtgctctacgattaattagcaatattcctaaaagctattttatatggttttgatcgagtcttcacatatagagcattactatttggtaccagtagttcctagtattttttataggtggcgttctacgattgattaacgatattttttaaaaaattattttatatataggactcaataattaattataccaataataatatgtcaccgagaaagatgttaagcttcattagtattttttagataaataatgcgttggacaattatacaaatttaaatagataaataattaatttaagtgggtaattaataatgctctagttgaacaattataggtgtataattaaatggtttaccacattatatcctctttagtttgaatatatagtatttaatatttattgtgtgaatgatttctatatatccaaatttttaattcacttagt

SEQ ID NO: 99010 - DNA, 6027 bp, Cannabis sativa
tttatatatatatatcaaccttgagtggaaagaaaaatttgagaaaatatattaaagaaagctatattgtttgtttcttcaaaatataaagggcatttttcggttatacatgaaaaatgcaacaatattataaaaaatacaatggaactgaccatttcgtctgtgactcaccatgcatacaatcacacgacccatgcttctcatcttcaaaactttcgtgtgctcaaacgaggacgacaattatagcaaaactgtaataccctaaggtttaataaccggattagcaatacttaactaagaatttatgtattaatgagaaattatattgttatatgatttaatatatgtgaaactgttatgatttattgtattttaagactccattggtgtgttaggggtattttttgtaattttgacatgatatattgtgcttatggactatattattatatagtatgtttattttgtctatttgtaggtattttctgacaagttggcgtggtatagtcacaataaggtattttgggccgaaccgggtagggttgaacatatcgaccgggtttgacccggacccgacctggtcaacccaaaaaattaaaaaaatctatttcgttttgggtcgttcaacccggtacactttcgggcgagttcgcgggttggtttgttatggttaccaagtttcgggttgaacttgaacccgcccgccaacccggtgatttttttttattttttatttttattacatgtataatatattaaaaataaaaaaaaaaccctaaaatttaatcattttatttatattacatagataatatattaaaaataacaatatattccataatatattatctatagttttgaacttcacttttgtattttagattcgaaattaatgcattttttattttattttaatctaacaaatttaaattatggtgttataagtttataaattatatgtttaatttaatataaagaaaaaaccacataaaatttgatttttttttaaaaaaaattaatgagttgatcgggtcaacccattgaccccgccaacccggtgaaccagaacctgcaaattcccaaacccgcgagcccgaaacccgcaaacccgaaccatctcacgggttgggtttgggtacaattttttgaacccgaaacccgcgaacccagaacccgcaaaccagaaacccggtcaacttgcccgatgttcagccctagaatcgagttcggggccacaatacattttcaggatttatttatggtatttatatgataaatgaggaaatgtgattattgtgatatgtgtgggtgagctgaatgacaaaattgtccttgtttatatgtgtatggatatatttgggccttaggagccgtttggtctttttgaccaattagctaatttcaacaaaatcaaacttttgttcaaataaaaaccatttttttttttgactttgaaccccttagccgacccctctctcttaccctctccacttgtaatttcaaccaattttgaagaaaaaggcttgacttttggtgtggctttgtgctagttctcgtgcttggatcttgaagagcactaggtaattactttgatctcctctatttactttgatttctgattttcaagttttattattgatgttttgggattcttgagattatggatgcatgctgttgagattaaggggaatattagtgaatatagtgtgattgagctattaggattgtgtttattgcttctaggttaatgtggttgatttttagggttgaagcatgttgttaatttctgggtattggccttaaatttttgagtttttgttttgaagctttgaacttcaagcttgtgcaatgtgtgcaactatgatgtttgtgttatatgcttgaattttgttgttgtattatttgattttgagctttgtgtaatgctcaaatgaataccaatgttagattggtttgcttttaattgaaagattagattatgcctagttttgattaggttttggtatgaattgtgttgatttttgagtgtttgaaaaattagcaattttttgggttcccgggcccatcgccgcggcgtggcccagcaggttggggcagccacagagaggccctatttttcctgagaattttcattttcttatttttgccataacttttgattcgagactccgttttagatgttcttgatatcgttggaaagctcgtttctggctctatatgttaatatataaatagaatgaaaattatgtgtatatgtgaacgtaaatttgagattaaccctatttgtgaaatctcgagaatgtgtgactaggattaccggcgcttgctcaggacctgaggatttggaatctccacatacttggattatcaggtaagacagtaagttagcacatagagttaagcgcagtggcactcatgtatgttatgtgagaaatcgagattagggttattaccctaaattaagaggatatgtggtctagggttattactctatagtatttaagtgatttttgaatgcaatattatactatatatgttgagataaagaattatgcgtgtaaagcataattaggttagactcggtaattagaacaaagataaaccgttctaaggccttattgtaaatagacgtacgagtgcaacacgtaagtctatgtcaaatagacaatagatgcattggcatcaatatttatatgaatttttattatgctgcatattgttatttatactgtcttgttgggctatggctcacggttactctattgtgtaggaaaggataaatctgttattgatcagccatgagttcaaggactttgcggtgtattatacatgttcaggctaagctagaccacgagggttgggtctaccagaaaaaattattgtaatcttcacttttgccgcttaggtcggtgtgtattgataacttgtagtattttgaaaagtttttacgggatcccagaacaaaaatataatcttttgagactttgtaaagtttaataattacaagttataattttactctgtatttgttttaaagtttaatttcctctcttgccctagtaatcccaatttagcgagattagcttatgtttagtcgcagttagtgacgttcttagtattagggcattacaaaaactacccagttattcaaagatccatcaatttcagtgacgtcacttgagaagaagaccctaatcaatctaactatctacaattgccgattgatgaaaattctacagaaaactggtttgaaacaaaaattcaaccatgaattataattcaaattccaaaaaacaaattttcctaattttattttcttagattcataaaatatagatttggagttctcgatcaattgaaatcaggtataaattaaaaaaaatgtgtcaatacacttacatataatcagtatatgcagaaccagcattaacttctcttggtcctgctagcttattcttttgactatgcgaggcataatatgtgattaggctctgtctcgatcgtatcttctcgcaaatttacatcaagcaatgttagctctattggagctattttttgacacgtcatccttttttttttttaccgggaactagatccatgtgccagctatttacaagactatactcgtattctaggcgaaaaattcacactatataatactatcgacagtaggtgattcgagtgtgggtaggttgtggtggaggctcgttgggggtgatgttgtcagttgttggcgattatatttatttttagacttttaataattaatttattttttattttttgatattttacttattttttagtgaggatatatgtaatttgtggtggtaggttaagaatataggtgtggagtggtacatgaaaaatcatagttttgggtgttgggcgagatcaattttattttattttattttttgcttcggacgttcataaccaaaacaagaaacaattagctttggtgcactgattttttgtttcggttataaactaaagcaaaaacctttttttttttttttttcggttcgtaaccaaagtaaaagaaaatcagtatttgtgtttacgactataacaacagttacacgtacagactgaaacgaattctttacatgttactaaaatcccaaaacaaaaagctttttttgtagtaaaaaagtacgtaccttcactgaagtattctactacattagtgacctagatctaggttatactatatattcataatactagttaattgtactagaaggaattagtctaaagattctacttagttgcagtggactcagttcatcatgttaatggggtcctgtatggagagcctttggtgattattataaggcccttctgttggctatggagattgggatgtgttcaggtttgagctattgaaccagttctaaatgttattatgcacttaatcaattagctgtttttgacagttaagttagtttctcagccattaagtgtacctaccaagcactatatatacaagtcaatgcgtagtgtgttaagatgagaaaagggcactttcatgtgtttgattgaaatgtctctcatttggtaaggtgtagtgtaagcagcaagactccattgagaagaggatttcgatcctagattatttgtaacaattggcattaataaagttcatactataatcaatattgaaggttgatattccccatgtattaagctcaagatcacactgatcttgtttcccaatcacgtttactgcttttatttcaaattctgtttacttttattacttttcattttttatccaaacactaaaagctaaaacagaacttatagaagctaagccaaatgggattaattaatcccagttttagtcaggggtgtgaataaattaatcaaatctaatgacaaccgaccgatccagttacaactgaccgccaaacattggatatccaattgtgagatcggatcagattgaatgttattttttaaaatctaattagattggatcacatgttagatggggtgtccaaaaattcaaaatctgacatccaatcgaactaattaatatttttattagtttatataagtaagtatattttatattgttatacataaaaatatatatacatatatatattaacattaaaatagtactattttttttagattggatgtgtccaattctatcaaataaatactaaatctaaaatattagatggatctgatatgagccaaaaaatactaagtctaaatatttgataattaaacccgaattaaactaatcgatatacatgaaatacatctatatccaatccaacatccaatggatgttggattgattgaataaatgaaattaattaaattagatcggatggtaaaatcttaaatcgaataatggatcggatctggataggccaaaaaatactggatatggtccgatgagtacacctctagtttttttttgaattaaaacgttcatagataaaattaaaccttatggtcattacaaaacataaagtttgggatggatgaaacactcaaacaaccagcgaaacttacaaaaatattgcttttttaccaaatattttcaaaaatactaggacacgacaaactttacatttttactgtctaagtccatttttatttcttttatactgccctggcccaatatatttacttttatactgtaaacagtaacaaaacacaaacgacacttctccttcgtggttggggccagacaaatcaacaccagaatcatagaaacaccaggaaaaaaactataaaatctggcaaagagaaaaaattactaaattaatcaacaactaattactgttttgtagtgttatttcactgttgttttaatatgaaaaaaaggtcacgtaaagaaatattgtaaaaaatgacaggacatggaatgcgaagctggttgcttaaaaaatgcaaaacttaaaaacaacagtaaaaaactagatccaaaaatcgacatcaacaacgcgaagctaataacagacaaacaccacggagaaattggaaaaggtcaggcgtacgaag

SEQ ID NO: 99011 - DNA, 1478 bp, Cannabis sativa
ctaatatattggacctcagttatggctgaagaaaaccttgcttacaaatctgttgtttgcctcaatgtctaataacttgtttgttttaatatttggtttttttcttcaggaatccttgggggtcctgaggctggtgttgttgaagatgaccaagttattttggacccaaatagcaatctggggatgtttctacgccgttgtttacttgcttttaatcttttgtcatatgaggtatttatgctattattattgttttcttttcttttgtgggtgcacttttctataagaaacgcaaaatatttgacatagttatcacatgcatgctaaatttccaatgggagttcctttaacgtgtaaggcttgtgtctttttttttcccctctctttctctgttcacagctcttttgttgtcatggaacttttatgtgcagtatggcaatattttttttacagaaagatattaaaaaaaaaaaagccctctcacaacttaaaaaaattatgcagggtttgtgccatcttttgacaaatatagggatttattgtaaagaagccctctcaagttgtccctcttatgatccacctcatttagatgactctagcaatgaattggaatatgagaacatggacttggagaatttagtgtatggcaaggttgatgaagagattgaagcaagggaaagggccagtgaaggtgtttcttttcatcttcacatgccgaaagcactttttgatctggctgaaggtattaatcctggaaaattttgctgaatttttagatttaacttgatggaatgtttttatagtcatagccaaagttcttcaatgttcattttatcttgtgaaaccatccatattaagcatgacccttaaatcatactaaaggtgaaatcttagcactatcgttatttgtagggtcgtgtgtgtgggaaacttgttaattaaattataaatatataccattttcaaatctaatgtgccggtttctcctgaaattacatttagtgtacgattataatgaattctttcacgatatatgtgtatagaccataaaccttgtgttttctaggagtgcgtgttcttgtaagtcatttttattggcaatagccaatatccgatatatttcaacctttataataaccaaacttaatcttgcatattctttcccatctaactattgtcaaactccttatgacaaagccttggagatcagcagttggccactatgtgggcaatttggagtgaaggaaattctagaattttcgaataaaaagagagttcagcagtggacatgtgggagaaaactaaattttgggtagcaacttgatgttttaagtcaaaatattttgaggatttgtcattttagggattggaaaaatatactgcatagctaaaattatcctatgggggagttgtttcaattcaagcccgataggagatactttatgtttatattaatatctctgttaccacagttttcc

SEQ ID NO: 99012 - DNA, 1486 bp, Cannabis sativa
gtgattctttgtagaaagaaacgttatatgttaatcttcattaatatttcttaagttataaaaaaaataattaattatcagtttcccaaaccctcttaattactattttatttttgaggaaagctaattaaaatcttattataattttttagttaatttttacgccaaaaaaacccatgatgaaatatttttttaaaagttttttttgtaagggtcggttttcgttatagttacattatcatttttttaaatttttaaaaaattctgaataatttacaatatcaaaaatagagtttctgatattttaatttaccacgggtttaaaaaactttaaacgtatttttagcactgtaaactatttaaaaatttacgaatactgtcataaaaattgacaaaaaatattcctacatgtgtttttagagacgaatgttgattaagagattgtaatagaaggttgacagtagcactcttatttatttatttatttatttattttataattaatcatctattatattaatatttgcttgtaattgttttatttttttctgaatcatatgtctaaaaagtaatcatataatacttttctctcatatgaagtaattattgtgttgtttcttgctgaagctgtaataatttaattatgcagaaatatatatcctatatattatgttagaagttatatattcacaacgtattatttgtgaatacaaagaaaactcatacaaaaaaaaaaattgattattttactatttcctaccaaaatgaaaaataaaatttgattcttttagttttggacaaatggataaaatatttaatgtaataaaaatactttttatatatataaatatatatatatatatattttgcaaaatggctttgttttttactatttgttttttagttatacttttttagtttttgaaaatatacatataaattcacatttatgtaaaaattaaacaaaaaaatatattgcgtttcatacataaatttattaaactaagcatgtacatttttatagttttgatacaaaatatattatttcaatacatgtatcaaactaataataaaaagagatatttatgttaaaaaaattaataataaatcaagattaatttataaataatatagaacacaagaataataaataacaattatgtatgcctactagattgagtcatagaaattacacaatttgatagaaaaattaataataaactcaagatcaatttgtatataatatagaacacaagaataataaataataattatatattcgtacctgattgatccatggtaattaccacaattcgatagtgtaatactatcaactaagtcttcctccttatgcttctaaatcagaagtatttttatttatttgtttatcaaaagtatacaattgtgatgagacaatatgtatttatagagttagggaggaaacttagctacataatcctagttggactgggcctactcatcaaag

SEQ ID NO: 99013 - DNA, 793 bp, Cannabis sativa
gaaagccaccatttttgttgggtttgctggatgatcttcagccccttatatcaggactcaaggatgaattgttgaaagtgactctgagtcagggggtcggttacttgcatgagggcttatctaatttggaccaagaagttgtttctcagcttttccaagctggacggattcaagtgtgtctcgtgagtagttcaatgtgttggggaatgccgttgtcggctcatttggtggttgtgatgggaacccaatactatgatggccgtgaaaatgtccacacagattatcctgtctcggatctgttgcagatgatgggtcatgctagtcggccattgctagataattccggtaaatgtgtgatcctctgccatgcacctcgtaaagaatattacaaggagttcttatatgaatcattcccagttgaaagccatttacaccactacttgcatgataatctaaatgctgaagttgttgctggaattattgagaacaagcaagacgctgtggattaccttacatggaccttcatgtacagaaggcttgcacggaatcccaactattacaatcttcagggagttagccacaggcatctttctggccacctatctgagcttgtagagaatactctgaatgacttggaggcaagtacgtgtgtggttattgaggatgacgacatggatctttctccatcaaatcttggtttaattgcctcgtactactatgtcagctatgctactattgagagatttagctcctcattaaccgccaagacaaagatgaagggtcttctagaaat

SEQ ID NO: 99014 - DNA, 1467 bp, Cannabis sativa
  modified_base (1228)..(1238): a, c, t, g, unknown or other
tgacatatattgttgtttcttgtttttaatgacgcagatacgtgctttttacgatggtgataggcgtagcttattcccttttgcaacttgcatttacaatcttcagtgtaattagcggtagtgaaggcaaccttatctttgacttctatggtgacaaggtacaaattaagaacatgtaaagtttggataagttgtaggctaggcatttattggtatatagtattcaattaatagagataaattaaattaagtgttttatatattgtttttggggccagattatatcatatgtgttagcgacgggtgccggagcaggatttggtgtaacaaacgacatgaagcaactgcttgaattgggaaacttttttgagaagtcgtatgcttctatcagtctccttttccttgcatttatttgcactgccgtactatctgtgctctcttcatatgctcttcctaagccactctaaatctaatgtattattgtaactttcttattatgcaaatggaaatttgatctgatcacaccttattctctcttttatccaaatatatatactagatttattgcgaattaggtatgttttggcttgttatagccttttttttctataacatataccagaactctatttaagaatgatgatgtgaaacaattataacaatatcgagaagataagttatttgaaaaaagaaaatgttttgaaaggtcacttattacaataaactgcacattttccctatatgggagataggttctatgaactcatcatatttttacataattttttacactaattttataccattttattataaagttctaatggtcaactttaatatggcaaaaaacttagtgttaaataaaataaatataaaaaatagtaaacaatctcaattaaaatgatatatattagagttagttctaatactaatgtcaggaaataaattaccatatataagatgaatgtactacttatcccattgccaattaattttaatatgtaacctcatgcatcttatctcaaattctaaccacaaaaaaatattgtagtattaaagagagagaaaaaaagtctacatgtaatatacaatatatattagagataagttgagaaatacttcttttttgtatctattaattaaaaataccattatattatattttattaaaatatacccacttttatgagtgggttgcccatgtttagaatattttaccaggatctannnnnnnnnnnaagtatgttgattaacattctaaatatgaatatctctaaaacaatgaaataaacacataagggttaagaaaactttacattgattgcagcagaatataatgactccttccgttgaagatctctagccattgatttcattctgtagcagagcattatcaagatctgaacttggatctctttctctcattcgggattggttaccactatcttactcactatgattgagtac

SEQ ID NO: 99015 - DNA, 834 bp, Cannabis sativa
acatatatttatatagtatatgtaagaaacaaataatgcataaatcaatcttttattcttgactgatatatatgacttccaagatttaattgttggcctagctaaatattcatatatgtattatttcgtggaagaacgtatgtatatatatatatgcatatatatatacatatctggtatatgtatatatcaaattcaagtgcctgccgcgtatatacttactcatgcaagcactgaaaccatatctatagtcaaactagaatcgaaacagaaccgaacatttaatttgatgtagacacttttctttccttctcacatgcaacctagtatatttgcaccaaacagcattaaatataattcacactcatggattaatgctatgtatatttacatatatatatacacaaatatagtaatactccaacaattaaactaataaataatgtcttagttgattaagtggatatgagatcagttggccggccggctattatgacatatatatttagactgaatttgcgctcagtgcactgcagttataagtattttagagctatatatatacagtataaaactcatagtaatcaatcaattatcttttttttttccttgtatctaattttaatcaacagaacatatataggaaattacgcgttatatatagtaattagatattataaataaataaaaatttacatgatatgtatatatatatataattatacatatatagatagctagctataaaagagcatttatagaacacacttgatatagctagccttaattaagtacatatatgcaggtaaagccgcactacgaacaagtggttct

SEQ ID NO: 99016 - DNA, 2642 bp, Cannabis sativa
gtatatttggcacgtgaaaagagaccccaataccaccacaacttcaaagcaggggcgatgaactcactggttttaagctatttttttggctgaatatttttcttttttataactagctaagaaagaaaacttacaagctaatctttctgtgtcctactagataagagtatcggcccaaatcagcaatgctcccataattctcaacgtggactgtgacatgtattcgaactattcagaatccgtgagagatgcaatgtgcttctttttggataaagaaaagggtcatgagattgcatatattcagtttccacaggcgtttgagaacctcacagagaatgatatttacagcggttccttgagacttataatggaggtaaattagcccatagctagtgattttgagcacccttttctttaatttgatttgataaagaccaaaccaatgcatgtatatgatgatcccaaggttgatcttcgaggatttgactctaatggagggccttgctatattggtaccgggtgctttcatagaagggaatctctttctggtaagaaatacgaggcaagtaataaagtattactcgaatggaaaagaaagaatgaagataagggaattagtgcagaagctctcgaagaaacatgtaaacttcttgctagttgtacctacgaagaaaacactagttggggaaaagaggttgttgcacttacattaattctcatattctctcctttaattgtgtcaaataataagatttctttaacgatttcacattagtatgaatagttatactgccttttgtatttgtgcttactgatatgcagatgggtgtgatgtatgggtgtgcagtggaagatattttaacaggacttgtgatacaatgtagaggatggaaatcagtttattataatcccattagaaaggcctttctaggagttgctcctataacacttcaacaagcacttgtgcaacacaagagatggggtgaagggaatcttcaaatctttctctcaaaatactgtcccttaacgtacggctacaaaaagattcccctacgacttcaactttcctactttatcagcttgctctggtctctaaactgcttcgcttcactctactatgtcattgtgccatcactttttcttctcaaaggaatctccttatttcctcaggtaattagtaaccaaattaataatcttaatcccagtagtttttgaactctgaaatgttatcttacgatctcatgacagatttccaacatatggggtttatcatttctctacgtcttctttggcaaccgggtgtacagccttggagaacttttgatgtgtggagggacatatcgggaatggttgaactaccaaagaatgtggttgtttaaaaggaccacttcttatttctttagcggcttggaccacgtcattaggctattgggattcactgatgcaacctttatcttaactgcaaaggtggttgatgatgatgtttctgagagatacgagcgagagttgatagaatttggtactacttcgccaatgttcaccattttgaccacccttgcattgcttaatgccttgggcttgatttggggtttgaagaggttggtcttcactgaccaaagtttggttctgaacccatttgtattgcaggctagtctttgtgctctgctggttttcatcaacatgccaatttaccaagctatctttttaagaaaggataagggtagactccccaagtcagtgatttatcaatcgattatgctcactctagtagcatgttcgattgttgtttgttagaatatttggcgaaacatgttttaacttaagagcagttgtacttggtcaagccaaattgaactactttgctcaatctatatgtaataatgtaattgtatataagctctatctttatgatatgtttttgggttaatcagattttacttgactaaattaatgagattttgtattagtaaactgaaagatagcaaccagtaagcatttaaagaatggcatgaaaggagtatgatgaaacaaaaaaagatcttagctatatttacaaaagggcattgagaaaaaaagaagtgcaagattacagttataatagctgaagcaaaattttggtttttaaaattatatttttgtttgtttcagcatagctccaaaaaaaaaaaaaaagtgcaactttacaaatctgaacttcttcaaaagtcttctcattttttttggtccaaacactactctttcatttctaaaaactgaaaaaaaaaaaaaattattatccaaacggataaccactgtagaaaaaaataatatacttttttttttaactcaaattattttagttccacttctcaaaatctcctatatatatacttgttaaatttgtgaactgataaataaaaactaatgagtagaagaatatggataaaaatcatgatgatgatggttatcttcctcttttcgaaacaaagtcagccaagagccgtacacaatttaggttgttcgtagtatccatgttagcggggatatgttctatttttgtgtacagattaaggtatatgccattcccaacaaaagaagaagaaggtgcagtagtcatcttattggtttggattggattgtttgtgtctgagctttggttcact

SEQ ID NO: 99017 - DNA, 1728 bp, Cannabis sativa
gagccaaaaagggaacaagaacaaaaatacccaccagaagaagaaattgaagccaaacccgtttggaagttacatgtagacgggtcatccattgattagctgtccaaagtggggattgctcttataacacttggggacaacctttgcacggagtagtcaattttggattttcataacatccaataatgaagcagaatatgaagcatttattcctgagttaaaactttcttgggaggtatgtgctatgtatttagagatctataatggttcccaattggtagtaaatcatattttcggagaatatatgactcaagggagaaaagatgatggaatatctcaaaaaatccaaaacctactcgcacaatttaaaagaaataatgtcaagaaaattctcagataagaaaatggaattatcgatgcacttgcacgattggcaagaaagacaatcaccaataaatcaaacttggttctaatttagttccttaaggagccgaggatcacctgcacgaaagaaatttagatgctggacaacacaccaaattgggtgactcaaatagcagcttaccttaacaccggtgaacttctaaacaaaaaatatgaagctcagaaaatgacaagaagagttgtgcagtatctaatcgtggatggtttgatgtacagaagaggtttttcaatgcctttgcaaagatgtgttagaaatgaagaatctgcaccactcttgtctagagtctatgaagggttctactgttatcatgctagtgggcaaagcttgtccaagaaaatactatggcaaggttacttctggccaacaatgattaaagattctaagacttacttgaaattgtgtgacaaatgccaaaggttttctaaggtccctcttgcaccgctcaatgagttgacacaaatgcagagtttatggcctttttttatatgggaaatagacctaatcgaacaactaaccaaaggaaaatgtggagtgtagtatgaagtttttgttattaattagtttaccaagtgaacggaagttgatccactgacaactatcacctacaagaaagttttggattttgtggtagaaaacattatatgctagtatagacttcccccaaaaattatttcagacaatggaaaataatttgacagcttgatgttcactgacttttgcatggcacatggaattataaagagcttatcggcagatgcacatccctaagaaaaaaaacaagtcaaggacgtgaataacacactaaaggacactatgaaaaatgacttgaagaagcaaaggtaattggcctaaaaaattacccaaggtgctttggtcatacaaaagtattgaatggatgataatcaagaaaactccttttgctatggcttatggttatgaaacaatattgcccatcaaactagagcctccatcccattgaagattgatgtacaaccaagaaaccaaccatgtccacctagaagaatcacttgatgaaatttaagaaaagagagacttagcaaatttaaagttgcaagctcatcaacaaaaagtagctcgataatttaataagcaagtaaacacaagaaaattcttcatgggagatatggtgcttaaaagggtgttccttaatactaaagactgtgcaacaggtatgcttgaacctaattgggaaggccataccaagttactgaagtaacaaaattaagagcatattgttgggaatattttaccaagatctagat

SEQ ID NO: 99018 - DNA, 626 bp, Cannabis sativa
ttcatccaaatttgctttgcccacaaaaattaagccatcatcaaagaaaatatgggagagaattgggcctcccctcctcaatctgatgcccttaatagtgttcttacacagggcttcttgtaacagcctagacaggacttcagccgcccaaataaacaagtaaggagacagagggtccccttgtcgaaggccacaagagggtttaatcttacccactgaccccccattgaggcaaatattgagggtggtggttgtgatataccgagagatccaattgcagaacttccatgatatcccataacaagaaagcacatggtcaatgaacttctaatccagcctatcataagctttcattaggtcagtttttatggagaaatacccttctttgcctctctttcggttgaacaagtggataatctcatgaataatcacattattatcttgtatatttcgaccaggcacaaaagcagcttcagtggggcaaataagattaggtcaaattggcttaattctatttgtaataatcttggaaataaccttatacatcacaatgcaaagagaaataggccgaaagtggtttgttctttttgggttctagactttagggataagaactatattcgtag

SEQ ID NO: 99019 - DNA, 608 bp, Cannabis sativa
tattttagattatgaattaaaattctttaattatttccatatttgttcctactacttgttgatataattttgtgttaaataccatctttttaatggttgattacgattaattagtattaagattttatattttacatttgagaaaggtaatctaaaataagacttagaattgcaagacatagaaaaaagtgcaagatgaagagattctactaattctatgagaatcatattgctttattattacttaattgattaatgtagaatagagatattttgttattaattaagttaattatatcataattcgagagatgttaatagagtacatgaagattcttgaaattttaaattatagaataaattgagattcatagtttgaaatggggaagtcaatgcttttaatctttactttgtcattaaaccattgtttaactgtttacttttcgggtatttcagtatttcgatcttaatcattatttactttgaactttctaaataaagcataaaacaaaaaatcaaatcttgaaatttatgaatcaatccctgtgagttagacaacctttttagaattaaaagttttctataataatgttgtacacttgcagaaa

SEQ ID NO: 99020 - DNA, 1021 bp, Cannabis sativa
aataataaaaccaacgaaatttcaaggacaaataaaatattccttttttccttaattgattaattagcactttcttttaattaattaattaattaattcttttgtgattaatgttgattaaatattctttatagataacatcaacacactctctttgcttcattaatcttcgtttcttatgtgtgcatgcatgcgtgtgtaagtgtgttgtgaacgtgcctctattaatttatttattttttcctttaataaattatgaaattttattaattgcaatgaaataaaataatagcttaatttaatctggacattttctctattagagacacaactagaatttaaatttaaaaaataagtcaaataaacagtcgcttaattctcatgatacaaaaaaattaaaataaaatttgatgaaaaagattatagtatatatatcacaattaactttaagaatacctatattttgttttatttgctgctaagaagatataacagtagaaattgttgtagcagattcattcaacctcgtaccttgagtactcaattactattgtgtaaggtatgtgtaacgacactactaacaatcccttcagtcagagagaacttgatattaccaatcattaataataatttgatgatgagcaatcgaaaaacaaagaagaacccaacaatgaaacacaacaaatttacgttgtaaagacaagattaaaatatttaaaactatatcacaaagataaaactaaaatacaatcccgaccaagccacacctaagtccaatgaaagctcaggctgactatagaaaaaaaacaatcgctaataattataaatttagaaacgagaaacactaatatttttccttaacgtaagtgttgagaatcatggggttccatctaaaaataaattgtcaatgagtggattagctcatgttcttatatatgactcaattatctaccatttattccaaaccggatcagagtggacatggtcactatctgtataggtgcggatcgaatatgatcac

SEQ ID NO: 99021 - DNA, 669 bp, Cannabis sativa
cccgaacccaatcaaagctcactatgacccagttcaactttgaacccgacccacccgcacccaaaacccgataacctgatcacgcaaacgggtgggttcgggttactaattctatacgcccgaacttgaaaattcaaaatccgataaaacccacttgatgtgcacctgtaatgttgaaccccaacccagaacctcaccgtcgaactcagacctaaaaccccagtcacaagcccccgtctcttctctcacggtctctctctctctctaagtctccatgtctctacctcgaatcctcaaaattcacgagctcaaccacttcgaaactcctgaaatctccaccaatcattagagttctcaacccatagcttgttttctgcgttttgagtttccatatttctttatacacacaatgttttttattttttctttgaatttgttatttgttattttatttatttttatttattgttagagaaataaaacaatcataatttatttcattttgttgataattatgtgaaaaaaaatatttttttaataaatattaaataatttaatattaaaaagtagaataaataccattttggatcgtgtgttttgcaaaaattatcaattagaccatttgttttgttaaatgataaaatgaaccctatatttttcaaaatagta

SEQ ID NO: 99022 - DNA, 1017 bp, Cannabis sativa
aaaaaaattaaggtagctcattgaaaataaaaatgtctattttcaactgctttcggccttcgtacgtgcctcgggtgtcagaccaggataagagcttaaagaagaaagtagattcatcatcttcgtcgatggagaaaagcaagagtagtactgttaagtctaaaaacaaatcatctaataatactaaacctcctgttgtcgtttcttacttccccgtcaattcttatgcctctcgattgtagagtactactcttatttatatattagaatttgagagtttgataaaaatataaaatcagtggaaaaagtgggatgaaacgacatcaatttctggctgatagctttcggagtactttataatatctatttatattgtttgtatcataaataaaacatttttatttgtataatcagttattgaattcagatttttatttagttatttatttatttatttgaggaagaatgagataacttcattaacataaacatacaatctgaccataaacaaccatcacgaattcagatttgattacacttcttttaaaattttatttttttgtaaaggccgaaagggagggatttttttaagtgaatatgcttagtttgataacctatacaataaatttgagcaattttatctatacgatgagaatgtcacaattttaatatttatggatcaaatttcattgtaagtttaaggtatgtaaattcttacactaaatatgattttttgaaacattatttgaaaaatatgatagctattagtttgtccatcacaaaccaattcatcttcttctacttctcttttctgtccctttcatccaatctctgagttgttgtaatttacattgaaatttttctattagcaactatgaattgttgttcttctcactcttacagcagacaaggcatattgtatatatgcagtagtgggtaaactctccaaggacacatcatattcaacatctgtagtgtagtgtagatacgacattatttatatatatagaataattt

SEQ ID NO: 99023 - DNA, 752 bp, Cannabis sativa
tgtggctgcactatttgagaaaatagtatgtgaatctttctctatttttgctataagtgttatctgtgtttatgtgtgacatttatgcgacattcgtgcgacattaattaagtttacgtaatttttactttatttgttgccattatgtgctttatacgacaattgtccgacatctttgcgacattcaactatattaatctatgtgtgtgatattatgcgatgtttgtgcgatttgtgtgcgatttactatgactatgttcatttttttgcgatttatgttatgttttgtgtgacatgattgcgatatttatacgatgttcactttttgcagtggttgttcttcaaattttttatcctcggaatcgggaggttgattattggaagaccaattgtgagggtgaggtccccgcggtggatattggcttggatgaggtagaagaaacataagctggggcgcaagattcgaccgcattcgagacccaagaaaaatgggtggcagattatgttcaaagtgcaaaaattattccaccatcaccacccaaagaagtaccagagccctccacatctgccactgtgcccccaacctctgccactgtgccgccaacttctgctgcagctaatgactctgactacctacggttggcaaaaagattagagaaggtcgaagcgcaacaacttgcgattctgattgcacagactgagatgaaggctgacttcaagagaagtcagaaagagatgaagaatcttatcat

SEQ ID NO: 99024 - DNA, 551 bp, Cannabis sativa
agtctaattttaataaattagatacggtacttagaaagatatttttgtataactttatgaaatagtatttttcagattaacattatttaaatataaaaattagttataatttatggatttatttattacaaaattgtaaaaaaaaataaaaataaaaaaaataatatactttaactacattttctttttttttttagctcaactaccacggtaccacctaatatagtttccttaataataattatttatttactttttcttcatccattattgacttaataattaatttcaaaactaatcaagcaaatacctttcaacacgtgtagttatcttttttgaagccattaaattattatacgacacgttttttttatattactttgcatatatattcatgcaaacataatatcctttacaaaccttttataataatcattaaaatttaaatatttaccttccatattaaattatactaatagacacgattttgtctcgtatttttacggaatgtatttcataatatgaccgtcgttagataagtgagttatttg

SEQ ID NO: 99025 - DNA, 1266 bp, Cannabis sativa
ctttatttttaacaaaatatacatcaatgttcagaacattattaaatatgaatcccgacaactcgtctctacttactagataagcttatatacatttgctggagaagatctctgactcatggctgaccaaacgttttttatctcttacctacaccacatagcacttgtgattacttgattgtgattatttgagtttaagtggatgatatttatgtactgatttgtaatattatgttattacttttcttgtcgaatctttgtgacataaccattcttattattgtctaataagagaacgatacttaatccaacatccaaatactattgttgtcttctcataagaaaactctgatatctaacttgacatccaaatgtcactatcattacctaatgagataaccgacaagtaagaaacctaataacagtttcaatttatagtcatgacttttctcacataatggtaatgaccatgtcttataaacaataataatcgtatgccaacatgacatgctatatggtacaactgaacgtttcttacctttaatccaaattcatgcatgtcggccaacccgagtggagaaacgctcgactatctcagtactatgtcacaataatagtaaatcaatcaacaacttgacctaacccattctaggtcttaaatttacaatcaaaagtttcatgtaatgatcgttatacttagacatgggattagtgagacacttagcactaattaatctaattatgtaattatttaagtattttatactttataaaccttattttcatgaaaataggtgttatgattattatttcaaagatttcaaagattttattgaaatgaaggtgtgatatgcatgttatatataaattttcatatttttaaatttttatgcccgacaatagtggaaatgggtcgaattgtaattttagtcacatggatacaaatttgtatcaagaaatacggaaaaatattattggacatcttaaaatatcagggtttaacgaaataacataattggaccattttacccctagggttacaagatgacttagcgggaaagtaagggcattttagtcttcttgccctaagtgattagtcactctttttggaagggttatgtggctgtggatcatccttttgaggatgaccagctgctaaagaagaaatcaaaaaggaaaagcaaaagtaaaagaaaaccaaaaccaaaaaacaaaagtcaaaagaagaaagaaaaagtcaagttctcttctccctctactttgtgg

SEQ ID NO: 99026 - DNA, 785 bp, Cannabis sativa
ttcagtttttcctcttcatatagtcaacaacgtacaactactatatgtcgacatgcatgcatattaaatttatgtactttgtctaatgtaataaggaaagaaattctcaagtcaatatgtatgactagatgatcaccatgtcccaaaagacttaaaaagcttttaccctataacttagtgtactttacacgtaatttgaacatcaaattttaatacaccatacgtttttaacatacttttgctaaattaatcaattacgtttatgtggaattagttctgagcaccatattgtgtttgcaaggtatagagtgagagcttaaaagtgaagccttgtagaataaaagctatggctatttttggttcagtcaagacaaagttttaattagtggatgcaaatccaaggtccaactgaagagaaattataataagatcagtaaagattttgatttattttttctgtttgactattataataataaaaattaataaaaaattcttttttaaagtttacttattattaaaaaattgtgaagaaattagaaattgttaaaattatcaaaatttaaaataacttttgaaaaattattttttatccaaacatctccgtatcatgacattttttttaataccatagctaaacaaaagaaacttataaattaagccaagattaatatcttagggtgattctacaatacactcccttaaaagggatgtactgatacacccttggtttgtttcggcatccaaaaaaaaatttagtgtaattttttttttatattcatgta

SEQ ID NO: 99027 - DNA, 6844 bp, Cannabis sativa
atcgtgttttaatatttgatgagtaaatacagctggaaaaagtcttgacgcctcaagcgattgtaattgctcacgcaactgcccacaatcttgaaattccataccaaaactaatagaagaaatcaataaattagctaatgaaatatacaaaacttctgtacacgctctacagaaatctacatctgtacatttaaaaatgaggcaaaacaaacctattttccagcacttcataccatgtttcaaaatcatatttcctatcatttaccaaatgaatattacacaaattgccacaaaaccacccaattgaccaattgatgattttccctatcaaccaaaatatctaatccacttcctccagcagtatttaatcatcactaccaggactgatggaaggcacacccatcttcttatactggttgatgcacacgcatcttctcatgcacatctagtacaagattccgcaactccgggaaaactgataccagcgatagttcaaggatagcatagccaagttgctttatacaaacagtagactgcaattaccaaaaaaaaaaacaaacatatgcacatcttaattggtttaagagaaaatggaagtaacaggaaaaacaattatagtagaacatgccaacatgcagacaacctgtgtgaaataatagatgtcttttgcacaacgcctgtactgtttatgtccaatcaagctcactaatgttgtgggtgctccatctgagaggaatcaaaagagattaatttagtttctaggcaaattatttagtatttcttagatggttaaaatatgtgttttatgaatctaaactagttttattttatttcatttttgaagaaatggcacaaaattcatggatttctgcaagtgcatggctttgtacaaaaggcatcgcattatcaaaagaagtagaaacattactgtcatcccaatatgacattatcattagctgacatcaactagcatttcctctaattttaatactgacgccaagtttaataataaaaagggaaatatcacatgaaccaaagagaataagttactaaagagacattactcaccaaagagcattttcttcacgtcacttgctctgcgagcagcttcaagttgagcctcaaatgagccaggtttagaaaccttattggcaccaatttgatttacattttgagaacattttagatcagattcagcattctcttctttgtctcgtgcatttcctactttaagaaagaatgtcccatcaggccataaaacctgtgagaaataaacaaagttatgaattaaaaaaccatttgtataaccattactaataaatttgactgatacttttccaattgaaagcaggcagcaacagcagcgttatatgaaagattaaagttgccataaataccatgcctgtggtataaattttatgatagactaaacaatagatgtattttccatttgcaaggaagaaaatgtggtccagggggataattttgtcagctaaggcatgaacaaataaatcatgaaatctatttaatatgtgaggtaacaaagcatgttcctaaagaattatgtcaataagttaattaggatcatttaggtgcaaaaaaatgtcttgtagttcagttcttacatcttgaacccaccgaatcccttcagcaattatatcatctctccgaagccaatgaatctgtctcaacagccagtcatcaatggcatcctccattactaattgcaatatttgtttggatatccaaaagacctgtcttctgcaagttaatatataaacaggagtcaaaccaagcttatgttattatttaggaattcattaaacttaaggtaagaagatatgtgtggagtggacgatcacaaatggatattgtcatgcatactaaaaggaaagcaacacatgaacaaaagacaaggtttctgttgaggaaattaatctataaagatcacattatgaaaacctgttttctttcacctactgaaattgaaaaggaatgacagacaaatgtcacaaatttccaaatgccccaaataataacttgcaagtgctttagacattaatcatacaaatgataaagacattgtttaattaaaccccatctcgtctacgcatttttaagatagatagaataaagagaagaggaaagaaaaccttagccagcctctccttttaagctgaaatatcttatctactagattcaacaagggtacactcacattaggtggagtccactgcaagaaagagaaaaaatgcaaatatcaatgagaatggaaaaacagatttcactaaccctatgtttggatgttggattttagtagggaaagaaaaaggtaaggaaaatgtaggagaaaaaaaaagtgagaaaaaaaataatgaattcttatatttggtatggaaagaaaattttcaattcaacaaaactttccatatcaaacatgaaaaattgatttgttttcttgttctccatgcttctcttcttctctacattttccttacctttttctttcctcgccaaaattcaacttccaaacatagcgtaaataaataacattctatattctttataaatgacatgcataaatattattatttgataatacaaaaatacacttcattgcaaacaaccaaagaacagttacttcaaaaaatattagacccataggatgtcacacgcaacccgactagaaattagttacaaaactccagtagttccgtagtataaactccagtaatccgctagtatcagtaatagtcaagcaaatttgttgtaagcaacttaaaattagggataactattaagttttagccctttttgtgttcctttaacatgacaccatactgctatattataaatatggaaagagggttacaataacaggacaagtatacaaataataaagagcagtaatttttgttccagcatgttcttctgttgtttcaggttggttcaaacaaattgttcagaagttagttgtgttagtacagtggtatataaggaagtaagagaagagttttagacagaaaaaatctggaagtattattgcggcctctcaaatagatcagatcctattttctgcaataaagaggaagagtctgtctagtttttggttttcctttctggctctctatttaatatctatgtccttgtcgaagctatccataattacatctaaaaatgtatcagggtttttgtttcaagtataagcccaggtaaaacagcctaacaacacatacgtgctggaaattcaccttaaggcaacaatgacccaacacatgtgcacctaaaaagggtgcaataaaatataaataatggccagattaatatacctcaggtggcattccaactggatccactataagactagatgtcactggaagttttggttcagaaagtccaccttgatgaacagtatcagaattttccataaactcgtttttcttttctaaatctaatttcattggctgttttatcactcgaggtggataacccttggcattcaattcattgtctgaatgccaaccatttccatgtgcactagattcggcttcctcaaggctatgactatggccattgtccccttcttcattgtctgaaaagctatttgtggtttcagctgtatcttgcctagaactatgtttgctcgcctcctctgaactccatgacaaattacgagtggggattgaagacagtgcttcaaaagggggtgaagtgggaccaacaactttacgcattaggccatctgaaacccctttaaactggcgtacaatatcatcaacagcatcatccacatttactgttcaattaaaaggagaatattaaacaatttgaacatagcataaaaagaaaatctctacattccaaaaagcagtaagaagttgaaaatgcaagacaagataatattcaaagaattaggcatatataaaagtattgattaaacataatcgaaggaaataaaaaaggaagattaagacatttctcaaaatcagagtaacaattttctaacttgcgcagtccatgttcatgaatatgtcagtgtcatatggttgccagaaacatagtaacttcccagcaacataagcatgaataaaagtgaatacgtctgcaaaaaattggatgctacatcaaaaagaagtaagagacaaagaagacatatgtacctgctaaggttctcatcactgaggaagattttccaaacgagtaattcttcagaaaacataagagaaaatagtaagaataagataatttcaacttttacaataaaaacaattagatgaggagtcttcacaaaacactacatagatttcaataatatctgacaaccatcttccgtacatttgaatcctaagaaaataatttactatataaagcgtgttgtgcatgaaattgaaggcgtattggtactattaatatttgttttaccacattacttgttttttttttcagcatcagggtttgttactatggagttgaccatctttttctaacataaataaacattttaataataatcttgcacaagtcattaaatacacaattgtggtggtgccaactctaccatgcgtgtatatggtatgtttgagaaatactataaaaaggaagaggaatcaattaacatagacccaataaaatcttcaggaatgagtaactcttgcaattctcaaaatttcattcagagaacccttttcctctatggaaggcccaaaatttagaattaaatctaatgttgagcttctatttctttggtgcacatactagtactacttcaccatctgcaggatttttcattttatggtttgctctatcctttgaaagaaaaaggaaaattggactctccactctctactcactcaactaacaattctatcttctcgatgtcttaacaaaagaaatgatcctcagaaaaagcaattcaacttgtagtaaagaacatagtaggctctgacagaagatctatgtaaaagataataaataccttagaagaatcacttaaaaaatcccacacttcatgttgttcagcaacattggcaattgacaagagatcctgagaaaacacaatcaagataaaggaataggaaaaagagatgcaagagaaattcttgaagaactgatgtcatacttgcagatatttgtcaagctgaatgcatctctgatgtacgaaagcatcctctgtgcttgatgagaatattctttttggcggtaaatgtaaagtgtaattgggaatgtctttaagttgtcggtgtaatctctcaaaatttctatatctgtagagaaacaaataaataaaagatttgagatatttttgaatggttgagacttaagatatcaaatttcaaacatcatattatggtatactattgtttctaaaacttaaattaaacctttagtgagacaaaagaaaaggtgtatccttttctctttttaacaatccttgcttttctagacataaaaaacaagcaataaaccagaaaaatagggtgtaactaccttcttttcacaaaccaagttctgctttctgcatctgtcactgcaattgaataaactgcaaaggactttgaactaattttttcaaaatatgctcccattacctgtagaggtattcatagacgaaggtaaatttagtttaaaagatatactaactcattcgcaatagaactgaagaagatactaataagctgagccattgctccttaaaatagataaaaactatctgcttattggaacatcagtatatatcccccattagtttaatcaggaaaatatactcacccgacacctaagcttgggattgtgttgtcccacactaaccactatatctgaaacgctcttaccgctaaactgttccctacgtctgccaaaatcagggctataaaactcagaaataatcagccctccaccttctgtaaaggccttttttgaatcaggttcaattttcaaagccgaagtgctattagatctcttaagacgacttttatttccatttgcagacacattaaaattactctctgattcatgtacaggatgcgttctctcaataaaagattcctcattaatgtcttgagagcattgtttctcattattatttccatctcttaattgtgaattggaacttgttccatatgttagcctcagaatcgcttcctctttggttactgtggaaactactggtttgtcagccaaaattggctttcctaaatttttggtgggaacagaactatttaatccaaagccctttgttgaaggattgtgaactcctcttttgaaattcttgttctccttctttttgtagttccttccttttgtccacatgttttcgagattttcaggagcaagaacttcagttcttctctgtgttgctgcctccagcattcgtgcccaatcagctgggcgtggctgcaaaggctcttcctgggatctataattacctgaggatgcttctgtctgatcatatattttaaccaaagctgtattattcccctgattaacagacggattcttcctagatgcagaatcatgatcatgtgggaccccggcagttgactgatcaccacccatgtacttattgttatcatctttcatagcaagcaaaacaaattcaatcaactcattgatgtacctgaaacagaaaaataataataaaccaattacttacaagatgcaactataaagtaagaaaatgcataaaatcatgcaaaagtttgctattaaaacaaaataacatttccaaaaaaaaatgttgcatcaatgagttgcagtagttaacatacgtgaggataacaagtgatgtgatatatacaataatatttaaacattccaagaccagtttcaccttgcttatagacta

SEQ ID NO: 99028 - DNA, 578 bp, Cannabis sativa
tgaggtacgtccctattgcaacaccttgtcttttgtctctctttagtaagtaattcaatgttaactattacaaagcgagtagtaggttaactatgacctgaattgtattctacataatgtatgttgagtgtggatcaatattttttattctctatctgtttcatcacattaagggtctagaatttcctatggattctatctaatggaagagtaaaaaggtagaataaaaatggagagaaagataggactactattcaattcaactataagtgacaacccaagcattcgagagactccgaactgtcccaagagcaatctctcaaatcaatacagttttcatgagtcccaatctcagctatgcattctcccgtatatcccaggtagtaaactactaactaattccatcaaaaaaaaatcgttccaacaaattatggggtctaaaaatccaatacccttctgtcatgtacccaatgcacccttcaaggtgtcattttttccttcatggacagagtattctgagttatatatcaatatgaccaaattctgcttatgttagttcaaaattcaaacctagtagc

SEQ ID NO: 99029 - DNA, 541 bp, Cannabis sativa
tctgggatattgcttttaaaggagaaatctttggaagacacatgtccatgtccaaacgtgatggcctacatcaattgagcaccacatgatggaagagctacctaccaatccaacgattatatggtcttgtagtatttcacagtcccttttttcgtgttgagtaaggaatcctagtggggtaagagggtatatcctcacctacctatgggtctataaataacttcatttttcatgtacaaatgtagaacaatttttacttacaaaaattctactgaaatttctatagagctttcttctttgagagaaacataaggaatacagagattatcattgtaaacacttgtaatactcaaatatttgccaaagaaggctaatactactgactcgtgaactaagaattattaacgcatgaaccatgtaaaaaatctgttgatctattatttactattttgcatttcttgaagttcctgttaattcgttcctaaaaatttcgataaatatatgtataacatatttaagtcagtgttggattaatattcat

SEQ ID NO: 99030 - DNA, 5761 bp, Cannabis sativa
  modified_base (387)..(387): a, c, t, g, unknown or other
tgttgctaataatttcgtgactcttgatcaaatttgttgtaataatggtgaaacaacaacttgtttttttggctctaatagttaaagaagaaaatatttttgtaattgttgagagtaactcctaaagtactattaaagttctaaatggcttaatttatagatgaattttatttaacttttgtactcaatgtaataggatttctgatacgtttttggaatgaaaatttttaagaattagtagatatcgtaattttattgtacaaatgggcgtatgctcacaatttttatagtgtgttagagttatcaagttttctgaaaaatattttatgtaatgagtatcgatcatgttatataggtataagtctttttttattttttttttatttnagcgtttatatattacattacataatttgggactcgaactcaggacctccaacacacacgcaccctcttatggtcacgtgaggtagcctcaagtgcttaaaaacttataagtcgaacatccaattacgaattattcagaagataccttatatttatatatattatattatataaaaaaaatggatctaaaaatttaaataaaaattcatggatttctctattcctctcccatccttatcttccattaccaaagagagtgtaaaagaagaagaagagaagattgttaaaaaaaaaaaaaaaaaaaaagctaccgttaaattgacgggttgatgcatttattgaccagcagtggggcccactctaaactgtggcccatagtatgttcagtgggcccaattatgcacctcagtaaacgacaagattttaatatttatttatttttttgacgtaacttttaatatttatttatttattatttaaagtaaaagaaatgaaagctcaaaaatttaaaaaagaaaaaaagaagaggaagaagaagaatgaagaggaaaaaagagagagaaaaacgcgttttggtctcgaaagaacacagtggagtcctctctctctacccttcactttcaggaccaaaattagggttagggttagggtttttgaaaaacctttttatttttaactttttttttttctttctttctttgttcctctgcaactcaaacagagaagggtggggtttgttgattcattgggttttgaagaccctttaaagggtttctcagggtatgggttgttcttcttattcattctcaaactccttttcttcactgatcagactagcttctcttccagtgcccttactgaagctccttttgcttttgtgggtcttctccaatggcgtcgtcgtcgtctttgccgccgccggttctgacaaactggttctgctccagctcaagaattcagtttctgacacggcaggactgctctcgaactggaattccatcggttcggaccattgtttgtggttcggagtttcgtgtgactctaattctcgcgtggtttctctcaacattactgggactggcagtggcaccggaggtaattcgcaaccttcttcatgttttgattttgctaagtttcctctgtatgggtttggcatcagacgggattgtttaggtagtagaggaaaattggttgggaagttgagccctgtgattgggaagctcactgagcttaggattctatcactaccttttaatgatcttaacggcgaaattcctggtgcgatttggggtatggataagctggaggttcttgatctagagggaaattcaataaatgggaagctgccaattcaattcaataagaatttaagggttcttaatctcggtttcaacaggattgagggggacattccgagctcactgtcgaattgtaagagtttagagatattgaatttatcggggaatcgtgtgaatgggaccataccggcgtttgttggaaggctgaggggggtttacttgtcgtataatcggcttagtggtcgtattccgagtgagattggggagaattgtgggaagcttgagcatctggatttgtccggtaatttcttgattgatggtattccttccactttgggcaattgtggggagctgcgaactctcttgctgtatactaatatgctgctagagagtattcctgctgaacttggtcggcttcggaagcttcaagtattggatgtttcaagaaatagcctcagtggtgcaataccacatcagctcgaaaattgtatggaattatcagtccttgtgctatctaatcggtttaatccgctttcaaagataaactatacggaagataactcatcattggagcaaatgtacgacgacttcaattactttcaaggtgcaatcccggagggaattaccgcccttcctaagctgaggataatttgggcaccgagggcaactttggaaggtggctttccaagcaactggggttcttgtgccaatttggaaatgatcaatttagctcagaattttttcacgggggaaattcctgctgtacttggtcactgcaagaagttgcactatcttgacataagctctaacaagcttacaggcaagtttattggcagtctcctagttccttgtatgactctgtttgatatcagcgggaatatgttgtctggctctattcctgcgtttcatagcagcagttgcactcccattcctacgttgaatgaattattctttaatcttgacaatccatcgtcaccttatcaagctttgttttcatctaaagctcaagatgggaacatcttgcaattgtataaagaagatggcaggcatgtaataattcacaactttgggcaaaataattttactggcattttgccttccatgccaatcgcacctgaaagattagggaagcaaattgtttacgcatttcttgctggagaaaacaagttcactggagcatttccaggtagtttgtttgacaagtgtgaagggttagatgctctatttgttaacatcagctacaacagattatctggtccaattcctgctgaaattggaaaaatgtgtagatctcttcagttcctggatacatctggaaatcagatagctgggcctattccccttagtattggcgacttgtcttcccttcttgcccttaacttgagttggaacttgttgcaagatgagattccggtgagtcttgaccagctaaaggttatgaagtatctctctctggctggtaataatctgtctggctcaattccttcgggtttcggccaattacagtctttggaagtgctggatctttcttcaaattccctcacaggtgagattccaagagatcttgtcaacctgaaaggcctcagtgttcttctgctggacaaaaataaactttcgggccagattccttctggattggcaaatgtgacgactctctctgtctttaatgtgtcattcaataacttgtctgggtcactgccatctaatagtaacttgatgaaatgtaatagtgctattggaaacccatttatacggtcatgtcgcatgtacactctgacagaatcatcttcaaatgctcagggaagaggtggcgattcagaaccatatgctgcttcaccttctggagttccaacccatagcagtgcaaatggtggtcttaattcaattgagattgcatccgtagcatctgcatcagccatagtctcagtgcttatatctctaattatattattcatatatacccgcaagtggaattctaagtctaaagttcgtgggtctaccaggaaggaagtaacagttttcacagactttaatgttccattgaccttcgaagctgtggtgcgggctactgggaattttaatgcaagtaactgcattgggaatggaggttttggtgcaacctacaaagcagagatcgcacctggagttttggtggcaataaaacggcttgcagttggaaggttccaaggatttcagcagttccatgctgaaatcaaaacccttggaagactccgccatccaaatcttgtcaccctaatcggttaccacgccagcgaaactgagatgtttctcatctataactacttacctggtggcaatttggaaaagttcatccaggaaaggtccacaagggcggttgagtggagaatactttacaagattgctctggacatagctcgagctcttgcctacctacatgatcaatgtgtgcctcgagtcctgcatcgtgatgtcaagccaagcaatatcttgctcgacgatgagttcaatgcgtatctatctgactttggtttggccagacttctgggcacctctgaaacccatgctaccactggtgttgctggaacttttggatatgtggctccagaatatgcaatgacatgccgtgtttcagataaggccgatgtgtatagttatggtgtggttcttctagagttgctttcagacaaaaaagctctggacccttcattttcttcatttggcaatggcttcaatattgtacagtgggcttgtatgctccttcggcagggccgggccaaggagttctttactgcagggttatgggatacaggtccacatgatgatttggttgaagttttacatttggcggttgtatgtacggttgactctctctctaccaggcctacaacgaggcaagttgtgcggcgtttaaagcaacttcaacccccataatgttaggtaggttagccagtcggctggtaattgacttagtaacttttagaagactagaagattaagagccccaatgtaatttgtgctttttgcccattaggtatagttctgaattgtgtagttaattcccacttgtacattgtaatataggcttctttcccacatttttttttttggatgctgtcccttgattagggtctctgcctttgaaatctgcagaagagtgcagatatttgtttcctcagatatttgtttcctcgtcttatacgtgtatatcagttttatttgttgtgaaataaaaccgtagagtagacatattttcttgaagagcatagttcgaagttcatgatcggattatgtctcttttgtgatgcttgatttcaggaatgaatattagaaagattttgtgctctattctcttaactgtcggtcatattaaatgcttcttctatttctcaaaaccagaagattccaataaatacgtgtaagctcggttgattttcatttctatgctttctttttagtagagtgaaagacagttgtttacttgtttatcttaaattagtctaagaacttgccttaatctatgtttcaaaataggctaattagaatgtttattatgccctctgaattttttaagcctttaaaatttttccttgaactatagaatttgttagatttaaggatttatatctaattttattcaattttgttaatgtggtaattgttcatgtaataaatcatgttttcgaactttattatatactaaattatacctcctaaactttaacatgtacaaaattgtgttttcaaaaattagacaaaagttttcaaatccaacaatttcaatagttcggacagattttttaacgatctaaaaagttcaaagagcttgatttagtacatgtcaaaattagaggtaaaaatttaaataaactttcaaaatttaatcatatttaacggtagcatgaaaatatatttttattattgtaagtgtaataattcttttttttttttttttgagagaaagtgtaataatttttttgattgcctgatttcaataatatataaatatttgtgtaatttgcggcataaatacctaagttttataccgagtagcagataaatacctaagtcgcatttttgacagtaaaaataccttc

SEQ ID NO: 99031 - DNA, 723 bp, Cannabis sativa
gtatttacctaactttttatctaactttgaataaatattaatttttgtattttaaaattagttttaattaatttttatttagtttctcataattaattcaattcaaatatgtgtgattttgaaaaaaattaaatacaaatgataaatttgtgatataagttaaaatatgaaacaactattatcaaaatagacatcgacttaccaaagcccaaaattaaatgttctttctataagaatgaagtctcatcattaaaaataaagtaagagtacaataaaaaaagaaatgggtcacgtagggctgtgttggtgcttagaaaaccatattatgtatatatgtgctttttcataaataaaaaggaaaatatggagcgctatagtggagctccacgaatgtcgagaaaaagaaagattaatttacggtataaatatttaaatttaattttcagttgtaaataaatacttaaatttatttttgacaataattatccctaagttatatttttggaactctgtaggtacctaattattaaattttatgtcattatccacgtgttattttcttattggtatatttaaattatttttttttaaaaaaattaaaaatttgatgacttgccccaattaaaaattgacacgtgacaatttacttaatacttaagagctaggtacttacaaaagttccagaattataacttaagcattattatcgtaaaaaattaaact

SEQ ID NO: 99032 - DNA, 990 bp, Cannabis sativa
atatgattacattaaaaatatataatattttataataattattattattaagaaagactattactagttgtgagtagtgtctagtatcacaaaaaagttagcttcacagattattagcaatttcttattataattattaaactaaggatgtagaatacagtatataattaaaattaggtaatattaattctattttaacattggctgaatagcggtataagttgttaaagttttaattttataagtaatataaatctaatatttatttttagcgataaaagtatcaaatatttataaaactgtaatttttcttcaattttattagtacagactacgttttaaatttattagaaaaatatttaaaattaactgatactacatgtttttgtctagacctaattatttaaaattttaatattatatgtatcatatttaagacaatactaaagtttatacaaaattaaaatatatataattttataaaaattaaatactaaaaataaatattaaatttatttaagtacttatatttacccctttaacatttgttaaaaaaaattagaggaatgctaattacaacctcttagtcaacttctacatttgaaatcacatgccgaaatattttttttttcatagcggtatttgttatagttacagtatcatccctgtaaatttttagaaaattctgaatagtttacaataccgaaaacagagttcctgatattccaatttactgcgcgtgttcaaaaaacttcaaacgtatttttagtactttaaactattaaaaaaatttcagaaattaacaaagatgatattgtaagtataacgactactcttatgaaatttttttttttaaaaataaacattatctttaaaagagaaacaattgaagctttctcccttatccagtctcaggcgaagcgcgtggaataattgtaataattatctgtcaataacgacggcaataataattttatttttaaagaaaaa

SEQ ID NO: 99033 - DNA, 711 bp, Cannabis sativa
tcttttccttttaagtacttcgattcaagaactctgcaacatagagattgacaaccattcaggatgtttcacccccacttagctaaaaaggcttggttcattctcatagttagtactttcaataatataaactactatttctcattgtaactttataaattttttcttatcttatctcattctggggataagataacaagctcatacaataaaaaatttgaacatagactccatcatatagtcataaccctatctccaaataattaaattaggaataactagacacaatccctgataaactaacatactatatattgaaagagaggaatcagccgataagccactcgttataatttatctattttatccatgacatgacggtcccaacaaaatatacaaattaatactaatcaaaattttattttctaacaatgcatacttttgtttttcaaaaaataaacatcaaaactacttaaatagtcatttttttttataaaaataaataaataaataaaactatgctttaaaaataaataaatatataaataaaacttcactttaatttttttttaaaattttggacaacataacggctataatttcaccattctaaaaattttaaacctgtgattaacttatctgacaataattaaccaaataatttaagtagactttaaaaatgttacttatgaaattttaaaacttctaaaa

SEQ ID NO: 99034 - DNA, 530 bp, Cannabis sativa
ttcaccattaaaacgacagcaaaaacgacaaaacgacaattaacaacatctcctaaaatgtagatttttatatcacattaacatttttcagatttctttcctacaagccaatttgaaaaatcagcattttaattatttattaatttttttttgaatagatttgagcattggtctaaaccaaagttgaatacgattatgattaatgttgatggagtaattttttcttcagttgagaaatgtagtattagtgatgtggctcgtgatagttctagccggttattggaagcattttctttgtgttttcatggtcaagaggaagcttctttcgttggtaggcttggtattaagagactttaaattggactaaacgagaagaatagcaagatgttcaacttgaatttgtctatttagtggcggttcaagttgtgcatagtactatttttatgccttctccttttagtagtcagttggaacatgattgtcgagttatgttagaaattttaaaattaagatttattttgttaaacgtt

SEQ ID NO: 99035 - DNA, 758 bp, Cannabis sativa
tgttttctctaaaccaaagcataaaagagggaaagagcagtttatttttatttcggaaataccatagacgagtaaatttttcaagaagagggatgttcctcactttgaatttgtgtaaagcttgtatttggatagtggtattaatttggattaaaaatataagagaaaaaacattgaaaaaatgttgaaataatagagttcattattttccaacaataaattagacggtaaatagaggaaattacactatatacttgtttaaattgatgccattaatttttacccaatattttaaaatttattatagtatttatctctttttttaatcattctactaattttactcttatcactttacaatagcttttattcttctttaatcaaaattttgtcccaactttttcacaaacatacacatccatttttaaagaacacaaatctattatgtttgaaattatgtcttagttatgtgaggatgtgaggataatttaggtacaatatttataaaaagatgtatatttgaattaaattttatttggaggtaaatttggttaatgtataaaaaaattggtatttttcaacttcttccgagtaaatattattttggaccttgtgttttgtaaaagttactaattagattcctgatttgttaaataacaacattgaccttatattttctaaaataataaaattaggaccctagctcaatttttaatgattttattttttaatgtaacaaactttaagataatttctaa

SEQ ID NO: 99036 - DNA, 614 bp, Cannabis sativa
aaaattccacccataatttatgaagtgttgaaccaacttcttttttaaagaaactataacctgaccaagaacgagaacttagagtaatataatgtgcaactttattcgtagaatgtgaaacaaaataaatatgaatattagcaatagggtttaatatctgtttacaattaacgactaattgtagaaggtattttaagagaatcagatgaaacattatttaatttaataactattatagaatattgttaaacaaaatactgttagaatgatgcctaactccaatacaaaacaaaaaaaaaaaatagagatacatatacaacttaaaacaaaatatacacttaaacaccacaaagtgaacgatagggtaatgagctaatgatccctagatttgaagaactttaagaattttgtagaataattgttttcttcttctaaaaacacaacgaaaaataacataaaatggaaatacatcttttgaatttactgtcatgaaaatataattaaattagtgtaaattgaattggattgaaatttaatatatgagtgcacttttaatgggtattacccataaatggataatattaaaaaattttgagttttcatgattaaatttt

SEQ ID NO: 99037 - DNA, 748 bp, Cannabis sativa
cctcgcaaaacggcatgggcctccctttattgggttttgatcgcgtaaataggcctaatacgattcactgaaaaatagctttgtccttggtatctattcttaatcttttaaggggaaattttaaatatacccaaattcagtatattaaaaaaatataaattttatttacagaagtacagattacgacaagttttacatgttcgtaaataacattgagaaatgttacgatattgagaaaggcatcctgaatgatcttatcaatacaagctgaagaagaaaaactaagcttgcaaaagatacaaggcttagcgatgcaatcctttatttataggagaaaagatttacaggtacataaggaaaaactgtaaaaaacaactaacaaccttgtaacagaaagttagttatgtacaagaacctgacaactatacacaagaagctaattaacataacaactagttttatcacacttttttatgtgtcaatatcgttattggtccaactaagtatcgagttcatataatttaatataataatttttaaggagtatcgttagcgaatcgcaacgcaacatgtcgagaaagtactaggcaccactggtgtctaatagcaataaaaaaatattatatcactattaatgtgattaattactgaatattacataattatatataataatttttaaaagaataccattaactgtattattttatagtattgaaacccttaaagtttgcatactctaataact

SEQ ID NO: 99038 - DNA, 816 bp, Cannabis sativa
tagatgctgcctccttggagcattaactactccatttttcaatttttgctgcctccttggaggtgctcttagtaccccattgcaatgctcattctgttatggggtgctagtgatcctgtacaaagttttttaattgggtacacataaatgtatatacttaatgtgtatactcaaaagtcatgtatattaaggccaactccaatggagcactaaaatgttaaatttgttaaaattttacactaaattcattccaaccacactctaaaacctatcctatatataatattgtctatagtgtcccactaatattaggccatctccaatggtaaaacctaaatttggtgttaaattaacaccaaaaaactactatttcaacactatttttttttcaattccaatcacaacactaaaaattacaccaaattttatattatttattattctattattttattaatataataacaatattttaatattaaatatttataattatttagttttttcttttaaaaaatattatttaattattaaaaacttaaaaggtaaaaataatgcggtctacagtatcccactaaatttggtgggacattgtagacaaacctacttataagaataattttagtgtctcattggagtaaggacatctccaatggtaaatatcaaatttagtgttaaatcaacacaaaaataatagaattttaacactaattttttttatttcaatcataactgtaaaaattatactaaaattatatttttttattattatattataaataaacacaaataatataaatacaaaaagtttactta

SEQ ID NO: 99039 - DNA, 594 bp, Cannabis sativa
aggaagattctcccattttgttaactggattttattaggtggttctgactatcctttttgtattaatttttctaccgttcttcattcatccatttaggcccgactaggaacacgtggatccagggaacttggctcgagaacaacttcttacttgtaggggctaataaagcaaggtaaagagaagagatcccaagtttgaaagggctggcaaaacaggttagacacgataatatgacttgaaactcgcacaagagttagcgagttttgatttgccttaaatgggttcgggttgactcgtttatcccatttaataaatgggtcgtgttcagattaacacgactaacacaaaactcacttattaataatctattttaagttattttagtagtttaacaggtcataaaatatgttaaatacttcataaatatattattagttgacatatttaaacaaaatatgcttataaacgggttacacaggttttgtcgtgtcaacctgtttataaacgagtcgtgttcgagtttcattttctaacacgattattaaacggatcatattcaatcgagcatgtacctaatatacctccacacggta

SEQ ID NO: 99040 - DNA, 660 bp, Cannabis sativa
tgttttacttatgctcctccctgtcgtgctctgcgtttggatttctgggatgagttatctatgactatgagtaattactctagcccttggattgttatgggggatctcaattccattctctcggctgaagaaaaatgtggtggccgccccgtaaccagagcggaaggccagggtcttcgtgatttcatgttcaaattgggagggatcgacttggagggtgtgggggctatctttacttggtccaatggccaaaactggaaaagattaattcgggagaagctggatcgtgtggttgtgtctgctgcctggatttcttattttaaaaaaagcaggggttagaaatcttgctgtcaggcattcagaccatggtgccattgttttagacactcgtatggacagagaagtggtgaagacgccttttcgctaccttgatgcttggagtcgtgaccctggatgtcgaaaaatcattgaggaagcttggaacatcgctattgtggggttccatagtttcatgttgagtcgcagacttctttccacagccaaagcccttagtaaatggaataaagaagtttttgggcattgtcaattcaaactccaggccctggaacgtcttttgatcgaagttcaaaatcgaaccccctctaaggagaatgtcgaatt

SEQ ID NO: 99041 - DNA, 1196 bp, Cannabis sativa
  modified_base (1169)..(1170): a, c, t, g, unknown or other
gtttcttactttttgttgttcaaatagttctactttcccatataaattgttaaaataaaaggagacttgaactgacctgcaagccaggccaccggggcatggcacggtacagccacactggtcgttgcagactttcatatttcccgcagtgtcactcattttcaggcctccttgaagaaacttctgggatgattctagcttggtatttatatatatttatatatatatacgatgatgatgatgatgaagataatactgacttgaattgttgatataaatatttcagaggtggcaattttttttccatgcaattgttttggtatcaccacgtaaggagtgtttgagcaaagtccagaatgtgttagttgcataagccaaaatcttatttggtcaaaattcaaacttcaccgactaatactttttatctataaatcaaatggatatatttagttcatctaagaatgaagacttttgagaatttttttacattttgcggtagcatttagtgctggggctggagtttttgacacggtatgaaacccgcacgagctcgagaggtacgagtatgattcggcatgaaaaaatatatttaagcacaacacgaaaatatatgagtttaaacacgacactacatgataagttcgaaaacacgacatgtaaacacgaataaattaataataataataaatatttatttatttattaaaatgatactaatattcaaattatgataattataattatttattatataattgagtgtaactattattaaaaaaagtaactaaaattataaaatacaaatatattttaatacttaagtcattaattgtaataaaaatataaaaatatagaacatgaatttaagcttttataaaaaaaataagttagtctatttaagaaagacagattatcctaattaaagtactatacgaatccgagcacagtacaaaattatcgaacttgcagactatatcagacctattctataaaatgtttgcacgatatgttacaatttaattttttttatagcccaatgtaacataatccatattttaaaaagcacgaaaaatatggattagattaacacaacacagttatttacatctattagcatctatctattggatgtgtacacttgaatctctaaggaggcgtttggttgggannaatgaaaatataggaatagaaatggg

SEQ ID NO: 99042 - DNA, 2006 bp, Cannabis sativa
tataaaatatgatatgcttttaaattatagatattttataatgaaatattatttattcgaaatttaagatgatatttaagcctaaaaaaaattcaattataacatatcacgtgattatcatatgatttttagaactttaagctcaacttttagagatgcatataagacataatatggtgtatgttcattggaattgttttagaaaaaataataaaaaaaagactctacaatattaattgttttaatcttatttagaaaaatataatataaatatttagtaaaataattacccataattattcaagaaaatttatatcaaaaaacattaaattgaaatttgattttattattcaattgtcattaaataatttttttttataacatatattctaaaaagattatagacaaccgcacaacacactattactttacttttcttcttttcagacaaagatttcacacggtaaacaaatcaataaatatgaaatattattgaaagtgactatcacaaatagaaaaataacagacctaaaaagagtgtaaaaatgattactaggtactgatagtaataatactagtagtagtaagaaggtcaaaattaagaaggcaaaaaaaaaaagaaaaagaaaaaaaaccattattaaaacaagttattactctaggcaaaaagaaatgagaaaaaaaataaaatgtcatagttttttttagttagaataaaatgtcatagttgcatattgaaaacaataaaaaaaaaagatatatagagttttatttatataaatacctgaaatagaaatagagatcatttattggattgttctgtacctgaaaatatatatatatagtaaaataaaattaattaatattaatgatacattaataataataatactaataaagattgttcaaataataataataatgataataataaaaatcgagtacttcttggtaaaaaaagaagaatatatctatcaaccaataataatgttctgttgtattattatggtatatttgtcttatatgtctatattatggtatatttgtgatataccccaatttattaagtattctagaaaaaaatttagtttaattttttttattatattgttctacgactgtgaaatcaagattaaaacttctgtaaccttttgttgatgaatggattcatgctctgaggtaacacggaaaagtagccggtaactattaggtgaactccaagatcaaattggtgtcttcatctataccatttctaatcttaatctctgtatttttgataaagtattgtttttgtcttagcgagatttattttctgggttggtttcttttcgggtttagtgtgtttggaccaagacttatttttctggggttagtgtttccggtaaaacaagtagagaagagccagaaaaatcttagaaccctaccctaaattttgaaacccaccattgtttcggctgtagcaagagaagtttgaaaaaaaaaaaaatttttgagtagagatagtggctgccgtgtataagctttagggttagaaaatatatagcttttatatattagggaaattttcatggccaccttatttttattttggtaattattttcaaaaataacgttttttttgttatgttaagtttttgtatatataattgcccttttttttggtaattttctatttttaggattaacagttgtgtttatgtttgcaggtaatcgtggaggagatgatgacgtgtcacgtgtgtgatacattattaacgttatttttgtaaaaacttacctaatatagtatattcctaaaaaaatcccttcatattaaggttatagtatttagggttttattagttgggctgctattgtgtttgggctcaatgactcttgttggttggctgaacaaataggatagagtcttacttttttttttggggtaagttgaaaaatgcctcttttattcatcaattaatcaaatttacctttaattttatatttatttgaaacatacctctttt

SEQ ID NO: 99043 - DNA, 1409 bp, Cannabis sativa
ggttggtatgttgcaagaggcagccatggttgcttgggagatttggggagcacgtaataatttggtttggaatcaaaaatcatctaatgcttcttctatggtataataagttagagtatcacttgatcaatatttatatgcttaacaaaaaaaaaatgtgattctttattattgctttgaatgatgataaagttattgagcaacggactacatcagctattaatcagatcaaaattaatgttggcagtgcaatttttgagcatgttggatggtttggtatggaatgtgtagttcgggatagtgatgggaggttgttggaggtatttaataggggcaaagtgagtcgtattccattagaagtgccatggattattggtatcaaagaacctctcaattagattgatgatcatcattgggacaatgtggttgtagatacagaaatttagtttgtgtacaagtgattatgagtgccttcacaatttggtttggttgtttctgatagtaaaactattctaaactaattaaatcatgtttcttaatgttttgttaatcaatctgctaacaaggtcatacattgtattgcgcatactttttgtttttctcccaatcgtattatctagaagattcttttgtctcttgagttagttgccatttttatggctggtttttaagtttaaatgaaaattggtatttttattaaatatatatattaataaaaactaatttaaaaaaggattttttcagttttaactaaaaaaataacaatattacaaaaaaaactttcagccggtcaaataaataaatatacaacccaataaagaaaaattacacaaatacttcttacacacactttcagcctacacaatccacatttcctaggatcgaaaccatcctgtgatgcaatgaggtgaacaacgatgaaaaaactccgacaggcgagaaaacaccattaattgtgcgcgacgtcacctgagaagagaacaaactcacgcacacaaccttcgattgaccaacccagtaacgtaacacaaccgaaacgagacccaaccagaaagagaaccaccattaattctggtgacttcacctgagaatacaaccgaaatcaatcaaaacaggggttattttgaatttatgaaaaaaaaagtacaaaaaaactactacaaaactaaaattcaactagaaatctggtttaattcgcataaaactaatgtcttgacttcaattttcaaatccataaaatgcatatctcaaaaagttaaactagaattcctaaacaatccaacttaagtataatccaaaaaaaaaaattgaatcaattctatagttaaatgtttatcctggtccattttcattgttttttagatttctaatggtgaatttgttcatattaaatcacaaatagacatgta

SEQ ID NO: 99044 - DNA, 693 bp, Cannabis sativa
aaaactatcacgggtaaagttaaggttacaactaatgctttgttgtgccctgaacagcttaactttgcaaaccccccggtgggatcattcatgacctctaatccggctagtgcagtttgtgttgctcccccgaagacctccccaccattccccacttatggctccctagagcattgtcccccccacggccaaacccaacaagtgggcttatacaagtccggccccacaacctacacacaagaacctcctccaatggtccaagccgacacctatgcaaacacaaacaccaccatcccacccattggcacccaacccgagaccattaccccctcatacactgctctccttaatgccacaatgagtaacaccagtgtccaaaaagcctcacctatctccaacccgagtcatactatcacaccccaaaactctagcagctcccactccaccagctcaaaatactgtcatgttcctctactagaaaacctccccctcttggacactagcaaaagactcgaagccatgaatctcacttaccaaccaggtgttgccaccccctcgggctcgaaagcttcaaggaaaagaaacaagcccgactccaaagacaagttcaaaaggcaaaccgaaatggtcaatggggagcttcggcatcaaatcaagcactcccgctctgacaatccgcaagccaacgaagtc

SEQ ID NO: 99045 - DNA, 611 bp, Cannabis sativa
ggttgctttcatccaaggattttgcgagattacgattgcgcttaagaagcttcctgaactcgacttcattgatgcccgagggccatttaggcttaattctgcgaccagggggagcactaagggttggtgcagaggatgttctaggggagaattacagtggctgagaggccgttaatccgcaagtatagtggagaagctcgggagatcagaacagtgtgccaattggatccattcgtgacagagggaatcgacatagtaggtggtgtggacatggttggcaaagggacatggagttgctcagcagttgtgacagttggatagagtgatgtaggggatttaggaatttgcggggtattggtctctaatgatgcattggcttcaaatctgagtgaattgatgggtgtcagtgtggggctcattaggttaattggttggtgggagacatgagggagcaggttatttcgtgtgagggtattaatagtgggattccatcctatcgcaaatgacggagcatgagaaaccgtttgaatgggtaaggatctaggagtgttggagggtccctccacaaaaaggcctgctgaagcagtacgtgttggaaattattttatcag

SEQ ID NO: 99046 - DNA, 523 bp, Cannabis sativa
tcaaaatactaactgagaggccatcaccaacactttttcgcacccctgccaccaccaagtctctagcttcaaagatactacgccagacgaaactcagattagaaccaatctctgttgtaagaaaagaaccagtagaaaagtatcgagccttctaaatacgtgtagccatcgacgaaggatgagtcaataaatgccaaccttttttaccaaatagtgctaaattaaaatcacgaaggcttcgaaacctcaatcctccttcattcttgtgtttacacaatcttttccaactcatccaactcacccccttttgttgaggcttattgaattccaccaaaacttagccataagtttttccaactctttacaagtttcaatggaaagaaaaaacacactcatagcataacttggaagagattgagcaaccattttaagaagaacctctttccccgcttgagagagaaggcgcccctcccaactctgaattctctttctcaacttatcttttaaaaaacccagaatagca

SEQ ID NO: 99047 - DNA, 1029 bp, Cannabis sativa
  modified_base (760)..(762): a, c, t, g, unknown or other
ttgaaagagtgaatttgcaagggtttagggattagttattagtattacaaaaatgaacgaaatataatcatttacaaaaatggattagtattacaattgaaagagtgaatttgactaattatgcgtacattagcataaattttttgccctaaacttataatacccaatatttgtagcatatgcccacttttttattatccccaaaatattctccccatttacatcaccttcctttccctttctgtctaccattccttctcacccgagcaccactccaccatcacaaagaacagtttttttttttttttttttcttttcactcattttgatgcttgatctatgagttgttgttgttattttgctgttttgtgtgttgaaatgcttgatgtctatgaatactgcattattcctgggttcagcaatttttttcgtctggtccgatgggatccgatgtgggcccgatagtgtatccgattggtggtccaatatggaattgcttcatgacataaagaacatgacagttggagtgtctgtagagaagcaaccagtagggcgacccaaaaagtaaaaggttggaagaattaagtcaaaccgaactgcttgtaatggtgaaaggattatcataccacgaaattgtggcaagtgcggttccaaggggcacaacagaaacacttgcacctaccgaggttaaaaatgaatttttaatttagttgtattgtgatgtgttgtactattatgtattgttattgaattcatgttnnncttttttaaacattaaaatttgtggtattttattttttgattattattataatttgtggcatagctgaaaggcctatgattattattataatttgtggcatagctgaaaggcctaaaattgttatgaactaataaaagaacataattataccaataaaagaaactaattatattgttatcttaataaatatatatatagataaatatatatatgtagatagataaatatatataagaaaaaaaatcattgttcatgctaaattttgg

SEQ ID NO: 99048 - DNA, 612 bp, Cannabis sativa
tgtaacaattgcaaatattaagaaactttcgtcgtaaatatccctctaaattataatggtgcccttttaatctttttaatcgaaaaaagtgattatgacaaaaaagaatatcgagatcacacatacctgggagataaagtaaatgttggaaacaagtgcagattgaagtataataggcatgttcgaggtgtaaaacaatttgataggatacgagccttgttgtccacgagcattcttcgatctcacgcgaagaagaacacgaaacccttgaaagtagacaacaacgaggaaaatcatgacagttgagagcaaattcgtgacattaggcaaatttcgcctaaaaaatgcttcatgaagagcgccaactttgtctgttcgagttaatagttgatggaaaagagctataacagcgccttcaaactcaactccgcggccactactgctaatagtgaccgggctaaacgccttccatattatattctcactgaaaaatcatgacattatccaatcattaatcaaatcactaataaaagagccataaaagaaaaaagactaattacttaccaaacgtttgttgtgatgaaaagcgaaatagctgagcctaagccataa

SEQ ID NO: 99049 - DNA, 523 bp, Cannabis sativa
  modified_base (305)..(314): a, c, t, g, unknown or other
attttacacaagctattaatacaaatcaatatcaaacatggtatattgtattaaataatactaatacaatacaatccaacataatctaatacaacgtaccaaacaagttctaaatacactctcaattacggccccttgtatttttttcattttaaaaaatgacagccccctagagagactattaattaatcctaaaatatagttaaagcaatagacacttttcttacactacaagatgacgacgggaaaatcaatatattcaacctaattaagccttgagaaaagaaaataataataataataannnnnnnnnnaataataataataattaagatttaaagaaattactttatatattatttttaaaaaaaaaaatttcgaatttacagtttggatttttaaaatagtttttccagtaatttctatgtggattgttatacagtttttacttatgatttaggttgctccgttagttataatatggggttctatgtagaatttcgtaaaaaatacaaaaaaaaaa

SEQ ID NO: 99050 - DNA, 597 bp, Cannabis sativa
gtagagtagtgagtaattgatgattgtaggaaattatggcaatcctgaaactgccccctacactaacacctaacagtcataaaccaagggcaagactgtctttttcctttgatgcggatccaaagggaatattctttcccaaaaccgaatatgccccctttttgaatatcagatctattttcaaaacctaatgccttttattcccatataaaaccattcttttcttttccaaaaccctagcacaaacactctcttcaaagcacacagccggcctccttcttctcctctccttcttctcttttctttgaacagcaagaacaatccagccaagcttcttcttctccttccttcaacctttgaaaaaaacgcagcaggttctttttcttcttttccttcttgctgcaacccagccgagccttctgctcgtttctcttcaagctacggttgtagcttccatggcagccactgctacctttcttccttctccttatagcaacgcttagtgcctgcaatatacacaaacaaaccgagagagagagagagaaacagtagcaacaaagatctaaaatgatctttgttggtttagaagatagaaac

SEQ ID NO: 99051 - DNA, 2303 bp, Cannabis sativa
  modified_base (2255)..(2263): a, c, t, g, unknown or other
tgtacaacctactagaggtcttagatagggagatcccctctctccttatccgttcattctctgctttgaaagcctttatgcaattcttagaaattactaggatagaggtcttctccgaggtattgctattgctagaaaagcccctcaaatattgaacctcctttttgctaatgatagcattttgttctgtgctgctgatcataactcttctgatgttttaaatcgtgcacttactacctattcaaagcattcgggcagattatcaattttgccaagtcctctattttattttctcctaacactcaaccaaatatcagagatcatttctttcaaactttcaattagaaaacaagccctttatcaccaaatatcttggtctgccacaatatctttctcgtgccaaatatcctactttcacctttctaaaagataatctcctctatcatacactcttggcaccataaatgtaactctaaagcaggcaaagaaacctttatcaaggctgcccttcaggccatcccttcatatgctatgacttgttttcgtatacctaccaacatttgcaaggaaattgaatctcttatctccaaattctggtggggatcctctactgaaacccgtaaagtccattggaaaaattagaggtctgtctgccaatcaaaatttgtgggaggtttaggttttcgatctttaacccatttcaaccaggctatgttggctaaacaagcctggcgtatttataaatgccctgagtctttgcttagcctaacctttaaagcttgatatttccccaacacttcgatccttgaggttgctcctggccatagaccttctttttcctggcgtagtattctttggggtcgaaatttaatgaaggattaacttatttagaaggtgggtgatggcaagaccattcaaaccttataggatcattgacttcctgatttcaggttcaaattctactcatcttctcctcctcctaaacccaatttatctttctttatcactccacctggtgcctaggatcccaataaactccatcaatattttgaagatcaagttgttgatagcattcttcacgtgccaatttcgggtaatagttgtagggatgagttaatttgggatcattaccaatcaggtctctttaatgttaaaactgcttatcatcttgcactcaaatctagagatctaccttcttcttcttcttttaatataagcaaacaattctagtaaaaaatttggatgtccactatcccacctaaagtaaagcacttggtgtgtcgtgtactttcttgttccattccagttgcctcttcattgttctttcgacacatcatcccctcgcctatatgccccctatgccaatcgaaatcagagacagtggaacatgctatcctggaatgttctagtgcaaaaaaagcttggaaatactctgttttttcctccttctatatggagaataaagatcatgatattgatatgtttattgccaaagcgtttgatttgtatgataagcataatttggctgtgttattttgtctaatttggatgatttggaatcagcataataatctatttcacaacaaaagaatcatctcctctttggagctttttgatcatcctgctagctacttgtgtgaatatggttaatgctcatcagtctaagtttgtgtcctctaagaacagagacaggtgaacatgtacctcggctcatttcttgattttggagaatcaacacagatgctgctataaataatacatcaaagaggcatggtcttggagtggtggcccaagatgatggtgacaacataaaaactggagtggtcattctagtcgatgtggtgatttctcctgaaattgatgaagctaaagctatccttactgcgattttctggattcaagcagccaagctcccagtctctattattgaattagattgtaaaagtgtgatggataaaattaattcttcttattgtaattgttctgttcttagcaatattacaagttgtatcaataattcattcttgttgagtccacacttgtatataacttatgttccaagagagtgtaataacttagctcatgagggaggcttagggttaaacaatgagcttgtatgatatagttctctaccttctattctagcctgcaccttctgtatcaaataatcttgtaaaagtatataagtaatatttttaaatttttatatttttcatgtaaatttttcctaaaaagtaggggtgtacatcaaaccnnnnnnnnngcccgcaccgcaaaaaaaaatgcagtttgaaattcttcgc

SEQ ID NO: 99052 - DNA, 535 bp, Cannabis sativa
tggtaaatatgatggaaaagggataacagaggcatcattggaaatgtattctggtgaattatcattgattgagtgagatggttgaaggggctgatttgtagtggatggggatgaggcttcggtcacagtgagagggtatggatgggggttcagcctatccacaatcttaggagaggctgcaacaaaagattttttttgctaatctagtcatgaatgaccatgcattacccttgaaaaaatttgatctgtaccgatcataacccgaagaaggcaaaggtgataccatcatttctggaccatatgacagtgaaggttcaagaccattataaatttggtctagaaaagtaggacaatgttcaaaaggatggccaatgataccacattcaaagcaaaattccggaaggcgttcataacgaaactcgacccaaaattcctctctagaatcacgaattcttgccattttgcctcgtaaaagaggtttagtaacatctaacaaaggctggaaacgaaaaaagggtccccatccctcgtgaag

SEQ ID NO: 99053 - DNA, 723 bp, Cannabis sativa
ttatgaaaatttactcttcttgattataatttaatgaaccaatttacacttagatatggcaacactaattatatctaattatagggaattgcttaattaattcttctaaatgtaacaatctttaaattccattattattattttcttttcatttttaaaaaatctttcaatcctattaagggtttagatttttctttttctttttataaagatagaaatttttcattttatattcttcttggttgttattcatcttcttttagtgtcaaagactgtttcgaaatgtattgtatagtttaagatcgattaagtaactaatttaattgaatatataaattttaaaatatgatataattatttcagtattataatacaaacaaagattcatataccaaaattaagatagtggtgtagtctattataattctatatattttattattatcagaaattatattataatttatagtatatttgaatttagctagtataggcgattaattcagtataatttataatatataatctgttacatattaattatatttattatataaaaaaaacaattatattttttttagataaaaatgcatattaattaaattaagagttgatcacaacaagcatttataggtggaggtattgcctccaatcaagtacaaatagagtccaccgaaagatcatactttgctaataaatgagcagcagttttagcagatctaa

SEQ ID NO: 99054 - DNA, 548 bp, Cannabis sativa
tcgtgctaagactaaaatctcccccaccccgaggcacatcaccgaattagagattagatcaaacccccctcggccctcttcccccctacgagtcatcgcgcgccctccacctcactcagcctcactcattccctcagaggattgcaccccagttactgaacaagacctccctctcctcctctcatcctctcctccatcgcccattgtcggcgttggataatattctctctcctcctcgctcctccgctcccattcagttaacacttagcaaccaacaacaagaagacatatttttttattatgtttcaaaatttattatctgcaaattcaactaggttattagtagttagattgtatattttgtgtaattttataaataaataaaactacaaaaaatatatattttttaatttaaaataaaaaaatcaactcgccctcccaaggcccatgaacccggcctaaccctgttatcacacagatgggtatggatgctctttttctcacataacacgtgaacccaacacccgtgaaattgttcagaccaagtt

SEQ ID NO: 99055 - DNA, 927 bp, Cannabis sativa
  modified_base (57)..(74): a, c, t, g, unknown or other
ctctcttctctttttcttctcttcaattttgaaatccttaagtgatagagtagtgcnnnnnnnnnnnnnnnnnnatctcaatcatagtgtgtaaaactccaataaaatctatttttatttgatttcatgcatatttttatttacataatttaatttgtcgaagttctaatagtcttagagtatctttacatgttaggaatcatcacaaagatttaaaattgaaaaacatactcgtcaagtcggaaaatcacattatgctcactgagtttgagctttgactttgctcgaacacaatctcagtcattgttgaatcacctgaatcatcaactgactcatctttgttttcttggttctccaactagctcttcgatttaagctgaatcgtgacacttaaggctgctaatcggttctttgtagctgagctggtgatagccagattgtcgtccactgtcggtacaaccaagcacatttcgcctgaaattgctaaggataagtctcacagcaatgttgtggactgttgggcgtatagtgtctttatctacgaaatgatctacggtcatgcactgttcgcaactcaatcccacaagacaacaatctcaaacattatcaatatgccataagtcttttccaccccgatgctaccatgcgagcttgagcttcacacgagggagttgattagtgggttgcttaacaaggccccgaccaagcatctcgaggttagacgtggagctgctgaggttaagaagaacctttttttctaaaggtctcaatttggccttgattaggttatttggttagacaaagtgtggttggaaaacaatgatcaattttttagtaaggtacaaaatattttgtcaaatattcaatatgattccacaagatctagtttcgttcaattaacgaattatagccaattgaaaggatctt

SEQ ID NO: 99056 - DNA, 506 bp, Cannabis sativa
tcataattgctaataattacagctgagggaatgtattgggaggatacttaagctagttctcctcaaccaaagaagagaacaaaggactggtgctattatcacctccaaacatatccctacaaaacaaaaaaaaccaaaaataatattgagacataaattgaatagaaccatttaaaaactaatatacaaattcaaactttagagcataacacaatagaatagaattatactaacttacaaacacacacatatatataactcacaagtcaatacacaaaatttaatacttaatctatatatattatacatgtcaatcaaatattaattattctacattacttcaaattaattataaattactctgcataataaacggaccactaaaaaagatggacttcatccaaaaaccacatatatcaatatatatacatactatatatatacatacacacagagagaacatttcgttcaacacaaaatataattaaacaattttacataatatg

SEQ ID NO: 99057 - DNA, 696 bp, Cannabis sativa
ttggagagcaaatgctacctgtctgccccaacttatcagatggattggcaaggctaaaatcagtaagttcagaaagcaagtcctggcagcagctagtgcctctctagtctacaacatttggagaacttgaaatgccataatttggaaagaaggatcaaaggctcctagcaagcttacaaaggagatcaaagagagtcgagtacaaagaattactatgtttttgcctaaaaaaaatcaaagaagctgataagacttggtttcatgaattgtaaggattgattctatgatttgtaaaggaaaaaaatagaaaaatgtatagatagaacagaaaagtaaataggagaatggtgtatagatttactctagaccctttactgaggtgctattaattagtctgtaaaatgttttttagagcaatacaacttcttaatttatcaaaaaaaaattataataaaatctgtgaaaccataacaaaaccagtttcaaccatattaagaaaataataaaacaaacttaacacgagaaatatataaaacactacaaagaatgcaacaactcaattacagcaaaacaaaaaaactaattacgtaaagtgaacaaattacaaaattaatatacaaaaatctattattgagaaaccaactacgattatcagctaatgaaaaatctgatatagagtaaaccacaaatcaatat

SEQ ID NO: 99058 - DNA, 1037 bp, Cannabis sativa
tatatatagcttactggccaattgagtcaactaaaggctatagtgtattaacatgagacacaatataagctagcctaataagctagctaattaagcccatgatattcctccacgaggaaatagtttattcacaaagttatacatattcttaaatcatttccattaacgttaaataaataatatatatatatatgaccatattgataaggaaagcatctcagaagattacaaccaaagtaatatataattatataatatatcattttccatctacaatggcctagttagatcccatgcaaagaataagcaacaagtttcactattctagtgatatgaaatatgactaaataccccttttctacaaattaagtgtgtatatatatatataaatgttaataaaaggggtttttgtttgaattgtttttaataccttagtgatggtagggcgccattttgtgagtgaccttatgcaaagagaggcagcaaaggcaagtcttttcaactgagtaacatcataggccccttcttccatctttggatcaatcagtttctcaatttctccttgtttcaatattggtttagcctaatcaataattaacaattaacaatcaatcacatgtgcttatttaaaaaatatttagttaccaaagactaattaagcaaagccttaaccccaatagaataattaatcaagttgcaattttttttgatttgatttgattacccaagtgtgtaaactctggtgagaactatcaactggttttctgcctgaaatgatttctaatagaaaaactccaaaggcaaatacatctgttttctcatccacaattccatgcatataatactcaggagctaagtgtctgtataattaaataaataaaacaatgttaaaaacatttcatttcatttaaagaaaatgttagataataaatgttgttttttaataagtacccaaatgtcccttctataggggcaattgaatgatgagtccattgtgatggaagccattttgctagtccaaaatcagatatctgaaa

SEQ ID NO: 99059 - DNA, 946 bp, Cannabis sativa
  modified_base (356)..(358): a, c, t, g, unknown or other
gactttgctttgcttctctttgtatttaattttttctttcatttttttttatgtatactaacataaggggatcatgtgatggcaatctcttcctattaaaactgatgatactaccaaaacaaactaactttctaaaaagctgaatatataatgaaaaacttacaaaaatattaaaatttggattaacttttataaaaatactgtcacacggaaatcctttcagaaatactgtgtttttataaaaaaaacagtggaatacaaaacagaacaactaaaaacaacagtagaacaaataaaaaagaacagtgaaacaacaatgaaaacttaacacaatacatagtataaaacttacacannntttttgaaaaaaattccaccccacagtataaaagtaaaaaagttggaattttcagtatgcggtgtaattatccctatataattcctcacaagcaggacaaatgtacattggttccatgggaggacttgaccctcccaatatttttttttccttatttttattatatttttgtattttttttaaaaaatttatttacaaattcatttaattgccctccttagattatttttttttacacttcgggcccctcacaataaatttttacttcctctgctctcaaaaaaaagttgtgctaggattcaaaccccttaactctaaacccttatgacatatttgatttattgtaatgaacattagaatggaattatgattacaattttaatgtttaatttttccttgaagtgatgtttggtttggtggaatgtaatggtaatagaaattgtatttgtaatagtaatataatgaagtaagaataataataataattgattacaatatttagtttattgttagaatgaatattagagtcattttaactttattttataggtaaatactattttggattctgtattttgcaaaagttac

SEQ ID NO: 99060 - DNA, 505 bp, Cannabis sativa
atgttacttttgtaaaaaatacacttatttttcgtctacatctactcctactctccagggggaggatgatgatttgtcaatatattctatcacatcctttgtgtctgacgtacatgttctgacgagtctcttgttttttcacccgcctcaattatagctcctgcaatgcttacacctcttccacctcctccgcctactctgcctcctattatagtgtactctaggcatccacctcctccacctcctgtttcatatcttgcacttgcttcttagtcattaaatctagaacccaatgatgatcttcccatggaactacataaaggtaaacacaaatgtacctatcatattaatcatttgtccttttcttcttgctcctttattgcttttcttgattctatcactatttttaaaattgctcatgaagctatgtctcatccttgtgggcttgctacaatgaaagaagagatgtatactttaattgcgaatggtacttaggacttgatta

SEQ ID NO: 99061 - DNA, 1088 bp, Cannabis sativa
atgcttttataattgcttggcaataagcctcctaaccatcttatgaggttacttttgccgaataagtaaaatcaaatagagggcaaatcaaatcaaaaatagcaggtaaagaagagcaaaggagggcaggtctcagaagtcacagtatagaggggtcaccttttatagagacagaaagatgggaatcgcatatctggtttagaggatttcttcttaaattattattaataattggtgtttattatttcgagaaattagatgaatagtttgatcattaaagaataatatagattttgatcattagtttgcttaattctaattgaaaattaatacttttatttaatcaatttagagttttaatacgtaaataaatatttattttgattatataactgtttacaaattctttatgtatagttgtaactgactacctctctcgtgctctcacacattcaaaaactgcggcaaaggctcaaggcagaagagcaatccattggtgcattcaagatctgtaactattttccatcttattccaaatatgaattatactgatttcgcaacaaatttaaatctttattgaatagttttgcttttgttttttttcttctttttcaacagaccagtatatgttttattcctgtcttcaaaaaaatttatatacatattgttttgtttatatgcttttacaacttataagttgacttcctcctaatcatttaaggttcgtagagtttggttggcttgtattggttcttcattctcattattgaaaaaagctcactcaccctcacttaagaacgatttggttctttgtctaggaaaatcaatcgtcattgtaattacatttaatttcgttacatttgattttaatttcttgataggtgctcccatctgaataaaaaaaaactcaataatggtaggtgctctcatcttaaagtaagcaaattgcatagtggtcattctttaagttaaaattacaccacggtatattacaaaacatatgatgttattaaaattaagttaaaattaaaaaagatactaacaatcttattatgcattttacagtgctatagcatatgttgaacttg

SEQ ID NO: 99062 - DNA, 1004 bp, Cannabis sativa
tttgaatatagtggcaaacttcagatgagatacggtgataacgacaggtaagacaacgagtgagatatacggaaagataacagatgagatacggtgatgatcgggtgagatacaatgatgataatgagtaagatacaatgataataactactttaaatgattgagatataaaaaataattcatcatggagaatactctaattttttcctacactaccctttgtatttattgttataataacaatttttttttatcaaaccaatttaaaattttaattatatatatatatattaaaaatataaatgggaaacttcttaatatacattgatcctttaattttacctttttgataaataaaattattaataataacatttaattagataatataattttattattattatattttagaataattttttaataagtaatttcatatttattattttaacaattactttttattaataattactatttattaattaatatagtactaaaaaacttaaattagtcgcgcgagtagcaattcattacaaaaaaataactacttttagtaataattttctagtcacaacataaattttttgtgactaaaatgtgacttttactcacaacaaaaaattacttgtgactaaaacatatatagtatttgtgaataaaagcacatttagtcacaaataaaatgtgatttttgttactaatacttttaatcacggattttatagtcacaacataaaaataataatttataaatagtaacaatattttaacttttagtcacaagttttattatgactaaaagtaaaaaaaattgtagcaacagtattgcctaataatttatatataaaagttatccgtaatatataataagagtgaaaaactagaaaacagtgattaaatagttgttacacatcaactctagacaaggctcgggtatctattggatgaactgggatcgtatgtgtgcttcgaaggatcaagtgttgggttttatgccc

SEQ ID NO: 99063 - DNA, 788 bp, Cannabis sativa
aggctgtgtagtgttggtgtttttgtcgtttattaaaacggcatcgaaattattgaccctgaccatcttcactgagcgacttttcttataataaaaatataatgcagggatcactacaaagtacaaatacattattaatttgaggcgtgggataactcacattaagataaaacaagatcttgcttactgtaaagacgtgtagtttcaatcttttacactagtaaagaaataatttcgataccatgcggtgaattctggtcccataacaagggtactacacacgtgtttttcatttccatttgtctctttcttttctgtcagttgtgaatacaaaaaccttaaaaaagtatctccagcccatcccataatactccaaccataaataatgtaaaaaatattggggaatatcattattttttaaatttataattgattttcctaaaatattacggcagatgtcaattatttatgataagattcaaatattcatgcgtatattcttctttttatacatgatgcatgtatgattgattcttaggcggtgcagaagtccatgaattctttcagctcggtgaaagaaaggtaatcaatcaaacgtgcactctgattatgcttacaaaactcatgcaaaacgcggaagccaaactttaaatttgtatgttttttatttttttaaaaaaaattactaaaataaaaaaactcagtttcatcaacatcatcttgaaaaaaaaaacaatataaaagtaataatttaaaaataatagaaactttaaaaacaaatttcatca

SEQ ID NO: 99064 - DNA, 533 bp, Cannabis sativa
  modified_base (404)..(407): a, c, t, g, unknown or other
aatatgcccttcttcttttattattatataatagaaaaatggggcccttctaccttccctagtttcgaatatagtaatatgttgtttagttttattttatatatttcgcttggtaaagtcttgtaaattgttaaaacaccttattaattttattttgaaatttttacacaaaaaaatacaaaatagatactttttacatatatatcttcacacggttaaactaacatttatacacattaactttattttattacacttttaccatttacacgcacaatccatgcatgcagccacacacgtcattgattaatgacttatatcaatcacactttacatcattccattatatttttctcttcttctttttttattattttcaatttctttttcagtttttttttttnnnnaaaaaaaaataaataaataaaacctccatagctgaactcttcaccttcccctttgccaaagaaaaattctaaaatgggattgaaatctatagctaataggaataagacgatgattccgattttgct

SEQ ID NO: 99065 - DNA, 790 bp, Cannabis sativa
acattgctttgttctctgttgtcaattttttgttgctagagatgtttcacgtccggttttagaggttatttcctcctgcacaaatggtagacatctcctgagatggcagagtcgatggaggtgcggaaggttttgagttggatcaaaaagaaagcatagagtaaaatggtcattgaaacaaatagtcttattttggtacaagctaatagaaacctcttatctagttatcctattttaagaatattattattgattgcaaagtgtttatgcacgatttgagtgatttttctattttctttgtagaatggtctgcaaatagtgtaactcatttttttacaagaactttctatttggttcccgatcgtattatcaagaatgacaatatttctcctaaatttcttgatgtgatcttgaatgattgtcattaataaagtttttcttgtttaaaaaaaataaaaattcatttattaaaaaaaaagaagtgttatcatcaacctcttattacaactatttaatcaatctctatgctcgaaaatacatgtttgaataattttttttattgtgatattcgttataattataacataattcttacaaatttttaaaaactttcgaacaatttataatactaaaaatatatataaagtttttttgaatacgcttaataaactagaatattaaaaactctatttttcaatattataaactattcaaaaataatattgtaactataataaaaacataacttaaattaaactccacctcaagtgtaagtaaaccttaaataaac

SEQ ID NO: 99066 - DNA, 1341 bp, Cannabis sativa
  modified_base (50)..(68): a, c, t, g, unknown or other
tttaacatagtattatataaaaatatgatatataatccaattcaatatannnnnnnnnnnnnnnnnnngacctaatacgacgttccaaatgagctataaaattgtgggattgagagaatcaagggaattgaggatatcatgggattggctcaattagcctttattgtttattttgtaattaatgtaatttatttacttgtagccctatagatagcgggtcattctcactattcaggggaagattctaattcgttcaaagatttatcacgctacaaagtattatctataattcctaaataagaatattaagaaactcacttgaccaggttcttgtgatcttgatacttcttagagaaatacaatataaggggagtcggtcattaccaatattcagggtcgaacctctataaatcttgtgtgccatttattgctttcgattattactaattatcaaatatctttgtcatgattttattgacaccacgtcattgactaaaatgaggtcaatattttagtactttcattgagagcatgatacctttttgttctctacaaaatatttgtatcttatctattttcaaatcatcttcgattcaagaacaatggtttaaacaaggagggctacatctagtcaacagcaggacccaatggccactgatccaaatggctagatacctactgacattggaatcgataaaaccaatgcacgtctgccaccttgcaacaatacctctgtgggagctagggctggagactcaatttctataggagttagatctgatccagctatgatccgacctgatccagatcatgtaaagatattccccgccctgccccgctagatcagatactcggatcggatcagatctgacttgacttattcggatcggatctgatccgacccaactcttttttttaaaagaattttaatattaacttataattttatatctattttaattttgtattagtattattaaatacaatattatgtttgctattgacatgtattaatagattgtgtaaagataatattttttttaataaactctaccccaacaccaacaacgggtcgggtccgcgtccaagtttgggttcgggtctgggtctgggttcgggtccaagtttgggtccggatctgagtttgggcctaggtcaaggtcttggattcgggtctcggtttgggtccaggcctcggtctgggttcgggtttgggtcctacgttcgggtcaaggtcagggtctgggtcgcgggttagggtccgggtctgggtttggtttcgggtcctgagtctgggtttttggttcaggtttggggtcgggtctcggtccgggtctgggt

SEQ ID NO: 99067 - DNA, 584 bp, Cannabis sativa
gcacttagtgcggattggatgttgtttgaaccaaaaaaatgcggattggatcggatgaacacctctaactgcacatcacgatttgactaaaatataaactacaattacactacaaaagatttttaactgtattttttatacgatctgttgtggtgcaagtagttgtgcaatgtagacagtttgataaatgtcccttccaaaaacttggcaaaaaaatagtatgtaaaggagtaaaatatgaaaaagtgcaactctaataaataacagtaagaaaacattacaccattgaagagcagtgatatgtatatataatcataaatttgaaacatacttatatgtgataagttaagttaatttaacaagtaggattcattttaaacgtactatcgttgaaccgaatcatgcaatagctaaattgttcataaaggatagcatatttctactaattaaaaacttaacaacacaaacaacaaactcaactttaacactatgtttggtaccaaggaaaaaaatagagtaattagaagaaaagaaaagaaagaaaattaatttgttataaaattactatattatcgttaaattta

SEQ ID NO: 99068 - DNA, 511 bp, Cannabis sativa
aatattttttctttaatttttaatcgtatcactttcaaataacataaaaaaactagcataaaatttactatacgtgcctcgcacgttgctttttgctagtatttatagatacatgtatccaactgttaaaacatatctctagcttgaagattatttatttgaagtaccgtttaaataggttattattaagtacttcaaaagtaattatttccatgaaaaaggtaaaaacacttggattggaactgttaaatatgagaaatatcatgttttaaatgtaataacacaaataattattgttaagcatgtttatttatttatttaattaatccttcttcatttaaaaagaaatagattattactttttgaaaatttaactcactttttaggcatgtttcttataaataatgataaatataagaacaacaaatcagagtggcgcagcggaagcgtggtgggcccataacccacaggtcccaggatcgaaacctggctctgatatatacgagtagct

SEQ ID NO: 99069 - DNA, 534 bp, Cannabis sativa
atgtaacaccgtagagctcatgagctcgcgtgtttggaatatgaatggataagttacgacttcttaagtggcatacattgctgcaatttaagtcaagaacaaacaaaattgtttttcatttattctttttaaatgtttatttaaaattaattctgtaatttattgtaataacggtcttgtctgaccggttatgtaatcctaaaaggcacatgctttctatataaaggagcgatccaaatcaaataaactaagatgaagttattgcaaaaagtggactaagcagacaaagttttgattgaaccactataattctcttgtcctctttatatttttatttttcgtttttgtctatttcgtagcttatattttgagtactcgctattctaagtgaatactcgcataactactaataagtagtgttcttgttgtgcttgaatactcatattatttggtgttgtctaaattccttcgacaacactttctttggcaatcaaatacctgtatagatacgattaagtattaatttatatttta

SEQ ID NO: 99070 - DNA, 792 bp, Cannabis sativa
  modified_base (329)..(331): a, c, t, g, unknown or other
aaaaaaaaaaaaaactatattttattcatttaagcaaaatactatcctcgccctaaattcctaaatattgaattgggtaataatcgtagttttgtctggcgtagtatttggagtgcacaacatttggttcgtcttagagctaaaataactattggtgctgggctttctacacacattctcaaacattcttggcttcctgatcctatcaactcctatgtctctactacaagaccgggccttgatgagtacatggttagttctctccttgatgtttctactcgaagctgagatgtctctcttgtcaaagatatgtttaacactcgggatgnnnatttaattcttggaatcccccttagttctgctgctgtcgaagattgttggtcatggactggtgatagaacaggcagctacaccgtaaaatctgcttattccatgctacaacttcagaaaaatactcgacctggtgtgaacaacaaactttggcaccttaaaataccacctaaagtgaagaacttcatgtggagagcagtatttgatgctcttccaacttgcctccaactggttactaagtgtgtaagtatttccccaacttgtcctgtttgccttcaacatgtcgagacagctactcatattcttctcagctgtcctcttgccttaagttgttggcacaaagctgatttgatccttcacgttgattcgaatggcactattggacgctggcttgacaatgtgtttaatagatatgatgataatgttattttccgtgtggttatgatttgttgggctctttgg

SEQ ID NO: 99071 - DNA, 627 bp, Cannabis sativa
tttttttttttttttttcatagcatcacccaatttcaagcttttaactttcttttccatggactatatatcaatttcgtgtcgaagtatagggcagcgtagagaggaagaagaagaaaaaaaaaataatttagttattttttttaaaaaataaaattattttaaatttaaaatttaagattggaaccaattatttgtcaacacgtgacattgtgagatagtagatccgttagaaaaaagaactaaccgacttataattatggtgaccttatcgactattactgtcaatttttgaagttagaaacttgtatgcatcaaattgatattttaagagatttaaacaaatttgtaactaaaagttaaaaaattgtgactaattataaatcataatttctaaattctatgttgtgactaaaaaaattacaattaatattaatataactaaactaataaatattactgtaattatattatctactattttactataactaaactaataaatattactgtaattatattatcaccattattgtatataccatcaccattaaaacagtacgaacaaaccttagtgggctccgagttgcacagacaggcgtattatattactatctattaattgatt

SEQ ID NO: 99072 - DNA, 703 bp, Cannabis sativa
cgacgctcttccgatcttactatgttttagtcacaaataattttttgttgtgactaaaaatcacatttagtcacaaaaattttatgtcgtgacaaaattgactttttttgtagtgacaagcaataaaatcttaagatattccaactcaaatagtaaataagggttattttttttaaaaaaaaaaacaaaaacaaaaaaaaaaaaaaaaaaagcaaatagtgaataagtgattgcatattaattagtgttgactttcccaaatatattaaataatatttgtgtctctatcatttggtctaaagatggaaaaatgctaaaaggtaccaattttgtctaatatcttttaatatattaatattattattagtctaattaaatatcgggtcttatataatttaatgtaaacttttagagagtatcactagttaatcgcaagataatatatctaaaaatgttaggcaccactagtatccaataacagtactcttaaaaaataaatacatttgacagaagcaattgaaaattttaaatttagggcacaatataatctatcatgatctttatcttctttctgatatcatcaagtttctcatccaattcttaatttattggcatacgagcaataaaatctgaagctattccaattcaagtagtaaataagtgttatttttttaaaaaaaaaaaaagcaaaaaaagaaaaaaa

SEQ ID NO: 99073 - DNA, 2177 bp, Cannabis sativa
ttttttttaagttggtaagggaagccaattaaaaggtcttaatatgattagtagtacagattaacaggattgttggcctgagaagtctggttttagaattggagggcttgattcagctcaagggatcagcataaatgagaaaattgcggaagtgacattgacaagcagaattgagttacgacaggtttcaatttctttgagaaaaaatactatttattttatttttattttttgaaactaggatctcgactcagcaagcaaaagaaaggaatgaagctttaatgaagacactgaaaaagaagtacacttacagttgcctcccaatgcttgaattagacagaacttttgcaagattaagaacgtcttcatggctattccggcggctacttactatctggttaaatttgggatgttctcttaaactgtccaattcaatacacactatcataatgtgtttactaacaagaacaaactttttacattgtacaaaattttaaaatgtaggagcagaacaaccaagtaggtaaaaagaaaaatgaaaaaaaaaaaaaacaaaacaaaacaaaaacaatggattacctgttccatagttgtccagtataccaggtctccagaaagatatctaaaccattagaaacaagggattgtgctcgagaatcatctatggctctacgaacttttcttgctgcttcatttttcattccagggcttccagatattacaacagctccattcaccttcacaataaacgtcagcttttgttaacaatgtaaatttaagtgaaacatgaattgctgtgactatcttcaaacttatcaatatctctactgtaacaaaaacaattaatttcattaaattatctagttaccttttctgtaaacctaagggccatatacaatgctatcctggctcccattgagtatcctacaacagttactttctctggtgtaatatggttaatcactgtatgtactacatctgcaactacctcaattgataaccttgttctcagtatggtatccttatcaccaagatattgtatttgtgttcccccatgcccaggaaggttaattgaaatacatcttgctcctctggaaacagccttcatgatagctatccagtcttcactggttccaagaaatccatgaaggaaaataagtatgttatcctgcagcaattttaattttcttagagggacccaatatagcagcagcaccaccaatagattaaactcaaaaaaagatcctgaaacatagtaatggtagcgaataggagtttcacaatacccctaaaaattacaaggtagattaacatgcaatacatgatcttctgaataaacataacaagtggacacaggcaacacacaataagactattaaaaagtgtatcggttttactaacatgagatgattctccaatctcttgaacctgtatacaataagagataccatttacatccacgggaagtaggtaactacgaacttcctctcctgtatattctctacaaattatgttatgattaatctgaaatgattgcagaagttgattagcatctgcaatagatgcctctacaaagccgctgtgttgattgcaacttatcttgagaggacctgtagccacgtcttctttaagccatcggtaagttcctagaccatggaatacagatggacctgttttgcctgtattcatattcataagtctgcttacctccccataattcagatcaagataacaggataaatggatatatgctgacaagcctaggccactttcatacgtagcacttagaacagccattttcccatgcttgtgggcccactgggcaagcgattctgtattctcaaagccaccaacaacacttggtttaataacctgaaataaccaaacggaaagtaaaatactataagaaactgacaacatttcctaagaaatataatattttgcaacaatatttctccagaatgtaaactgcatttgatgattatgcggtttctagtgattcttgcacatttcgttgattcttctatccctataagaggtggtaactatagataactaaaactaaagtgataaagaaggaacacagtaccaaacccctagtaaggacaagcatggcataatttaaatcaataggtacatgttccgaaatgtacaaaacagataaatattataatatg

SEQ ID NO: 99074 - DNA, 867 bp, Cannabis sativa
  modified_base (52)..(52): a, c, t, g, unknown or other
actattggtgatatggtcttaagatgagtcttcccagccactgaagaacccngagttggggtacttgggccaaattgggaagggccatatgaaattcaggatgaggttggatctgggacctataagccaaaaagatttgacggaactattctgccaagggcctggaacgttgatcatctccggaagtattaccaatagtccaaaaatataaacttaggctttgttaaaagaatttgtactgtaaagtatatgcaacctctaaattttgaataaatccgagtgtcttaaaaataatgttttcatgcaactcaggagggtactaaggcattccacatggacaaatgtaaaacaggccaaaagtaaaaacaaaattaagggcctggggaagagccttagaaactgtctccccttagaagagaataagtaaattgtgtaaaagaaaagaaaagagactgtaaatgtaaagaaaggaaacaatagttgtaatggtgaaatcggttggactgctcggcctaatcgatgcggggaggaagaagaggcccccgacgttcttcaagcaaagcatcaaagcgcttgacgcagtgcttgcaggagactggggttaggtttgggataaaagtcaagcttgatgctttggccattcgactgccaggccatgtagatgccatcatcaaagcgcttgacgcagtgcttgcaggagactggggtcaggacatcatctcttttggcttttttcaaggcttagtccttaaaatcccttacctccttcacctccatagtcaggtgggtcgtcgattgcaagttcgcctgatgcagctcctccaaggactttaacttagcggccatttcatccatagcctccctggc

SEQ ID NO: 99075 - DNA, 1065 bp, Cannabis sativa
tttttgtaaaaactccaaaaaaaaattattgaattgaatcggttgtgaatcctaatgtaagaattttagatttggaaactgtcacgttccctaatagaaagccacataattaataatctatagtccatcatgagctatgaatggataggatagtaacattacatgtcgaattttcttcttattcctatacatggattttcgataaaagtgaagatgacaattatatatgatgcattgaataaatgctataaattttttaaaataaaatgctgctttgtccatttctatgaatatatatcttgtagctagctaggccatgaatttgtatacaaaatacaatcaatcttcattaatggaatacgttaacatcaccatgcatgcattttaaaaagttttcaagattatatataaacattatactcatcttgataacttgaaaatctttcaacaattgacaagagctagtgacagaactcttatgagagcagattcgatctggtagaaaattattcgaattgaatcagatcaaacacgattctagaaaattattcaaatctgttcataatagaatcaaattcgaccagatccatttacactctattgtgactaagttaatataaagtgaatttcttaatatactttccttttccttgtttgagtttattgatttttgcgaatattaatttagttctttttataaaaacttaattttgaaacattttagttaaatttgttttagcttctatagttttttttttttttaattttcatattttttttttcttttgttcattttagctctgtttgcaaatgtaatgatgctttacccatttttaggtatatgttgacacttgacaaccatggatttgtatacaagttaatacatcaatcttaattataatcctatacgtacattaccatatataaggtggatttcttaattaatacactatttttttgacataattaatacactattttttttctctatttgaattgattttttttttttaatattaattacatattattattttttgggaaattaccttatatactattttt

SEQ ID NO: 99076 - DNA, 818 bp, Cannabis sativa
ttttttttttttttttacataatataaaaaatagaaataaataaaaaaaaggtataacactttaatatgtatagaaaaacaaagtacacagttagtttttttaacagtactaacaataaaaaaatagttctacttatttatttataattacataatatataaacaaaaaggaaaaaaaattactacagttttttttgcttttttttttttttttaactaaaagaaactaagagagagaggaaaaaaaaaaggtatatatataaatatactgttaacactaaacaaattaaatttagaaaaaaattaaactatatatcgtacagaacaaaaaattataacaaattttttttatcaatcagatgaaactaagaaaatataataaaagaaaaagtaaaaatacaatgtgctaacgttttgtagcgtaggaccttcccagtaacggcactaaaaattgatatcgcccaattagttatactgcggtcgcggtagtaaatgggctatgtcgtatccaaggaaagcaaatcgaaactaaagattagtttagtaaatataaaataaatgcaataggagaaattaagaagcgaaattaaaatggagatgagaaagttgatcagataaagtgctcagtaaggtagaaatttagttatgcaaatcctattctaacactaatattaattcaaaacgcagttgcaattctacaccattaattacaactggaagatatatatatatgtaaaaagcacaaattaattcattttgaataaattgaatctcacttctaatttaacagtatatcatattatatatcataaatcgac

SEQ ID NO: 99077 - DNA, 638 bp, Cannabis sativa
ttagtttgagacaagtacataccatttgaatttcgacaaatttccactcctagaaagtagtggatatgtcccaagtccttaaccgagaatgtatgattgagatcatgaataagttggtcaatttgagaagagttgggccctgtaataagaaagtcatccacatatactagaagtataataagagaggcacctgaaccataggtaaacagagagttatcggattgagagactttgaaacctcgctgcaccaaggtgtctttcaacttttgattccaagcccgtggagcttgctttaagccataaagggccttgtggagttgacatacatgattaggctttgaactatcaatgaatccctcgggttgcaccataaacaccgtctcttctaaatttccattgaggaatgcattactaacatccatttgtttaactacccaattacatgaaacagcaagagtaagaatgattcttacagtagctggtttgaccacgggtgagaatgtttcctcataatcaatgccgggtgtttggagatatccttttgccacaagtcgagattttaaccggtcgagtgtcccatcagcattaagcttgactttatgaatccatttgttgccaatgacagtcataccagggag

SEQ ID NO: 99078 - DNA, 1067 bp, Cannabis sativa
  modified_base (34)..(53): a, c, t, g, unknown or other
tttattccattccattcctattctcattcccatnnnnnnnnnnnnnnnnnnnntttcattcctcccaaccaaacgcagtttttaatttttttcaaaaaagatataattaagtactaataatttttattaagtgtgttttgagaaattattataatatatatataatatgtttgataaaaaaaaaggctcatcaaattattgttttcaatttataaaataatataaggataattttattttttcaaaaacaaattattctaaaaaggatatatattatccactaaattatcgataaaactaataaattggtttattttttaattaaaaaatatctaatcatcaattttagttaaaaacatggaaatcattgaattcattaatattaaaataattaaatgcttcaagaaaaatatattaacattgttaaaaacacacatacatttaattaaagaagttaagatcaaaatttattgaattaattaacctaaagttattttttcttaaaccagcttaatattaattatttttagcaaatcacctaattaaacacatctcaaaattaagttagtgatttttttattttaatttatttatttatttttattttataaagttcaaatttgaaggctatttaattattgtctacatttaagattgtctgtctatattaccatatttgtgaacatgtagggttgaaacaaacttaattatataattattaaatatcaaataatatgcattggcaaaaaattaagtgaggatatatatactactattataatttatataataataaaaaaagttttatagaaattaatgtactagtataaaatataaatttatgaattattcaaaaatataaaaacaaataatacacatataattttttgaaaaaaaataattaaaaaagaatgtttgcagttggcatataattagtggggttgttatttttatttaagaaataaatattaattacaaaatatggttgcaattctttcaaaaaaaaaaaatgtggttgcaattgaattgacttaagatatgtaaattattaatgatttgtttttaat

SEQ ID NO: 99079 - DNA, 1291 bp, Cannabis sativa
tggccaatcggggcagtccataactcacttaatgtatgctgatgatctagtggttttcctaaaggctgagaatgatgtgctggattcatttctagagtccatggagaattattgcagatggtcggggcaattgatcaatgttcggaagtcaaaagtctttttttccaacaactgctcgaatgattgccgtgaagatttcctacacaaactggggtatgaagagatgaaacggggagaaaaattcctgggaaatccttttcttatcaaaggtagaggctctgtggattttgatttcattactgaaaaaataagtaagaggcttgaaggatggagggctaggcttctttcgcaggcggcgagatcgattctagtaaaaaatgtcttggcgtcaataccactgtactctatgtcgacttttcttcttccgagaaagacgactgatgccattgatggcatcctgagaaaattctggtggaaaggaaatgttcaagaggggagatttctttaaaggcctgggattcgatgtgcaagcctaaaacctgcggaggactcgggtttagaagaagtgcggatattaatttcagcttaattgctaaactgggttgggacatggcttctaacactcagtccctttggaagtcggttcttctggaaagatactgtcctcactctgatttcctatctacgacgatccccacatcggcttccttagtggcgagaggcatctgggcaaacagagacttcattgcagataactctatctgggcaattggaaaaaattctcaggttaatctctggagtggtttatggtcgagtaaagatggagtcgtttgtgatagtggggaccttaatccgatgtgcaaagtggatattactgttggggatctcatgctgaactctggggagggatgggatcataataagcttgtcttgtggcttagacctgaggcgattaatcgattggagggggtggattttggcactttactgaatgaggacattctgtattggaaatcctctccagacggttcctttagtattaagagggcttattgggacctcaatcggtcgcgattctttgagaaagatgctattggtagtcggatttggaagttgaagatgcatgaaagagtgaaacttttcctttggaagttgtatcagaattctctcccttttggctgcaaattcagagagatttttggttctcaacctggcctttgtatgttatgtggggaaagtgagggagacactgtgagccattttgttgccaattgtgctatttctagacaat

SEQ ID NO: 99080 - DNA, 695 bp, Cannabis sativa
tttttttttttttttttgtcctttcaaatatcaatttaacatttgccaaaatgacattaaattatggatttagaaattctatttaggcgaaggaaatgagaatttaaaataggcccaagtaataatgccaagcaaaattagatgaggcccaattgatcgtgccagatcacgcccgtgatagtattccttgttttatcatacaacatggtattaaactaaataaatgtcaattatccaaaaaaaaaaaaaaaaaactaagtaaatgtcatcaattaaaattttattaattaatgtaagtaaatttacagctgcaaatagcttcataaacaggaaatagaataaatatgattttttttcaccaaacttttcaccaaactatgactgtagtagaagtttaccccaaaagttttttttttttttttctgaaaaaattcttcacaaacgaaacgacaataacttgcattaggataaagcctaaactaattttaattatacaaaatcaaatttattgatactaaatatatgaatatttaatgcttaaaatatatttattgtgattgctccatatattttttgaaaattacataaattattattttttaagaaaacaattacacttttatgtttaattttttttaaatatatttttacaatattttataaaaaaaaatacataataaccaaaaaatacaaat

SEQ ID NO: 99081 - DNA, 803 bp, Cannabis sativa
tttctacgagaatggagttaaatatcaccactacacatgatcaagattgttgactttcttttatgttttaatgatttatcttttaattattaggactgagaatattttaacttaatctaataagaattaagttttttggttagatttatggaattaacgatgaatacatattcttatattaataaattaaattaaacataactaacttattttattcaaaaaaaatctaatttacattaattttagtatatagatttgtgtgagaaaaaagaattataataataataaaaaagtgaaccaatcaatctaaagcatgttatagacatttaaacagaatgtattatctaagtaattctcatgtttaatcttcaatctttccaaagatttctttttgaatttgtttactcttttttggtgtactactactttttctgtttgtgttaatcatgttttcgagctggcttcccttccattcagttgagtatgagttactataatagtggcttgtctcactcgtaacatatacaattactcaataattaccaactttttatttgagttactataatatttgtcttacaattccttttaacggccacgattggctagattattttcatcttcatcgtctccattgatctcactcgagctaacagccatgatgaaatgaacactccagagaaagaaataaggagagagtaggggtgttcataaaaaccgaaaaaccgaaaccgaccatcaaaccgaccagaccgtaaccgaattttcggttccacgtcatcaccgaatttggcggtcgattt

SEQ ID NO: 99082 - DNA, 980 bp, Cannabis sativa
tacaaattagtttgatttgaaccataaatgagaattttaaaacagtaacaaaactaggaaatcgtaaacaattcaaattacctaaatcattgacaacagattatttagtctagtcttaaaataatttgatccagatttgttaagatttaaaaccaccaattacaaattttgtgaacacccaaggaaaaaaaaaccttaaatttctcaaaataagacaatttagttgtgacttcagaaagtgtgaacatattatagtgatcaaatatattattggtcttgttcaaagtatatataaatatattattagaaaaaaaaaatgagtattacgaagatgaaattagactctatactctttttatattgtcttattttatttttaccatcttttttaaaatttattatttgtacctctttttttaaacactttaccgattttacccctgtcacctcaatatactctctatgtgactctcttatgtcagggtattttggatacaatacatataaaaagaggtatgcttcaattaaatataaaattagaggcaaatttagttaattgataaataaaagaggtatttttcaataaatccctattttataatataataactaaaacaaaaatatatctcttgagccaaaaattatacatgataatttcaaaaaaaaaaaaaaaaattataccacatactacatactgaaatttttaatttttttactttttttattgtggggtagaatttttttaaaaatattgtgtactatgttaagttttcactattgtttcacgattatttttttagttgttccactgttgttttaattgttctattttgttgtttctaagttgttttattaaaaaagtatttttgtaaaaaaaatcgtgtaacaataaattataaacttttgcccaaaattcagtatttttgtaaaaaccaaaaaagaaaatgtatgtctagattctctctcactggcccattaat

SEQ ID NO: 99083 - DNA, 966 bp, Cannabis sativa
tacatttatgaaaaaataatggatgaatatattttaaaaaatttatcattaataaacaaatataagaaaacaatttttatatgtgcggatatcttcaatacctccacttctctattttttttttttttttcatatgtcaccttttatattttatttttatttttttcttttttctttctttgttggttggagtatttctcttttatatattattaggtgaagctaacacttgcaatggacgtgtttagttctctttgttacattttatttatagttttatttacttaatttttattttataaataattgtaacaaaaattcatataatataaattttacattgttaacgtagattttcgttaaccaaataattaactttttttgtaataaataaattgtagaattaattatatagtaattaatagtaaagataacaataaataatgagaaggttttatacgtggttttgaaattaaatctccatagtccacaagtccatcttattcataatttatgagtttgtatacagaatacaatggtaccattttcaagaataagtaataacaatattatctatctttcttaagattggtcgtctcttcttccttggattctgtcgctattttagatgtttagggtaacaattatttccttgggatatgatcattcgtaactgcttatgaaacatggacactccccacgtttcatctttgtgcacatgagataattataaataatcgcctaaccactctttttctttatctatagacggttatgctgactgtgttcaattgttctcgtcatttgagtgatatcttcctttaacatcttcgtagaaaaatgttaagtgttgaatcgtgatgcatctcgcagccttccttaactgttgaggagatggttatttcaacgctttaagagcaaggcgagtaaatgttgaagttgtccttgaacatactcacgagtatg

SEQ ID NO: 99084 - DNA, 812 bp, Cannabis sativa
ttccatctttttctactttttgtttgtttgtttttgttttgtttctccgactgattatgtaagactatgctgacaattgaacaggatgaatgcaaaagggtgtcaacagaggggcaaaatttgaggctagacttgtcagccaggttccaagatgctataaaggttggtctctctctctcttaagtcttttataagctcacacttgacaattgttttatctttttgttgttgaccatttcttttatcaaagttctccctattttaagtttcttttttcgcttttacttgcatgcactttgacccccggccaaaccatttaacccctgaccaaccgaactcatttttttttatagtaaagggttatgttaagagtaggccagaactcattgggctgaaaagtgataggccatataattatggattggttatgggctgaacagactttaactctatataacccaacccatttcttgagagacattccaaatttgagacaactttcatatagatatatataatatatatatttgttagagaaaccgataccggttaaaataacaaagttaacaaggttacgtaataagtggagaattttcttccatctataaaagttttgtctataatatacataaatattttacattcacaaaatatataaaaatttatatttcacattttaataaataaatcatataattacgataaccttagaaagtgaattgaccaaaacacagaaaatatacataaaatattttacattcacaaaatatataaaaatttatatttcacattttaataaataaatcatataa

SEQ ID NO: 99085 - DNA, 863 bp, Cannabis sativa
atatatatatttatacaaaccaatacaaacatttattgggtttaattttaaaatgacccctctaactcttagtgtgtttcttaatctacccttatacttgtatgaattagtaatttaaaatcaatttcgatagaattacataattaaaaagaaattccactcaagataataggtaaatcttccaaaagtcttacaacgaaagagacaaatattacttttggtcaaaacatgatacactgatctaggatttaaagtgagggagaattgaacaattcactataatctagtttaatcattatactaaagttaatattatgtttataaatattattttttattataagtaagttgattattattaaattatggtacagtacctggtagctgccaatgacatgaataacaaccatcaaattcgcagaggcaataagccacgagggtttttgaagatcgataaggacattatcatcaacatcttggccaaaagcccagtaaccgatcagagccactgggaagtaacagatggcgttgatgaaataggccccaaccacacctttccacatgggaaccttagagggcttttcaggtgtcgaaggaatagtggcttgaatctctagggccacagcatggcctgcgaacgcaaaagagatttggcccaaagcgttaaaaaatctgaacatgttgtcagctgagcccgtgtttttgtatgcgtagctcacgttctctatttgcccttttcctaagcaccctgcccatgctatcgtcgaatagctgcatacatatgtaaattagtatcttagctatgcttcaaaatttttccatcaacttcaaagaaaaataaaataaaatttaccttaatgaca

SEQ ID NO: 99086 - DNA, 1434 bp, Cannabis sativa
tttttttttttgtaaacttttattatactatataaaagttgttcaacaagttcaaatattaactcgaacacgactaaaaatactttaatttataagtggggtgggcgaaagtggggaaaagggtactttattattagtgttatctctagcaaatagaatatctcaaaacataggaaaataattgatcaaactaatggctaatggacatgattaatagccaacaaattacttaatgatgctttacttagctgctgaaattattagttgttattatatacactttataaggaagcttccaatcaaattcaaatataagatgtatagttagcaatctcattatttggtacggaaatattggtactttcaataattagatgataatccactgaagaaacaaaatgaagtcatcatcatcaacaatccacatttgttgttgaggacagatatatattaatccttcgcatgcatacacatttttataaattaataacattagatataatatataataataataataataataataataataatagcttaataattgaaaaagagaattacatcaatttgagaaacttattagaagtacaaaaaggtactagttcgactctaattaaattaaaaaaatactttctaaatcctaaaagaagattcacaaaagatttgtaatttgtaatattgaagtatcgatgttatcacatggaaggaaaggggtttcaagcaaaaaattaaatttaattaatatatgacttattcggtaccattatatatcacaatatattaatttaggactatatatattttagctgaactatatatatcatcgagcaatcgtaatcttatttttatttaaatatatcgttagtacttttaagttttaaccaaaattgttgaccatgtgtgattatctgaagagaagtgttaaggagactctattttatactctcttttacattttcttaatttagtgacaaatgtcattttttgaaattactttatttatacttgtacttaataactagacataatattattaccttattacaactatgctattacaatgaaattaacctactaattttttacttaggacaactccaatgttaaaacttaaatttagtattaaatcaaaatcaaaagaacattattttagtactatttttattaataagcacaatactaaaaattacattaaaatctatattttttattataatgttattttattaatataattataatatttacttcataaatgaagtatttaattttacaaaaataaaattgaaatattttatgggaaaaattacaccaaatataattttttaaagtgtcattggaaataactttaaacctgaatatatattaaaaaaaactttttttaaaaaaaaaaaaattataacacatctttacaattatttagcaaaatga

SEQ ID NO: 99087 - DNA, 516 bp, Cannabis sativa
ttctctagtccttacccattccacctacgattcgtaattttgcatggatagcctcccttagttttatccctactcatgcgaacttagctcgttatggtctgacatctaacagtctgtgcccgtttttttttgttatctgtatttctagacagaagacacgtgtagttccacaatggtttagttttactataacatgcccaattgtatgcccaaccaagataatggaccaaatctattagcaaggacaagccatccaaatgatagatagatatctcgtctaggcgagataagcatccagtgcagcagttctctggataccatcaagtaatgcctccgagataatggataatggacattctgatatccagtttcgtaattcactcatttattatgaaatcccacaatatcacgactttatttccaaaatcatgtccgagaatcaaatattctaaataaaaaaataaagtaattatcaatcaagcatttatgtgtctgttatctcaaaattggcactct

SEQ ID NO: 99088 - DNA, 1542 bp, Cannabis sativa
aaaaaaaaaaaaaaacaatatgggagaatagggttttgagaaggttccaaatggaataaggccgagtacatatatttagtaagggtgagcaacggtcggtttggttggttttttacaaaaaaaaaaaaaaaaatccgaaattatttgggatatagcctcaaaatctgacttgcattgggttagatggattcaaaaaaattatttgaagggctcttgtttttggagttatactagcaaatgtgatttttaattggtattggaaaaaattcatcaagctgagacacatgagatagatctgaggatggaaaattaattgtataactcattattataacatgagaaaatggattatgccaagattgtgtggtgtaatatattggtgccaaagcatcattcgtgagaaatattaaaattaatgtataaatatttgttcttaaaagaattataaatttttaataagattaatgagataataaatttaattttgctaatattgaaaaaataataataaaaaaaatccactaagccataacattatctcaacttataaggctaactaaaaaaaaatctcactaaaaaaaatatatttaaacaataatatttattcaaaagcccatagattttcctttctaatggcttcctcttcttcaggagtgaaatcattttctatattgaatgtcttcctaatctcctctggggtctttcctttgatcatatcagcaacagtttgacatgttaagtcaagtaaatccttgatgttaagataatttgcagcctgaaataatgtcaattaaaaaattagtaattactaaaatagaaagaatgattccaataaatgtttaatgtagtatatatataccatgataagatcataaagtgtggcctgatcaactttgacaaagtttgcatcccaagactcgagatcaacatcattaggggaatcaatgtgcttcttacagtattcgatgaccatggcaagaatgttggcggtgacattaggtacaggaatggcattatcggcgcaaccatcttcgatcataaacttgatcatttgagattgcatcgcaacagtctcttccatctcaaacgattcaccatctgaactaatcaaggtgatcttttttgaggacgacgatgatgatgacatcgctaaaacatttgtatttccttttgtttccatgtgtagaaagtagtttgaacaatgacaaagaatttctttttggaatagagaacaagagaatgatgatgagaagactctttctccttgctttgattatttataggagactaggaaggaatatagtctcgtcctagtttcatttggaatagaatttatttagtttaactttaattacttaattatcttttaatttttggactgaatttttaattaaaattgatagtataatttagatgtatatatatatatataaaaaaagaaaaaaaaggaaagaaaggtttccttttaaggtgagtttgacttttgattgactgtttcaagttttttattattattcctttaaaagatttttccgattcagt

SEQ ID NO: 99089 - DNA, 1387 bp, Cannabis sativa
ttacaaaaatatttaaacatttttattttaaaaaaataataattactaaattatttcttgatcacacttcatacatacataatgatgtcactatgtaaccatcacaactcaaacttttttttttttttttttcaatttcaatttttattttgaaccacaatcaaaaatttgtttctcaccaaaaaactttccatttctccatcatccatttttttttcattattctttctataaatttctatataaatagctatcatgcattcattgtcttttccatctcctgcggtgaaaacaccctttttgaagaagcctattactaaaagttctaaatctccaataataggtgaaatcagtggccaaaaaatgtaaagggaaacaaactattgtggaagataataattctgacgaaaatttttgttgaaccagtaacaaagcatgaatgtcgtcctataaagaagaaatcgaagaagaatgaagttgataaaagtattatatcaaaagttaagaaggggaagaagcgtgtcgatggactgcgtaaggtttcattatagtttctttttcgttttgccttaatttatgcattttgtctatgttttttagtatttttatatgtgattttgattttagggtttcatatattttacttgttttgttgttttattaagtatagtgtatgttagattatttgttttgggtgttaggcatgtgatgtttatgtatggttgcaatatagtttacctactagttatgaattaggtctattacgtgaatgattttttattaatttagtatagtttcaagatagttttaaaaccgtttatattatcattatcatgtttatttttatttctctctgcacaattaggaatacaaattccatacttttgaatatttcaagtccaagtgctactctacttgtacttacagtgatattgacaacattaagaaaaaaataaataaaggatgtgatgacaatatttcgtgctactcaattctgtcatttcttggatattcatgtctgagatcaagcattgttcttctctgaccccatatatttgtgttgttgcattttagttgttgatgtgtttcagtatagtgttaactattttgattattgttttgttatactgactgtggtacttttgttgctgcatttactgaattctttatcatgaaaaagatgttccactggattttaatattgaagcttatcgcacgaggcttgctgtgcttttgttcgcatatggtaaaagtaaaaattatgaaaacattgatagtgaagatgaaaagcctaagaagtccatgaagaatgttcaagggaagaataagggtatgtgattggggactgatttctatagcctgttgaatgttattgtttatttttatt

SEQ ID NO: 99090 - DNA, 545 bp, Cannabis sativa
  modified_base (493)..(502): a, c, t, g, unknown or other
ctggttggttggcttgcacgaaggtgagaagaagaatggagtgtttttatagttgtttcataagtattgagtttatatatatcttagtcttttttttctttctttttttttttataatagacagccctaaaagtcaaaagggcaaaaatccaacaattaataaaagactaatctacccctccaagaatttttcaaataacttaggggcaatttagtaattttactaatccattaaatcgacattgtaaaaattctaacctagtcatgaatatcctcaaaataattctcccattaatgtcgtgacatttctgaccacatcattaaattccacagtcgtttggcccgaaaaaaaatatttttatttcaaaaatagtatcctcgatacacacatatcccaatataaactcagtaattaataaattacgctttatataatcatttaataaatcatcacgaattaccctaagtaagatcgtaatcttacttcattacnnnnnnnnnnacatatttaatacaatatgtctatttaaatatcattttatttt

SEQ ID NO: 99091 - DNA, 937 bp, Cannabis sativa
aaataacatatgcaagtagcaaaactattttaaaactacaaaataactgtaaacaaactaaaatatattccaaaaaaacacatatagcaaggtgttttaaaaacccataaaaggtcgaatacgaaaaggttttaaaaatgggggaaaccaaaaagaaaccgaaaacaaacctgaatcgaagaccaacactatcttgatcattttttgagcattatcatgaggaattttttcctgggcgccacctttgatttcttctttggaggagctcgctgtttcgacaatggaggagaaaaatcagagtcatcttcctgaacaacaggtcgtttgcctttgtttctattagctaaagatttcaaccccatcttagaacttttcttttgacaggggaaggaatagataaagaacgagtaatagccatatttatatatggattaagagacaaaataaaaagaggaaaaacggttatgggaatcagttaatctgagttgaaaatataattgaagaactaaaagaagagggaaaccgagttgggatcgtggaggggaaagtgttcaactatggaggttatgatttttttaaaaaaaaaaaactgaaaaagaaatggaaaataatagaaaaaagaagagaaaaaaggagggaaatgatgtaatgaaggattgatgtaatacatcaattaaagacgtgtcatctgcatgtattgtgtgtgcatgtggtaaaaatgtaataagctaaagataaagagtataaatgttcatttaaccgtgtagtggtattttggtaataaagtgtgcattttgtatttttgatgtaaaatttctaaaatttttatatatattacaataacatatattttaatatatatgtatatataaaaaaacttaaaaacaaaactatatataagagctaatatgattttttttttaattttacttttata

SEQ ID NO: 99092 - DNA, 1705 bp, Cannabis sativa
aatatatttaattgcacattcatacctgaacatcgttgcaaagttgcttcagcttactataaggcatatcgagttcaacaagattctgaagcttaaaagttgatggtagagattgtaaaggatatttgtcccacttgagatatctaagtgaatgaggaaaatattcaagaccatgaggaagatgaactttgcgtttcttgatgtcataagagttgaaaattttgagtaatctcaggtcactcatctctttgaaaactgtaggtgccaagtctgcctcttcatacactttagatgagtcaagaaagattccttgaatatttgcagttccctgccattgaaattaaaagcatggatataacatgagcatagaaagaaaatgtaaacatctcactcagtagcacttacttcattacttttcaggacattatagctatcttgaggaatccataacctactccgctttccaagttgatcttgtgactgttggcgaacaattctccaacccatttcttgcaccaaatcatgcatacaaagctcttcattgaaacaatcaacagttacaagacatctatctataagattatctattcctatacttgcatagaaaccacatttgtttagtatatcctccacaaaatctctacatttccccttgaaaaagcatgcaatatcaagaaagatatcttgttctattctatctagaccatcaaaacttgttcttaacacatgttgaatgtcatctaggggaacttctttaaactgattcaatgtcatctcccattcccttttggtaggagaacgaagtgtgcgaagatgagagcctaagaccttaatagctaatggtatgtttccagcatatctcacagccttttttgatagctctatataatctttcggaggaccatttcctctaaaagttaccaaattgaaaagcctgagagcttcgtcatcttctaaatgcttaagctcgtaggtttcattagcttcaatagctctcaaaacttttgcatctctagttgttactatgattctactcccactaccgaacctgtcattctcactacaatgatcaccaattaagtattccagttgctttgaattacttagatcatcaagaacaatgaggaccttggtagaacgaagtctatctataatgtagtccggtagagatggtgctcctaaatccaggctttcttcttcttctctcaatagttttgaaataagcactcttcttagtttctctaatccgtatctttgggatgcttccctaacatttttgagaaagtaataactttcgaattggtgaaagaaacgattgaatactgcatccgcaagagttgtttttccaatgccaccaattccccaaatgcccaatataccaacatttgatgagccttttgtgtcatttaacagcagcatgatttcctcaatgtgtttttcaattcctattaaccacttgaaaccattgctcgacgataaacgtcccaatttacttataacatcttccacaatttgctttattagtttggcctcatgcctacagcacatgaaggagacagtcacaaaaataaaattaacatacaaattagaatgtaggaaatttgtaagaacattttcattatttcttctaaattggtgctgtttttttactaaaatagatagattgcattcataatggaacatataaacttccaaaaacccctct

SEQ ID NO: 99093 - DNA, 1515 bp, Cannabis sativa
ttaccaaaacattcatagcaccagctttgtagtgatgtggtgtagcgggacgcttctctctacttacataaactagatgaggcaagctatttgggtcattttccttgttttcccatatcacctgtccaaaatatatattaattaattattacaatacctaaatgggaaaataaaattaaataaaacgagaacttttcaagaagttatatgtacgtatatgatcactgatcttgatattttgatcaggtcaggtcgtccatgctataattatttaattatcaataataagtcattttcaagctccataagaaaataaagaatgaaaacgtcacttaattaagaatgttttataaaaaagctaagaaatattaaaagatattagtggtatttagcatcattaaaatatgtcatatatattactattagtataattaagtattaagttccacataattccttggaaagtcaagcttcttcacattatgaataataagtccttcacattggcaaggcaagcttcttttgtgtaggaaatgtgaggtacaattctccttctcagattaggaaaaagatgatttccccaattggcttcatatatttgaaaaagatgagtttctccttggcctaactagccaacatgaactttatttttccttagactaggtaggatgagctccctatatctcatattgttaaaatgtaagaagataataccatatatttataaactattcctatattattaattagttttaaaataaaacgtcttacaatcacaaactattttctcacatatacacttacacaaattctaacacgacccacacaactagtactttctcatcaactatatacatatatgtagcaagtggcaagccagcaacactaccacttgctccatgatctcctataccctatttcatttgttgtactcccttggagaccactatttaataacctaaaaataaaaaggtggaaaatcattattgtaacaccattttgaaaagtaatatgtatattctcaccattttttcccttgtgcaactttctttcattttctcttgattaatagttatttatctttgtttttttttgtctatatcaaaatataattgatgagttattgttgacaaatatatatatttatatatataattatattttgtcaatttattatattatgtagagttaattatagatattttttaagtggtatgattgaggttaatatagctagagttattttcacaattaattaaaattctaaaaatataggtgtacaaaaatttaaatatattttcgaattataaatttctttatataaaaatacagatctattgttttatattgtagaaaattgtaattaaaaaagaataagagaaaccatagaatcaaaaaacaattataaaaaagtaatatatattaaaattatgccaaaaagaatacttgtgtaaaaatcccttaaaaatacacatatgtaattaatttgattaattagtgttacaatcatttctc

SEQ ID NO: 99094 - DNA, 1522 bp, Cannabis sativa
caagctgcccaatgcttgggccgaccctgagctcgtcataaaaataagaacattgctataaggcacatataatgtctaacaccacgataaaatatttctttataatcggtcaacaattttctataatatttaatttatgaaaataaaataaataggatccactattaagttgtagcaatagcgagagtattaaataccataggtgctttttagcatagtagggacgaaaatgacatttccatatgtaattttatatataaaaggagtattgacttgtattgatcaccacattacctaccttcttacataactcattacatgcttaagttgagtttaaccaaaatcttttcacaaactttttatctatttcttcactcaattcatggaatcaaacgacaaaaaatatatagaagagcttcctcatgaaatcttcttcaacatactatcaagattacccttacaatctcttatgcaatgtaagttagtctctaaacattactacacttcaataaaacatcctttagcaatttcaatgcatctttctcaacccaaaaataatcacctcttatgcttttgtgactatcccaaatcacttgatgtcgtttacttaaaccctagccatgaaaacgacaataatatgttattgactattactagtaagcccatacttccatttgagtccactcattttgattttgatgttgtgggttcttgtaatggacttgtttgtttatacaaccgtttaaataacaataatccacttttcatatacaacccttttaccaaagaatatagagaattgccccatttggtatatcttccaaatttggttgttttaagggtagttttgggatttggatttcatccaaggactaagacttataaggctattgaaatagtgtattatatggagggaaacaacttatatttgggaactattaaagagactaaagtttatgtttttaatttgggtgaggattgtcaatggagatgtattgatcaaaagcctcataagattattacttgtccatcttctgatgttttagtcaatggaaatcttcattggctaacaatgaggtatcaaacacatctagttgacattgtatcttttgacttggataaagaggaatttcatgtcataccacaacctgtcgatttcggtttgaacaagtctctcacccatcttgtgacgttgaatgatcgcctttcggctgttgtttcgtctaagtttggggaacatgagatttgggttttgaaggattataataagaaggaatcttggagtaaagaaattgtcattcctgattatgttccaatgggattcagaatggatagtgctcctccaacaagaattaggttcaatgggagtaggaacaaagcttttcgagttttgtgtaatttacaaggtggtgaggaaattttgttttcgtatagagatcgatgtttggtatcatacaatcccaatcatcaagagttcaaggattttaggactgaaggacttcctattgagtttgagataatt

SEQ ID NO: 99095 - DNA, 8276 bp, Cannabis sativa
  modified_base (1693)..(1698): a, c, t, g, unknown or other
gagagagagagagagatgggtgaaagtcatttgagacagcaagaaatgatctgccattcaaggtgaaacacaatttcagagattgaaaatagagaaccatacatgtataccaggtatgcagatgaaacatttcattaacacagaaaaattaatcgtcatttaatttcaaatatatatatatatatagatatagatatagacatgttggatgagcggaggagaagcttttacttaaaatcaatcataaaacattcacagtgacagtactgtccttgtctgagttgattagaaatattttatttaccgtacacaatgatcttattaccaatccatgcattaagaaacatcatcacaattttgcatgcatataaagatacaaccatttcataacattgaggttgagcattagcatacatagcatataaatactccccttttattacaagcctaccaccccacaagatcaaagaaaattccaacaatgaggggaaaattaaaggcaaaaagagacaaaatttgagaacctttcacaatccacttgtactagaatgtacatatttctcaaaaagtaccagtcctaattggaaatggactttgagcagagggtttttgacataaaaggtcttataaaaagggtgcttgcatttcatgatatgcagagaacttccaagcctaggtataatgcaataaattgatacaagtattctgaaataagccctatttcaaaacatagatttcaggaaagaaatgaatgttaccatcaatgtctaaaagattgatattagtcttttagctgacaaattattaaaccaaagttatcttttttctttccacaaactagaaaaggtaagagccaagatttgacctacaaaaaagtgtgcacggcaagtggcaactaaatgacatattacatgagcaataagttgaagaaagaagacctgctacactaacttcagctctgtacgtcttcttttccacttattggtgtccttgataaggaataatcagatctaccaaggatacaactgcactgcacctctaatttaggcccagttcggccaatcttgtttctacagattcaacgaactcatcaaatgcctaaaactactattcaggaggaacaaaagagtccttcaaagagaataatcaattcaaaatcagcaaatagttgatcaatcattagaactactacaactaggatcaagaaaaatatttatttcaagttaatggaaagaaactatgcttaacattagagcatcactgtatagaaattaatccttaaaagtactaacacaaggtaaatagactcattgattaaaaacatattatcagttacctgtataataaatgcctatgtaacaaaatcttgtggcttaacagaatatttttaaaattctgctagttttcacataaacatgtgaaatactaataacaatgctgaagaagatatgcaaatgaataaccataattgttcattttggtcaaaccttctacaggttattaattggtaactattcaatgaagcattgcctattttgcttctcctattaaaatactggataaaatttgaaacatctacaagttatctctacaatcaacaacacaacattgttgcaggtaactcatttgtcactgtgagtagttaaaataattacaattcaaattgcttagaaacaccataaattagattttnnnnnnagagaagtttctcaatgtcaccaaaaactttatcaacacaaacatatagaattatcccaaacttaaatgcagtgctgaaatctgaaataaaatatatgtaggaacaaataccatagaaatgggattcacatgaaagaaacagaatttttttttattgaaccgaaatcagaaaattatgaaagtttttttggcccttctcttacgcttcaaatggaaaagatgtgagaacaaaaattcggaccatttcctaagattattaacacattcatactataacgtttgaaatggtaataatatacacaatttctaaatcttagaaccagacattataactaattatgacaaagctctctaatataaaaagaagaagaaaaaaagaaagagaattggataatagctaagccataaccctgtagaatggcaaagtagaacaactatatacaacaaaacaaagagaatcacttgagaaaactcaaaaaaccagacaaagtttgcatcgtctctttgtatttaatcctcattagcagcctcaaagccgtaagtagagtacctgttgtgactgtgagtgaagtaattgtttatccatgcaatgattgaaacggaattcctactctccgatctccgatctccgaccagtagtgaaggaggttgataatatttctagggtacagcttagtgagttaaccgaagaaagccagaaggccgatagaggagagattgaagaacggaagttagagttggaaggataaagagaatgaaaacactttcagtttaatagataatatagctccttctaccatccaccctgccaccatcattttggtatcttagtctatttttttttttttttaatatttaagagattttgtaaaattttttgaaattcaaattaatttacaatataaaaattaatgtcgaaatagtatattttatatgcgtataaaataaaagagttatgcttacgcatgcaacaaacagtttaaactatattttcgcgtgttaaattttttaaaattttacagaatattttaagtaactataatatatacgagtataaaaaaacattaaataaaaaaaaattgaataccaaaataaataaggatcagtgtagaattttcgaataatatatatttttagaaaatctaagattcaccaatgcatatttaaatatgttggataatttttattttttagtgtaattttttgaataattgtgtatgttgtagttatacaagatattcactaaaattttggaaaagtttaacatgccaaaaagtagagtttaaacgcgcgattcttttattttatacttgtagaatagaatgattgagcactctatattgtaaattattctgaatctctcaaaaaaaatttctagatgccggaacaataagagatgcattggtgcacctttttttggggggtgcattgtagatttcgagtgcttctaatgcaccccctaaagtagagtggactgatgcatcctgtttcgatatccaataaaaaaattagtctaatttttttttatagttgtgtacactatagttatcaaagacattttataaaattttgagaaattagaaataatttataatataaaaaataatgtttaaacactatttcacacgtgtatgaaataaaagagtcacgtgtgacatagactatttgaaccttgtttttcggcatgttaaatttttttcgaatttctcaaaattttacaggacgtcttaaatagctacaacatacacggtcatgaaaagaattgggctatttttttttttagatgtgaaaataaataggagtgcatcgctaaaccactttagggggtgcactataaaattttccaaaagtataaatagatgataaaaaaataacgcaaattttatggcgcactcttttttagtgcactccctatcaatttcagcatctaagagaatttttttaatccaatttttttatggtcatgtatgttgtagttatttaagatattctgctaaactttaaaaaatttgatagggttaaaattattgttgtacatgtgacttttcttttatatgcatgtgaaatataatatttgaacattgttttttattttataaattattttaaatttcttaaatttaaaaaaatattttaaataatatgcacaatcataaaaaataattggattaaatttttttttcctatactaaaataatatagaatgcattggtgcacccttttttttttagagtgcatcgtaaaagtacttttattataaaatgaaatatgtaattattaaagtttaatactcatgttaaaaaatcttcaaagtaaaatatataattgttctttttcaaatatatatatatatatataattgttaagcaaagaaaatatggaagactttttttttcttattataaatattcgcgattatatttaattttactaaatataatgtatttttttagaaaaaaaatctcaaccactaaacatcaagaataataagtactctaaaatggtggaggcgagaatttattcaaagacactatccgctatcaacagatcctaaatacaaataggactctttggccaccaaatcatactagtacttgtcaaagcaagtttggccaaagtatgaacaataccattacaagacctattacaatgaacaatactaacaactttgtgcctattacaaagaccaataatgtcatccaacactagacccaaagagataataatagagacattattttaattttaaggatatcattcaaacaatcagactcaataatgatatttccgtacccaaaagaaagatattgggacaaatcatttctaatagccaatgcttcaactacctcaggcacaaaataaccattcaaacgccaacttgtcgaagcacgaacaactcccaactcgtctctaattaccttgcccaagccaatacaattgtctgtagtgttaatagttgtgtctatgttaactttgagacaactaagaaggggtggtccatttgggagctacttgaggagagaggtgccacaactccgacaagccagagcaggtagccatcgtcggctgaggaggaggattaattgtcgtcaaatattgcctgttgtgaaacatcccaagaaagtcacatgcccaacgaatcgtgagaacaaaagacaaatcaatattgttatggaccactgtattacgcttgtaccaaattcttcacatgatcaccatgaccaattcaatcatctcttttgaaaggggactaataaatctatgaataaagtcaaaaaaaatccacacaatggataagacgatttcccaacacaaacttagagattttcttacaatgaagcagagagttacaaccccaaagagcatgatgagtagtttcttcttccaacccacacaaaggatctaacccatcatataagagaccatgacgagccaaattaattttgcaggaatccaattgtaggattcttgccaagcaaaaagtctaacctttggagggaggttaagagaccaaatctttttcccccaaccaaacaaacctctagacggagaagcacaatgcactgccaagttacaaagtgcaagccaacaaccactcgtaatagaaaactatcctgaagtctcaaagttctaaataatcttatctgacacattgtttgaagactaaggatgtaacaccctagttgttagggacgctatggtattatccaaattactgtaccgagctttgctagttaaagggttttaatgaaaaaaatgtgatttatttaaaattttttaattaaattaaatttacttaaattaacatatattttagagtaatatgcggtataaatatctaagtttaactctcggttgcaaataactatctaaatttaatttttggcggtaataatacctaaattatatttttgaactctataggtattaactgttaaatgttaagtcattatccacgtgtcattttctttttggtatatttaacctatttttttaaaaaaataaaaatttaatgacttggaccaatcaggaattgccacatggcaatttacttaaccacttaatagctaggtacctacagaagttctagaattataacttagatactattactaccaaaaattaaacttagatatttatttacaattgggagttaaacataagtatttataccataaattactctatattttaaaatttatgggatctcgtgtttaaactttaaatatttcaaaatacattataagaaaaaggtgtcgcctagcgactacaaaatataagcctatgttgtcccaaagaactaaaccctctaagcctaaccatctcgatatgtacaatcactaatgagctccagactcgttgttgctcagtatttgctttgtctttacctacacatgaaatcatatctatgagctgacatactcaatttgaaaagcataaaacttatagtcatataatttgtctcataacccaggcgtctatacacctagttacaagtttgacccgcgtacaatgcatataatgagtcttgaatgttcttgatgatattacatcctttatatcacatgcactaagtatctttctaatactagtgttggtagggtttgttcacactatgagtacaattaattgttataccacgtacactctgtactcttcaagtaccagtgttgctaacgctatgccataccccttaacaacatacaataccacatacaccccatacctcaactgtactaatgttgatagtttgtaatccatataatctaacatgtatactagatgcatatatgtatatctttatactaatgttacctcattattggattcaaacctgagtggaaatatcacttgttgaacgaagaccctatgtcacttttatgtaaaattggtaagtgttactctacatactttcggggacttaaactcaaaactagaaattttcctatcaataaatagcttgaaaataccctaaatatcaagaaaacatgaaaatcggggttcctaaaagcaccccatctggtgaatcagactccccaaatggtggaccattttttagggttttgcctaaggaaatggttcaccgaccgtttttctacaaagaaaaacacaaaaaatctaattccaagttcattctaccccaaattgaacccaaaacctccagaacacctacaacatatagaacatattccagccagaaaatataacatctagcctcagaactaatagatgacattgttgagcaagctttgagttctaagaactccaacttgctcaactcaccacaaggccagcaaaacatcatcaaaatcatctcaaacaattctaatttgacccagaaaacaacctcaaaatcccttaagctcagacaaaacgtagttctaaaaatggcacactcaaagcaaactattttctttaaaaatcaaacaaagaaaagaagctaggtttacctttgatttttccttgacaaaaccttagaaaaccttgatggaaacaagcttgaattggatgcaagaggtttgaaatagtagtttgttctttggaattccaaatcgagagagagaaagataaaacgtgagggttttattttttgttcttaaatttagtattgtcctattattaacctaatctctttttgttttatctaacattataatcagcccataaaagactaaagggatgtactaaaaattccactaatcttacttagtaattaactttgggaaaaaagattaaaatgcccttgtcttccctcttaagtaacataaatatctaagggtaaaatagtaaaaaattattatctcgtataaacatgacattctaaatgctcaattatcttgacccgctaaacaaacggtactaaaccatatgtatgtgactttaacagccaaattgtcgcatttttctcgttactgggcataaatcataaaaatattaaatttcatgcttatcatatataatacatctaaaatttaataaaatttttggaattgagaaattataattcaaatacctatttcttaaaatagatctcacaacacataaaataattaattaatgcgaatagtctattaatccatattcgaagtatatggtcattacaaaggaatagaaagggtagcctctgcttcactggctataaatctagatcaaatcaagtctttatcccaccctcaaaacatcccttaacaaagagaccttgcttgaaggatcaagtcgatggggagatgtcaagacaaaggtcaatgctataaggatccaattatatatattaatagcaatgtccttcccattcccaacacgtaaaactgccccaaaataaaaatatttcttgccccataaaatattcttccacacaaaggagcctctcttggacttcttaatcttggcaaaggtcctcttcctaagtacaagccttttaacacaaagccagccaaggtgtaataccctagaattgagaagtggattagcgacactctaattagatgattatgaataattgagaaattatattattatataatttaatatatgaaaatttatatgatttatgctatgtaaagaccccgttggtgagc

SEQ ID NO: 99096 - DNA, 2378 bp, Cannabis sativa
ttgttttcgtgttattttttgaaaaaccgtaaaaatgtaaaaaaaaatattatttgaacgtaaaaattacataaaaattttaggtaattattttacaatggtgtcttattctgcattcctgacattctatttgggctcaaacgctcaaagtgaagcccacctctcagcccattattgagtccaaatgttcaatttatcagagctcggatagtcggctagccgaagcaattatttcccgcgaaatatacctaaatgaaatttccggccatatcgccgtccagatgtttccatattccggcgaactctctcgtcaaatctgaaaccctgccccgcaatattctcattagaaacaatcttcgacgtgttcctcctcacattcggccatctttcgcggccgtaaacgagaacaatggtaccttgtcggccgtctcaaaagatcgagaaccagtgagcttgaaaaatcaaaagaaatggattcatttcgtgggagtcggaggctgtggaatgtccgctctcgccatgcttgccgtaaaacaggtaagtttgctaacttcaatacaaacttttcgcgccaaccaatctgagatcaagatgaatcaggaaagtacgttaagtttatgttgatcgtcgattattttttattttagggttatgaagttagtgggtcggatcttgtatggagtaggttcatggataaactacaggaagcaggagtgcgtttgcatatttgtcattcagtctcgaatttgcaaaggcacaatggttcaagattgcctagtgctgtagtcatttcaagtgcgattccccaaaacaatgtagagattttacatgcaaagtccactggagtacctgtgtgagtataaattatgggtttttactctttcagaagggaaaatgggttcaagctattttgttcattttcaaattatttaattattaaaaactgttaaaatttattcattaattactgacttggacgaagtaagttagaacttagtcaaggaatactttttctatcttgtcatgacagtgagctagagttgaaatcgatgtcatgttgttgaaatcgtttgtcctaatgagctagagttgtaaaaaattattattattgtactagttgaaagctgataagaatgcttgctttcaatgaatatagaccctttcatgactgaacaacgtgtacattgtgtatgattgtttcctgttctttgccgtgtttgcgatcttggaagagaatgttgagtttggtagctggatagattaaggtttatcttagcttcattattctttttcgcatggcagattttttgtttttgttttccccgtttcttaaatacaacattagtaatatatatgagttcttatttcagatacaagcgagattattggttgggaaatttgacacagcaccataagctcattgctgtaagtggtagccatggtaagaatatacaagcattttctaatgtgtctatgcattcacacgcacatgtttataggatgctacttgataattgcagggaagagtacaactacagctatgcttgcttatgttttaaatgcaatgggtgatgatcttactgctatagttggggcagatgtgccacaggtattttcgggaatggaaaaagaaagcatagtgtttcccttttctcattttctatatgtttgcatgtttgtctcctgtgatttcgcctttttgattggatttagtaaaagtgaagtctgtggatgctctaaagtctgaaacagaattacatctaaacagatcgtgtatgcagttcacaggaggaaatattatttcaggaagcagtgaaacatttgtactagaggtactgacttgatgatttacgagagatttctaagctatatgttttaagtatttaattatttagcagtgtgaccttgctcggagttttcaaaataatgcactttaggtttaaaagctggattggtttgcccaatgaaaaatgactgaaaaatgttaagtggaagcctggcagggtatgatgatgtatgaggccttatcatatactaaacattgcttcgatattgtcctcttatatccaaggtccttgtcatctggaagagaatgaggctttagtagtttaatctccatacttgaatcattctccaaaaaggctgcaaatattcttttgtgatgtatctttgattgttttatatgtgcacagattgtaaggatcgaagccttatgctcatgcattttcttgtttgctaggctgatgaatacgatgggtgcttcttgcaattatcacctcaaatagctgtcgtgacaaacctggagtgggagcacgttgatattttcccagatgaggtttggagtctttatgttctggtacaaaagattcttttactat

SEQ ID NO: 99097 - DNA, 780 bp, Cannabis sativa
taatctaataaaacttctattaaatatttttatgttcctacataatgcaacaaaatgaatattagaaacctaacatttcattcattttcgtttttatgtaaatttttaactactttctatcatattcttgctttctcctcttcgataacataacctcctctaccaactcagccccaccaattagcattaacatagtcataaccacttctatttgcaagccaacactaagagagagaagagaagtagtagtatgagtagatcgtcgtcgataaaggatttgcattctcagtttaggtcgtagtcgctctattgatgactaatccttttttcttcatcattgcatgaagttctgctattcttgacaatcaatcggcgctgtttatgatctttgacacaattcattatcactaacacatacaacttttattaatataatactgatcatagcccacgattaacatacatttgttttattatagtatcatattaatttctttattctcattaaatatttaacaatgaatttatctattgtttttcaaatctatcaaatttgaatcatatagtaacaatttcttttatttttagatgcttatagtgtttcaaattttgtgcttacagttattatcttttaaatatacagatatatttctctctcgttcttagtcgtggtaatttattattatttccttttagtttattcttttaaaattgttttggtagttagttatttttagcaaaatttcaagttaatttattatgcttaaacgatttcttata

SEQ ID NO: 99098 - DNA, 1133 bp, Cannabis sativa
gtagagaatttaccttaggcccgttttggtttacaaaagaaaactattgtcatttgagatcttcattatagactgtttaaaatgttgatatcatgtaatctacagcttcatatgcaaggagttctatctgttctgttagctacatttaccggatttggggttacaatgtgtgggaattctatacttgttgagatttcaaaatggagaagacaacgacgctctcaggcaaaccaacagcaggcttccgtagaaacatctcagatggatcaactacctgcaaccccgccacaaatacagacaaataatcctaacctcgatgaaaatcatcggcatggagattcagaagctattcatggcaattgatttgaataatacttatcacattcattaaaaatgtcataaaatagtaacataacaatagtgtgctcttctgtaaagaaagtatacaaacgtttgatggtgtaccagtttaggagcttaaattaactgtgtattttcttggcttggtcatatgatataaaatattagagttcaaagcattatatgccaatcctagtggagataagatacaccagatttttcaagatttatcttttaaaaggacaataatgattttggcaatagaaattttcatgataacgccactaatgtcagtgccaatgctcgattgagctctgccaaaattatttttcttttgactctcatcataatggagcttactcaaaaccaaaaaaaaaataataataatagtgataatgacacacattagttgtgtaattatatgttgaagttttcaagtggtgactgttttggacaattatgagtgctagcaagttgatatacacattgtacggaaaagtagttatagcttgtagtggtgttgttggaaaaaataagctgctaaaaaaaattaaactgaatatttggtaaattataaattttaaagtattgttaattgttaagattctatttataatgataataatattataatttagttcattattatcacaaatatatacaaattatgttatataaatttttttaatttttttttatataataagtatatttttattataaatatatttattataaagttttttaattaacacaatcttttttaaagttga

SEQ ID NO: 99099 - DNA, 666 bp, Cannabis sativa
ccggtattaactattatcggcggtctggctatttaataccggcggatgactccaccggtaatagccaaaattgttgtagtgtacccttggtcacaaatttgactaatgctaagcaagttagcccttagtccttcaattaacatcacatttttcaatctgggcaacccttcaaaattgagagttcccataccaatgacttttccagctaagccattgccaaaagtgacttctccacactgcataggccgaatgttagtcaaaaagtccttgtcacctgtcatatgtctagacaaccactatcaaaataccacatttgagatgcaggaatttattagaaaaaccagcagacaatttttcttaacccatttttgtttcaaaccgttatgtttcttttgagattttttcaaattaccaaaataatttgttttaaacatattttgcaacgtgaaacttttaggcctgatatgtcctttttcaccacaaaaatgacaagtaggaacaaatctttttaccttagatcttactctttttgtaaatcctggagattttgcaacagcagaaactgctcctgcaatgataggttgtgaaactgttgcaacagactgcaaaacctctttgacctgcattctgagctttttcaaaaatagaagatccaggattaagcat

SEQ ID NO: 99100 - DNA, 592 bp, Cannabis sativa
ttttggagagccgaaaacaactcatggcatatgtaggaatggactgagcaactgctttgagtagaacttcttttcctcctattgagaataatttttcttgccaagtataaagaagtttccacaatttatctttaatgtcaccaaaaagaatgcttttgtcttgtcccgaataagagggtaagcctaagtacctttcatggcatggctgaatgtgcatattcagttgttgctggaaaaaaactttggctgattcccttgtgttaggagaaaaagagaggactgatttgtctatgtttaatcgctgtcccgaagcttggcaatatgtgttaatggaattttgaattgatcttgctgaagtgctattagaccgacagagaatgaggctatcatctgcaagaaaataagtgtgagactgatggaccattacgtgaaagcatgtaaagaaccattgcgctcttcattttgtaataatcttgagaatcctttagcacaaataatgaagagatatggggataatggatctcctagtcttaatcctcgttgtggtacaatattccttgaacagatccattgtgtaacaccctaactacct

SEQ ID NO: 99101 - DNA, 509 bp, Cannabis sativa
ttattgctttgttattataaatttaactaaatgctaaaggacacccatggccatggttaggggtggctatagttgtgggtgtttattagaccacatctaatgtttttaggtctatccagatctgatccaattatatattggatgttagattttatcatccgatctgatccaattaattttattcatccaatcgatccaacatccattggatgttagattgaatcaattctatccattgaatgtattttatatatatacatatatatatatttattggtttatttttgttcatctaatattttagacctagtcttttttagatcggatcggatagcatccatccaatattttaggtccaatatgtattagattggactggattcttccaattcaagaaaaaaagagtaaaattttaatggtaaattgaaaaacacatcttttctttatcaattaactaaatctacctctaatttatatttaattgaaacatatctctttttatatgtatt

SEQ ID NO: 99102 - DNA, 1515 bp, Cannabis sativa
tattttaaaaaataatatagtttaaaaatatttgaagagctgcgcgaagcgcggcattgttacctagtatatatatatatattattgtatagataataaattaatctataataattaatgtttgggctagctttcattccatgtttatgaatatttaattagttatataatacgagttgccacgtgcatttaactataattataagagactagcacacatcattattatttcaaatcttctgaaagcaaatattattaattttaagaataataataataataataataagaaaagggtagcaaaagatgttgtcaataattatgaaatatataataattttgtcaatttttgatcaatttgtcaaagttacaatgatgcaatgctttagcagacacacattgaaaaagaaagaaagtaaaagaaccatatacgaaataagaatgtgaacactgaaactataaatatatatatatagcatgtataattctctcaccaactacaaaaccaataattatatatatatatatatatatatatttatacacaccaacctttccttgggtaatttgatgattgactaggtagacaaagaaaataaaaacaaagtagtttaaatttgactactttaatgttaatggttgatctctttttccatacttgttttcttgcaccaaaagttaggactagctagcagaagccaaaactttgaataaactttattacctcattatatacctaacatttataaatatatttattaataagaaaagacaattaattcttccctacttaaaaattaaaatatgatcttttttttattcttttttaaaaataatgtatatatatatatggtgcttgcaatctcctacaactatattaatccttattaataaaatcatatatgtaactattatttataaatatatatattaagaaataaaataaaatgaccatgtggagttttattgcctcaatgattatttgcaagtcaactcatttaaccaaataagatcaaaccatatatttacaaagagtcaaggcgcgcaattacatgttcaattagtatataattagccactctttcacgtgtttaattatataatttcatatataaaaaaaaataaaattatataatatttttcattttatataaattttaaaaatctcattaataaaatattataatattatttttgcatgtcacattatttttaaaatttatgatttaccgtatataccacattcaatatatttttaaaggaaaatgtatatatacaaattaatttgattataaaatttatggtttgtggtagctgattgctttgccatcaatttttttactttactaattaataataatataatggtaaccaatcaccaccacagtaatttttaaaattaatttgattattttaaaaattgatgtcgaatttatcaatttctaaaaaatgtatatatggaaaggaaatctcattaatataaaaaaaaaataaaaaatgcagaaagttaaaact

SEQ ID NO: 99103 - DNA, 655 bp, Cannabis sativa
gggatctatatcattctgagtaggttgatccttagcgggtgttagttaatttgcagccaactctactttttccctcaaaaataaaataaatgaaatagttaattttaatacaaagcaaattgaaagaaatgttcaaaaattaataaatatcaatgtaagcttacataagcttgttgcacgtattcattgcgccaagtgtagtctttatggtgaaactttcgaagtgtgtccacaatacctagaagttccactgtctcgagattagcctatatttaagtaaaaataagtgtgattattattttttttttccaaaaaatacttatcaaatcataaataaataaaaattttccccaatcgacaacatgtgttacagtaggctttgatccgacctatctaccttgaagtttcatcttatctcaattttgttaatatcttgttgatcttgcttgaaattaacatatttttgttacaattaattatttattgctgactagatcataaagtattacaagattaataattccactatgtacatgttctttttatgtgctccggtaagcaattcatcaatccacctagtatcgcttatttagggagatgcataacaacgtgaactattatgtcaaagaaagtgggaaaatagtttctaacttgc

SEQ ID NO: 99104 - DNA, 568 bp, Cannabis sativa
tttgtcccttccaggcgatcggaaaataaagaaatagttaatatattcaagataattacgtatttacaaaataccgtctcaattcatcctatttcatcagatccgggatgtgatatgattccgaatgatgaactagatatggacatataaaatgtgtctatttaatttaaagtttttttaatattaaaatttaaatttaaactcaaaacacatatctttatatatctattaaaagtgcctatatagcattatttttggtttaaccaattttattattttttaatgcttctaaaatatttcaaatcaaatcttcctattctcacgaaaacgattcagtttgttaatcacttttaagtaataacttatttattttttaataaaaaaaaataaatttataattaatttgaaaacattatcaagcgaataaatctcatttgaaagactaaataatcaatttatacttgctattttacacttacaaacacattgattttttttttcctttcttttgttgaaagattagatttttatttcgtatagaatgggagactaagagcatgtttggtat

SEQ ID NO: 99105 - DNA, 559 bp, Cannabis sativa
gcaccaccggttctggccatttttttttttttggtcttctccttcattttcacttcttcataaacccaaaaaagtagccggtcttctccttcattttcacagaaccggctattctttggttgttcaattctaatttcaattcaatcacccatccttgaaagctcaatctcaccaatattgttttctgcataaagaaaaaaagtacttacaagatgtcaaattttcttagcatgagaacagaatttagacaatttttcccacccaaaagaagaagaagaagaaaaaacaaacaattaaactaattgataatgaactcgtgcctaatcttctttatttggggaaaaggtatttttgtacacttttaatcaatgatggtaattaagttatcattatttcttacttatttattttacaataaaagcaacggatgattaaatttagagaaactgtaactctttctagacataatctaggttggaccatatgagtttttgaccacatacagggaagggttttaaaagtaatattaaagttttaggcaaggttgaatttttagagt

SEQ ID NO: 99106 - DNA, 549 bp, Cannabis sativa
tcaaataatgttaagaatacttatattcacttttatttatttttcaaatagtaataatagaaactgtcataataagttcattcagcctcgtcccttaagtaccaattattatgcaagatacgtatgtgcattagtaacaactcctttaatcgcaaaaaacttgttatgttaaattttttatttgagtttacattaaattttattggttttattaaaacttggcttagcatatgtgtgtaaagtctaggtgaagcagaagtgtggacttttctagttgactgaagcctttaatgaacagcccagtccaactagagttatgtagctaagtcccctccctaactctataaatgcatattatctcatcataattgtatacttttaataatcagatataaataaactgcttctgagatttagagatctaaggaggaagacttagggcccgtttggtgcagcttttagaaaagctaaaagctgtgacaaaaaagtgtttggtaaacagttaaaaaatagcttattgaaaaatttatgaagaagctacagctaaaa

SEQ ID NO: 99107 - DNA, 1414 bp, Cannabis sativa
tcaaagtggtcatttcgttgtggaggttggtaaattgtgtgtttatttcacctcttaagttttgaaactgagtgccaaccaaggtgtgaatacgagaaaatgtctcttcgatgttgaaatgaggaacttgaggcattggaggtgcttgaggtagtgcttcttcttcttctttactctcacttgaggtagggtttagggttgaggaattgtgtttcacctcttaagttttaatgaacgttttgctaattgtcactttaatgaggaacttttcccaacattagggagataaaagaaaaaactgcaaaaatatattacatggtgtgaaccatcattattgtatcttgatcctttcacaaggcaatgtgaatcaaaaatttgaaacattgtacatttacaaactatagctaatcaattacctaacacatttgttgacacaaaatgagtaactaaatcatatatactagttgcaaatgctccttcaagaattgaaataccaaaaggaaaacctggagatttagtcacaaatgagtctaagtcacgcctgaagcgtgggagatcaattggttctaaagataaaaatcttcgaaaaagaaaagggacagatacgcgtgatgactccaatatggatgaaaataactatagaaaaactcaagatgaggaaaatactctagaagagaaagcaagtgaagtgagtcaagagatctcaattgattatgtcagggcataaaactcatcaaatgaaaatggttcgaaagttaatgatgagacattttcttataatgtggcatgcaatgtagtaatagatgattaagaaccaaaatctgtctctgaatatcaaaatagacatgactgatataaatggaaagatgttatgcaagttgagttagagtcattaaacaaaagaaatatttttggacctattgttctcacaccctaagatgtgaaaccagtaggattcaaatgggtcttcattcaaaaatagaacgagaaaaataaaattgtgagatacaaagctagacttgttgctcaaggtttttctcaaagacccaaaattgattatgaagaaacatgctctcctataatgaatgcaatcacatttcgatatttgatcagtctaacagtttttgaaaacttaaaaatgcatcttatagatgtagtgacaacttacttgtatggatcgcttaataatgatatttatatgaaaattcctgaatgttttaagatgcccgaagcactaagctttaagcccaaagatatatgttcaatagttacatagatccctttttgcttaaaacaattcgaacgcatgtggcacaactacttagtgaatatttattaaagaagggatacaatgataatctaatttgtccatgtattttcattaagaaaacaaaatcaggatatgtaattattg

SEQ ID NO: 99108 - DNA, 619 bp, Cannabis sativa
aaaaaaactataacaaaatatatttctagagattttgtgtggtgactattttttttttttttttttaaagaaagtcttgtgaattacaaggaccaaaaccacaagactagaaataaggcaaagagtcatttcaaacgaactcactattaagccaataccccatttagcaacattgtgcgccaaggtattataattcctgctaatatgaaccactttgaggtttgggcaaggagataacaagttcttaatacaagttactagatcatttaaaatattacaactccgattacaagaatacaatttatctacaatagacttgcaatccatttttagaatgtccacaggcaagagaatagaggaagcccaatgcagcgcatggacgattgctttagcctcagccaccgaaggatcaacacagcctgtaaacggcatagccaaaccagccacaacctggttagagtgattcaagacaacagcctcaacactatatttttttcctctggatatcaatggttgcatcagtgaacatctgaaaagccccctcaggaggaataagctgcaaaactgtctgatccggattggaaacagtgggaggaataggaacctgctgagcatccaa

SEQ ID NO: 99109 - DNA, 790 bp, Cannabis sativa
aaaaaactaattttaaagaagcaagcgagaatgtattgacaagccattgagagaatatcgataataaacggaaaaaacattacaatgttaaaaaattcagacaatcgtgaaaattatcgaaaaactatcttaaaacaattgaaagaatcatccctaaccttagtacgctaactatcaagataatattgaaaaaccatcgatattgttcaaaaaatccaaatttcactggaaaaaccatatctccccaatttatagaaaaatagtaaaataacatcaatacaaacaataaccacaaaaatctactgaaaatgaactacatactcttctaaatatttgaaatatacttgtccattattgtggtgaatgtgcatttaccagtcaatgtgcgtgattcgtgacccttgtggtctgactgttgtcctagagagagagagttgtatttttttggtttgttagctttttagtattatttgtataaattagttaggagtctaaaatttgataatgagtaaacttttaagcaagattagtgaaatttcctattttaattaattaaactatgtttggtaggaggaaaaagtggagggatgaaaaggagagaagggagagagttgggaggagataacaaatcttttttctttggcaagagggattgaatgaaagaaatgagtagggatgttcatcaaactactcaaccgctcaaaccctgacaccgcaaaaaaaatgtggtttgaagttctttacgatgtggtcgcagtttgaatttttcctaaaccgcacggtgcgatgc

SEQ ID NO: 99110 - DNA, 1105 bp, Cannabis sativa
gccatcggcttacaacatattgttgggttgtctagcactgattggactaggggcagtcagtttgatcaagcacctgtccttgaaattccaaacactaaaaggagtgggagttgtgcggggcgactagatcttggctcgcgattgctatcgcatagagttgtagcataggaaagccggtcatcagttgatggagatcttggtagaagaaaatgaaaagaaagatgaagatcttgacccccgagttcaagatgagaggaacttattaaaactaattgaggagttggaagaggttatcctcgacccaggaaatcccacaaaatgtgtatacattaggaagaacctggacgagcatctcaaatagcaactaaaaagttttctgaaggcaaactatgatcagttctcctggagccatcaagatatgatagggatcaaccataatattatctgccatcatttaaatattgatccaaactacccaacgaagagacagaaaaggacacccttggattctgagaggtaaggggccctaaaacaggaagtttacaggttgttagtcaacgactgtagacgcgaggtgttttatccctcatggatagccaattctgttctcgtctcgaagcctaacgaaacttggagaatttgtactgatttctctgatctgaataaggcgtgcccaaaagattattttccacttcccaggatcgacaagttagtggatgcaactgctgggcacaagcttttgtcatttatggacccatattctggatataaccagataaaaatatatgtcacagatcaggaacatataagcttcgtaaccaacatgggactctattgttataaagtcatgtcgtttggactgaacaacgctggggcaacgtatcagcaattagtaaacgaaatgttctcaaaccaacttgggcgaaacatggtggtttacgtcgatgatatgatggtaaaatcaataaaaagtagggatcatacctcagacctcgcggaatgctttaagatattaaagaagtaaaggatgaagctaaacccgaaaaaatgttcttttggagtttcctcaagaacgtttttaggattcatagttaatgcgaggggt

SEQ ID NO: 99111 - DNA, 587 bp, Cannabis sativa
gtgattatattaatatatgagaagcatagtttttttaaaaaaattaattattcgtacaaaccaaaatatcaattaaattattaaggtgacctttaataacattttttaattagttttctgttttttaaattagaaaagtaaaaaatattttttaaaaacatgttttataaaactatttttattttttaattttttttttcaaaaaatcacttttaatatttttttaattttttttttttattaatcaataatttgtactcagaccagaactgaacctaaatctcactcacgacctggtactgaaccagacttctaacccaaaccgattatttgttaaaattatattaacacatatatcgctaataataactaatgagatatgtatctctcttcaatgatacatgatgaacttattttctttttcttgaaccactctttattttgttcgatatgcctttttgtcttttgtcaattttttaacaaactaaaataatagtgggatatagatatagttttattttattttatttttttaaaagttctattttttaataataaacaatcaaacattctctttcttttttttt

SEQ ID NO: 99112 - DNA, 628 bp, Cannabis sativa
ttagtctaaggatttacttagactgggaaaggtctcttttgaccttgatactgatatttgtggctttgttggtgtagggttaaaacggtaaaaatcctacagaagtaattgtttaattataggtagtagttactattatgtcaagagtacatatgaattttcatttttatgaatggaaaccactttataattacataaaaaataaatattatataatatttaagtatctaaatatagtcatattttataattacacagtataatatcatgaggataatatgaattagagagaatacatttaaactctttaattaattacttttaattatatagttaagcaaataatgtgctcccaacaactatttctaattttatgcacaagataatatttatatatataatactttatattattattttctactaatggtgcaccttgcatcaagttgaatctatatacatacatatatatatatatatgtaaatatttttgtaaggtcaaattgattatattggttcaaaataaaagataagttagaaagaaaatgtatatatataattaagtaaatctaatagcacacattattttaagtttaaatctaatactaacacataaaatatcacacaa

SEQ ID NO: 99113 - DNA, 620 bp, Cannabis sativa
acctttgtcccaaacccaatcccaaacctcgagccaactaggacttcaaaccactggcttgtaaagtctcgatattctcaataatttcaaagggatcgaaattttgactttctatgaatttattggattaaaattatttcactaaacctaagttaacccatattggtagaataggctaacatttcataaaattcaattctactcttcccatttcaaacacctgaccctctctcttcctcccttctctttctcgctctctgaactcacccaaaaaacttgatccacaacccaccacccacaacatcggtcccttctctccacgatcaccacgaccacagacccaacgacccacaaatccaacgacttctccatcaaccacggcttctccatcgacaatgttgtcaaatgtaagtatcatttttttcatgatttttgagtttgggttaaatttagggttggaatggtcggatatgtattttggacaaaatttgggttttggcctggtccggtgcaggctcgatatcagcccgatgtattttttttattggaaaggttaaaggttgaagacgatagcccgatgtaggcctgatagtgtgcttagggtttatgatttttttttt

SEQ ID NO: 99114 - DNA, 592 bp, Cannabis sativa
tccagtccacaacttaataggaatgatcaacaaaaggctagacgagatggattccatttgcaccagaacagatgatatgccagctgagtggcaacccccccctccgggctggatctcctgcaacacggatgtctccattaggcgtaatcaatcagcagcagcggccattctcagagaccataccggtaagatactaaagatcctcactgttcaaacaaactacaatgatccgcttgctggagaaacctttgcagtttgcaaaggagctgaagcagtcgcacaattgggctatagaaatatcatcttccagtgtgactccaaaagtgtagttccagctctgaattcaaaaccaacacacatacacaacctgcaatttaacatacaggacttggccaggaacttcttcaatataactggtattttcaacctctgggagattcaatgggttcctagaggctgcaatggtgtagcccactctgtggctcgatgggcaaatcggaacaacaacttcggccttcttgatttacccaattttgacgatttcctgcagcaggtgcatgcagatggtcgtgcggatctagttaattagttt

SEQ ID NO: 99115 - DNA, 904 bp, Cannabis sativa
actaactattttgccaaacaagatattaaaaattcatatataattaccacttcatatctaaacacacagtgtaactagtaaattgtgttgtgtaattaccatcccatcccagtagttacacaattacttccaaacagaatattttgaagatagaagggtttcatcatatccaattctctgtccatcggcggcctttttgggtttcttctcatcaaaaccctagaaagctttactaactgatcggagaggacgaattgggttcattacaattgcttcactcacactcacataagtatggcttcattccatttagatttcatcaaatcaattaaattaactggtctttaatttgttctttaaaaaatagttcctgatttgattcttccaacatagacccaattgagttctctctgttttgttttgtatacagttcaattcaattcagttctacattgaggattttgtatatttggagagagctaaattgtatggatcatccaggtaattgaattcttgattgaaaaagataaaacaagatgaattttaagaaaactcaactgacagatcaaagaaaaagattcaaatctcttgtttttatatgtcttatcatattataccaatttcattaggttataaatttttaatttcttctgaaaattacttttcagtgttcatttctcgccgtataaaaccaactctggaactgaatccaggtaattaaattataagtttatttatttatttatgcatgcatgaatctatgattgaaaaatgaaagaaaaacgaacataatttcttttatgtatttgtttatgcatgtttttcttttaatactctacacatttcataaggggttttacacagtaccaattgcagaaagagtctagtgttttccaagttaata

SEQ ID NO: 99116 - DNA, 545 bp, Cannabis sativa
gcctgcttcacgagccggttgcggatagagatctcgtagccggaggaaactgccgtcggcgagttgatcccgacggcggaaggggaaaagggtaagaggtcttttaatgaagtgtaaggttgcgaagaagaagcagagttcttgaaagagatgagctcgaagtttagagatggcggcggatgagccgcgtaaccatttcggttttggattgggaagcttgagctgtggcgagacttggcggcggcggcggcggctggaagagagagagtggctgggatgactgaagaagtggaaatagagttacggcggcggagatttgaagttggtggtggtagctcggcggagttggccatggctgtgtgattagttattttaattatatttaaattttcgagaagagagaaagagacgataacaaaaagccaagaaattaaggaaaaaagaaactatgatataacaaagaatgcttttggttttcgtttggctttcttatttttggtttttgcttgtttttcaattattattatgccaatttgtttttggtt

SEQ ID NO: 99117 - DNA, 2778 bp, Cannabis sativa
gaaagtactaggcactactggtgccctttaacatttctctttaactacaaattactattaataaatttacataatttctttaaaaaaataaataaaaactcaaatatcttgtatatatataaaaacaatcactctttttattttaataattatggtctcaacaatatacacaagctgtttttagtttcatatatgtatatatatggtaattaaaggcaacaaaacaacaaataaaataggcagaaagtttggattttcagttctggtaggtagtgtcggtatatatatattaccacttaaaaatacttctgtatatggtaatcacgtgatcgagctctatataatgccataaactggaccatttttcaattattttttccttaaaatttcatattcataaaattacaaaaaccctttttaattaagaaaaaaaatagccatatcaccccaaaaattaatttttcattttttttaaagggattaatttcttttttttttttttttttgtttcttaaaagaaaaagaaaaagaaaaatataacaattaatgtgatagagacaaacatatatagaattaatagaaatagagcagaagcacatgaggttatgagttatatatatatatatgaatatgagttatatatagtacagtatagttgcagagagtggtaaagtaagtgttcttgagatgtgttccgatcaagaatttattcatgtgacaaactgcaccaaatggtcggataactaagagcacacaatcatgtgaagtctttcccttcattattattatctccatttactctattatctttttaatttcatttttacatatataatattaattaattaactaatttatatttatacatatctatatataaaagcgtgcagtgttaacttctacctctaatgagtgtctacatatgtacaatatacatagcttgtacacgtaccagcttctatcttttaatattttcttttttaataaattatttttatattaatttatgttaaaaaaattaatgataaatttaaaattaatttgtatataatataaaatacaataataaataaattatttactttcactatttataatatattttttagcttttagaattaaaaaagactttctacaagtatttggataaaaaataaaaagcagttttttttaatttaaaagttattttgaaagaatttaagattcttctctcacaaaattttttagaaactatttttaaaaattaaaataatttgcataattttttatttattcacaaaagatttttttagtgatatctaaacacttttaaaattactttttattgaaaaaagatcttcatataataattatgcaaacagtaaaaataagacaaaatttatatttatcttatcctcgcaaaaaattgtaatcacagtataaaaattctagtgaatagaaaatccaaatgataataatctcatatgatggattaaaccaacaagacaactatattgaatatatatagatggagcatatatgaataacacaaaattataatatggtatatagatggagcatatattagaaaccagcaccattctatttatttttgttgccaaatagaatgttttaccaaattatgatggtgagggtctaccaatcaatcatttggtgacacataacgacattttgcatagctggaattctaattgccaggtcagcagcaacacataataaaaataaacccaagtacaattcttattttatttttttaaaaattaattttataattcaagggctgctttttctaaaatataagtcaatttcagaaacaaacaaagtcggctcatttgtttgatatagcgttttaagccccatattactctttatttctctaattatacaccaccaataattattagccgattttattccaaagtgaatacgagaaaaacaatattattcataatttgaagaaaaacaacaatttagtcaaaataattgatttataaaaattcaccaatgtcaactgaagattaatttattgaaaaatatattatttttaatttttaatttagttttccttacctcttggagcttttcgccagcatacgtatatacttgtatatatataaatactaaaatgagtaatattaatatatatacgtatataatgctatatatatattgatattgtatgcatatataaactatataattaaggctcgtcatctctctccctttgaataaataaataaataaataaatcattacctaagtaggtaggttttgaattacttttgactcaaatttcagtctaattaagaatctaatgaacatgttagtgtgaaatataattcaccttattattcatatataacaaattaaagctgtacatgactacatatacgtgcgtgcgtgcactgcatatatatatatatttatatatatactatgtgtattaattaagtatatgttctttagatttgcatgcacgtgtatactatgatcaactttttttttgttttattttttaaaaaattatttgtcatatggtgtgtaagaatactcaagttcagatcatatattttctagcttaaactaaaaattaatgtaagcaatttaaagtggatactactttttcacgatgaaagaagctttaaactttagaacctaaaaaaaaaaaccgaaagagaaggtaaattcttgtctaaaaagggaattgtaaagtaaatctagtgatgaattatatagatatatttattattgatactattttattaattaagtaattaa

SEQ ID NO: 99118 - DNA, 1375 bp, Cannabis sativa
acaaacaaaaaagatattagagtcacggggggttttgtcaaacgatcagtacaattactccatcaaagtaatccaaaagacaaatttgtatgtttccatggcagttaggtaggtaatcatgcaggattaaaggaatacataattattttgaacatgtaacggactctcatcagctacgaaaacattagaaacataaattcttgtgcattttccagccactgacctgtcaaatttgccagtccatcaccagtgatcctacaagaatccaagttcaagctctccaaatttgtaaaacctgcttacagcaatatcagatacacgactcatatggaccgaaaaccaaccttgtgcgtgtgtggactagctttcaagtgtgccaaaccaatataaataaagggttgaagtttaactaccttttaagtgtgccaaacaagtatcagaaatttcattgaaagccaaattcaacacttttagtttctttccaagtcctgcagaagaaattaaacagctagttattgccaagtttcccaggaaatattataaatcaaatagcatcaaggggtgaaatcatttttaactcttatgattacatatcgagaaaaataaaacaaatcataaagttacttaccggaaaaaaattcacatccatcgtcagtaagacgacatctgctaagattcagatagagaagagcagcaagagctaataaccaacacaaaaagaaacaaaaattagatagcggaacaaacagatgtgattacaagattatgctaagaaacagatagcggaacaaacatgataaactataacaaaatctaaacatttcaaggtttcacaaatggccaaacatatgaagaaatttcaacctgaaagagaatccaagcatgaagcagtaactaggcatccctccaagttcaacaaagagagattgtgaagacctgtgaagcattaaatgaataaataaatataagatagatcagaggaactgatgtagaatatttatttattttatcatgttttaacacttgtcctcttcttagaaatctataatgttttcttatactgatatgcttgagaggaaatttcaccagatacctttcaagtgagaaattccagcatctgtaactttactgctggaaagttgtaatccttttaagtttgtaagccctgaaaatataattgaataaagtctattagcaaatataatagaaaacagactgaatttccaaacgattaatgaatgtgcgtgtgtgcatgattgttgtttagagagggagagttgagatggagatagaaggagtttctgaaatatcatatgcaaatggatagttaaactacaacatgtaaatgcatatgtgaattaagttgcttcaaaag

SEQ ID NO: 99119 - DNA, 1159 bp, Cannabis sativa
ggtatacaccatgcaaacaaatatgatgttctggatatctaacttaaatggaagaaaatgattaagactcaaatggatatgaagatgaagaggctcaaatttgataatggtggtgaatacaaattagcccctttcgtagaagtgtgtcaagcagaagagataattagataattttcagtaccatgtacgtcgtagcaaaatggcatggcagagtgaatgactcgtactttggttgagaaagttcgatgtatgctatcccaatccaaattgagcaaagcattttgggttaaggctttatcatttgcaacccatatagtcaatagactccctacgactgcactaattgggaaaatacctaaagaggtacggtcttaaaatctgtttgtgattatgattccttacgaatatttggatccaaacttgatcctagagcaaagaaagctattttcttgggctttaatgaaggagtctaaaggttttcaactttagtgcggtgaatcaaagaagattgtcttaagctgagatgtaacatttcacaagtatgttatgctaagatagagtaccatagaaggagaatgaaagcccaagtactctttctaaagtggagcttgagataccgaaagatccaaactaatattattgaagatcatggtgaagatgatagtgatgatcaagaagagatctcaattgaggtggaggttctctcagcttcatcaccagtaaatcaacaatcaaaatctattgccactactgaaccgagaagggagattaaaaggcctgctggatacacaaatatggtagcatttactggctttggtatcacagtttgatctggagttagctcatctcgatgtcagaacaacttttttccatggtactttagattaagagatttacatgtctcaaccagatggttacaaaattccaagacatgagaatttggttcgcaagttaagcaagtcacactattgtttgaagcagtcaccaagacagtggtacacacattttcacagcttcatcagtgagcagaagtacacccgcagaaaatccgaccattgtgtatacttctggaaactcaaagatggtactttcatttatttgcacttataagttggttatatgataatttcatctaagagcaaggtagagattgccagac

SEQ ID NO: 99120 - DNA, 613 bp, Cannabis sativa
  modified_base (328)..(337): a, c, t, g, unknown or other
aattcggttatataggcacactttatatagaatagatatttatataaaaatataatagtaaaggttggtcaatatgataattggagtgagaattaatggttcttttttctcttaatttctgctttaatttgcatgtttgttagatatgagagtgtctgattttgcagttagtgtcttctgggcggttctgtgtcgattctaatcaattaatctcttattaattttgggtcccattaattacttataaatacactttcttcaatggcttagcacatgctttcatgggcttcacaaacactaactatttctttatttattattattattnnnnnnnnnnttattattattattttcatttattaattaataataatgtattaatttgttagaaattcctttatgatctcttttacataacattattttaccataatgaatgttatatttatttttccatttaataagtaagttgttcaaacctgaatatgtggagtggagttctatataacctaaagttataaccctttcaaataaataaataaataacatatgatacttttgagttgagttagttgagaaggtattcaattaattcttaactatatatattctt

SEQ ID NO: 99121 - DNA, 831 bp, Cannabis sativa
ttcattaatattataactcacattatcaaagaaagaaactattcaaataatgcacatcacactaaataactaagtaaattcggccactaaataattaagctcttattttaacttggcttatatagccatatcaccttttagttttcaaatggcaatactatagtgtctagtgatcatgcaaaaatagtaatgccatgatgattatatataaaaactcatcttcaaaacacagactaagctattatactatcatgtatactatatatcatctatatatggttccctcctatttagttttttattttattggagaggtgatgtggctcccttccttgtacatcaattttctatcatgtttccttattatagtagtgataataattttttggatattaatattctcatttatggagaatttggtcacaagaaaaactaccttattagtcaatagtacccccaaaagggacattgctaaaattggaatataacaacaaccccttcatcctaaaacaaccacgcatgtgctagcttgagtagtctagcctggttaactcaaccaagattattatataattacaatatatgatgatgatcctggtagaaaatagagctcatgattgtgcttctaaaaagataatacatgattagaagcaagcaactagtcaacttttgctgatgatgttatgtataaatcctactatagaccatccaagcccataacagagaaacttacaactaaatacaatttgtgtaagatcgatcctttaactaaatcacattatatctcagtaaccataggttgtcatgagtcaaatgtcaatttgtatagtg

SEQ ID NO: 99122 - DNA, 599 bp, Cannabis sativa
tcatcacagtaagctttcagagtgatcaagaaaatgctcctcgtagcgcccctttgcgcgattctctacccaaagtgtcatttaggggcatttttgtcccaaaatgaggaaaaattaggtttttaattttttgagactaagaggaaactgactttggatcagattggaaaggtagagactagatcgaggagacaaatctagagttttttttcttcatattttctcttgaattttatgtttttctttgattatttttgttttatattaaatagcatgaactgtagattattttttttaagattgttatgtgaattacttgaatttcttttatggattaattaatgtagatatttaattttttttttcatctcttatttgaattcaatacaatatgatttattttacaattattgattgatcacctataattgttatctatgaattcgaaataaaattctgaaaattaaaacttgaatatgctttgattgttatggatgcaaattaattttggacgaaagtatgtagattacttgtagatattgtggacaatgtcccacatagaataaatggtagagaattgagccatatataagaacatg

SEQ ID NO: 99123 - DNA, 1237 bp, Cannabis sativa
acatggaacaaaatgtcaaagccttatctataacgtatccttcagcaatagatccttccggccttgctttgttcctaacataatttttcaactttttcatgtacctcttaactttttcacgagattatctcagaggctttatcaaaatgctttgtagttaattcaacttttaatttattgatattttatcccactttcttttcattgatattttatttaattattaatctatatctatatctatattcatgttaattataatgtttttttttttttaatttttacgttaactttaataaaatatatactattacttaattgaatattctttaactttgaattaaaataaaaaaaaaattatgcataataaaaatcaataaaatattaattttaatgtaaataaaagaaaactgtaaatatttgtttcatctaaaattaattaataaaaattatatatatttattaggtgtttagggttatttcaaaaataaatatataaataaaccgtccaagtgtcaatgtatgtattagcattcgttacaataataacttattaacttttatgattaaatcattattataaatttaatttttattaacaaattaatgattcttaaatatgaaacgtgaagtatcaattggtaaattttttttgggaaagtaccatatatactgtattttttatttttttttactgttatgttttttttttttttacatttttcatttttataaaagtgtttccattttgaagttatgctattttaatttcgaggttatactgtttcgattttataaaaattatttccatttcgaggttatgctgtttccatttcaagattatgttgtttccttttttataaatgaataaaaagtaaaaatgaaaaacttccaatctttttcaaaattgattatataatttttattattattttgaaaaatagcttgtcttttcttggtgtgaaaagtcttttaaaaaaggtgaattagttaaataaatatgtgatcttcttatattgaatattttgtatttactttgtatttttaaggaaaatttaaatttaaaatattgagatatttttaatcatatttttaagggtgtatgtatacacatttggtaccctttgttttatttaaatataaatttagtaccctgtattttcaataatacttatttggtaccctgtattttaaaagcatacatatttggtaccctaaactcaaaattttttgataa

SEQ ID NO: 99124 - DNA, 1865 bp, Cannabis sativa
gatccaaaataatatttactcttaattattaaaatttaaattcacaaaacaaaattaatttggaaatgtatttacttatttcaaaaataaattctcaatctataattatgtatatttatatcacactacatcttttttgttattgagaaatcagcaagtgttgttcattactccaataaactttgaatttttacaaactaaacaacaccctttatccaacggcctgagataagtattctatacaatttacaatgtattaaaccatgataaatcttccaatgatactttgttaggccacacactatgtattctatttttacaaatatttttcagttgttgtacaagatcattcgaattctcaattgtttgctgccaaaatttcctatttctagttttccaaattaagtacaccaaggcagcaattgcagctgctatgaccctcttttgaaagccagaaatcttccttcgatcaatgcttctcaccaggctttccaaccgggttgctgaagccttccatcccatccatattttcacttgttgaaggcactcaatagcaaaagggcaatcaaagaataagtggtcacaagtttcaacacctttttcacacaataagcagttcacatcagctgctattttgaaccaaaacaatctctctttggtcttcaatttattttgaattgccagccatattacaaagctatgtttaggaatgtttagtctacccaaacttccttgctccacttaattcggttctcttaggacataacaacttatatcattctgcaactctatatttgttttgaatgaaagaagaaggggtagttaatgttagaatggtacatttcaatgctacaatcttcctccaatgccagctgccttgttgtggagccaagtaactctaccattcgacctctttgatatatacactatgaatccatttgacccaaagattgtcctccttggttacaattgcccagacatatttaaacatcactgccttgttctattcagctactctcttaaatctgatacctcctgctcctttagtttgacatatatttttccaagcaatttgacccagtccagccatcatttgttgccctttccataagaatgccttacacacagcttctatgtctttgataatcttctttggaagcaacatgatttgactctaatatgcatgtatagtgagaagaatcgagttgattaaaactgcttgaccagcaaaggagatgtgcctggtgctccaagttcgaattttgtgagtcatcttatctataagtataccacactcctttgaggaaagtctcttggggctgataggaatacccaaataggtgaaaggaatttcacctatctggaatcccaatgcatcaattatgcgttgtacttcagaatctaacattccattacaatagatagccgacttcttaggttaggttgcaaccctaatgtttgtgaagacaatttaagcccctacaataaataatagatgctcttataatctccattgcaggatagaagaacatcatctgcaaaaatgagatgattcaactttagttctctgcatctatatcatgaaaggtgaaatctaatttttgccccactttcttcattattctggtgaggtattccatgccaagcacaaaaattaatggagacattagatagccttgtctcagtcctctctttgcagcaaagtagcaaagtagccatgaagagatccattaatcataagtgaaaatttaggcaaacaaatgcataccataatcagctggatgaatgactcagaaaagttcaatccatgtaatatttcttcaataaagtctcactccactgtatcataagctttctgcaaatcc

SEQ ID NO: 99125 - DNA, 2885 bp, Cannabis sativa
ctagattttatgctcagccctagtggtgaaccttgtcaaaattgctttgtgtttgttctcgcttacctgaatctctttacttaatttgctattaattttctagtgcatatttctctgaaaccagctcaagatcagagctggtttttctctcttcttaactttcctcttgaattgtcttgccttaattttgatgtgtccttcgaagatctattcagacaaataaaattggtaaagcaaattcaaagaataaaataaatccaatacgtgtcataagtgtgtccattgatttagaataatgaaaggtcaaaattgaccttgtgcactaatgtgtgtttgagttgtgtaaggatactagtgtaaattcctatagtggtattagagtcgtggtttaaacaacaagaaaaactcacaaggaggaagagaaggtgatcaagattgaaggaagctgatccttgaaagggaatcttgatcaagaagagtttgaatattcgaactaagaattctcttaaaagaaatttgttatcttttctgaattaactaacatgagcaatataagagtagatataggtttgatgggtctagagattatagaatttggaggagaaagttcagatcattgctagcacaacaaaagttgcttagagtgctagatgatcctattgaatggcctgatggaactactaaagttcagcaagaagagttgcttgaaataagaactggaataatcattttcaatttatctgatgtaattatcagacaagttgacaaggaagaaacccctaccaaaatctagaagaaattagaagagcaatttcagaagaaatctctaactaataagatctatttgaaggagggggtctttagattcaagatgtcaaattctaagactcttgaatagaatctagatgtttcttgagattacttattgaattggctaacttggtgagaatgactcagtgatgaaaaccaggcctgtataatactcaactccctacctgagtcatatagggaagtcaagaatgctataaagtatggcagaacaaagatcaccctggaagaactaaactctgccctaaaatcaaaggatttggagatgaaaactgaaagacacaatagatctcatggtgaactaaatctaagtaggggaagatagtacacaagaaaccatggcacaaaaaggggaggagtacaagtagagattccagcattgatcatctctctggaaaaccaaagtttcaaccaagaagccttaaggatcctaatggtttctaccattgtggaaaaccaagacatctaagaaaggattgttatttctaagaaaagcaacaaatacaaatcagatacacaggacaataactcacagaaatcagatagttacaagcataaagaccattaagaagcaaacgacaatgatggttatgacagtggggaagtctatgtggcacaccctcaggaaaatagtcaagtcgaagcagtcaataagacacttaaagatactttgaaaaaacgacttgaatatgctaaaggaaactggccggaaaaacttccagaagtactatggtcataccgcacaactgaaaaaatatcaattggacaaactccatttgctatggcctatggttatgaagatatgcttcccgtagaattagaacctccgtcccacagaagattggcatatgatcaagaggctaaccatgccctcctagcagaatcacttaacaaaatcgaaggaaaatgagctattgaaacacgggttacgtagtcctcaccctctactaagacttcaccggcctcaaacatgggttccccttcctcgttgtaaccactgaagggcaatccccaagcaaaactccctcctcctcgaatttagatggactgtcaggacggacctcgccctgatcctccacctattgaagttcgatgtccccttcattatcttcctcctcaccatcaggccgggcatgttcagcacttggcattgtggcaagccaagccacatgaggatcaattgaagtaattctccgcattgtttgtttagtgtgggccatcatcgtatccttggacgacgtttgattggtgtgcctagcaacaaacacggcaaaggtagctataggtataccaacagcagcaagacttggtcggcccatgggtatagtatcaactatatctggcaggacgatgtatgtttagctggacgacaagtatcgtctccaccccttcctgagctcctagataaagcgtttgtaaccttcacccgcgatctggtcgggatagaaatggtgttgcacctcgagttttagggaaggtgtgtgttcactgcttacctcccagtcctcaaatctcaaactggaaaggctgtcacttgatgaggacggactagcatagagatgaggttgatcctcgtacagaagttggagaagatcctggttgacacgatgttctcctccccaaaactcaccagggttcatctaaaataggtagaacacaagatgagtatttggccaggatattgaacaaaaataaataaaatatatcgaccaagtttgatcaaaggattaaaaaggggaattttgcatgattttaggtttataacatagaatttcaagacttcagatattaaaggttaatcttcactaaactctgaatgggcaagtgaaaccaaatatcatgaaattaaagtcagaatgcgattacagccaagtcgtatggttaagcacaattaaaatctcatattcctaaacctagattttttacggttttcctagaacgagttcaagaactattgaattttctataatagaaacccagaaaatcaaagattcaaatgttaaagaggaaaaaaatgaagaacttactcattgttcaaagcttcggggttgttcgga

SEQ ID NO: 99126 - DNA, 520 bp, Cannabis sativa
aaagagatattttgataagtattatttttggcctaagtttaacatttgtaccgctatactttttatatattaggaaacaaatcgcgctccgcgtgcagttatagtttatttagtcatgataattcagttataaaactatatcaaattttaaattttaatatttattatttaatattttaagtaattatgttattaaacttttattttcatttacttggataaataattaatattgtgaaaaattcatcataaaatcgaaatatcttcaaacgttatagtaaaaatatattagaaattaaagaacttttacacaaaataaagagctaaaaataataaattgataaatctataattttttttttgaacaaataaatctataaaaaattcattatatgatttctaaaatattgtctacatctcacttatagttgttattacattcaaagttatggtcatcaccgcatctcatttatattcctcaactttgcaacaaatattttttttctaatcacgttttctt

SEQ ID NO: 99127 - DNA, 509 bp, Cannabis sativa
aaaaaaatttaacagtagcacaaaaataagtaactaacaatatcaactaaataaaaacagaaattttgttagaagaaaagcctaaatttaagaatatattgtaaaatattaagaaaaaatgttttttgaaagtattaaaaaaagtattaatatgatataaatatagacattttctttcttcattcttttttattttatttattttttatttgtgagagaaattttttttttttttggtgtagcaagagaaattataaatttactgttgaggatctagttttttttactaaacttattattattttttaacaatttactaacttatttttctctgtcttcaaaagttataaaacccatagcttttagaaatctctaaacagagtactacagagtctaaagagaaaactctgtcctgttcacatctatggccatggcttcctattctcattctcagtccattggtctcactctgtttacattgatttacctcctcctttcaacggtgaatc

SEQ ID NO: 99128 - DNA, 700 bp, Cannabis sativa
gtcaccaccatcaacgttataccggcaacttgctgggttttccgtctagtcacagtaaaaatggaggtgttgttagtgagttatcaattggatttttttgttgttttgttttcttgagtttttcctcctcattatcttctgttgtaccattttattaaaaatatatttatataatttattgggctctgtgtaatgtgattaagtgagcttaaaaattgtgaaatgtggataaaaacttgtgtgctcatgcaatgtttgttttagttccttaatggcatgtgttattattaatgcttacagtttcggagctagtgatttgaatgattagcctttatttgtaatgagtggaagacacatggtgttttaggcgcatggtgtttcaaagttccatattaatccttgtcatactgatcaaatgattgagcttttaattgccttctttcaacgttgccaaaaggaaactgagcgctaggacacaatctcttttggtggcctaaaatgaatctatgaaaggtttaaattactatacacatactgatatacatacaaactatacatatatatgacattagttgaagtatattaattaatatatcttataatttaggtacgcttggaaaatatatcaacagatgcttctaacatttgttggggtttatgggttttggaaatatgcttcaaagcttgagaggcgagagac

SEQ ID NO: 99129 - DNA, 689 bp, Cannabis sativa
agaggtgcatagcacccattcattgaacaaaacaagcagatacaaataaaaaaccaagagcaaagggcggctctgatcaagaaactccccaaacacaagaactacaaactaaagtcccaaaaactaacaacaacagcagtaaactagtacatgaagaagggtaaaaaaaattaaaacattaaaaagaacccgcaggaacttccaagcaccagcaacattctaagggaaaatccaacatcctggagcttgagaagacccaacagaagaaagaaaactagccagcatctgggttccattccttatagtcatcgaacaccaacggatccataaactttaaatcaatatccccaacagctgcattgagtttagcccatttagccacgttgtgtgccatgaaattctccttcctattgatatgtttgagtttccaaagccgtagctgtgtggagcagcttcgaaactgagcagagattccatcaagatcaatgcttcgctggacgccttgtgtttccaaaatgttcaaaatagcgcatacattgtctgagaagaaattaacacaagtgagttccaaacgtacaacatgctggactgcacgtaccagaatcaaagcctctgccaatgctgaattggttgctgaaaatcgatctgcaacaacgctccatattcgattttttgagtccctgaaaact

SEQ ID NO: 99130 - DNA, 857 bp, Cannabis sativa
  modified_base (109)..(114): a, c, t, g, unknown or other
  modified_base (244)..(247): a, c, t, g, unknown or other
ttgctagatgccatacgtaccaaagggaattagaaaactaaaaaaaaaaaaagacttttagaataaaaaagataaaaaagttgtaactaattataaattatcattattnnnnnntgactaaaaagtccgtggctaaaaatatttcacaaaaattacaatttgttgtgactaatgtatttttagttataatatttgttgtgactaaaactaaattagtaataacttgtaactaaatactatgttnnnntcacaagtaactttttgttgtgactaaatgtaactaaaagtcaaatttagtcataaaaaatttatattgtgaccaaaaaattgtcactaaaagtagcagttttttgtagacataacacctttgtgagaatatgacaaactcatgtcagaaaaatgactcctttacaattattattagattacgtactgttttcccgtagtaataattttataactattttacaaatattggttatgaatattacagacaaaaaggtctattagatatttagctattaaggaagtttatttaatcatatattagataaagttggagatttatgtaaaagcactagatttaatgtaatcaagattcattgttaaaaaaaatgtaatcaagattcattgaaccccggagatgcccttaaaatgttttggtctattattatcaaagttacttccatacagaaaaaaaatacttaactaaaataattttagaaaaaatagaaaacacttaattaatattaccttgcaattgtcaaaagtgtctctccaccagtctcagtctgccatatgtgttttgaagccagataacaacgtcaccaaaatttatcttgtgttttctatttttt

SEQ ID NO: 99131 - DNA, 674 bp, Cannabis sativa
aattggtcaaacttaaatgtgtcatatttatcataagaacttttaaaatcccatagtaagtgtaattttctctaatattaaacttaactaaaaacattcaaatgtcacatattttaaatataattataataattaaaaaacttaaaaaataatattaaaatatataaattcattaatttagtaaatgatttttttttctatttcttgcaacaatcttgaagctgtaaaacttaataagaatataaatttaaacacaatgattaaaatagaagagataacaataaatgaatcatttaaaaatgtatctttcttactttttgagatacaaatttactaattaagtcatcgtattaaagcttatttaccaatttatttttgatagacaacataatcacttagttgttcttgcatcatagttaatcttaaatatgattttatcaattttaattttaaaaaatttctctctgttgaagcaacagttactggaattgttagtaatattctacaagtaacatatacatttagaaaagaatttttttatgtaatcaagtatttcaattgagttactatttttattttaaaaaaacttcttcaacactttcaattctgaaagcatattaatttaaaccatcaatatcagataatctactatattttaaaacatcctcaacatt

SEQ ID NO: 99132 - DNA, 609 bp, Cannabis sativa
atatagatataggagaataagaagaagaagaagaactaagtagacgttatcgttcgtggttttccaatcacatcgatcgaggccgtgcatgcgtgatcaaccatgcttatacttgtacaaaacattttcctcaattttcaacttatcctatatataattcttttacaatcttttttatttatttttaatttattaattactacattcatttctttttttatttaatcaacataaatatttttattacaaacctaaatatttttaacagatatttttttatgagccctaagcgcggctctaatccatcttaatctaggaccggcctcgattatcgatttcaataatcatatctctctaattttttttctttatctaacttaaaacttgacacttattgttttaatttctaattttttttatttataataataataataatataattttttaaatagaaaaaaaaaattgaaaaggactagaagtgttatgatcataataaatatggctccttagattgccatctgtactataaagataactgaaaaatactgtgtgaaaattcccttattgtgatgatggtgaattttgtctacaaaattcatatattat

SEQ ID NO: 99133 - DNA, 814 bp, Cannabis sativa
gtgtaggcttctacacctctcttgtttaaaagtatttcaaatgttttttaactcttcgaatcgatacgattcaaacactgaaatacttgatgacattgccaaagcaatttatgttcctttgaaatcatctgatgatcatgagggattgaagaagaatctcatgataagacttccaaagccactgacgatcggtcctagtcgaggaaaatcaacaactgtgaaatgttcgttgaacttgaatcactttaatcaaaccccaaaatatttttccatgaatgaggtttcttttcataaacacaacgaggttgagaattggaaaataactactcatattatgccttcaaaattcaatttctgtttcatttgattctagccaaactatcttgatgacattgtattctagaaagtaattaatataatataatttttgtataatatatttataatctataactacataagtgttaataatttttggacttttacatattactttacttatttaacctttgtctttttctcattaaaatattgtgtagtttaatatatattagttaataataacacacaacaaatcaatatataataatcatatttttgttgatgaaataatatgcctcaacttggggaggaacaagcagcagtcgctaaataattagttgctttgtttgcagatcgtttaacaaaaacacaagaaatattgttaagatcagacattaaagtacaaaaatcattgaaaagtcctttttggcaagttagatgccaaaatattttttcttttattgtaacgccccaatattttgccttattttac

SEQ ID NO: 99134 - DNA, 788 bp, Cannabis sativa
aggggggctcttaggattagtttgcattaagttagttaagctttggattaagttagttaagctttggattaagttagttaagctttggattaagttagttaagggttgttttgtttgttacaaagattgtattttagctgtacaattcagttacagctcttcttgaatactgagctatataaactccttccccttttgtaaaatcagattaagaataataaaatcaaatgctctgatattttctctgcttttatctctactctttctcataaagattgtttgtgtcaaggattataagatacgtttaaactttttttttatcaaagatacatttaaactttgcatagaaaaattaattgatgagtatggagatattagtgctcatagtgtacttgctcaagataaccggttgctcaagataactagccatatttgagattgttgggacatatatataagaacttgtgatctcttgctattttattatgctggtgttatggtttggtttttagtgatgatattctttataagtgagtatgactttatattatcatatataaacacatatttttggattcaataatcattaagatcgattatattaatgtaagtatttgataagtaaggttgcatctgctcataatcactacactatctaatgttgaaacatgtataaaattaatgtatattcctctaaaggccattacttgatattagaaattcttacaacaatcatgttagctactcaagcttacacgacaaacatgttagcaactcttacaaccctt

SEQ ID NO: 99135 - DNA, 580 bp, Cannabis sativa
cactgtagtttcagaagattaagtgatgaaaaggagagcttttagaatcttacagaaaggtctttccattttccatggacagtgttgtaaaaggaaagtacttttaagctgatccaaaagaaaaacaatgatgctgtcattccgttaccctttgaccggtgttttctttattctccttgtccttggaatcatttaaagtataattgagatcaaacttaacattcctcttctctttttggtgtttgtgggattatcaattatctgagcaagttgttttcttacttgatatacattcatcataaactcgaacattttgagtgtaagttaagttagaatttgtgttgttattagtactgaagttagttatctttcccaaatattttagagttatggggggatcctactttctcaaaagaatattgtgttgtactcaggcccagctctgggctaaggtgggctaggctcgtatttttgtataaaaaaagttaaaatctgtaaaaatgtaaaatttttgtgatttttgaatatttattaaataatccttatatattgtctatgttttatttgcaggcgtttggtt

SEQ ID NO: 99136 - DNA, 741 bp, Cannabis sativa
aataccaaacatgctctaagttgttctagggttgtttttgatttttttttattttactgaaacacaatatttttgtaatttcaaaactttaaaaatttagtacagtgaaaatataaaaatctccacctctcactattttcgcaaactttctctcattttttcactatttatgtaagttcgcattttttttttttactagctttactactagtctaataacttattaagtgttgattggactaattccaataccacatgtcatgtcatgctcatttttattttaaaaagtaatcaaaatattatttaaataaataaaaagaaaaaaaatatacataaataattatttaagaggttatcaaaatacaattctctaacaatgaagacttttcaaaataacacaacatgtaaaaagtaaaagtataatcaactaataataatatattaaaaatcaactcatatacaaataaatgaataaacatttttaactccttgtccaaaaatcatatgccaactcataaatgaagaacaaattcaggtctgattttgattaaataattgaaaagaaaaacaaatttattttttcgagaagagttgaaaaagaaaatcaaatatgatttttgttgtctaaaacttgagaaatccatgtgaaatagattgactaaacaaccataaccaaagccaccaaccacacacagattctcacaaaaccacaaactcataaactcaataataatttttttt

SEQ ID NO: 99137 - DNA, 707 bp, Cannabis sativa
atagactaattaggtaatctttcattaaagagttggaaaagaagctagagtggattcaaaaccaacctatcagcgatgctctaaaagatgaggaacttaaaactcaatctcttctttcggttgcttgggctaaaagtgagagtatgtggaggcaaaagtcaagagaaatttggctatctctgggggacaggaataccaaattctttcatgcagccactgttctgagaaaacgaaggaatagtatttgggcagttaaagataaagaaggaaagatttggagagagaaaaaacaaatagcaagcaccatcaactcgcactttctagatctgtattcctctatgcagccttgtattccagaaggtctggaggagttgttcgaccacaaaatttcatcttcagccaatgatgatctctccaaagttccttcaaatgaggaaatcagggaagcagcgttttgtttacatcctctaaaggccccggggccggacggtttctcgggatgtttttatcgcaagttctgggacgtggtaggcttgaatttatgtgcaactgttaaagagtttttctcaagtggagtgatggactcaaagctcaatagtacattcatctgtctcatccccaaggtggaattccctttgagtatggatcagtttagaccaataagtctttgtaatttttcttataagataattgcaaagatattatca

SEQ ID NO: 99138 - DNA, 682 bp, Cannabis sativa
  modified_base (655)..(656): a, c, t, g, unknown or other
accacgtaaaaatccttctctaaatttcttacagctctataaacttataatattttattagttgccgaaaaactcggtcaacatatggcattagtttttaagcctttattgttgattcttaatgcatatggcgtcggttatatgttaataactgatgccataatgtacatataacatcaattattattaaataaccgacatagtgtacactatggcctcgaataagtttgaccctacactattgcctcgattagtgcgggtagcaaattttaccaaaatcgacgctgaaagaccgtaaaaaatcctctaaagcccagatttacagtagggaaatgacatgttgataaagacagctttattcatatcggtcattgtatatataatctctaatatatacaacaccttaactttgatgtcaaactacatctgtaatccgaaccaagattacttgtactgaagaacgggcatcagtgaaccgtactagcaactattgattaaagatttcgtaactttaatatgttattgactgtgtattcatagctaagtggtcttagttctctatacaactacaagtcacagcctcatatatgaataaggagttttccaatatttaatataaattattaacaatttaactgtaaagcccgcttagttnntttggaaattagcagttatttatgtt

SEQ ID NO: 99139 - DNA, 737 bp, Cannabis sativa
gcaatagaagtactttcctttttgcttttcatttggattagcagcctatttctgattagctattttaacaggtttaagtggcttcttgctattcctccaattcttctttttgatgggtttcgaagtggaggcaaggtttaccttagccttggtcgtaccattagcagtgccagaactaggagctttagttcctcctttctatggtcctccaatcaaattttcaaatgtctgaaggttgttgattaactgatggaagtcaaactccaacttgtccttgacaaatttgatgtaaagggcacaaaagttagagtcaaaatattcaagatcaagctcacgttagttgtctggtctataacagctccatgattctcagcctcttggaagtaacaagtcatttggagtagatgatcacgaacattttgatgaggtttcatccatccattgataaaattctcggtcacctcaaagcgagcttgaaatgaggccatccgaaacagttcactcaactggttcatgatatatgcagccgtgagagtgttagcaaaccttattttcaaagtgttgaccatgctagacagcataaagtatcgagctttgttgttagcattttgccaacgcttgaacttttccttgacttccttgcttgcattctcacctggctgctcaggagcctcttcagttaacacaaatagggtattttcaccaatgagagcaatatcaatgttctctctccattt

SEQ ID NO: 99140 - DNA, 691 bp, Cannabis sativa
acccaaacgaaaggcttcctgctcctctctaaacctttcgccaattctatcatttgggacgaaccgattgtgttctgagaaccaaaagaaacgtatatcacagatctaggttcctgttcatctaaccatttctccaatttattagagcatatgttcacttctttgcctgtgtaggtgttttttttggacaaagacgaagaacctccaatagaccaaactggacgatgaatgtaatcacgcaaaagctttatacctaaaggctctatctcctcaactgtgttacacaaccaaccgtgagattttaaagagagggagatctggggctgcatgaacctcgaccaaggatcatcaccatctgctgatctcaagtacgagttgagcttaccgcggcagaaacgacaccgttctgggaaacccggcaaagcgaaatctgaagaatcagtttggcgatgtgggaggtgaagccacaatgatatataagccatagttccgtaggcgccgccggtggtgaaggtgaagttgagagtgccgaggctgttggcaacgtcgatagcccatccaaagaaaacgtcggagattatacatagcggtggacgaccgtctttggggatgatctctcggatcagttgacggaaaggagactgaagagagagtgattcgtggcagaggtccggtatcttagaaatggcca

SEQ ID NO: 99141 - DNA, 1377 bp, Cannabis sativa
aatatataatcagtgatcataatgatcaatttgttgagccaattctgtggtgagtttgttggcacgatcatcatggcctcctgcaaatgtatacactcgaaatgcaaactcaaaagccctccaaagtattttactacttgatttcattctttcgcttgttcttttattctcttctcccaccttattataagcttctctcctttcctacaaatgaaatatctaattatactacaaaacaaatgaaagtttattttatttcctttttcgacttgtgatcactgatcaatattcgaattgggaatattagtaaaaccttaaagaaccatcgagggaaagctacataatggttcttggaggttttactttgaattcaaaatctgatcttattattatccgaaaaagattgaaaaaaaaaagcatatatacctttaatgccaactccatgcagcttgaggaaacatctaccatcgattcttttattgttattaggatgttgaagtcgaaatgaacattatgggttttgaatttcatggattcttcctctttggtgcgttctagggtttctacttctcttttaatctacaagacatatatgtatataaattggtgtacctttcatatttttagtatccaaatagttatattttcattttttttatatcgcaacttctgatagaattcgaaaaaatttacaatatagaaaaaatataatgtaagcaatttgtttcacactcgtaaaaaagaaaacaaacacacgtgtaatacttatttaatcattaatcacttctggcactccaaattattttgaattatcaaatactgaaaacatcgatacactcatttttgatgtaaacctaatctaatccttccaatttacaatagaagaaataacaaattttatggatttttataaaatctgtgcaaaaatatgattttttttaatcaaaaagttactttatgggaaaaatttaagaaaaaatttaaaaatatagaaaaaaaacaagtaagagtaaccggttacccttatggtaatcagagagataatcagttaccttcttagggtaatcaggtaccttacactatttcaccattttttaaagatgttttttttttctaacttaaaactcaaaaaatggaaaattcccctttaaaatatgtagtctaagccttaggtatgatctttgttataaaagggggacttcactttccccaacaaaatgggtcttaaaattttagaccaataccatttttctacacaaaagggtctcaaaatttagaaaattaccattttctatataatagtttgaaactattgcattttgtattggcctttcacatgccataaaccctccctatctctcaattattatatatata

SEQ ID NO: 99142 - DNA, 512 bp, Cannabis sativa
attattgtttacttattttataattaattagtataaaattataaattaaatgaaaagtaatagcatgttaatttatatattaaatttagtagttataaaagtattatatcactatactcgcatgtaggattttactactttaaccctacaccaacaaaagattaaatatcagtatcaaggtcagaaatgacctttcctagtctaaataaaccttagactaatacgacaccgttttatccccacgacaccaaacttgatgtcgtattgaacctttggttcaaagactcagtagaagagtctagaaccctaaacactcagacacaactcacacacagcctcccaaactcgaaaccctagcagagcaagttctctttgagaacttgctcgattccaagccagaaatccagaatcaaacccacacactcatagatttagatttagtaaaatgaaaaacaagagtgagggagagaaaacaccagatttgttttagagttcacccaaaaattagggct

SEQ ID NO: 99143 - DNA, 770 bp, Cannabis sativa
  modified_base (37)..(55): a, c, t, g, unknown or other
  modified_base (98)..(101): a, c, t, g, unknown or other
  modified_base (129)..(132): a, c, t, g, unknown or other
tactgataaaattggaagaaaattacagttttacaannnnnnnnnnnnnnnnnnnctaaaaataaacattgggtttataacacttacaaacttaaaannnnttataacacttacaaacttaaaactttnnnnacttatgccgctatttacccaaacaaaagtggttctcctatccaacgtggtggctattctaaccctggacgtggccaaaatcaccaaatgaatcaaaaagctcagtgtcaattatgtcacaaatttggtcatttggttaagcaatgtttctatcgttttgataaatcatttactagccctgagtcttttgtcaatttccctgccactactcacattactgagatgcctacaatgtatgccacaccaaaaactgtccatgatgacaattggtaccctgactcgggtgccactcaccatctcacacaagattttaccaatcatggagccagcatatcttatgtaggtaatgaacaagttcttgttggtaatggtgctggcttgaatattaaaagtgttggtaagtcttttatctactctcctttctcatctcaaacattgtctcttaatagtctattacatgtcccttccataacaaaaaatatgcttagtgtatctaagtttgctcaagataacaatgtggtttttgagtttcaccccttttcttgttgtgtcaaggatcgtgctacccagaggattttgttggttgggaatcttgagaatggactgtacaaattcgattctacttagttgagtattct

SEQ ID NO: 99144 - DNA, 624 bp, Cannabis sativa
gagagagagagagagattagggttgaaaaaatctaaatctattttctctctaagaatttgttatctatctctattttttggcttatttttctgttgtcagatttttgtcatttatgatactatatatccatatatatatatatttatatatattgttataaataaaatctttaatcctttatttaaaataaaagatatatatctaatttgatttgaattcagaattccaattaaaatataaatatcaaataactgaattacagacattagtctgaccttttctttaaataattatccttataattaaacaattatcaaataatgtatttaattaataattgaaagattaatttattattaagcagttatcaaagtgtttactcaactcatgagatactgtgatgagattaggattttaatttcacacacacctgagttggtaagatttcgtgtgagatgaagagagagagtgagagagagagagagaggcgcatgagagagagagagagaggtaagggttaaaaactctaaatcaattttctctctaacagttgttatctgtctttattttctagcttattttttgttatcagatttttgttaattaggatactatatatccct

SEQ ID NO: 99145 - DNA, 569 bp, Cannabis sativa
catcgatggcgcccaatgctcatgtgtgccatttggttctgcagaagcttcaattgagatcctccttaatgcgaatgcaacaattaagccttttgtacaagtgtggtcatcatcaagtgaagataatcatgttacaacaagtaaaacatgagaatgtcagttgacccccataaataacatcacaagaattactacttgccttgcttcaggggaattcttgccttttgaacttgcaagggaacgatttttctcaaattcctctgttttctttctctctttcggcatcaaaatcctttttgagtaggaaatgctattttagaaggcttctcttttatttatttttttgggtaaagttcagctttgttaaacatgggacattaaacatgggatcagttaagtgcagtcaataaacttcacaactatgaaacagaaatggctggtatttaggtaaaaaataatagacactattttggatagaggggaaactcaaaagggttccaagcaaaatagcagtacacaccaaaacaagtgaagcagacaaaagcaaagaaaacagaaatggaaatgat

SEQ ID NO: 99146 - DNA, 544 bp, Cannabis sativa
ttcacatccttcaatctcttgcatttataagagtaaatattatcattttctaatctatatataattatttttcaagtacatattttcttgacatattttcagacatactattatatcagtgagagcatttatatatttttgatcataatatttattctaagtaatctttaaccataaaatatattacgtatttgatatatatatattgatattttttttagatacaaattctttttcacaatctatgtatgaattcactaaagtatatttttatttatttgttatataaaagattaggattaagtcatggctatatattcatcaccttctaagtacacaatattttattattaattgttagtcactaaatttctcaatttttttatatgttcatagtttttacataataataataatgattattacaaattataaaatttatttaatatgtaaaaattatatagaaattattaaaaataagaataacttaacaattcattaatttaacatagttatattaatattttattttctattttgtaat

SEQ ID NO: 99147 - DNA, 640 bp, Cannabis sativa
aacatagctcgactgagcttgtgcagtattggagggtgatacccgcttggctcgaaccaggggcagggctgttgtttgcagcgttattggctgctgtgggagtctgagggaggccagtcgacatggcgtttgcctaggctagctctgataccaagatagaaaagatggtaatttactaaatgggaaaactcagctcaaggaggctgaggggtttgcattcaatatatatatacttagggatacaaacattgagccactgtgatgaagacagatggcaatatacaataggagaatgcataaccgaaaagatactctagtacaattcaatgattacacaagaaaagcaaataacagaaggaatatcctaaatccccaatgcacgatgctgactgcagacaaatgggcaggactcctctgtgatgagtagcaggggatgaatgaaccttaattctcaacacttgacaccatcgtcgtcggtagaggagatgggggtaggtgtaagcgatggagtaattgatttgggggtaagggaaaggtctgatttggggtaagggaagggtctgatttattttagttgtatcgtgggttagagaagactttagtcttcggttattagctaataacaaaaaacaaagttctc

SEQ ID NO: 99148 - DNA, 871 bp, Cannabis sativa
  modified_base (28)..(30): a, c, t, g, unknown or other
tacatttatttatttatttatatacttnnntatttattatatatatttattttgttagtgtacaaatttaatgtgttttaaagttagatttagtgtgtgatgatcgatgttgaatagtccttcgtttagtttgaattttcagtgacttaattactgccttcattttttaactttctttttatacttatttgttgttgtttttaaataatttatttattacttgttaatgcaatttatttttcttttaattaaaatttttcatttaaattcgttttatcttttcattctaattttatattttaataattattacttaattattttgatttaatttctcgtttatttgaaagttaattttgggtttttaataaaatttattttttgcttttatataatatgtaaattttacgaagctaattatttattttattagtttttactatatagatcttttattaaaaaaattatatttaatatataataaataactaatttaggttaatatatgttgagaaattgatgccttaaatgtagttcaataatagctactaataaatatagatttgatcaatgatgtaatcaccttaataataataaatatttagatagatataaaaaattatggtgaatattgtgatcaatattactaattttgtgggattttttatattatttccctttccttcacacttggtattccacttcatatgaagcttgtaaaaggaggcttcaacttttattttaaacacaccaatcaatagagtcatcagtcatttactgaaaagctctcttgtcttcttctttgtattaatcctagcttgctagagtagtgaaagtggtgtatttttctactcgttagtcattgtatctt

SEQ ID NO: 99149 - DNA, 569 bp, Cannabis sativa
tatggtcggccagcccgtaataatgctagaaaaattagcaaagttaagtgtgcaacttatcgtagataaatctcaaaggcctaaagaatagaacctatcaggctcgctatcatcaagctcgtgaagctcatcatccatagaaggaagagccctctctaaatgcctgcaagccgcctccatggctctctgccccatggctgagcatgctccccaactaggcctctgggcacctctgctcgaaggccgttccctcctagcgggagggtcatccatcaaaggctgcccggttggcacaggccctagaggaggaagaggaagagatgatccagcgacatctttggcacgggtggtctaatttaccttggtcttggaacgacccgaaggctcctcagaaggtccactagcaagacctctcaacttggaagacatacttgcaaaaacaaagtagcaaagtcagaaatgcaaattacaaatactcaatgcaagacaagaatattaaagatagtgttgggttttatgccctaaataaaactccaattcaatgtaatccattttattcaatatcaata

SEQ ID NO: 99150 - DNA, 907 bp, Cannabis sativa
tcttcaatctttactccaagattattcagatcaagaataatcttgttgtaatcatcaagatgtcttcgaagctccttggactcatccattctaagagtatatagcttcttcttaaggtacaatttattggctagggatcttttcatgtaaattgcatccaatttgttcaataatccaagagccttttcttcacttgacacttctctcaagacttcatctccaagactaagaagtatggcactgtgtgccttagtttcaatctcagctttcttcttcttgttatctatctccttcatagcttcatcatccaaagcctctgaaatcccgtgatgaacaagaaaatctttcattttaattctccacaaagtgaagtcattggtgcctgtgaatttgtccacctcgaatctggtagaagccatcttgtatcaatcttattttcttgcaaaggattcttgaatctgatccctaatctccctagtgctctgataccatttgttgtgcactcaagcacaaacaagaacacaatgcaagaaaagaaataagcttagaacattaaaccagaaactataaaccagaaatgtaaattgacagcaagaaataatgaggttcagtcacaagttttggataaaacttggacctaatccttgggtagaaacaactttattggttgtgatgattttattattgaatgacaaagattacaacttacaacaatagagaatcaagaacacaaagcacactactggtgattcacaccaattacaaaatgagtttcactaaaggcagtcaaaattcaaacacgaacagccttgtaacacctctaatcttgaagagaattcatctcaattaagctttaatttttctttgtgcaacactctcacaaacttgatctctctctctctctctc

SEQ ID NO: 99151 - DNA, 503 bp, Cannabis sativa
tcaaaatcataaattatgtaaatggtgatcaaacatttacaagcattaaaaacagatcaaataatttaaaataaaggggaagagagaatcatgaaatcctcataaaaaataataaaaatcctagtacattaaaaatcttagaaaaatgtttagttcaacattgtaattctaaacaaaaatcaaaacgaattccctaaaattaatattttctcttccttgagcaaaaatctaaacaaactaaataaagaaaacacaagcaaactaaataaatcattattattctctaaacttctttgccattacttaaaaaatctcaatggcactttgtaaccacaatttcaacttaactgcttcacaatttaactttaatgctcaaataggaaaaatgaaaacatagcttacaaatgactacaattaatggattctattataagtgctcaactcaagccatcattttacaatcaaaataatcaataggtttgcatttatacctttctctacta

SEQ ID NO: 99152 - DNA, 509 bp, Cannabis sativa
agagtatcttgattgacgtgtttttatcaaagcttccacttggaatttgtctaagaaatttttcttctgtactgtatctccttgttaactatgcaaagtcttgtagaacttgattaagcttcaatacataacggtcttatgatcccttctttcttgtagtacagtgtctaatacttacaaatatgtatatttatattaatgctatagtatcgttcaaaagaaaaattaatgctatgtgaattacaaataataatgtaactttatgctatttgctggagtaaccctctttatttttatatcatgtcaaattagatgggactaattggttctcagtacaacaacttcatgatatcaaaggtcacagtatttgacagcggttatgggctcatttggaaagttatataagaatcctattgtattaaataataaataatattatatttagataaaataatgtattgtattaattattacgactaaattttattgtattatttaatacataaaaa

SEQ ID NO: 99153 - DNA, 1146 bp, Cannabis sativa
ataaaatgtgtgaattgtagtatgtaatcgctccttattatgtgtgtatgcattaacaaaatatacatagaatcacattctaagtaaacgtggtattatttttctttgtacggtacatattggattaattagaatgttatatatatatatatatacatatatttatatttatataaatgttaagagttacgtacctccaagatcagtaatatttctagccattagacttgcaatcctttcacactgtctcttcaagagagctaaccagcggggagctccaaacgccattccactttggacaaagtgactgaaagtttgatgaactgtcttctcctggtctatctcagcatgttcaacccatgtgacctgtatatatgtatgtaaataattataataaactcatgaaaaaatataaattacctatcaatcatagaattaatgaaattacttctagcattcaacttcagttttatttagttattatatgttagaatttaggatgagagtgagtgttagaattcaggaaaaaaatgagtgtgtaaggtaagttgcacaatgaactggtaatgagagttgaattatctttctaacatgttcctcaagcgtcaagatagtgagattatctaacacgttcttcaagataatagctattttttacgcactaattttggtcagctagaatacaaatagctctttggcttattatattcccaaaacacaagtaactaaaatttaggatgaaagtaggtaccatgcatgggatgctacaaaattttttacgtttcaacaaaacttataaataaaagttagaaaattattactaattataaattattatttatatattttgattaaaaagttggtggctaaaagtattagtcactgagtaaatgtttgtttagtcacattatttatttattgcgactaaaactaaattatataaatagtatattttagtcataagtaacgttttattctgtgtaaaagttgtaaaaataattttttttagtataattctatctccaaaccaattgataattagatatgtaattttgggatcttatatataaggtattatcctttccatatgctaaagactcttgatcaaacatattataagagaacataacagtgtaaatatattgt

SEQ ID NO: 99154 - DNA, 1847 bp, Cannabis sativa
aataataataataataataaggagtcactctgcattaatcatatatttagaatgacgattttcaaactcagtaccatatataagaatatatataataggagaaaaattaaagaaataagtttatttttttcaagcacgtcatgatttattaatcaacaacgagagatgagctatcacattaaatttattagttagggaacaaaaactgtcttaattttgaagaaattaacagtgatataagcaattttaacaaattaaataaataaaataaatcgagtcgtcattatctaaaattttataaatagtttggcagtgtgtatactcgtttttatttttaacgtgtgaaggaagtaacttccaattcatgtctcatagtcttttccttcaaaaaaaaaaaaaaaaaagaagaaaaatcatgtctcaaagctatgtacgtaatgtacacctacttgaaaatacattaatgatgttcaatactatattatatgaatatgttataatattatattggcattaatatgagattaatcttatatattttaatttaataaataatataaaaatagttaacaacgtactcatataatgaatcatgtggtattaaacatcgatcttaattatgagaagccaagtttcgaataattcaataaatgtgtgtatagttgtgaaactctctccttatataaatatatatataaataaagaggatgatgatcattatttggaggacgtgaggtttttgagttttctttgcatacaagcttaattatatgagagtctagttaattaattagagatatataaatcaaagactaataattgttagccacatgcaattgataatcattattaaagtactgatatcgaatagtatatatatgtgtgtggtcatcaacttattaattagtcaattctatttctatgactagctagcttagtacagtaactttgacataatatcgtaaactgacaaaaacgtcttttttatttttaaacaacactttttgtaatttaccaagagtataatataagagtttaaattaatcaatgtctccccaatttggtaccactttaatttagtgtaaatatgcatggccgagattttcaatgtaggctaataaattataaattaaggttagttttaaaatcttattacataaaacgagctggttaaaagattctattttaaggaatatttcaatttttagtattatatataattatgttatctgtgttgtgtttatgaaattttgatgaaataactaatgctgtaaaattaaaggaattcatatacaaaccaaatagcataattaaattcataaacagaatgaaaaaggagaacatttgtaattagtacaccgcgccataatgttaccatatatatagaagacaaaaatgcatgtattgcactactaaataaaataataattataattaattatatatagaatattaatacaatactctgatatacattttccgaagccgaagtagtactcgaagttaactaaagctcttttaatggagatgatcagacaaaagttgcgtgtaataattcgtaacatttatcaaacctatattatataacaatggaattccaaactaatttcttgatcaaaagaaaaatcgaactagaatataacttatatactcaaatattaattagagatcattaactctctattaatggtcaaacttgctctttggctgagtatcctaaagtttagtgaccagcttcctatttgcttttggccttagagtttcatttaatttaattaaaattaaatatatataagagtttaatattaatttgtagaaattattcctctttcaaaaaaaaaaaaaaa

SEQ ID NO: 99155 - DNA, 563 bp, Cannabis sativa
atttggattatttgggttgggattcgatttctggttggggttcatgggggtcgggggttaatttatgagaagaacaaacgaataagaaatagaaagatgaagaagaaaaaaaatattaattattttttaaatattttaaactattttttaacatataaattattaaaattaggtggactaatgaaattttgccacatgtacacttgtgttcactatgacaatctactttggcacttaactgaccaaaatagacggaaggactataaagcaaaagattgtcgagtccaaagaatatagccgtaatttttcgagtaagagagttaaatcataataaacataaaaatataaggaatttagcaataaaataccataaaaaaataaatattaaataataaaaaggaaatagtggaagaaaagacagtgtctttctttcaaaaagaaaaaaaaaaagtaaaataaaaaaaggcagcttctctctttcacttgaataaattaaaaaaaaaaaggctaattaacaattttttcttccgaactttgacatataccaaatcatactccttgaa

SEQ ID NO: 99156 - DNA, 1708 bp, Cannabis sativa
ttttctccgaattaaacctcgtcaggttcacacattgatgaaaggtaacatcgtcaagctcgatagttttaccgctgcagaagagaccatagttagaaaaaagtaatgaataaagcaaaagcatagaagatggccagacagctataccaccattttcttaaaatgcatttttaaaagaaaaaaactgtttctgagcttgcttttagaaattatacctatcaaacattcatttggtcccttcaaattttttatacagaaaaaaaaaaatcattcattcaacttgcgaaccactcacaccagaagtttttagtcttttgaaacatgaaaacaaatgtttttaaaacaaaacaataaaattgtgacgacccccaacttaaaattgtgccaaaattgaaaattcagggacaaaatatttcagcatgaagttgtcacccaacaattagacaaatgcatcctctcccatgtcagatgtaagaaaacaattttaggaatgatactcaacagtaaagcctaatcagctaaaaccatatcaaagagaaaagccaatggtaacagctaccaacctaagaaagtacgtaaaaaaataaaattataatagaaagatagcaaatgtaatggataagataaccatgtcgtgaatgaacctttttgttgggcgagatttaagttgtgactctttttcaaggccaatcttatcatttaaacccaacttcaaatcaggcattccagagagaaagcacttcattaggatctttccagttacatcacaacgcaaaacactacctgaatcaccaaattgtaattgagttgatagaacagaggttcataaagaatagaaacacccttaaaaatatatgacccaccttttgaagacataagaagatttacactttccacaatatccaaaaacacctataacaaatggaagttaaaaattaaaatatgtccaaaagtcaattgttaattcaagaaatagtaaaaacttatgatcacctcattctttttataaacaaggccttctctccgccaaccaacagcacccgtaacttgtagagttgcattaggaacaggcttatccgtgggctagcatttagtttttgtcacataaaaaagaattctcagatactaaatgataataaataaagaataattttacccaaaaagaaaacatacttgagaataatcaaggaccacttttaacaggacaataaaatttccatttatttgagatctagtaagaaattctgttggtggtcggactctactatggatttctgaccaaagctatatgatagcaccctattcttcagaaaagaacgtaaaatagaagtacaaaaaatgaactaaccttagaagaaaatggcgaacgaaccccttcttgagtaatgtacaacttcaaaatttctggtgaaagattttgggggtaaccaaaatccataatttctgcaattcaaaagaggaagaaaattatggtctataaatttacaactctgcattaaattagtacaattcatcatttggcattgagtaaagaataatcaacaaaacactaataggctgcagagctataggagattgtcatcactcatagaagcttaatacacaccataaaaaatgttacagagaaaatgcagttgtatactcatgctgaattttaatttgtaatatgcatggattaataaatttgaaatgatttccttgtgttgac

SEQ ID NO: 99157 - DNA, 818 bp, Cannabis sativa
taaatctaataatctcaatagttccggaaaaatttttaacggttaaaaaaattcaggaagcatgatttggtacatgttaaagtttagggggtaaaaatccaaattagtctataatttctaacaaaagatacacaagggattacatgaatcacgaagtgaaatggaggacaggagagaaaaaaacttacgtggctaactattactattcacaacctaaagcccatttccacttcgaaatatagtttcaaatgcagatgaaatgcacaatttcaacattgaatgtcatctatagatagcaaccagtatacaaaacttagttataaatgatcctaataatctctctttgtctcatatttgccaaactgaatctgggaagtcaggtcaaatacattaacacagtttgctagtcattcaagtacatatacaactccatttcaatattcacaataattttcagttttcacaggagggggagtgatgaagaataaatcacacagccattttgtccacaacagttacagcagttagtgataagatatgctggactacacaaagactctaagctacaaaagttaggcctaatcttttattcaacaaactattccatagatgaacctggacgccgaacaaacgcattctacataattttaaacagctacacaaggaatgaagctatgttttttttgcaagtaaagttagcactgtaaacaaagattattacttattaactctataggaaagaaagaccctagaacaaaagaatagtccacaaaaaatggtttcaaaaggttagttactcccaacttattcttctaacc

SEQ ID NO: 99158 - DNA, 2304 bp, Cannabis sativa
  modified_base (26)..(41): a, c, t, g, unknown or other
  modified_base (2251)..(2276): a, c, t, g, unknown or other
tcttaataagtaaatctgattatatnnnnnnnnnnnnnnnntagggcataaaacccaacaatctgctctgcccataggtccttgatcttgacttacttatatttgtactcgacccagtttcttgagtttcttctcgcactaacctccatattcgaaacagattcgacacacgtcctctacttaattaggtgtatgcactgtctctgtcattgtggtttggcctttatgagtgtctcgatggtcgacccatcccatgccgattgccaacacccctcacatcgtgctgagagaatccttgattcccaggtcgtgattgcctagcatttgcattcatgcgggatgattctgggtttttaggttgtatgttcccgcaatttatatttccacaggaagttcatggatcgttgggtcgagtttccatgtttccattgtttcttggattttggtggttctcttcatctactgggatatccctcctgttctcaggttggtcatcgtgggatttctaaggctatccctctagggacatccccgtgtcttctggtcctagagcctcggggtcttccctgaggccgtctagttgatgtgttgggttagtttagaggggcatcaccacccgcagcccttgcgatcgctgcctcacgctctagttctgcatttcttcgatttgactcagctagttgttgtcgaagttgcctattttctagttccaccaatagaacatatattgtgggatcataggcatcttcgctttgtctttctaggatttcatccccagttgttcaaattctccaccatttctcccagagtgaggagtctcaattgtatttgtcctatgagaagtctgatgctcatttccaagacgttgagttgtctctcctagttgattctcttcgtttcgaggagtatcgtctgccatggatggatggtttagattttttatcaaggagggtattatctgaattttctcttacaaagctctcattgaatgcaccaaattgttaatgtagatttttattaactaatatataggcctttttatgtaactaatatactcagggatctaaataaataatgatgatgataataatagtaataaatgacgagaatttttaatgtggttttgaagttatttcttaatagtccacgagtccatcttatttaagaattgataaattgtatatagaatacaataaattgtttacataatgaatgacatgtatatttctctttctctctcaaattggtcgtcctttattttttagattttgtccctatttataggagtctaggatgtcaaatatttctttgggatcttatcacttataaccgttcgtaaaacgtagacaatcctcacgttttacatttacaaacattggataatcacaaataacttctcataactgctcttttaattttatctacaagcggttatgctaattatgcttcattcttttcgcaatgtaacaattctcctttagacgctttaacgtaaaaaacgtctaagtatatatcagtagtacttttcacgttcttttattaatgttgagtaaggtataagcgagacacttttcaccatctgacaattgcgaggtgaaccatgttaaaggtgttgtctttagtctttcaacatactcacgagtatgtggatcaatgagttgtgattttgataaattttgccatcaaaaattgatttatgttgttaagtgtttaaaaaaaaaattctaaatataatataattttggctttttgtgtgagaaatagaatgagtattcattaaatttttatagaggactataactgaaacaaatgtatgggaccatgttaagtaaaataattgagttgattagttgggcatagatgatgaccatttattatttttatacaaataatatgagcatttattatcttcatatttggtaccttaaactttccagctaatatttttaaggaaatatataccatacttttttagttttatttggtatttgaggtgtcgctagtcaatgtcacttgaatgtgaaatgaattataattactaacaattatattggcgtttttgaagtaataaaatagaatgaaatgacaagaaaataatttttatttcatttctttgtttagttgtattttaaagtattagaatagcattcttatgaaatgctattctactattttagtgaaacgactattctattttgaaaaggaatgaaagaacattctagtataataagagaaaaaatttaataatttnnnnnnnnnnnnnnnnnnnnnnnnnnttaaattttattttatttcattcctatt

SEQ ID NO: 99159 - DNA, 2191 bp, Cannabis sativa
ttattactaaccttttcccaccaaagctctgatccttcaatcaaatcaaggatctcctctggatcatacaagtccgaagactgtaagaatgtttggagtctttcacgaacaggagtttcaaaaataaaacttgttctgggatcaaaaactgttggctcctctatccttccagcatcagagttctgagaatttgtttctacctctaaggtttcaatcgttgatttggcgagggaaagtgcatataatgtatggaaccgagtatcacaagaatcttgctcttcaatcaaccactgaaggtacctgcaagaaaaacaaagaaactcaatgctaaactttggccaccgcaaaagtaacttaatttagtaaccttgacaatagttcctatgaatcctatctgcatgagtacatacattgttggtacaacacatgaaatcaatatacctttgaaatatctctactttcgacggatcaatagctgcaataacttcatctgcagacaagaaataaatgtgagcatacaatttacaaggtatcaggcacgaaaaacaagttcacattacatgcacgtgaaccaaaatctacaagggtaggtcatgtgtaattttggagaatgatttcacctggaggaagttggttttctcgtttttctgacgttaaaatctgaactgcgaaaacctgattgatatctgcaatctaacaagacaaaacgagcacaaggttagccccttttgcttgtgaatcataatacgaatataacataagagagtttcaaaatatgtacccatccaagatgttgaagaacaaggtctgcatcagatgactcctcaagaatcttggatgcctcagcagcagcagtctccttaccagcaagaacatgtgtaccgctatcatctacgccgctcttcagagaattatctttccaaaggcctgaagtataatttcgagcaagaatacgccaaatagcaagtgccttagagctcattcctctacttgcatataggaaagcaagtgtccgtaaatgccccgaatcacctaatagagtttccaactcctcctgcaccgtccatgtaagttgtacagtcatccttcaagcaagctgtctctgtttcgaaatgcattggacttactaagatttccctgtttactaacatcctctcacaatgcaatatatcgaaccctataaagtacattgatctaaatctccacaaccaattattggtaccaagtatatcttctttgtagcagccctataggtgacaactctaacttacatagtaattcaacctatttctccgaatccccccaatccacacaactacaaaactttactgggtggtataaactgtgaagatagtttcgccacgaccctcaatatagcctcctaccattctttctatagatttatctacccataaatttgtttgttttacgttctaagcaaataagggagaaatatattgtaaatgcacaatgcaaaaggatagcatccttaaatttctgcatggagaacaaaaactagatttacacataaactctataccttagcaatctccaaacttgcactgttattgttcttctcattaataaaatgaattcaccgaaaacctttcttactattcatatagtggtataaactatttttctatattggacaagtcgagatttactattcattttctttcatttatatttaataatgaatgtaaaaaaaagcatatatgtgaaatagtttatgaatgaaataaataagtcttaatgtcatatagttgtcaaatgtacatatatgctgaagcagaagtgctaagaacataccacaacacaagaatttgcagaagatgccaacttctccatgtcatccacactatctatagctctatagaggtacattaatagtgtatcaactccctcttttactgatggagtcagctctttattgcgagaaacctccaagtacctatagcacatatctatattgtttaagtatatttggaaaggaaatatttgttcaaaatggttaaaataacaatacttcttactaacacataaaacaaaacaaagataaagtaaactgtcaaaacagtgaccgagaacacattaaaacagcaaagttataagctagataacaccgttagtacaccacctaagtaaaagaggagaagaagcaaatgcacagacctaatcattgacttga

SEQ ID NO: 99160 - DNA, 575 bp, Cannabis sativa
  modified_base (528)..(531): a, c, t, g, unknown or other
aaatgaatctgatgtgaattatttaatcaatccagactattttaaaatttttagttcggtcacgattttagaaatcacgatagcagttcaaaccaaataaatccgtataattattatacatatacttaatatatttttttggacaaaatattgatatttggaaacaactttaaaaagaatgttgatattgagtttatactgttatgataataattctttattgttacttatgtattataaccttattgaaaaagtaaaaaaaaaatatcgaaaaatgaacaactattgtaaaaaaaaattagaacaactatgaaatacaaaccatagtttgaaccaaaccaatccgtttttgagtgatttggtttggtttggtttgatcattttattggtttggtttggttttgaatttttgaaaaactgtaatagtggtttggtttgaaaaaattgaaaatttgaaccaaatcaatctgtaaatacccctaatgtaatgaccgctctagtaatgtggattagaaaaggcaattagcnnnnatttttattattttattattttagtattatttgtgaattaattt

SEQ ID NO: 99161 - DNA, 1178 bp, Cannabis sativa
gcaaagtgagggaagagagagatcccgagagagctcatggtcgaagctcacggggcttaggaggctaacggccagagcgcacaggggtgggtcatcagggttgggcgtccattgcagttgggtggttgtaaggggctgcggtgggaaagagaaccgagaaagagagaaggaaaaagagaaagatagaatgaagaagaagaagaaagagaaatgcccttgtaatagaagaaagagaaagagaataagatatattaagtgtaggattttgttttagggtttgtagaatcggctttggcctatttacatttctcactatataatggatttgcgaggctttaaaattgacgcaaattctatatatatattttaaattctaccttttgtaattagcaagggagagagaattgacacaaaccattatttatttatgttgttttaaaaataacacaattatttaaactggtactactcacgtcgatcaacgcgatgagcaatcgtgttgaacgatgtgaataatgaattttgtagtagtgttaatttcttatatatttatcaatataaatatatttattgaactaataatttgtagatgtcattgcaaaagaagcattacacaaggagaggcaaatcatttaaagatacacacatttatctcaaaaattagaagttttacgacataaaacattcttaaatctatttatatattcagtagtcaaacaatcaaactcactttaatatttaagaaagtctcttgctcaaatatttactatttttttttttagaaaaagataatttcattaaaaggcaatgaaccaaagagatccaacaatattacaagcataataaactaaaataaattagggagacccaaccactagacacgagaatccaatttaattagctaaaaaatatgctaggcgcattatattatttcacttacaataagaaataaaaacattagaggaagacttccaaatataaaaaaatatcattaagtataatattatactcattggacatcttattaaaaatttaattcacctaacgcaaacagtcaataaacacactaacgcgagaacaacccaaatgcctacatagaagaggaccttagccaggcccggcgctgagcataggcgggctaggcctgtgcctagggcccacccagtccaggggcccaa

SEQ ID NO: 99162 - DNA, 669 bp, Cannabis sativa
cttttcagggcattggtaaagtatgctagtatcagatatatggagcacacattggactggaccgatatttaacttggtgacgatatcataaaattaacgtgatatatttttaagtgaatattaccaagtcgatcttagatcaaaagatattaattctaatatggttaggttcgatcacaagagtgttatttatgttcttagagttcttcgttaaaacttaccaattggtttgggccaatacttatatcttaagaatatgatagtataattgagtgaaaacacttatcatagatacaaaatctatagcttctatctgaacatagaaatgaaatcatgatttctttcaagcttgacttaatagagataaatataagagctcttctttagtaattatattagtttactgaaatatcatttataggaagctatatgttttaaggataaaatatattgaggggtagaacgataaatttgtccatactcgatgtaaatcatatataaaggatctttaattatttagattataacaatgaataattaatagcgtacttatatcttaaaatatatagaacgttctatataattaggactgcaattttgaatctatagtgacacaaggaggaatttataagttagagaatttatttcgtaaattctagaactacttat

SEQ ID NO: 99163 - DNA, 843 bp, Cannabis sativa
actaccaattaaaaattatattatatacttttattcatgaaaaaataacttattctcataattaattagtttataactttttatatatagtttagtttcattaggtttttttttttgtgtgtgtgcttagcgtatcgttttatttgtaaatgtgcatgtatatatattatgctggtgataaatgatcagtcttttaacgataaattattctacatagattaacttatttcaccctttttatttgtttttatttttgtaatatcaattggtttagcaaaaatggttatagtaaccaatagatattaattctctattaaaattaatttacttaacctgtggagcatttttttttaatatctattggtttagcaaaaatctagtttatctccctattaaaataaatttacttaacctgtggagcttttttttttaaagattgtggaacttaaatttaaataagtaaaaaaagaagaaaaaaatttaatgcatgtttttttttataaacaatttatagatatgaagagaatatattacaaaattaaacaatatatatacgtatatatattatttgatttttttgctctagaattttctcacaaatttttgttggtacaaaattaattagaataatgaaagaaaatcttcaacaacattaaaaataataatgatactatttattgcaatagtttcagggtaaaatgcaaagaaagggtatgtgtatcagtatctacttactcactgctccattcactatagggtaaaaaccaactgagaaaaatgatagtacgtgttgaccgagtaattgaaatttgaaattggaagtaatcctataatttgatgagg

SEQ ID NO: 99164 - DNA, 2504 bp, Cannabis sativa
acccaccttctagtggttcttttaggtcaaattatggacctataatcaaccctgtaattcgattcttggtgaacaacagatctcccttgttactaaatttgtacccatactttagttacattggtaacacaagagacatttctcttgactacgctttatttagatcccaatcagttgtggttagagatggccaaaatgggtacaaaaatctttttgatgctattttggatgctgtttactctgctcttgagaaggctggggggagttcgttggagattgttgtttcggagtcgggttggccttcggccgggggaacagcgacgtcgtttgagaatgcaaggacttataatgcaaatttgattcaacatgttaagggagggactccgaagagaccggggaggcctattgagacttatgtgtttgctatgttcaatgagaatcaaaagagtcctgaatatgagaagaattggggacttttcttccctaacaaacaacccaaatacaatattaatttgaattaaggtgtattgtaaggattactatattaaggccaactcaaagatttggcttttatatgatccaaatccaatatatgtaatgataaaagaagatgtgagaagttggcatatggaataaattaacaataatgtgttaaaactatatgatgaataaagataactttttttaaataccatatattatcatatttttaagatgatgaaaaaaaaatatcatatcatcaactatagtaagataataaaacacttatatttttttgttattaaaataatataaaaagtgtgttattgttgattgtataataacacatatgtataacaataataaagtgagatacatgatgtttagctcaggtcttacaaaattattttggggaagagccttgataatagcagcctatttgataaaggttttagccaacaagaaggaattgattttaatgaaatctttgcacctgctgtgaaataaaagataataaggataatgttggccttggttgctcaatttgatttggaattggaacaaatggatgtaaccactacattcttacatgaagacttagaagaagctatttacatggaacaacctgaaaattacaaggaaaaaggtgaccagaatcgagtttgtctcttaaaaaaatctttgtatgggttaaaacaggctccaagacagtggaataaaaagttcaatagcttcattacacaacatggattcacaaggagtatatgcatgatacatgcttatactacaaaggcactgagatgttacaagctgaatatcttctactctatgtagatgatatgctactaattagcaaagaaaagtcaaaggttgaaggaatgaaggaaattctaaaatctgagtttgacatgaaagatctaggggttgcaagtaaaattttaagaatcaacattaagagagatagaagcaaaaatcagctatttcttaatcagaaagattatttggaaaaaataattgataaattccaaatgaatgattctaaaaaagaaactatgcccctatcaagctagtttcagctgtctaacactcaatgtcctaatactgataaaaaaagtaagaaatgaaggaagtaccatattcaaatgctatgggtctgtgatgtgtgctatggtctgtacaagaccaaacctagctatgcagcaagtgtactgagtaattaaatacttgagaaatctagggaaacttcattgggctacaatgaaatggctgctcaagtacattaacatcactactaaggttggattatgtttcaagaagaatcaagacatgatttaggtaaaaggtgttgtagatgcagactttgcaggggataaagactcaaggaattctaccagagcatacacatttctcatttcaggcaactgtgtaagttggaaatctcaaatataacctatagtagttgtatctttcactgaatctgagtatataactgtaactaaggcaatataagaagggatatgaatacagggcctgctagaaaaaataaatttgttcaaaggaaaagtaactgtctatacgaatagccaaagtgtactatatttgtgtaggaatcctgtatttcatgatagaataaaacatatcgaggtaaggtaccattttataaggaagaaagtgacttaagaacagattaacattgaaaaggtaccaagtgaagaaaattcaactcacatgagtaaaaaactagttccacttagcaaattccaacactgttttggaattgctaagcatagaaagaaggttttaagtcagttggaggactggaccatgatcttaggattagtttttcttggcttggttttattagtattgaggtagaatttgttgattattcagtctttgataaaactaataactgaagacaatgacatggcaagtgggaacttgacacatcaacaagatgttagactttttatttgggcttacattaacttttattggttttattaaaacttgggttgattgga

SEQ ID NO: 99165 - DNA, 4194 bp, Cannabis sativa
taaataattaaaaattataactattctaacgtgggacctacctgccgtacacggattccaatccgtgttttgcacatttgggcataaaatcggctgcctatatatatatataagccaaaagtatattgtaaagagtaatatatagcttcatcatgtaagaaacatatgagaaaaaaatatattagtaaattgaaggggccttagcaaaaaaaaaaaaaaaaaaaattgaggaagaaattgcccccatgagacaagcatggtagaaatatatattttcatctttacaaattcatgctatacattgtaataatattaaatttgttcacatattatattaatgtagaactaactccttaacaaaaaagaattaaactgatgaattttaatcagaataaatatagtaaaattttctaatacacctttttaaaaaaaaaactaatgataaaaaattaaattctattgatctgaaaacaagatatatatacatgaatttaatacaactcaagcaagaaactggttgagttgcttatgattacatttgaaataataaccttcttaaccagcttgtaattaactttaactaactttatagataatactaacaactttaatattccttctcaagatgaagtcatgtagagagtcattacactcattttggacaataagaacttgaattgtgtgggaaaaagaggcttagtcatgatgatatcagcaatgttgtggcgaacatgtgaaagcttgattcgttgtttggtgacttgttctcgaacaatatgacagtcaatatcaacatgctttgtgcgctaatagaagacaacattcttagagatgtgtattgcagcttggttgtcgtgtagagtttaacaggttggaggtgtttgatgccaaagtcaaaaaggatgttgagtaatcatatgatttcacaatttgtgtttgctaaggatcggtactcagcttttgcagagaattttgaaacaattgtttgcttttttgatttccatgatatgagagacttgccaaggaagatgcagaaactaatgatcgatcgtttagtgtttggacaagtgccccaatcggcatcagagaatgcttgaagatgaaaaatgtgatatgcgggatgctgagtaaagttatttgagttaaagaatagaccttacccaggagtgcccttgagatattgaagaatgcgatatgcaaccttcatgtgtggttgtcgagggtcactaaggtattggctaagtcgattgactgcataagagatgtcaggtcgtgtgatagtaaaaaaaaaaagaagtttgccaataaggcttctgtaggaagttgggtctgaaacaggtggtctaacatttttattgaggtatagatttgctttcataggtgtggagacaaccttagagccgaggagtctaatttcagtgagcacttgtaatgtaaatggtctttgagatacaaatatatctgccttagatcgaccaatctctaatctaaggaataaccgtaggggaccaaggtcctttagttgaaattttaaattgagaaatattttgaatgcaacaacatttaagtcatttgtgcttgcaatgactatgtcatcgacatagaccaagagtgcaaggaaactagtaggagataatcttatgaacagagaatgatcataagcaaattgagaaaaatcatgctcaagtaaggtgtttctcaattttacaaaccgttgttgagatgcatgttttagtccataaaggcttttatgtagtttgcaaacagggttcggaggaagctccccctcatgtactagaactagaaattgttttaggatattgaattttacaactggtgcaaaggtctcaaacatagtcaatactatgttgttgtctgtatcctttagctaccaaacgtgccttgtatatgtcaactttacctttagaattgtattttattttatacacacatctgtttctaattgaatggaaaccacgtggtaaggatacaacagtctaaattttgttcttttaagagcaaagaactcattattcatgacattcaaccattgagtcaatttagaagcttgtttaaataaagtaggctcaaatttagtatatgcattgagaataacattctgaacagaggtattaatcctatcataactgtgatattgtgcaagagagtgagcagtaaaggtgtgacaaacatagtccttgaggtggctaggtttggaaatttgtctacatgctttagttgtttgaggaggaactgttggtgattgtgttgcaagatttgaagccattttattgggattagttactgtaggagaacttgttctcagatcctgctgaccaatcttgatatctgcaatggtatttgagggaacaaatgatggagcttggggaaaaaggtgtctaactattgtattttttaaagaacctttgagaggaaaaatattttcataaaagatgacatccatagagtgaaatatattgttactagcaagatctagtagagtatttgctttcatgccattaggatatccaatagaaatgcaagcatggactctaggtgaaaatttgtgtcttttgtttactaaagaagatgcataaacaagacaaccaaagttctttaaatggtcatatgcagggggtttttagtgcaacagttcaaagggatatttgtgttgcatcataggtgtgggggttttattgatgaggtatacaacaatgttaattaaataaggctagtataccaaggctacaaaaggttgaaaagccaaggctcgagccatattcaaaatatgtcgatgttttctctcaatacagaattttgttgaggtcttttataacacatgaattgcagatttagatacctttctgagtataaaaggaagttatgaattaagttcctttgcattgtcacacctaactgcctttatattgacagaaaattgagtatgcacaaggctatatataaaattgtggaatgagatggtgcacatcagatttggattttaacatgtaaacccaagtcaacctactgtgatcatcaataatagtgagaaaatatcgaaaaccttcaatcctcctaatgtggaaggtgttggttttatggtactaaatcaggtacgcaacgaaagagttttatattatctgattatcattgtactatattgatacataatttttactgcaagcgtacaatattgttatagcaaagtttttaattctaaaaagattgtcgaatccacaagaattgattattaaattttactaattattatactttttgattttatgctttaattagagaatttaaagtaaataataattaagaatgaaaaaataaaatagctgaaaagtaaatagacaaacaaataagaaattaaagacctagaggattggttatgaatcgcagtttaccgattattccaatttattctataatttgtagtttcaagaatcataatataatctattaacctctctcgagtgatgatagaattaacttaattaactaacaagatatctctatccaatgttaatcatttaagtaataataaagcaatatgattctctttaaatgaaactcataaaattagtggaatctttcaatctcacacttttcctaagtcatgtaattctaagtccaattttagattacctctcaagtgtaaaacttaaaatctctatactaattaatgatgatcaaacattaacaagataataattaacacaaaattacatagacaaatagcaagaacaaatatgggaaacatctaaaaactttaattcataatctagaatagttccatcaacactttaggaagagttaagttcataaccataaacatatcaactacaataatcatgttcataattatataactaaacaaaataataaagaagaagaagaagaagaaagaaactctaatgatgatagttgatgatgattgcttgaaatctcttctctcttgctcttcaatatgttttttaatctcaaagttgcttatttttaatctctagtcgtcctcaaaatctgatttacatccttctttatataggcccaaagagatagaaagaatccctttagaattaagattttaattcaaaaatataggtacggtgctatagcgcctaagacacaacgctatagcgccattggaggattcccgaaatctcacacgtgctgaaattatcttttttt

SEQ ID NO: 99166 - DNA, 2668 bp, Cannabis sativa
atatatgtaacaattgaaaatgttaaagagattttgcggtaaatatttttgttatggaacatcagttcagtttgtttttgaaacaaatttgaccatatttctaatttatctcttgtgtttttttttttttttccaaaaaaaaaaaagtaaaggttaaaaataagggattatttcacaaatacataaaaagaataaaaaaattacaaaaaatatgattgtacggaattttaaatatttttaggatttttataattttatttactaaaaatacaatttttttttttatattgtactcttgttaatttattgaatttttgttatcggtatgttattttttgtttgtttagatgttattttcttgtaacttttatatagttttcttgttgtttctatataaaatcgtaaaaatatataaaaaataaaaatgtaatttttttttttttttttttaaaaaaaagtgttttgtataattattcttagaaacaatccaaattatatgatgagttcttgcaagtagataatcgattaaacaaataaacagttaaatggacgctaataaaataaaataaatctatatggtgatgactattaaagaatctccccaatcctaggcaggaagcatgggaactgagtaacacctaaaaccccaacactagtcactgcccttttgtactttaaaagcaaccaaaatatatatttatatcatacctctcacttcattgcttttattctacattggtttattttgttgctttaaaatatgtataacgaataatatatcttatgaaaacttgcattattgggaatagcaagtggccaataaaaggagtgaatttctattaaatatgagtggtgtctaatatattttataagtagtgcttatgattagttagcgatattttttaaaagttattttttttaagttatataagatttaatatttaattatatcagtagtaatttggtagtgtactagtgatcccttttatcaattctgtatatctaatgattacattaagagggaagttgactccttcatgatcataatattagcatatctttgcagctttggagttaagctaaaaaaatttcaggagaagcccaaagggatcaaatgctctaataaattatagtgtagaatataactatgaagacttcaaggattataaaactatgccatagtttatttaaattctatgtgtcacaattgaaagttctatatatatatagagagagagagaggttgaactagtccatattgcgcttatcaaattattattctgaagcaaaaacacatttgtttctttcatttgttttgcatattcgcaatgtgtgtatatgtaaagtaaattaattaatggtctataaattattgtaagagagacatcaagaacagaataattcataatggtgatgccccaaagacattaaacaaatttaaaatcattattaaaagcccttttgttaggtttgtatatattctgcaatatatggagatgtggaccttaaatattaatattgattttccctgtaagttttcaatatattctggatttgatcatgtcaattatttaactgtaatagcttttgagatacataattatatgttgatgactcattataacatcaaccttgcaatatgttttgtctgatccaaaatgtatgcccatcattaagtgtcaaataagtcattttattatgtaaatgtcatgctataataaagaactatttaagttaggtttcttaagtaagttatatatatcatcactcctgccttaattatagttctctcaataaaacttaataatataatttggtgatagctggcttatctacaattaataatcaagttgtattttttcggtggtgaataaacaattacggaaaataatctctctaggcctcctagtatgagaaaaaacagagtacaatagggagaaaaaagcttttaccttctattattattttgtgtatttaaatattacaggtagagaaatacatatagagataaggagctaatttagttagaggtataactaacttagcttagttcaagacaggcctaactaactaagctaagaaaggcttttactaaattgtaactaacactaatgtcgtaatagcctccctcaagatgagtatatatgttggagacacttattttagatacaatgttgttaaatgatgagggtagtaaggcttttgtgaatatgtcagccaagttttgttgggactgtacatgagtagcttgaggatggcttgctgaattttctctttgatgaagtggcagtctatttcaacatgttttgtgcgttcatggtagacaggattttcactgatgtgtatggctgcagtgttgtcacaatatagagacgcaggtctattgggagagatgccaaaatctttgaggagagcaatgatccaagtgactttagagattgcattagtcatggctcggtatttggcttcaactgaagatcgagagacaacttgtttttttaattttcatgagaatagagcttgtccaagaaacacaatagccagatatggtacgcctagtatcctagcaagtcccccatctgcatcagcaaagaatgagagttgtacattggagggggattggcttgtttcagcataggctgatatatttggagaagtatttgaaggg

SEQ ID NO: 99167 - DNA, 514 bp, Cannabis sativa
atgctagtgttccttgtacaaaagcgaaacgcggcttgggagctgttatccgaaaccatactggtgaagttgtggctgttgaaatcaagcagatcaggggctcttgcacggtggaattggcggaggttttggctataagaatgaggattcatcttgcttccaaagtgaaggcctacccgttcattatccaaactgactgtcttcgggcagtgagctatttgaatggagattatcaagccaaaacggactggagcgcgctgcttgatgacatccgagactcccctgcttttggccattgtgttgtagtgaagcacataaagaggaaaaataatatggctgctcacttgctggccaaagaggccttgtcttcaaattgtaataagttgtggttgggagattatcccctctgtgcgtttgccggtttaatggcggacctgccgaaacttgtgtaattctttgtttgataataaaacatctttcaaaaaaaaaaaaaaatccaaaccgcccaatgaat

SEQ ID NO: 99168 - DNA, 704 bp, Cannabis sativa
gtcttgaatgaccgagatcacctcggaaaatttgacaatcggagtgatgaagggatactccttggatactcatccaatagtcgagcttatcgggtatttaacaaaagaagtgggacagttatggaatctatcaacgttcgttttgatgacttggaagtctcagagggtgcccctactgaggaggaacttctcgatccctccctccccatgtttgtcccaatcaatcttcctgctagtgcatctgacaactcaactccctcagcatccgaagccccatctgacgcatctgatacatctggaatctctcctgaagtatccaccgatgctgaagttacaagtagcaccccgaccagctcaactcattcgaggttatacaaaaagggccctccatcctggatacagaaggcacatccacccaccattgtcattggtgatcctaacgctactatggttactaggaggaaaatcctgaatgctattgcctttgcgtgttatgtgtccattgtggaaccaaaaaatgtgaccgaggctcttctcgatgagttctggaataatgcaatgcaagatgaaatgggacagttcaaaagaaacagagtttggatcatggttcccaggccagatggtgttaatgtcattggaactaaatggctattcaagaacaagactgatgaatttggtactgttgttcgcaacaaggctcgact

SEQ ID NO: 99169 - DNA, 833 bp, Cannabis sativa
cagtccgcccatgtcagaggcccatcactcgcgtctgaagctcaccgagcaccctagctgcacacacaaaggctttaaacaacatctagcgtgcaggaacgaggctaccatcaataacctgagcgagtggatgtggctgcacacagccaatgtgcacaggaagagtgctttgcacccaaaaatttgatttttgtcattttttttcactatttttttttttttggatttttccttttcaaatccctaaatatttatataaaatattatttttaacatttaaacctaaatatcaaaattttaaattaataatatttaattatttaatagattataattaatttttgatattttgaagtttaaatttaaaaataggttattgtttaaattatgattagattttaaaattttattaatttcttaaatttatagattatttaataataagattaaatattttaataatagatatattttaaattaaaagatattattatccttataatttgaaatactattgttgaccgagattttcggcaaccaattaaacgatataataaggagagctatgagagcgttaatgcaagtagtttttacgtggttcagatagttatgagtcgtagtccacaattctttgtcatttataagagttcttatacagagaatgttctaggtgaatctttctctcccttcttcactctctttgattcaataattcttccaacgatcccctttcattatgtcttcttggggtatttatagagttttgggaggatcactagaaagggatcacttgtctttaagtgtcagcctcttaggggcacaaattcctagca

SEQ ID NO: 99170 - DNA, 564 bp, Cannabis sativa
agccattcaaaaggtaaacaaagcataaactattttctaataattcattttcaacattttctttcctctgatctatatactgaaatgtctttaattgtctttgatattcatttagtcttacattgtgtacatgggagcacattcgcatggcccaaaccctacctcggttgatctagaaaccgccacatcttctcattacaccttgctcggaacttacaaggggaggtacataactttgatacaaaaatttaattgttcctatttttttttcttttagttttcactacaaaaaaaaaaaggtatttcttgtcggttttgttgtgttggttcactaaaccaacgtgtaatcgtctaatgtatatgtttgggtgtttgcgtcggttatcaacagatgaaattgcatagatgcatcgattgataattgacacaagcgatgtttgtgttcgggacccactgacgcaaacaataaattattttttctcaaaaaaaaaaaaaacaaaaatcttccgttcaattgtaaattgatgcaaatgtttagcattagtcgcctgactcacaattaac

SEQ ID NO: 99171 - DNA, 657 bp, Cannabis sativa
  modified_base (623)..(631): a, c, t, g, unknown or other
taattagtgagatcatgagattatcttttcctttttatgccacgtgtcatccgtatgaaaatacggataacacataaatatgaggaatttttaaaaatactcaaaaaaaaattaaaataaaatactaaaaatatggtatttgcaaaattataaattttgtttacaaaaatacagtttgtaaacatcttttataagaagttagacattgtatatttgtaattaattactttttacagtaaaatacattttttttttctgaaaaatggtgccaaatgaatttttttcctttaatattttacactcaaatttgatgaatcatatataataatatgtaaaattaacctccattatatcagttttaaatttaattagttacttatgtataaaaatgtatagtttaatcaaaagttgtatttttgcactatatccatacacgaattctagtaacttagctcactcgaaaaaggcccattaagaataattggccttacaacggtatttttgccaaagcccaaaaatcacttatgaaggcccatttaaatggtccaactgtatatcccaaaatgatgacactttattccgtcctcttttatttttaccttcttttttaaagtctatcattnnnnnnnnntttttttttttttttaaacattgtac

SEQ ID NO: 99172 - DNA, 943 bp, Cannabis sativa
actttttgctggtgttattgatccctattgtcctctttgttccatggtagtagaggactcgttacatatcttttggaattgtcatttggctcgctccctgtggtttggctgttgttggagtattaggacttctttgttcaacttctccaattgggaagattggataaattggttcaaaatatctgataacagaccgaaagataccagcctccatgcattcctagagggagctgcaataatttttgaaaaaatttggagcgaaagaaacaaggtagtccatcatcgtcaaagcacgcctgcaacgataatccttcatctgattgacaatcgactacatgaagcacttcactctcctcaatttggctcaactccgattacacaatggctgccccctcctgaaggatggctcatatgcaacaccgatgtagcaatcggtcattccctttcggctggagcggcaattttcagagatgacaaaggggagatcaaaaccatacacacaaccaaaattctgcattgtgagcctctggcaggggagctagcaacaatctgctggggagctgaaaatgccattagccttggccataaaaatgtaatcttccaatgtgattcggctggggctgcatctgcaatttcaacatcttgcagtgccttggacaagctccaatacaacatcagagacattgtatctaagttcaaggtgctttcttcgaagttcgacctgtgggagattagttggatccccagaacccataattgtgtggcccatgacgcggctcaaagggccctgcactctcaattgtttgggagtttcgaagcgcccagttttttcggtttcccaccttatcccgtggtggatggctgattcggattaatgaagttttttttgcttgttttttagtgatttagattgctagtttctgttagtctttcgtctacttct

SEQ ID NO: 99173 - DNA, 608 bp, Cannabis sativa
ttagtgactatattagttcactataatatcatttataggtggccaagtgtttaaggataataaaataacacaaaaaatatgaaaaaataactttagactgatcttggtcattgatgctaatataatagctaaattgactcttgatgaatattgttaattttcagagcttgaatctcgccgttggatcattttcgggtgatctgcgaaaaaattacacttgtcataggggatgaatttcggacatgaaatcttcaaaattgaaatattgttgtgagacatcatttgaaaaagctataaaaaagcttcaaaactcaagttgaatcgtgttaatcgaataaatattgagagagttatggctaaaacttcctgattttttctatattccaccttgccaaaaggttaaaatatcaaagtgtgaattttcttgtcacaagttgtagttctcatttactacaaaaaaagtcaaatgctcaacacaaaagaaaaattagataagcagtttccagcgcaccaggccatatgtcaacctgggcgttaggtgctccttagggaggttccctgttctccaaccctatttttgacaaaactaagaagaattcccagagcag

SEQ ID NO: 99174 - DNA, 968 bp, Cannabis sativa
ctcctcatcagaatttagaatacattattacattacattgttttttttattgactcttgcttgtgtttaaactatgtctactacttaatgaacaataattgtaagtttcaggttgggctatgccttatgcacatgattggtggtttgagtaggtgccaacatagttgagatctgctcaaggctgcgatgatgcttgcatccctcccaccccatttttccacatattatattggtacttggctttgtatttactgtgaattaattacatgtaactaaatcaaattcattcacttgacttgagaatttgctttatccatcacttgttcttattccctaataatatataagccactccaatccaagcttgctttgcatataactgccatataggaaattaattctctacaatgcataattcgtaatcagcctcaacaacatatcattctatctattaattcacaatggatacattgtgatttagtgtatacttttgtgtttatatattgtcttgttaactatttgtgtttatatttttgcttctggtttggtttgttgtaatggtagtacgtactaactaattctattcaattatattccaagctttctttggtctgcgtgtaataactctggtgtaagagtaggacacatgagttctcttgcactaggtttggttttaagtttttttaagagcaaaagcaatgtccattttatttcatcaagttttaaactcaaaaaatgatgactctccaattatgagtttgagttaaaattagttagtgttagttaggatcatgattgtatatactataattagtagcttcatgtatctgatctgaatacaatactaaccaaatcaatcttattacattaactaaatgaccttttaagaagcttcattattaattacaactattgttctgcataaacttagtcctcaattaaattataatcttgcttgtgaagaaacg

SEQ ID NO: 99175 - DNA, 1403 bp, Cannabis sativa
agagagagagagagagatagaggatgtagttgggtttggtagtatttttatatatattattcagaagcaacctcatcctctacctgccctctcttcatcatattacacaattcacgtacaataataataataataataataataataataataataatggatatcctcaatgaaattatacaaccaacaaattaaacacaactctatcacaaaataatataatatataaggattacataataatgacacttcgaaacataaattacacaaaaaaaatagagtatataaaaatgaaaagaagaagaaattatatatacaaacacaaaattacaaatagatcaaataaaatgtatataaacacaaggataataaaagtgagaacaatttcaacaccactacaaaggaatcatcaaattcaaataatgttttacacatttggttaaaaaatatttgtccttatcacaaacacttagagaaagaagatagaaataactttagtgatttatcaattgcctaatgagtgtttctaaccaagtgtgctatttatagcatttaggttataaccacaatttcataacttaaacttataacgtggcatggttgttaccaaatacttatgaaaattgaatagcaaattacgttaccttacatgcaatcactagacctgattatttgtcatactctggaaacaaacacaattaatatatatttagacactcctcaaactcaacatttgagggctaacatttatgaaatagtgtggttacccctaacccaaaatagttgttttgtatattgtattgtgacactaagacaacccaacaaatttacttgttaatttcattttgcatgagagaatcaagtacattgaaatttattgtcacttagttaggaaaaaacttgaagctgggctaatccagccgacatgtacattatgtttctactcaacaccagccagcttgttgatatttccactaagccgcttcttcctactcattctcatcaacttaaggatatgagggcttattaaattaatttatgctttataaggggaagtattaaataatgttgattagttaattaaatatagaaagagttagctagttagtgttagttgtggttagtcggctgagagtataaatgctttattttgtactctttctttaattgatgattgatgtacagtgttcattcatcacatttttaagctctcaaacctaaaatatatgttgttatatgaatgtatcatatcagccatttcatttgttcttttaaaaaatgatttaaagtggtgaaaattcaaattttaataattgttgattgcacaattattattattattattattattattatatctattctatataaagtgtgtctatataaccgaattcttggtttat

SEQ ID NO: 99176 - DNA, 731 bp, Cannabis sativa
ttctacctatcttctacagcaaggataagatcgcattcagaaattaaatgtgcaaagtaaaagtagaaggaatcgaaaacttactcattgatcgacgtctcgattcagtctacaggaagttgattggatggctcttgtgaaaatttaacgacaaactcaaagtgaaaaatctccttttgctctgaacttgcttaatggataagttggtgaaaatgagtttgtgaacaatgctcagtcgtatttataggcagaaaaacaaaaaggggtaatcatttcaaatatctcagacgcctctgctcctcccaaaaaagcaaatattggaaattaaaaagtaatcaagtgtaaccgtcaaacttggtgagagaaaatcagattttgaagcattaattgcgtcagagcatttattagccgaaaactaaatagacgccaagtcagcctcacatcgaatcacgaacagatgcacttgacacgtcacgcaaccaaatgcaaagacaactcagatgaagtctacacataacttcgaaagtcccgtatagacttggggcaaatgttatcccattttttgcactctgacgtggcatcacacgatggtgacacgtggaatcaactctgggtacctactcgcaagaaatatgccgaacaggacaccacatacatttccttggacgaagttctcatagccaggcagtgtgcgatccgtgcaacacgccaacacttagagaattcagctt

SEQ ID NO: 99177 - DNA, 718 bp, Cannabis sativa
taatgtcaaattaaagttgcaaaatttactattaaagaaatttagagaattacttatttgtccacttgtatatgtgcaagttaccaaagtggagacacacaatataaagagaactaaaatcagagttacttctccacagaacaagagaaagaacctgcaaagtgcaaacacatgaacactacaggaacttctaccatttcaaacaaaaactttacatacttctcattcactgcaatctcataaagttgttcgcatatgttactataattttataacgttggagctagtgttctcttctggataaaaagctacctgcaaccactaaccaccctatagtaacttagaaagcaagtgattgaaattatacatagcacaaatctaaacagaaaaagtagcctttttcatgctcaccttttggtgtagataccttgaacttgtttacatcatcactgtaaatacaaaaatcatctcctactccttaaagtattacccaatgcccatttagaataacaattaaaataaagaggcaattttaaaggaaggaaggcaatgatacctatatttgccaatgcatcagcaaaagtcatgatcatgttcaccaaaatttttcttctacttggaaaatgcacgaaccaaaaaagaaaacaaaaggaatagtaagagctaataatagagagaaataaatctatttctcataaatgctaaaagatgaaaagct

SEQ ID NO: 99178 - DNA, 644 bp, Cannabis sativa
gagtatctaactcactaaaaatataatttgacatcatacaagactttcataatttctctaattatttacaaaatattaagtataattagtgttagacatcattagtacttaatacaaattatacttaatactaggcaattagtaaaagatacattatgatattaaatttatgatccaagaaatgaaacgagtaatgaggacgtgttagaaccacttgaggttagctcaagtggtcataggggaatttaagagggtgtgtgtaggggacccttgggatcgaatcctaaattctaccatataaacgcttcaattaattttttttttaaaaaaagctaattagaatttatgtttcttgaattttgacatgtaccaaatcatgctttatgaactattctggctattaaaagttttctctaaattattgagattattagatttaaggacttttgttaaattttggtaaggaaagtctaatatgaatcaaaattgcggggaaatgaaattatatatgtcaaaatttgattaaatttggaagagtatactttaatacataaatattcacggaattagtaaaattataaaaattttaattagtcaataaaaaaataagaatgagtgacgtgttagtttgtgagtgagtagac

SEQ ID NO: 99179 - DNA, 1483 bp, Cannabis sativa
tgtttggcctaggaggctttcctggtagagcctcttggttttgggggaatgctccctaaggggtttgtacatgtagggcatgtaacacacctccaggtggtacttgaagtctagtttgtccttccctcatatgcggtaaacgattccttaccccctcatacaagtggtctaaccatatcagattgtcaatctcgtcctttaggttcttgcatttattggttgtatgcccaatgtcattgtggtactcacacctcttgctagggtccctttggagctgtcttggtataaaggggaaggtctccagtagtgaacatttttccttgtggccaaatacacatgctcttgtgtgtccaccaaatcattgtactaggtgtataagggattatacccaaacctctttggcttcattttgtcactctggctgcttcctttaatgaccacttactttaagaagctttagagttgcagcagcacttgccgcaagtgaagcagattgggaaggatactgcgtgcatgccttgggagtgggaccacctgctggcagcccataatcagaatgggttggtgccatgatagaatttggtgagtacccaggtgttgcttgaaactgtacactaagcgtcccacttgtttagggagcgacgggaagtgtgatacttaggaattgtactccaaaagcatactcagagcctcctgtaggataattccaaaagcaatcatttgagcttcttccaagttgatatatttttgggctctcttttggaaatcttgaaggctagccgcaccaccttgttgcaatttattacaaaatcaagttctttccgaattctagcttgcaataaaaccagctgttgtctgtcatatactttcttggttttggaagcctcctctttgaacctcttgatgaagttctttaaggtttccattggtagctatttgatgttagttaagacattgacatcaagatttattttcttggctgcaacaaactgcctcctaaaagtagtctgcaatttattccaacattctacaaatcttggttctaactttttgaaccattcctctgtagatttgcctaatgttagtgggaaacacaagcctttagcatcattgctcaccctcatgactgtcatgactatcatgactttgtttaatctggatatgcgatcacttgaatccgtgtctcccatgtacatggtcatttcaggcattttgaagttctttgggagtttaacttgtagtatatttctcgcgtaaggcttttggtcctcacaatctgattctgagtcatctcctttctgcctccgagagatccttgttatgtccttccagaagatagcaagtttggccacgactccttcattcaaaatacctttagagattggcgtagctttctttctttggtcaagtcatgccctgtaaagactacttagtttaatttgagaattagcagttaataatgtttaattatggaaaattattt

SEQ ID NO: 99180 - DNA, 515 bp, Cannabis sativa
ttgttgtacaagcaattcataatcattaatctatgttttctcattttggtattattattaattattgtaaaaaaaaatgattaatgtggataacgggtctctctttagtttttgttaatcagtctgttaataaggttatttttagagcttcttgctttttttttttcatatggttgtttcagtgaaagtaacactacaaaaaacaattatctttagtgataatgttttagtcacaatataaattttttgtgattaaatgtgattttaagtcacaataaaaagttacttgtgactttttattgtgactaaaacataatatgtagatacaaatagtcactaatttagtcacaataagtattgtaattaaaaacacatttaatcacaacaaattgtaatttttataactaatatttttattcacggattttttagtcacaatataagaataataatttatttttagttataatttttttattttaagttataagttttattgtgactaagtaaaaaat

SEQ ID NO: 99181 - DNA, 511 bp, Cannabis sativa
aaaatcaaaagattaaacaaagtatcctaagttgatttaattatggcttattaggacttttcttgattattaccttcatgcagtgagtttttgaaccattggagacagttttcctggtccacccaactgaatccttagctggaagaagctcagtgaagttggatctcaggccaacatagccagaaacagcagctggagcagtaaatgaggtagcagacatcctaacctcaaacttggttaacaggagaaagaaaataattgcagtgttgtagtatttcctttcctttcctttattcttattttgattattttagtatcaagtagtttattaggaaaatggtggaaatggtttctaaaaacaacaaaagaagtcagctttatatttgttatgagatcaagtgtggttttttttctctttttcttttgtaaaagatgagtggtatggtatttcggtgggcactacgaggtggtgtagagttttccctatttagagtttggctctagtggaaat

SEQ ID NO: 99182 - DNA, 1119 bp, Cannabis sativa
  modified_base (33)..(37): a, c, t, g, unknown or other
  modified_base (451)..(452): a, c, t, g, unknown or other
taaacaacatacatgtgagtagatctaagatcnnnnnaaaataaattccaacagatatgcacctagatcttctctcattcaatttagttatacacagtcttccttactatgtcaggtattgctttgatatgagtgggcatactctcaattcacttcaggattcaaaaatattgaggaagaagaagagggaattcaaaatagaagaagaaaaagctctcgctttattttctaattgtctaacaaaagagactaatgtaggttatgaaaataagagtcatcttattctatttataggattcgggttaggtttagaatttaaatggaattaaaaaagataaaataatagctttattgaacttaaggggcgggccattttatagcccccacaagtttcaattttgctatttatttaactcctctttattttcacaaatgtcatattttaattctnnctctataaatattaattctatctatttaataattatgattaattatcaaataaaattgtcattgaacttatttagtaataacaccttacaaagtcttttaattaataaataaaccctaaatcctcttttcttctcaaataagcctttgcctagtgaaaaattcacaaataagacatattcttatttagattctaattgattaatcaaaactaattaattgagactacaaaataatattatcccagttagtgtagggaccatggccctatgtaatcaaacttccaataagtagtaacttattaattcctcctaacttcattataaattttgaattgcactcttaattatgtagaatgctgtattaccaaaaatagatgcgatttgaattaccaattgttataatccaaatagtcaaaaattctctatagatgatctacatcgagtaaggacaaatttaaagttctacctttcaatgtattttaaccttaaaattctttagctacttgtaaataatatttcaataaactactataattagtgaaaggagcgctcaatacattatcgcattaagccaagcttgaacgaaatcatcgtttcacttctagaagttacagaagctattgattctatatctatgattagtgctcccgctcaattgtactaccat

SEQ ID NO: 99183 - DNA, 522 bp, Cannabis sativa
  modified_base (253)..(257): a, c, t, g, unknown or other
gaaaaattatcatgtatatataacaaaaacaaaataaggtgaggatgtaactaactatatagaattattacaacatttgtatatatagtggggaagatgatgatgatgatgatgatgatgagaaaactaatagtaggatccccaaattggaggccaccacttagaatgaaaataagacttgtaagagatcaaaaccataaccacaacaagcaccatagccacaccccatggagaattattattattattattnnnnntattattattattattatttccaccttcaaacaaagacaaagaagaaaaatactcacgctttgtccttggagtcctaatcaccaaaacgctgccgtatttagtaacaaacttggccaaaaaaatcaacagcaaaggcaagaacaaaaggaatatcttgaaaccgataacggtttggtgcatgtgtgatctgtaattggcgtacgacgaaatggagagtaaaacgacaacgattcccactactgccattaatggaagaggaggaaa

SEQ ID NO: 99184 - DNA, 2341 bp, Cannabis sativa
acttcacccgagttcaggaacacaaattggtccttcccttcagctccttcgaacccggtcacctgcaattgtacgtttacacaatacttttctactcttttgggcaattaattactaattatttgtgttttggtttcaaaatttgtgtatatcaatgtaaatgttttgatgacataaaatgctattactacaatggtttttggtcctcttatattcttttgtttgtttttgtttttttaaatggtttcgagaacaacgtaagttatgttcccaattatagtgaaactgttatcaatctggtgttcaagtcttttaacttctgtatatagaaaagaactaaacctgctttgaggtgacaaattcgttgacttaggaaaatacagtatgagtttatgaataatcacttgacttctttcttcttttcctcctagtactacaactagacctatgattcactttaaaatggtaggtgtcattcaagataaggactagtaaattgggaatctttattcccttggcattgcagaacaatcttatgttgataactttagggttgtctttttgttgtagatggtgctgtaatgccttcatggtttgacattcatgagattccggttactgctgtaagtactacatgtttcatacttcttaaatttgttttctaatatgttatagcatgaattggatggaatctaaagtaaaagtgttgtagtaatttgattacaattaagttctgaactgtttgagttagtcttcttggaacctatctagcaatagcttaagaccttcttgcctcctcatgattgtaggtttcattaacacgtttagtattgtagattttgaaaggggattcttaaaatgtttcaaaaagttgttctagaaaatctcaccattcatttaatttttgaaaacaaaactgaaaatggttccaagtagctcatttataacatcatttttttatttattactattgattaagttaataatatatttcaggattcaccaaaagatgaaagtagcttggttaaagctgtacagaatgtacacaagatgattgacaaagagatagctgctggcactaatcctaataatatatttgtgtgtggatttagtcaaggaggtttatctttctccttccttctatctcttttaatcttactcgtttacatcactgcattatttgtctgcatttactgctactaactttatatttatatattgaacaatctccttaggcgctttgactctggcaagtgttcttctttacccaaaaactctggggggaggtgcagtattcagtggatgggtcccctttaattcatcattgattaatcaaatttcaccagacgccaaaagggtactccttaggataattttgatatgtctagtcttggtctgcactttgttttgtttcttctcttgtcattttccgaagaagtaataagaaaatgcacatgtagtaaggcccatctttaattgctgtgttgtaaataatttaagtacaatatgattctagcttgagttgtaaattatgttataatacattatgacttatgagtcccaaacatgaaagacaattccattcgtgtattttttgtgtttaaacaatttctcatatctaaatcttatatgcagactcctattttgtggtcacatggaatggatgacagaacagtactgtttgaagcaggacaagctggccccccattccttgaaaaagctggtataagttgcgagtttaaggtaagattacttctgatcaagatattaattgacctttttcttctttttaattttgtaataatgttttgacccgtgacaaactctgctttattatttgaaggcgtatcctggtctttctcattcaataagcaatgaagagctaaagtatctggagtcatggatcaaagctcgtctgcaaagttcttcttagttcttagagatttaatggtgatatcaccttattagtaagtcattattgctgagcatcacattcaaagggaaaaaaactacggtttcaacaccttttctgggactggtattctgtttgcttatatgaataagtttttatttttaaaaaaccacatctttatatgtttttatcttaatacaactaaataccatttgcaccaacctttgcatcatatcattttttaaacaaacgagtatatgcttaaaaagaaaaggtgaaatttggaaggcacaaataaaattagagagttgattaattggaaaaatgaactgcaaaagcactattagggctcgtttggaacgccgtattaagtcgtattgtattgtattgtattacatttaattggaatatatatcatatttttatata

SEQ ID NO: 99185 - DNA, 656 bp, Cannabis sativa
tattagagcaacccaaaccgtaaataattttaagaaattaaaaatagtaattctctaatttttaaaaagtgagattgttaatattttttaaatcattttttttttttagttttttaattaaaaaagtaaaaatactttccaaaaatatattttataaaattgttttcactttctaattttttaattgagaatcaaaaatttataaattttaaaaataaaaaaaaattacttttaattttttcttaacattcttttttcttaatcaatattttcgactcttattccaacacggacctcgcgacctaaccccagcccatgacttggccccgaacttgggtcctggatccgaacccaaactcgaatctagacccctaatctagactcagacccaaaccccaaccctggactcaaatttagatcccggaccaaaactcgaacttcgaacccgaacccgaccccgaatctcgaactggcccgagacttagacacgacttaaataaaataaaaaaataaaataattataaaacatatttttgtttttcttatacaaaacctcccaattttaaaataaaaactttttttttttttcggaagtgttaatatatgttttcttttatttcttttttaatttgatttatgtttcgttccaaaacaga

SEQ ID NO: 99186 - DNA, 858 bp, Cannabis sativa
  modified_base (688)..(689): a, c, t, g, unknown or other
ataactccgccgctattgggtttatttgttgtagtgggttgtggtcttttgatgacttagtttagtacaacaaagagttcttcgaatagtccaaggattctggtcacagaatatcaaaatcataatccatacgttaacatacagtttaaatttattgttggaaaatcgatattcacaacttgtgaaaattatactgtattatcaaatgtaaactggaaaatcaaatttaaaatttctgtttggaatctaaaatttaaagtcaaggagttaaatttaaactaaatatttctcgagtagttattttttcttggatcaccactactaatctaactctaagtttaagttgcctttagtaagcatatacaagtagaagattctctaagatcaaggatttatatcatttcgtgatagaatatctagaatatagtcatctaccatattcaatttcataggagaaaatagaatgacatataagcatatgattctatccaatgatattctttctacacaatttcttaaggaaaaaagctaagaagaaaaataaagaataatttcaattaaaataagaacctaacgatatcccggtaggcgagagtcaaaattattcttattttatcaacttcttcattgtttcatattgtaaacacaagtcgaagttgtgagtcaactagatgttgcatttacaaanntttatctatcgagatctaacactactttgttgtctaacggatgacaatcctttgggatttgtctcgttataacaacaaattatgttagaccaacaatgaagattcaaaaattttactacaataattaataacccagaactaacctgaagaatctgaagtttgtttggac

SEQ ID NO: 99187 - DNA, 638 bp, Cannabis sativa
taaattttgggacaaataaaacaacaaaacaaattatgtatttatggtgtatctttaaagataaaaaaaatgatgtgaatatattatgaagttctcacacaaaatttaaaaaatagaatgacaaatatatatttaactttatgaaaacatataaataatataatataaattattatagattataaattaaataaatttatttttgaaaaatattatcactaattaattgagtaagactaatttaatcaattataattaatgtgtgattaataccaaaataaaacttagtaaataatcatatattttagaataataatatgatactctttaaaaattagaataatagaaacaaaaacattttataaaaaaaatattataactaattaattatgttgcccttaatttcgcccaaaatacgttgaccaatatgacaacgacacgtggatctaagaggcacgactattagatgaatcgactaagtcttttttccatcaggagtgtcaacaaaaagatacctctcggaggagaggtgaaggctccacatactctcggagaccaagggaacgctaaggtatctaaaggaggtactggaccctatttgaacagtcacatctcatttaatgtcgcatgggagaaaa

SEQ ID NO: 99188 - DNA, 3451 bp, Cannabis sativa
tgcagcctcctttgaccagaagcacattacaccacaacacatttctctgaatttgggttaaaaaattatattgggtgggcgctccttcttcttcttctcctttcttcttcccatttgatctgcccaaacaattttctccctttggattaaaggctgtaatttgaaagggtttatgtttttaggtttccccaatttacagccccacagatactctttcaaggttggttggtgcttttcatttctcaagttgaaattgttaattaattcttagttttcttgtgtatattaattaactaatattgttccttccgtttcaccaatattaagtcttgggaatttttcttttaagagtttctgcatcagctttggattttgatttgatgggattattattatcatcatcattggtgttaatttgttaatgattccatatgtgttaataatttgttaatgatcactcttttattattgcaactcacttgttcgatgaattgcctcattggggctttgtcatgataaccagtttcttttgaaggctcagccacatcttttcctttgcttgggtttgctcttggttcactggaggatttggtcacctcaggttggtgtttttttagctttcttattgttatctattttagctttgtatggacatggggttggtcagttgtttgataatggttctgaggtacaccaatgtatggtctgaactttttgttgagcttgagacagacttttttttcgtgtgttgacaatgttttcatgtcatttcacagtagccaatttaattggcacttttctttcttcctatgctgtaatgatttggctttttctgtgtattgctatataaaataagccttttgaaggtatattggtatactgatttggttgttctcctcattaacttcacatgtttattgcaagaattcttataaaatatctatttcaatgtgctattttattttatagctattttgttctttctcagctttgattggttattgaattttcatgcttgggtaatgttcattatttttggttggaattgatggagccttctcgaattatttttgatgtaaaggaaaagactaattgaatttataattctaatattgcagaaatagaatcaaggatgttgtacatagtatttaacggaagatggaatgcacacaacaaatatgttgatcatgaaatcaaactcctaatggtgcataaagatataaaatttttggatttggtagataagatacacaacttgctcaatttgaatcgaaatttggtttcgatcaacattctatttgatgtgaatatgggtacaagcaaaggaatgaagatagaaagcgatatggatttagaggcttacttgatcgagaacaacacaaaggaagatctgagaaattgtcctcttattgttgaagtaattgagaagaaccaaacaatggccttgtcaagaacaactagcattgctgcaactacttcagcaagtaacgcaacaagcagaaaaaagacagcagcaagcagtagcgcttacagcggcacaaacagcacatcatcacgagcttcttgtatggctactgaaggaggacaagaagttcaatcacctctaactgtcttgccaagtatgggcattgaagacctaagagtgaatcatatgttcaagaacaaagaagagttgaaatctgctctttcgaggattgctatcaagaagcacttccaatacaaggttaagagatcatgttcgctgacattttgggcaaaatgcatagatgaaaattgtgagtggtacctccgcgctagaagctctaaaacatcaagctacttcagagttatcaagtacaaaaattttcactcatgctccttaaatcacaaaagtactgataatagacaggctagtgcaaaagtaatcagtgattgcatcaaagaaaagattcgtgacccgaaaacaaactacaaaacaagacaaataataaatgacatgcgagatgagtatggagtgcaggtaaaatataacaaagcatggagggcaaaggaactagcaaagaataatgtcagaggatcaaatgaagagagttatgctgagttacctgcgtacttacatatgctgaaattgtccaacccaggaaccatcacaagaattgagaaagatgatgacaataggtacaaaattttgttccaactcatgtcttttcctttgagtctatgttgtttattttctacaataagtgttgtatattttgctcattttttttccttttatgattatttatctggaagattgattacaagattcttgaaataatttttgttttttggcattgatatacaatgcatctttcataaattacataattcatataaactacaacaaagccataagaagtaggattattttttatttttaatttaattgactgtacagttcatgttcttgttaataaaattaaggatgaaatttttattgctagtttaagattggaagtttaagatcttataatgaagaggtcttcaatatttttttttctttagttgctttccttctatgttaaaacagcttgatcattacactaaatgaaacatgttcatagtttaacaaaacaccaacactgatatccatgccgagttttattttctcattgttttcataaattcataatcatcatcatcaatatcgattaatggtatagacattttattaaaaaaggattttgagagcatgggaagttcaaaatatatgtatgcaatagtggaatgatttttaggtgtttttaattccgatatttggtggttggtttgtatttttttacaggtttaaatatatgtttctggcttttggttgctcgttggatggatggaaacattgcagacctgttgtagtggttgacggaacttttttaaaaacaaaatgtggaggaacgttatatgcagcttgcgctaaagatggaaataaccaaatctttcctcttgcctttggaattggagactctgagaatgacaaagcgtggaaatggtttttcaaaaggcttaaagaagcaataggtgaacgagaagagatgtgcataatatctgataggcacatcagcataaagaacgcgattgcagaagtctttccaggaatataccatgggatatgtgcttaccatttgaagcagaacttaaggagtaggtttaggggtgtgcacgtgcaagccacatttgaaattgctgctagaagttattcagttccagagtatgattctgctatggctgagttgcgcaacatcaatcctgaaattaccacatacttattggaagcagatccaaaaaggtgggctagatcgttctttccgaaaagaagatataatattatgaccagcaatatttctgagtcaataaattctgccattgaacatgcaagagacctacctataactccattagtagaagctcttagagaaatggtacaagattggtt

SEQ ID NO: 99189 - DNA, 550 bp, Cannabis sativa
agctctccttcccatctgtaacaaactatcaaccgatctaccaacaagattggggtgataagttgtcacaaacttattgtctatacctggtagccaaggatcttgaaggataaatgttgttttcccatcacaaatggatcttcgaatcccagcctgtaataaatcttttgcctccaatatactacgccatatgaagcttggattcggacccaactcagcattcaagaaattgccttttggatagtatcttgccttatacaacttagcaaccaatgactcctcattcgtaattaaacgccagccctgttttcccaagtacgccaaattatactcccgtaaactcctaaaacccaaccctccagcatctttatgtctacatagtttactccaactcacccacgaaaccccttttgttgagcctttggattgtgactttcaccaaaaccttgccatcaagccttctaagcttgagcaaatttctttagttaaaagaaatacactcattgcatagcttggaagcgattgggcaacggatttcagtaacacttct

SEQ ID NO: 99190 - DNA, 1411 bp, Cannabis sativa
  modified_base (116)..(121): a, c, t, g, unknown or other
tacataatcgtggaatcttcgtcctccgattcctcacggaagacatgatcatatatacatcagatttaagtccaaggagtggttaagagagttggttaattaatatatatatatannnnnntatatatttatatatatatagaaacactacacatgtaaattaattacacagccaaacgcaagagatacgttcaacgagccggcatggctgaccaccgaccactcaaaactggttaattaacgtagactttatgaaagtcaattccattcaaaatcatttgtatatgtatgttatcctctttactcttctttcaatcaatattgaatcatatacctttactctttcttattaccaacactctctctttctctttctctctccctcatgggcaatattatcgtgtctccaggctgcttcaacccaaaccctaactcagcagtgatactaatattctgggaaggcactaagagaattctcaaaggaaagaaacacatagcaggtgagatcatgttcgagttccctgacagaattgtctgccatgccgattcattcttcataggtcacccagttccggccttaggcatccaagacccgctcctcagtggccaaacatactttgttcttcccatagacagcttctccaacggtgtactcacggcctcttccctcgccgccttcggctcctcaccgagccccaataacaaggccacaagtcccattaattttggcggtaatacctccccgttcgagtacttaaagggctcaaatggaagggctttgatcaaggtttcaccagagttcttaaccaaattggttatgagaggtaaggaagagggttcgggttgtgatagtcaatgcaataatggtagatttctttgcaacactccggagcttcaaaagcactatgatcagctagtgggatcaaaagaacaattatggtcgcctaagcttgagaccatctctgagcataagattaggttttcaccatgtagatttatagggttagaatggaaagtaaaagagaaggaagcgttatgatagcgtatatatttattaatttgtatccttatttgttgttcattaagaacttaatttcatttatggtttttgtctctaatgaaatgttagacacaccatattatatagatagatatatactacgttataattgtcagttaattaattttgtcgaattttgtacatatatagtagactaaattgttaggagtacatatatagtataaacattaatcatactttgacgtaaatttgtctttgtttttcttcctttgacccctctgatctcttccaatatttatgatgtgcgtgtaaaattctgtacacatggagggtttttgattaaaaagattagaaaggacaatgaacaattttacaagtatgttggttcgt

SEQ ID NO: 99191 - DNA, 572 bp, Cannabis sativa
ttaaacttgaaatctaaacttttcttatcgataaacacgatgaaaaataccttaaaaatatcaaaacacataaattgaaaaactttaaaattcccttactggaaatctagatttacaaaccgaaaccccaaaattacagaccaaccaaataccattgcccattctcttgcaaagaagacacttgttttagatgagtttcgtatttggtggcgggggctttgtatagattttgttttttaattttgtgtgcctctttttatattttgaaacttattaggctttgtgcatgttaatgaattatctccatttccttcaaaaaaaaaatagaagaaaataattaactaatgttgcccacgtggatgtacacatggcgccacttggatttgcaacatcaccatagatatgatccgacgacgcagatcgagcgaattcgtgtggaatctaaagaaaaagtgtgggaaactgataacggtcacgttccctccagatctcaacaaaagcgaggtccacgtcatcacgcgccactaatcaaccaaccaaaataagccacgtgtcataagtgtttaaaatat

SEQ ID NO: 99192 - DNA, 875 bp, Cannabis sativa
tagtgagttcccctacatgttgtccctggcataatcacgaagaaacctcaatacatgctctatttggttgttcatctgtccagaatgtttggaaattaactatcttttatgaccatattattaaattaaaatccttaccttgtaatgatactctatatatgtgtactgatattatgacactcaaagactttcagttctttgtctgtctcctctagaaagtttggcatgcaggaatcaagtattacatcatcagtcggatcaagatgccccaacgctcattcagtggacgaaagattatctactccaataccagcaacacaatgaaagaaacaaactacacaagcttcaagatgctagccattcctcatcccagtggcaaccaccacctactggtcatcttaagctcaatgttgacgctgcccaaaatatacaagagatcaggatgggttttggaatgatagtacgaaatcataacacagatgttgttgtagccttagctattccctgaaaaggtgttcaccagccgcttataatggaagcgcatgctcttcaactcgctctcgaatggtgtcaagagaactcacttgcggttcaacacattgaatctaattgtcaaactcttgtacatgctactcgctcggttcgcaccaataacattcatctgcaagaattacttatcaaaatcattagcttactgtcttctcttcctcaagcttcgattagctatatcccacgagaggctaactcttccgctcatcatctagataagcaagctttaggcttagaacaacaggctattttatgattgtaatcacttttctctctgttgtatcctgtactctttggtttgatctttggatacagatttccaagtt

SEQ ID NO: 99193 - DNA, 505 bp, Cannabis sativa
ggggcactcccatcttaaaattttgtacagaaccttcaagctggtgaggattctgtatgaaatgggatttagttgaaatggggcaagctcgagatggttcaggaagaccttgaaatagtctcgcaagcggattatttctccagccttgatgtgttcaacgctcaaagcgcctatcctggtcgagccacttgtactggtctcgccactggccccctcaaatgtttcgcaagtaagtctcactggtggataacaactaaactcgccaacaaccaccgatctaacccagctgtcttgtttatattcaataccacaagtcctcagagtatcacctacataacctcagatggctcgcaccttcgactctattagctctgcctcgaaagtgacgttagggtactagggagtctttgatttacgtggcttggaagacataatttcaaaatccaagtcacctggttcaaaagcaattgtgaccttggtaaaaaacaaaggcttagccaaagga

SEQ ID NO: 99194 - DNA, 889 bp, Cannabis sativa
ttttttttaatttttttttttatggcataaccacaaatacttgcttcctcttcggatgcattatttatttatttatacatatggtaaagtacaaaccattcttcttcttctacctttttctctaattattttattttgattattattatatataaaaagagaaaaataaaataatagtaaaatcatgcatgatcatcatgtgtcaacatatagctatagcttcctagccaaactcattatatataagacccctcccttgtttccaaaatctgttctacatataataagcacacataataataataatattatctaagtcccaaactctcttctcttctcttctgtgctttgttatcaaaattatggatgggaagaaacttgagtacaaaggcgaggaggccttgaaggagatagaaaggctgacaacggagcctgatatagttcaggaaaatatcttgagagaaatcttgagaagcaactgtgaaactgagtatctgagtaagtacatggataaaggaacgaaagatgatgtttcaatgttcaagaaacgtgtccctgtaattacctataaggacattcgaccattcatccaaagaattgcgaatggtgaagactcatctctccttactggtcacccaataacagagatgttatgcaggtcatcactctgttctgttctgttctgtcctgttttttttacgttataatttttgtttctcaaactctgttgacattttcagttcagggacttcagctggagagcccaaaatgatgccttccattgcagaagatctggaccgtcgaacattcttatataacctcatcatgccgataatcaatcagttagatatactctacaaactttttttctctacttcatgcataataa

SEQ ID NO: 99195 - DNA, 633 bp, Cannabis sativa
gaatcgttagattcctttcttagattcctttcaacagccatccgaagggggcctctttccagcggttaggggacatccactccccttttcgacttagggtttaatgtgggggcgaactgatggatttcttgtttttttcagatgagtgaggtccttcgcgatcttcataaacacagtttctttgggttcaaccaagaaattcttaatctccaccagggcgatcctatgtctacacccgcagctattggggcaaaatcctccaagaaggggccaaagaagcaggccaccttcgaggaggttatgaaagccctggtcatttacaagaagttcgcgtgccattccaatggttgggaggctcacgaactctattcgacattgacttgtacctatcaactggagaatattgtcactgtggctgggattaagccctccattttggagtataacactgtcttctaagggacgaggagacgccaaaccataactacaatggcttcggggcttggagtcagacccaccttatgtctggggccatgttacccctccaagactactttattgacttccatatttttgttaggctttcaccctatcagctgattccacaagcttaccgcctgttatcaggcctat

SEQ ID NO: 99196 - DNA, 789 bp, Cannabis sativa
tgctattattcatacttatcatcggacatgttcgtccattatcttctttctaaaaataaatcaattgttatatttattcatttaaatgtgaaatatgtattggaatcaagtactcaaaatcgtcttgcattatcatcttcatcagtgctctttttcactacaaaattacttttattattgccctacaaactacaataatggcgatccttttataccattttgtcaataatattaagtttttttttcctgtccgaaagtctaatttaacaaggacagttcaaccatatccatttgatttatttattctgatcactgacaaaaaaactatatcactaattataagtaagttattacaatagtatttatttattttgtttatttttatatggattatactcccaacttatttctattacgaagttagactcgattttgacatagtttttttttaatatgacgagatcaaagtttgaagagaaatcaagataaagtttattacaaactatctcattaaattagtaaattatttttcaaaggagtgagaaagtgacaacaaagttaataaatggagagtagaaatatacaattcatagttaataatggtttttcttttatccaaaatatagttaataattgttaataagtagatcatgtgtcaaaaacactactcaaaaactagttctttttacagttttaaacagttgaataaagtatttttattaatttctataactgtcgtttattcgatcattgcagaacagatagtataacaccctactagtttaagca

SEQ ID NO: 99197 - DNA, 802 bp, Cannabis sativa
ttcaccaacatgtcaaaagacaagaccttgaaaaacaaatattatggtttgagttcgtacaatttactttatttgcagtattatgggtcattcagaataattttttggaaagttgtatgataaggctaagttaaaggcacgatttgtgcatagtaattacacaaatattatacatgggatatcaaactctcaaaattgtgaattcaatgagattgatcatagattgaaaaacaacattaatgatcatgttgttgttttgcatgagagtgattccactttttttttcgtttgatgaggtggagcttaaaaggaaacatgtggagaatgactcaactagtgggcttaatgtttcatctcaagtagtgaagtaatggaacccaataattttcttactgaagatgttgttggcctttaaaaaaaaatgggaatataatgggctctgttgtctaggtccatcaatcattatgaatactattaattagaattgtttgtacttagaaactcacagggctatctaattccttgaagatatttgtgtttagaagaagctcaattttttttgtttgtgtgagacaatgtgtataaaagatgttgtgggctatattaagggccagtttggcacagttgtactgtgagaaaaaacagctatagctatgctgtgagaaaaaacagttgtaacagaactgtagaaaaaagctgagctgggtgtttggtaaattaaaaatttcaaagtactgtgagttgttaatatttattataattataatgataatgttataatctagtttattataatcacaaa

SEQ ID NO: 99198 - DNA, 500 bp, Cannabis sativa
aatagtttatggacatgtacaaagaatgaacaagaattgggcagtgaagaaggattaaagcaaacaatataaacatttcggtccaaaacaaaagaaaaataagatacaaggaaacaacataaacctggatcaaagtgaccagatgaacgagcggcgaccggagacggcgcggcgacggaagtagagagagacagtcggagagtgagaggaaccacgagagggaacataatttgaagtcctaatttcaaaagttttagaaagaaaagggaccacattttttaaaataaaaattataaagggacccgttcattcttataaaactaaaattagaccccaaaaaataagaacattgccattgagcaccatcttaaggtgcataacattacagttaggggtgagtatccgatctaatccaacctttttttttttctcatctgatccaatccaattagtaattggatttggaaaatcatcatccgatccaatccaattagacctca

SEQ ID NO: 99199 - DNA, 1150 bp, Cannabis sativa
  modified_base (107)..(131): a, c, t, g, unknown or other
  modified_base (355)..(358): a, c, t, g, unknown or other
ctagagcttgagatcactaaactcaaattgtaaattgcttgaattaatgaagaaaactctaaacccttggtgctctagggattgggagagagatagagagagagagnnnnnnnnnnnnnnnnnnnnnnnnngagagagagatagagagagagttctttttggtttaatttcttatttttcaaaaaatgagatataatttttgttttgtctaagtaattaagaaataaaaaatcagattattctttccactaatgtccactaaaggacaaaaacaccctaaagtaaaatgaccattttgccctttcccacactaaaaatcatgactattctcgactattctcgacatttccaatgnnnnactatattgccccgctatactaagaaaatactatgatgtgattctaatagtcaaacaccgcgtttcaatattgtcgtgcatagaacatgaaaaattataaaattctatatatgacgtataaaatgcattctgaattcaaataaatctttgtaaacttatacttcataactaatatgtaagtttcataattaaaccctaattatgtgctaatttccaaattaaagttaaacggtatttataacttgacttgttgttggggcatgtactctttcactatagactcgaaaaatttgaagagggagagagaggatttaaaaattagagaaggaaaggaggctctcaaaactctagttatctaacagaatgaaaactaggttaaatgcattagttgttggatgagaatgagagcagcctattccttttatattatttcacctagggttaggatttaagttatatacaataaaaaatgataaaataatagcaaaaataagcatatagtggttgaccatatagatggccccactagctataattttgctatttttttcaaccatttatctttttttcactaatggcatatttttttattttaatcctataaatgtcaaaactatttatgtaataattataattaattatcaaataaaccctaaaacctcttttcttcacaattaagtcaatgcttagtgtagattaattaaaatcaattaactgattcttacaagcaatattaactcaactagtgtgggaaccatgggcctataaaatcaagcttctaataagtagctc

SEQ ID NO: 99200 - DNA, 1420 bp, Cannabis sativa
taacttaattatcattaaataaaatacaaccacacgcgaagcgcggtttgtttctttttcataaattgaaattgcacattttcttttaagaaattttgtttgaaaattggagaggagaatgtcaatgatgctttaggtttgacccccaaccattcgatcaataattgtacattaaattgtacccatttccaacaataaggtatagatataaatcataatatcattttgttaaaatcatatatatatatatatatatataattcattaatatccatattattgaagtcaaaattatgaacagaattaatataaatcaacttgctatacaaaataattgaaaaagtgatatatacctaactgcatgcatgtatagtaatttaaaaggtaatataaatttatatatattatataaatcttcaaataattctcttttgtactctcttattttattttttttcaattgggtattttttagttatacatttatgtatatataggatactatttgagtaactaactagctaggtataaatagtattatatatataatttaaataaaattattattaataattaagaacatattttagcaagaaataaaaaagattgagacgtttgagatataaatttcaaaatcaaaagttatatcttatctagaatatatatacacaaattaaaatgtcatacatgaaaatcatttacacaaaaattgcatgcatatataatattatatatatatatgcgtatatatattaacattaattatgaaaatcaagctaattaaaaataatatgatagtgttacgtacttcatgagttgactaataaaatcataaattaaatattgttaatttttttttttttggaataaataatttagtttaattattatttttagctactagattcagataatgaagttcaaattcgatattaagttggagacaaatgtagttatgtacagttgcaatgtctaattaagttggatgctaattcagacatgacaattcatatggaatctatctatcactagtttatttatatatgtatatttaaatatatattaataaggcatgcacatttcttattggttgaccaactattttccaattaattaaactttaatttcatttacataataatggcattcgaaatatttccataattattttgttgtatggcttatagaataaattgacaatattactccaaattttgtttcttgtaaaaaatattctttagaatataacacatagccaaagttgatgaataatgtttttgtgtaaaattatgactttgtttctttatattgcagagcaagaagggttgtaattggtaatgaaagtcatttaattttggttatttgctaataaactaagttaaaactatttttgactttggttgtggtcaaatttcataat

SEQ ID NO: 99201 - DNA, 655 bp, Cannabis sativa
aataagtaaaacacaaactagctacttaagccctatgaatcttcaaaacattcattaattagagctgtgtataagaatacgattttactttattttttaagtatgcagcttattttgtggaccagattaagaatttaacacacattattaattaacaagtgggccaatttcttgagtggaaattctccaaaatctagcaaatctggaggaaaagcaatatatattgatgtcaaattttttggttgtcgaataaggcttgtcggaagttagttaactatgctcaattttagttaattaattgttcaactaaaaatgctagacatttttctaaataaaagtatattttacggtagatttggcataaccatatagatatgatgtaagtttcactattacattaaataagtaactatgatagctctatttatttttagcagttaaataattattagacaattgagaattatgattaatttaaaaatttagtaaaaataattaataaattacacgtacatactaaattaattttatttatttctttaaaataataaaataaaaaagttataaatattaatatttgaaaaaattttattaaataatttaattaaaaaattaaattataactttaagtatgtaattaatctaagtcgaaaat

SEQ ID NO: 99202 - DNA, 649 bp, Cannabis sativa
  modified_base (290)..(298): a, c, t, g, unknown or other
atcgtgttaaattaaaactttgattaaaattattaaactttataaacttatatgtatatatttacatagttgggatcccaagttaaacttttacaaatgtttctaaaatacttgtatatcatgtcgcacagagactacaaaatactgtccaagatgtcttgagaccgaacactccaggtcgcgccagatcgacatgttcaatcactatctaagctcgaagctcacttttattcagccttcacctttcctttatctacacatgaaagtagcaactgtgagtcaacagactnnnnnnnnnaagcatataacaaataatatattaatgaattgtatacagacgcccataaacctatccatcaggcttatcagataagtaagaacattttttactaaggtacgaccactataccacatgcactacaggccactactgtacgagtgttggtaggatttgtcctgtaccttgagtaccactaattataccatatacacctcgcacctgcccgtactagtgttggtaatcctatactgtactctttacacatcatacacggtaccaatgcactcagtattgctactgtactagtgttggtagtgtacgaatcataaaaagcatgcatatataacacatacacataatcacatatat

SEQ ID NO: 99203 - DNA, 717 bp, Cannabis sativa
ctcctttatatatatagatatatagatatagatatagatatagatatatagatagatagatatagattttattttcttaaaataataactctaaatttttcacatatctcctagctatcacgctttttttattttaaaaaaattaacaaaacactaatattataagaaagatctctaaataaacttaatagaagtctaaaaagattaataaaaacctaagaataaacttaatagattcttaaacttagaaactatttttttttattgttgcatgcattagattttcttataggataaatagtaaacacattgattatttaataattgataaatgataaaaaaaaaaaaaaaaaacaatagagggaaaatatgaataaataataatcaccttagtactaagagactcccacattctacaaactctaatctttatgctccatcatgagagaagaagatagaaagtaaatagtaaactgaattatgaatttaagagaaatagtttaggatatatataaaatttagtaagtgataaaagaaaaaaaaaaagtcatcaaatatatcattttaaaaatttaatttaaaaaaaaaagataagcaaaaatgagattttttaagaaaatatcaaaaaaaaaaaaaaccaaaaaaaaaaaagataaaaaaagtgatatgctgttgtttttgaatttttttttattaattattgaattaattaatatt

SEQ ID NO: 99204 - DNA, 1324 bp, Cannabis sativa
agagcagcagattctataacaccgaatttgcggcatcagtgtattctcttccgaagacaccttcctccaggataaatcaactttgccttaggtgatcaatccctttttgaagaaactctaccaaggggaaagaaagatgcgccattcttagttagggagagggtatgttcacattgagtatcctcgtatgctcagtcgagtgacaaacgtacctatccccgacgtggtctaggctagagaatgggaaccggagggtctgacctcatccgggacctacctaaaaaatctccaatgttcgaaaaatataactctttttccttatagccccatcgggagtaaggcattagtcattgggaaaaatgtgtaggcagtagctataaaataagataacttatgggttaagtgggtccatagtgtttatctcaaagggaagattggtggagttacaatccactgcccaacaaaggtgttattggagacaagtgacaaaggacaagataagcaaagttgtaaatatgcaacaatttttctcttacaggtacacaatcagccaagattacttggctcttcatcctcctcaagcagaggttcattggcgcaagcatgtttggagtcatttatcagtttcaaagcattgtcttattctttggcttacaattttaaatagattgtaaactaatgagagattattgatgtgcaaaatatgtcaagaatcaagttgtgtgttgtgtgacatacatacataaattgtttgacacttatttttttttaatgttatattatagtaggagatgttttgatgagcataaaatatagttggtctggaaggtgaatagtgtactgctgaagagtataattttgagatgcaaatctcggtcaaaacagtctaagtttcaaagacaggtacttgctacatccgtggtagctatggtatatcagttatggaggaattaataagaatgaggtatttcggtccttaaaaattcaaaccatcccttctttgattaacaaaatcaaagtggatatgtcaaaaatagaatcattgttgtgttatcgaaaaaagtcagctctaaagatttaaagtgttttgagcatttttaaagacacatatgtagaagagaattggacatgtttggcttaacttctataagctttttttagcttttagaattagaaaagtcctttcataggtgttttgataaaaaatgaaaaagtttttttttttttttttttaatttttatttctacacttcaaaacaatttttttttttttttttttgtttttttacaaaaatatacataacaagttagaaaaaaatcttaa

SEQ ID NO: 99205 - DNA, 502 bp, Cannabis sativa
aatagaaaattccccaaccaaagaatccaaaactgtaacgcttctagtgtcccacaccaataaagtacctcccaatcttctccatgctggatggtaaatccaagctttaaatctagacctccaaatgttaccaataaagcttctatcaattgttgtttttttgacttcttgtaaagtaaccaaatccagattgattttacaaatagtcgctttgattgctctccttttgaccttgtccccacttcctctgatattccaagtgagtatcttcattgatatcaatcttgtatgtgtttcatgaatttgttctgctttatggatttttctgggttgctgctggattatcttcaatttgtgtagctgctgtatactttgattatcttcaatttgtgtagctgctgtatactttgattttcatgtttgcatttttttagcttaaaaaatttgtcatacgaggggtaattgatatgttagtcaacaaggtaaataagtaatcgaaaca

SEQ ID NO: 99206 - DNA, 679 bp, Cannabis sativa
ggtctgtacctttatcatacaattcaatcggtagcattttgaagttttctaggagacgagcttccgtgatgctcctaagacccgactcctggtcctaatcctcggaatccgtgagggccccactttgcttacgtacaagctttgtcagagcagcaattcggtcttccaatctttttgtatcattattaaggaggtcacgtctgtggtccctttcattcaaatgattcctaaggtcattcctacgtggcctcaccaactctcccttggctctttcatacttggcatcaagacgcttttgaagttctgcagttgacaacctgtagtcagaatactgtcccctagtctcaccgtcctggttaatggaatcagtggggcgatttttccttccctagggcttggatactttcgcaccagtccctctttatgcaacaagacctttcaaagcagaatgcgtccacatctacaggcattggtggccttctgcgtttgtacaggtttgctagctggattcacgctacatgtgctgtcgagttctagatctctaaacttagcttggaggggagccattatttctccatcttttgagaaagcttctcttgatgggctagcttttctcgagtctcatgaaactccttggatacttcagccacctcaggatcttgctcataatgatacccat

SEQ ID NO: 99207 - DNA, 1639 bp, Cannabis sativa
ttttgtgtggtgttgttgtgagaagaataaagtgaacaattttattgtgtggtgtggcattaaccacacacacacacaatgacacaaacaaacactaaaaactcaaccataaccatatgagatcttcattcttcaacttcactcctaattacttttttgatcaaaatcaagtctatatttataattatcaattaatatttctaaagttaattattaactttttaaaactattaaaagactaccgcaaaatataccaattgcatatttatttattttattaagaaaattattttatttaagatttttttttctacattacattccaatttttttttatatttttttattttttttttctttcccatccttcattcttttattttttttaaaatgtaatttctccccatcctttattcacatatcaattttattttcccaattatcaaatcatctttatatatgtcaaatttatttttataagagttctattaaaataataataaccgaattttttttttcataattatttgattatagtcaaaattatatcaatggaattatttgaggcaattaattatttttttaagtaaccattaacaggtagtaattattgaaaaatattttatatttatattgtttaccgcaattcttaaaaattaaatatttagaagctaaagaaataataaaatgcataaataaattagatggaaatttttacgtggttcgaatgttaattaatcttaatccacaagttcgtttattagcttgtaatggtgtgtttgatgtgtttacaatattttgtaggaaacattaactctgtgttcttagtttcaattgaagaataagaaagcttaaaacaatattaaagagctttcactatttaggttgtgatccccattcatatagaaatagaaaagtatttataagctaaggacggctatggacatgctcatgatggcatgacccacctagggtttctgctaaaagcccactaatagggtaaattacatgcaaaagagacctgactattgggtctcttggaaaaaattatgctcgtgttcaatagttggataattggggaccattgtacgtcggggacacatgttggcaaaaggttcaacatttaaaagtagaggcatggaataacagactagcaaaaagatatggtgaggtacacacactaccataatctggcacagggggcaagatttgattctgtgtcagaaaaagcataaccatcgttgggctatccgagatgcatctaaggtagacgtctgcaagactcttaggcggtcagtgtccacaatgggcccttcaagtacccatctgagtatcagttgggtagactctgagtttagaccactccgggtcctgaagagacaataggtcttccgtgtcgaggaagttaagataaagaaagaaaaacttccgcttatctcttagtcttaaactgtttccagatttatgagtcgatcttctctgtgactggattttagtaaaaaattttaattagtgagattttaaaattatctcttcccgccaatatcaaatataatagtaacctagtcattcattataatatatggtattaaaatatctatttcatgaagaatttttctctcgtttttttttttttttt

SEQ ID NO: 99208 - DNA, 930 bp, Cannabis sativa
tataaatgttaattctgccgtgtggcagtaaaattgaaaacaattaccccaaatgcagtatttttgtaaaatgccctataataatgatagtctgatagcattgtcctaataagaaaagcccaaagtcgatccaactctactgattaaattaggctgaaaactcttttatcagggcattcccactgatagcccacttccggttgaagcatgccataatattataatttccaaaagatataattatatatgcatgactgcatgacagtccggccagctttatatatattatacattatataagaattaattaacttcacattttagaaaagtatgtttggaccacaagtcaaatggaagaattagaagaaaagaagatggtttggtgattcacacgttgcttaagctaacgttaaaattactgatcaatcaatatatataatactaattaattaaaaagaaaaagtgataattttcatacatatgatattgaaaagaaatcagctaaagcctatatagctatagcttgagatcatggtgtgtagcggtactaaaggtgggtacttgcatctttattacctcaaataataaacttgtatattttttttccctttttgggccaactaatatatgtaaagtatggcatatatatgtgtgtgtgcatataagttgttcatattgttgagctagctttttcaaatcttgaaatccgagcgtgcaaaagtttccccctttgcaacgtgttgctttgcttaagcatcactaggatcatgtgcttatcatgcatgacatgattatactcactcacacatgccttttatctataacggtttttataattattaattaactgttcatgtttagcctctatctatatatctacatatatgtgtgctctttttgctgaccgaagcaataagcatatattattta

SEQ ID NO: 99209 - DNA, 2006 bp, Cannabis sativa
ggtggagggaaattttggacagtggatcgaattggtcttagtgggggattattgttattgtggaaggatgatattcatattcgggttgattcaagttcatcggggcatatccttgttgaggttgcgattttatgccttggacattgacatgcttttatggacacccggatgccgctcaacgaaagttttcttgggaattattacggaatataaaagctggggtgcatggtgcttggctgtgtattggggattttaatgaaattgtgagtcttgctgagaagactgggggaagaagaagatgctcggttgctatggaagactttaaagaagttattgatgattgtggattgatagatttttgttcggtaaaaacagagctcacttggtgtaatgaacatgaatctaaccaagttatggagcgattggacagaggattatgtaatgcggagtggttgagaagttttgaaggagcggatatccaagtattggattggtgggagtcggatcatagacctcttattgttgacttaccggtggatgtggaacgagatcgatgtggtcaaactaaaagaaaaactcggttccactttgaagaggcatggtgtgatgatgatgaatgcaaagatatcgtcctcaatgagtggaaagatggtacttttggtggctattctaggggttttaaaaggaaaacgtttcaaataggaagaactttgaaggagtggaataaaaagaagaagaggctgttgaatgaaaaaattgggaagttgaaaaaaactttaaatgaactgtcctcacggcaagagttgggtacttgggctgatgttaaaagagtggaaagtcaattgaatggggctttggaaaaagatgaacagtattggcgtcaaagaagtcgagctttgtggttgaaatggggggatacaaatacgaaatactttcaccataaggcttctaaaaggaggaaaaaaaatgagattaaaggcttgtttgatagttcgggggtttggcaaagtgatacaaatatcgttgtgaagctggttgaggattatttttcctctctttttcaggtttctttggctagtgatgaccatattcaggaagtattggctgatgtgcaaccgaaggttactaatgagatgaatgacattttgcttgctgaatttacggaagaggacgttgttagagcggttaaagacatgaatccgactaaggctcctggggttgatgggttaccggctttgttttatcaaaagttttgggatactcttaaggacgaggtaattgcggtttctcttcgttgccttaatgatggcgaggattttagttgcttaaatgataccatcattgcgttgatacccaaagttgagaaggctgaacgggttgaggaattccggccaattagtctttgcaatgttatctacaagattatctctaaatgtctagctaatcgattgcgaagtacgttggatggagtgatctcggaaactcaaagtgcttttgtcaaagggcgtctcatacatgataatgctattattgggtatgaagctctacactgtatgcggaaaaatcggtttcaaaatggacaaaaggtggctctaaagttggatatggcaaaagcatatgatagggtggagtggggatttttggagatgatgatgattcggctgggttatcagagtcaatgggtggaaaaaattatgaaatgtgttacttcggttagctttgcatttctcattaatggggaagtgaaggggcgagtgaggccgggtcgcggattacgtcaaggtgatcctttgtctccatttctatttctgttttgtgctgaggctttctcttgtttaattcaagctcaggaaagaagaggattgttgcaaggtattaagtttggaagaacggatttgtttgtatcgcatctgtttttcgcggatgacagcttgatcttctttgatgctacgatggagggctgtcaaactttcagggagttattgaataaatatacaaatgcttcg

SEQ ID NO: 99210 - DNA, 547 bp, Cannabis sativa
aaacatatatttttattatttattatgaatcagtgtttgtattataacttttaaaccaaatacaaagctaacagcgcctaaaataaggcctgatatcatcttatatatatttgtattataacttctcaatctagtctaagtcattttattttcttttcttttggtaaaataaaaggaattctaattttaatattatgtaatacaattagtcaatgtcggcaaacatatcactttctgaaagctaaccgtcgacttgttttattcatattatataatcttaattctcttgtacaaccttacaagattatacaatctctatatgaataagaaactttcagatatttattaattatacttccataattaatgtatccatgtatcatataattgcattttatatattctgtaatatattatccattaattacttacttttagggcataaattccaacaaagacatcttatttgagggccccatggcacctctaggaaacttatgaaaacactaaccaactatttggtaccgggacccacaccacagtgtgc

SEQ ID NO: 99211 - DNA, 625 bp, Cannabis sativa
atataaaataacattaaaaagaaacaaatacaaaaaataaatttaataagaaaaaaaagtaagagctactataaattaattgcaagcaaaatgaacacttacaatctttaaaggccaatagaatatcttcaattacagattttgcaaagctggagtaccctggccaagatagactagggtttcaaacttagagtgacttggaggatagaattagccttaggttttctaggttagagttaaggcctttatatagaaaagcctaaaccctaatttacacctgaaaccctaggatatttgtatattaaagtagttaattacaaaagactaaaatgcccttaaacatagatattttctagctattttatttggcactgagggcccaattcgcagtccgacttgcagtccacgagtgaaattgtataaaaaatcttgtcaggcccttccgtggccggccatgctcctaccagggtctgacaggtcatgttcctaccagggactggtaggtcatgttccttttagctttaccaaagggaggcctgttgggttttatgccataaataaaactctatttcgatgtaatctctatcatttaaatatcaataaagaaacataagtattttcatca

SEQ ID NO: 99212 - DNA, 704 bp, Cannabis sativa
tgggatcaaaccgggactcaggacctgggatcagactgagactcgggacccgagacccgggaccccggatcgaactggggacctggaccagaccaggacttagacctagaaccggaccgggacccgggacccgggaccagactgggacccgggacccgggactggactgggacccgggacccaagactaagactggaactgtgacctgagaccaggaccgggaccgggactcaggactcaggacccgggacctagaccgggactgggaccgagacccaagacttgagaccgggacccggacccgagacctagacccagacccgggacctaagacccgaacacggaccctgacccagactcggatttgaacccaaacttcgacccaaacccaatctcggacctagacccgagaccttgactcgaacccaaactaggacccggaaccaaacttggacccgaccagacccgtagttggtgttgaaatagagtttattaaaaatatattatctttacacaatctattaatacatgtcaataccaaacacagtattgtattaaataatactaatacaaaattaaaatgaatataaaattataagttaatattaaaattcttaaaaaaaaaagttgggtcggatcagatccgatccgaataagtccggtcagatctgacctgattagagtatttgatctagcggggcggg

SEQ ID NO: 99213 - DNA, 557 bp, Cannabis sativa
atataaaatactaaacgggtccctttcgggcaaagagtatgatccccgttcccgccccgtttaacattcggggacaaaaagtaattctcgttcgcatactgtttcccatttagacgggccgggtccttgcgggacctcatcccgataggggaaatgtgcatccctaattgcaagcatgtctcatttattttatacgttagtaaaatagattatttgactattcttttacttttatattgtaaattattttgaatttttcaaaattttgtagagtgtgttaactacaacatacaacactataaaaaaaaaattatacttaatttttatcttgaatactaaaacagtataggtatattagtgcacccttttctgtagaagcttcccagaattaatatattttgcatactaatatatattaaagaaatggtgcactaatgcaccccaatctattttggcattcaatataattttttaattcatttttctcatgatcatatatgttgtaattatttaagacatcttgtaaaattttaataaattcagaataatttacaata

SEQ ID NO: 99214 - DNA, 1485 bp, Cannabis sativa
attttcaattttataaaaaaataagattagattgtcatttactcattgtgagaactgattctctagattatcttttttgtcctttattggatagaatgaccgaagaactcttatcactttgctatgctttgcttcaagttcagatttgatcgttcaacttccacttctgtccaaaaacaaaagacaaaaacaccaataaatgtattgatcaggattttatacatagaaaaatcaaggcaactcatcaataactccagttttgatatgaattcaagtagtggctagctagctacaacttattgtgtcctcacattattttcactaaatagaagcattatatataatgatgatgggactttagatattgttaaatagttatgtagggttattttagtcatttatgttagttacttatataagatttttttttattagttgtattttttattttttattttgtaatttaaataaaaccctaattttcctgcatctcttttttattagttattgttctcttcataaataattatcatgatattagagcaagttttcgcaggtgtctgtacaattttcatccgtatagttcgacattccaattttcggtatagatttctttttcttgattctcatagaagatttaggtattgatttttgcagtacaattttgaattttcatcagttttgtatttggattttttttgcaatttgttcttttttctacaatggctaccaataaagatgattctcttcaagcgatcagtgtgagattggatggaaagaattatttgtattgaaattgtgttatgaaaaaaatttcaaaagaaaaaaagatgtggggttatatttcttggacaaagaaaaaactagcaaatggtaatacaaatctgttagaaaattgggaagtagacaattcgaaaattctcacctggataaataaccctgtcgaacaatttattggtacccaattagcaaggtatgagacaacaaaagaactttgggaccatcttgcgagattgtatacacagtctaattttacaaagcagtttcagttgaaaaatgatattagagctattgaacagaaagatatgagcatttcaagagttctattctgtaatgatagatctctgggattaattagcactcaccgaattagtagagctacgtgcttttacaccgtatattgctcgtagagaggaacaaagattggttcaatttttaatggttcttcgtagtaattttgagggactttatggttctccacttcttttgattgattcagtagtcagtgtattattagcagatgaaattcgtctcaagtttcagttagagaaaggaattctcttaacccctagttcttctgttttagcagttcctcctactacaccatttcctcaagaagagaacaaacctcacacaaagattggtattgatgagtgtagcttttgcaaatagaaaggtcattggaaagctcaatgtcctaagctt

SEQ ID NO: 99215 - DNA, 574 bp, Cannabis sativa
ttttttttcataaaaaaagatagagatgaagataaatgtagtgaaaagcctaaattaaatcaaaattcgaagatgggttttcctgattgaaccaaaattaatcaaaaaacgttccaaaaatcgcaactttgtactattttctcggaaaccaaacaaaaatttcaaaccattaatttaatttagaaaaaaaaaaagaacagggtatcattcttcttcttaccttagctaatgcttttttttctgagagaactgaaaacgcagagagctaagcccaaacgctaacgagcgaagagactttcttcccttctggtgaggatggcaatggtaagagaagaagacggtgatcgttttcacaacccagagacgcaaaatacgatgccgttttacgcaatccttttcttctgattatttgattgggccgtaaatggagtaatacttgtagcccagcccggcccatgtctataatgagcttggttagttgttttaataaactgccttattagtaagtaattaataattaatctataatctagtatcaacaaggtcgttgtagtatagtggtaagtattcccgc

SEQ ID NO: 99216 - DNA, 737 bp, Cannabis sativa
acatcctttccttttgcctctcttcccaaatctgtcaatgagtcttattcttactctgactttgctgtttcatctcacatccctctcactaatacacatttaaattctactcctgttagcactaataatgtcatgcctgctatggcaagcactgctgttaattcacaggaacatctcaactcagcattctcaatgccacctactggtgtcactcaacagcaagaacctgagccaattgtcccagctcctgttgaagataccaacactgattcatcagctgctgctactgttcgaacagaaattgcagcaccagcaatcaatcctacagttcctgcttcaacatctgatactcgttcattagcacctgttgcttgtgaacctgtttctgctattgctgtccaaccagaaatcaccaccaatactcatgcaatgcagacaagggcaaaatcaggcatccacaagcccaaagtctatctcactaccaaaattccaagaaatgtaaaagaggcattgcagcaagaacaatggaaccaagcaatgacagatgaaatgttagccttaaccagaaatgaaacttacacgcttgttcctctaccagaagacagaactcccataggctgcaagtgggttttcagagaaaaagaaaattctgatgggacacatcacaggttcaaagcccgtcttgttgctaagggttttcatcaacaacctggatttgatttcacagaaacctttag

SEQ ID NO: 99217 - DNA, 528 bp, Cannabis sativa
  modified_base (500)..(501): a, c, t, g, unknown or other
gatccacaagatcaactattaatttcctaaagaccaagacattagtatttcccagagactcaagattaattgagaagtttcggtatttcccaagactcggatgaattatcatttgcaattaatgtaaattatgtactttctccataaaattactagtctattacgctgagaataggagctaggttactatatcattgtaatccataagaatatatgagaaacacaattggccaagttccatttgaacttgagtattctttagagaaatacaacaaaaagagaagtaagctattacaataaaattggggttgaacttctataaatcttgatgtcattttaattattagatctttgttctcacaactataattatacagattgtcgtattcttaactccatatcattgactaaatttaagtcaacaaatattaagagataattttctcattcttttgggttcgcttggaacgtcgtaataggtcgtattgtattgtattgtnntatattgaattggattatatatcatat

SEQ ID NO: 99218 - DNA, 890 bp, Cannabis sativa
ataaatctaaagaaagaataaaaaaaagagaaaatcagactaaaaagtataagaataaggtgaaaaattaagaagagaggttgaaaaaattacctgatagcttccaataacatggacaacaacgaaaaggttagccattccaatcaaccaagcaggtttctccaatgagataagaatgttatcttcaacttggttaccaaaaatccaataaccaatcaaagcaactgggaaataacacaatgcaaccactatataagccacaataactcctctccacattggacccttagaaggtttctcgggtgttgatggaattgtagcttgaatctcgagcaccacattgtgaccagcataggcaaatgcaacatctcccaatgcagtaaagaaatctaacaccacacccgtgttagttgtcgccttgtagctataatctacatcactctgaacacccttatcaacagaagctgaccaggcaatggtggagtaactcaaagacataacagccgcacacaatgaaacaccagagatggagttgaagttagggagatgagagagtacaaagtgaacagaggcaaagatcataatgaagtaagtcaatttgatgtctttacaatctttgcaaacaacatcatgaaacttcttaagtgattttccaccagtgaccatgtaaacaatgttgacactaacttcaacaatgagctgttgaggcacaacaatgtaaagaccaagcttttccccaaatgcatgctgacccaattcgtgatatctgtcgaatcgcttacccggaaccatttcatgcatttcaaccatttgccatagtgtgtacaatgttatgatccatgagaggattagtactgcaacaccaggtcccctgaaaaaggttttaagta

SEQ ID NO: 99219 - DNA, 856 bp, Cannabis sativa
ctccttcagccaactttgcagctcgtggaaggaagaacttccctccatctaagttaggcagatcctcttgatctcgtggccgtggccgaggccgagggcgtggaaatcagtggtgtatcacttgccaactctgaagtaagcctggccatcttgctagtaagtgttgtcatcgctttgatgttagcttcataccacctgcaaaaaataacaaccaaaaccagaactcctcttacaatagcaacaacactgaacatggcacaaaccagcaggcctttgtagctaattctagccagaaccctcagtctgatgatgctaatttgtatgtggacaccagagccacaaatcacatcactcacaatgccaacaacattcaagctctaactgaatacaatggtaagactcaactgatagtacgtaatggccaatctcttgctaactctcaggtgggctattcggttataaaacctgttagtcaatccaaacctgtgaaattgaataatatcctatgtgttcctaaaattgccaaaaacttattaagtgtatcacaactcactagagacaataatgcttatgcccaattttatgctaactcttgtgttttgaaggacatggattcgaggaaggtgcttcttcaagggaagcttagcaacggtctttatcagctcacatcaccaatgtcacagcctaaaagtcacaatagcagccatcaacctacaccaaaatcatctaatagttgtcgtcgtcttaagtctaatgagtcttgttttttattttctgtcaatgaaccaagtttgtggcatcataggttaggccatccttcctctaatgtactcaaacatgttttaatcaatgaaaa

SEQ ID NO: 99220 - DNA, 1864 bp, Cannabis sativa
tacatataaaaagaggtatatttcaaataaatataaaattataggtaaatttaattaattgattaatgaaagaggtatttttcaacttaccccaaaaatttattggaggtggggattttcaatggggttcgcctatatcaataagtgtgttgtattggaacttatgtgggcttgggaaccaacagattgttcaattcctaaaagagatgatttctcaaaagaaacccaattttgtgttcttatgcgaaactaaatgtggcaaaaatagagctaattttgtgggccggctattgggctttgaaggaacatttgtggtggaggcccaaggaaatagtggagggcttgttatgttttggaaaaaggctgaggagggtcgggtagtgggctactcaagaaaccatatcgatttctctgtcgaagtggaagaagggaagcactggagacttaccggaatctatggagagccgaatgataaaccttaggcgtaatacctgggatctgttgcagtcacttgtggatgcttatcctacaccatggtgtgttataggagatttgaataatatcatgcatcaaagtgaccagagaggaggtcgtggttaccctcgttggctgctggacgggttcaggaatacagtggagaggtgtgggttgactgatatggagctgttgggccatcgatatacatgggagaggggacgaggtactcggagatgggtggagatacagttggacagagctctagtttcaacaaactggtatactatttttcctcagtctcgtttaattaatttagagtcttctccttcggaccacaatccaatttttctggaattggaatgtcctcctgcttttgttcaaaattacaatttcaagtttgagaatgcctggttgaaagatgctttgtgctatgaaattgttaaaagctgttggaatgatgataacaacagtgacatttttgcaaagattaattcttgtgcaattgctctggcgccttgggggaaagaaatcacaggtaatttcaataaaaggatcaaaaagtgtcgtgcagaattgaagttgttgaagaacaagagagatgagttgtcagtttcaaagtacagtgaggtgaagaagaagttgtttacaattcttgatcagaaagaggccttttggaagcagagatttaaacaattttggcttaaaggaggcgatcaaaatagtaaatattttcatagagcagcgagtaatagaagaagtcataaccgtatcataaaattgagaaacaataatggggattgggtggaatggggtcacgggttggagggagttattgtgcaacattatagttctctctttttaacttctggagcagactttgatgaggtgatagattgtatacagacaagggtctcagaccatatgaatgaagagttgaatcaaccagtttctgaggtgaagaaagctgtttttgatatgcatcttgataagagtcctggatttgatgggatgacaccagccttttatcaaaaatgttggggcattgttagtaaggaagttgtctgcttagtccaacagttctttaccacgggggagtttgcaccaggttgttgtgaagcaaatgtggtactgattccaaagaaaaagagacctgaaagtatggctgaccttctgtcacgacccgagccctaggctgtggcagatgtgtaatatccataacttaggtggtcaaaagtcacactttgactcttgtaggaaaataaagcttataaatgatccttttatatatatattacaaaatactaatttaaaagatatggattaactcctatattaataagaaaatattagtaacaaaatcaggaccactcatcaatataaaagaaca

SEQ ID NO: 99221 - DNA, 2288 bp, Cannabis sativa
ttagaggagtgggacgccccgccaagtttcccaccatgggctggttagtcagaggagagtaaggaggaggtggcagaagactcgagtgggcagagctagatccctctttttgagcagccttggctggggattcttccctataagcccccattggtttcctcttcaaaaaatctcataatttggaagcaatacatgaaaagacactagatgcataggttagaagacatatcttaaagaacaagaataagagtgcaagttggaaaagatctttacccttggacagctcgggattatcatcctaaagtaggttgtacggaatgtcttcatcatttgaagaagactcttcactgttttcattaccaatacctctaccttttccctccacaacagttgggcgggcaatcctaacaaactctaatccttaagcccttatgaggataggagcctcttccaaagattcacctctctaaagcctcttctgaataactctctctctctctctctctcttggtttctatcttcttcttaaaaattttattagagggaacttcgacttaaggtactctctcgttgccaactcacaaatattttgttttgaagccaacaaggagaggatatggttagctctatccctaagcttcaatgtaggtattggccggtgaaaggtgggagccctccaaaatgaggtgcacaccctctgcaccatatatcataaaataatccctggaatacccacaaatcttgaatatgaaagaataatttatgctactcaaccaaatgaagcctagctggctgaaataaaagtaacctcgtcggccctaataagggttggatttcaaattaaaatactaactgatcttgaaaggagtaggttgcggccagcccatctaagcgtataaaatgaagagagcaaccaagaacttgatcccctttttagtcaactatgctgggtagatcccttaatagttttctatatccctgaagtatgaatgaagtggcaaaatagctccttgctctgggtgggaaccaaaccatgtcatcctgctcataggaggggcatgtggaaggtattcctcacctggcaggtcagtgtttagatccccagccaactttttgatcagaaggttcttaaaccttgcaggaagaagtttggattgaggagacacccaagcagcctctggctcccctctttgaggaaaatgctttggagttgccaactcttcctcataatgatcaatccccacatggggtggctccccattttcattaagaggctccctagcctcattgtacccctaggggattatctgtgagcacatcacactttttgactatcctctaggcaggccaccattttaccttaggctctacaggcctctcaacctgatcaacacgcctctcaacttgatcagtcagtgcaacctatcccattgccattatttagcaatataggggtcagttgaaggggtgtcatggtaggtttactttgtcttggcgaggattggatcctagccgatataccgcgcaacagtgatgacaacttagcctaaaaagggtttttttagtaacgaagatctacatccctttggcatgatgtctgtgacacctagacacctagctggacgatatatgtctaagaagttttgaggaatttcctccaacctcagttcagttgctaaatgaaatgtccatacatctctcgtttgatctgttcaaagtagtgataatgttgtaatcttcggcttgggggaaccactattgacttctaagtttgaataactacccaaatacctagccaaagaatcactagatgatgaaccacttgcttggagtacgagttgatcctcaaagagaaggctgaggaggtctgcgtctatccagtgttgacctccttagtagaagcgagggttcattttgcaaaagggaagagggaggtgaacatccatacaacataaaaaccatacgggcaataccaaattagctggtcacaataaaaacaccatacatagattgaccagggttgttaacagatctaaataacctattctacaaaaaaaccatgaaaaccaggttatttttattcttcaaaacccatgatcaaagatgtggaaaacaaggaaaagattcaaccttttttaaggtagaatccctacattattctaccctaacatgccttgataacccacgaagggtgggtgtggaaggaagtggaggcttgatataggtcttttttatttaatttcccccccaaaaaattaaatggaaaatgcattccctataaaatttct

SEQ ID NO: 99222 - DNA, 517 bp, Cannabis sativa
atcaccaacaccatcacttcgaccctacccgagatgttcttcacaaggtccatctcagttcattccgagatgcttctcacttcagcatgtgcttttcataactcatcaacttcatgatcttgacatcagcacgtacccctcaccaacattccagcatgtgcttctcatgatgaaaacaagctagcacctgtgattaaagaatatcttcagcagtttatcattttttaaatatatgtttgaaatgttattctattattattttgtattttaaatttaacttaactatgattaaggtaagagataccttgggttaagaaatctatataagaaaggtaaaacacttgaactcattctcatgaactcccacttctcaattgaactcttagagaatataactctagagaactcttctcaaatattgagatcaatagcactctaagtggagcaacccattaccgttgaaagaaggtgaacatcactataaaaattctattgttcatcattaccaaattttatt

SEQ ID NO: 99223 - DNA, 504 bp, Cannabis sativa
ttaagaatgtggctgcatggaatagggttgctatgggaaaatatgtgtgggaaattacaaacaaagaacacacactatggctgagatgggttaatagtgttaatctgcataatgaagactggtgggcctacaaaacttcaagtcaaagtagctggtactggaagtttttggttaggctcaaagatcaactcaaggagacatcgggtggagcattgatgcaacaaaaatacacagtgtctcaagggtatagcctgatgaaaccagcaggaacaaaattgcagtggcctaaacaagtctggagcaggttaaattcaccaaagcatagctttgtgctatggttatcaatgcaccagagattgaaaaccaaagataggcttttcaagatgaaaatattggaggatcaaacctgtcttctttgctgtgtacaccaggagtctgcaaaacatttattttttgaatgttctgtaactagcagctgcctactttgtgaaatagtaatgtgta

SEQ ID NO: 99224 - DNA, 640 bp, Cannabis sativa
gtgccccaaaaggcttctggaatgctgtgtttcataatcattagactcaagcgatttcaaagatcccacctctcaacccttttatcatcatgggaatttttcttagtgagaggtgcaagttgttcatcctttattgcatggtataaatccctacattccaaaactaaagtaagttcattttttaatccttaaaattggtctcattaaacatagcaatataattaatattaacagatattggtcacatcaatgtacattattaaacaatgaattcaaaaattaattaatcccatctcaagatactaaggacacaataatatcaagtccttggacagtaatattaattgtaagcgatactcttagtgtagcaatcaaatatttgacaataaaattgtaccaaacaataagtcaatatttggactgaggtactgtacacacaaaatatcttcacagatgtgtttgaaatctagaaaaatatttacttatctttcggttagttaatatatacatcaattacaaatacacaattatcttgatattttaaataaattaatctacacaacaaaaaaaaagtcactttaacaacatacactacaacattaaggaccaatagcggcgggcccctcggccgctattggtc

SEQ ID NO: 99225 - DNA, 525 bp, Cannabis sativa
ttccccttgaacgacatcatgaaccattactttctttgcaccacaagccaagaccgaaccagaaacatcaaacagaaccacggctacagccccaacatccctgtctgaagcaaaatccacaaatcctctcactcttccaggcctcgggagaccccatctgaattccgccacaccatgacataactccggtctaactcctttctcaatccgaaccctgtcgtgctccgcaaaacagctctcaatactcttttgcaacatcttaaaatccacaggcaccccattatggaaggcatcattccggcaaagccacaatttatggtacagaactgcaccataaagaaaaaagctggacaaatcctgcgaatggagaagatgatgaaaaggaggctgagagagccaagcaaccagctctctcccgttgctaaaggagagagcttcagcccgaaggccccatctagaagagaaccataaccatttcgtgacagaacagccagcaacaaagtgatctatgacatccccaccttc

SEQ ID NO: 99226 - DNA, 875 bp, Cannabis sativa
cagtctcttactccattcttcttaatgggagtcctcagaagaaattttatccgggaagggggttgaggcaaggggatcccgtatctcctttcctcttcctcctttgtcaagaagtgttgtcaaaattaattttgaaggctgaaagtaatggagacattcacgggatccagattgctaggacggctcctcctatatcccatctaatgtttgcgaatgacactattctgttcttaagggcaaatgagaaggaagctactaacatctctgaaattctctctacttatgagagatggtccggtcagaaatgtagcagggcaaaatcgagtgtgctattttcaaacaatttgaatcacgaaaggagaactactattctgaagcttctccaggtccaacaggcttcgggggaggaaaatatttaggtaatcctttcatattcaaaagaaggaagaaggaagtctatgagaatttaagagaaaggatgaaacaaaaactggaagggtggaaaatgaaacttctttcctttgctggtagaactactttggttaatttagtattagcaaccatgccagtttatgcaatgtcaacaaacaaagttcccctttcagttagtcaatctctagatgctttggcgaggaaattttggtggctggggaatgtggaaaaggaaagattcttggcattaaaatcttgggacactatctgccaaccaaaacaatctggtggtctgggtttcagaagattcgaagacatgaattgggctttactctcaaaactggcgtggagtttgggtcaacaaaaaaaagaagccttgggtgaattgcttgcttcaaaaatactgtaggatccaaatattggatattattttaccaggatct

SEQ ID NO: 99227 - DNA, 557 bp, Cannabis sativa
cgtggcattgtttatttggctcgcgaggcatcttattcaattgttgaggtgtgtgtggcaaaataagtaaactaacgactattaatttttgcacaaactttgaggagaatatcatagtgtgatttcacctcgattctaaataatgcactaaatgttaaacgaatggccttcctagatgttggatctattttgtgttttgggaggataacgcttgaccgttgacttagatttgcatggatcgtcttttatagatataaatacctttaaacaccacattttaatacttttacccaaaattttaaaattttctttctcaaacccataacctttgagagccaacaaccataattagaatcgtgcacaaatcgaaccactttggagcgtgatatatatttttgtattcaacttcttcttattcgaatcaaaacttgagaattttcaggcacaccacccccagtgatcttgactgcatcaccagaggaagttgaaaatctggatataaactctaaaatgacccccttatcgaccagaccaatgccattacagagaggcttgat

SEQ ID NO: 99228 - DNA, 1768 bp, Cannabis sativa
ttttttttccttcttttctttttttgaaagaagtccccatatgtacagaactacagaattctagacaattttagtgaagagaagacatgacaaccaaagcacatgaaaaagcatcaaaatagaattgatttttttttttttcaaacacgtttttcaataaataatctaacttcctaagtgactggagaacttattcaccatctcttctgactcactcctgaatccaagacaaaagccacaaaccacaaactatttggtttgatattttttttactaatagaattccaacaaaaaggcaatcaagattttataataatttttttaaaaaaaaaaatatgtgtgtttaaatataaaagttttaaagattatagaacagtgcagattcaatgcatcatggaaacttgaatgtgcaacagaatattagcaaaagcaaagaagatccacataaattgaaataaatgaatagcaattattaccaacatccaattgccctgatggtttctcacactcctctggctggcctaacttttgcctttttgttggcacatcaccagaatcatcacccgcttcatcttcatcctcatctaacttaactggaggagaagcaagctttgacttctgcttcaaactgaaagcaagtttaccacttgaaacagattgtgtactcttgcgtgaatcagaaccactggttttactaatagaagcattaggagtcaaactagctgatacaattttaattggtttaggatcccctgaaacaaaagcctttttgtccttgtcctgttgcagttgtttaaacctttccatgaatgaaccatcattaacaaataggctaggtggcactcctttgtccatgggcaaagagtcaagtgtgggctgtctagaaaataactgtttgacacaagcaagcttccaagctatttagatattgaactgataaagcctaatctcattttgatatgcaagagtgtaatgtcaatgaagcgtatatattcttatgcaccctgacatattgaaatcaatgtatcttaacaaagtgtaccttccatttaaaaatattaccaatgtatgaaaaataaaatgctattacaagccctcttccaaggggtttcaaacacagagaaacaaaagctagacaaaataaatataaaatctgtttgccttggcttttagcataaataccatggatatcaagttgacctttagccaaaatataacatattgctgagtcccaaaccccaaatccaggacaaaaactgaagaagataattttaattttttttacacaccttacagaaatgaaaattaatcaattaaagaagataaaattcataaaccctaaccacccattgctaatcagatcttaatactaacctcaagccaaaactgaaactcgacaacatcaaaacagaaggcaaaagaagtcagtcaatcataacattaaaaccaaaaaacatcaaggaagactaatcatatgagccaaaacggaaaaccccaaatcacaggaattccgagtttaagaagaagaaacagcatgataaaagccaaatcaataaagcaacatgcacaaatgtagaccaccatgaccaaatatggattgaatctaggttttggcaattcatcttaaacatgtggaccttgtgtcaaaatatttatgacacagtatgattaaagtagaagcacgacacaattattcagtgaatcaaaaacctaaaacatgaatacagtcacacaacatgcttaacatgtataataaacagtgacccca

SEQ ID NO: 99229 - DNA, 688 bp, Cannabis sativa
ttggtgctttcattgagagcaagggtcataaactcactatttacttcaaatttagtcataaacacgatggtggtacggactcatagagatgtggtcgatccagcaaattcactggcactggatcccacattgcagaatctaggaaatgtaagggttccaccagccacaaatcctgaactactgcgaattatgggtcagggtgtgacgtgtcctttcaatggaatcgcacctggtgtgcaagagactagaaatacaagtttggcaaccaatcagggtattcccaacactagagttccgccaacaacaaatgttcgaacaatagtaagagatgacaacgagatttagaacctccgtgatgctcttggactcattcaaggccatactaacactttgcatcacgatcaggaagagctccgtgctgcagtgaacctcgcatttgaatagcaaaggagtttgttaacaaaatggagggataaagaggtggaaacattgagggctcaacaagcagccattgacaaccgaagatcaggttactaatcaacaacctgcaaccagcattccactgggtgagtcagacgaagatcaaccagggaatgcttctcaaacgctgaacggtcagccgcccaatccctggtcacaggttccacctgtgggccaagtggtgttgggttttgtgccctagataaaa

SEQ ID NO: 99230 - DNA, 730 bp, Cannabis sativa
agtcaaaggctatcatagcacactcagccattctataagggcaataattcagctatagaaagggtttcatattagaaaagagttgtgaaaagggaaatataccagggttagcgaaatggcatactgaaaaatctctcaagtcgatacgtttcattaaagaagcagcctttctggtttgctcgtcagttgctcaaggtgcagcaacacttgaatgaagctgcagagtcatagtgtctatcagaaatgaaattaccagtaactctcaaatacaatcaacatcttccttgcctcttcattgtctctgatatcatctgtgttgaacaacctattgtaattaatcataatatttttcctctttgtatgtcaaaaataggatacttatcaaacaccacaagaatcaatatcaactgtcaaccaaagcaccacaaacaatataaaatacataaatcaagcataaaagtgagacaccaagatttttacgtgaaaacccaatgcgggaaaaaccacaggaccgtagtccgcacaaatcatccactatcaccaagttcaataatgaaattacaaagttctcctctagtaaaactataggttcacaacaacaacaagattaaacaatcttacatcaccaacacaatcatcatcatcatcatctcaaaagatgaatacacaaataagaaaaagtttgggtctcaccaagtgggtattatagaagagcatcttagagaggaca

SEQ ID NO: 99231 - DNA, 617 bp, Cannabis sativa
tggaaccgaaaattcggttacggtctggtcggtttgatggtcggtttcggtttttcggtttttatgaacacccctagtaccgtctcttgaccaaactgcagacattttcaccaaatgtctctcaacagatcgatttatctacctcaaagacaagctcaaagtgtgctcttcaccatttcgcttgaggggggatgttaacctcagttcagagtttgttaatagttagttaatttttctgttagttaactaatgtaacagtttttctgccacttgtttggctgttatcttttcttttctctgtgctgtttccttttcaaactctgtaacaaactatatgcctctctatataaagctgctctcatccaagacttggttaacttttacaagtcttgtgattcttctcttagacagaatccttgtagaattgtatagatgagttcacattttacatggtatcagtaagcctttgatcaacattgttaatggattctcgtcaccctgaatcccccgcccctgcttctgccgcccctgctactgctgctcagattccggcagctccaccagttcaccaatggaatcctttccagaattctctgaattcttcccttactgttcga

SEQ ID NO: 99232 - DNA, 805 bp, Cannabis sativa
tattttttttttttccacaacagagtgttcattataattacactataattttaaaaaaatcccaaatagtttatagtgttgaaagtatatttatagttttttgaatatgtatggtgaactgaaatagtaattttgttgttcatactataaactattcgatttcttttttataaaaaattacaaatttaatattgtaactataataaatattactataaaaaagttataaaaaaatattttacatatattttcagacgcagaaattaaaatagaaagttaaagtataattttgcatttaaaaatttgattaattataagagtattagaacttttttacttaccaattgatgctttaatgaccaagttgtgtcttcctgcaaaagatccataaaatatatttaattgtaagtacactatcaatttgtgtaaacataatacaaagagtgtattgtcattaatattttgttttgattagatcactatagatttctagaatcaatgtaattagaattagaaggcactataaaacaaaatttatttttagttataataaaatttgtgactaaaaataaaacaatcgtgactaattataaatcattatttatatattgtgactaaaaattttgtgactaaaggtattagttacaaaatttacaatttgttgtaactaaatgtgtttttagttacaatacttgttgtgactaaaactaaattagtgacaacttatatttaaatattatgttttactcacaagtaattttttgttataactataagtattttgtgactaaaaaattgttactaa

SEQ ID NO: 99233 - DNA, 542 bp, Cannabis sativa
ctaaacctacttggaaggtttatgtagatggcgcatcgaatgaaaaagggggccagagctagagtgattttaatctccccacaaaggcaccagcttcaaagtgctctacactttgaattatgtgcctcaaacaatgaggtagagcatgaggccatgttggcagggctaaagttagcaaaggaattaggggcccaacaagtgaatatttacagtgattcccagctggtggtgaatcagatctctggcgactatcagacaaaaggtgagcgaatggctgcttatgtcctaatgtcacgcgagttattgcaaggattcaagcactactagaaaaatgagttttagtgatacacattgagtgactctaaaattatttagtgacacttcaccgtgcgttactaatgagggtgactggaaagacaatttttagtgacacttcacccatgtcacttaatccttttacactcactcactgcgggtcactataggcgtttaaagtcaagttttgtcagactaaaaaagtaacagctacacacaaaaagtgt

SEQ ID NO: 99234 - DNA, 605 bp, Cannabis sativa
tataatgaacacacattttccattggattgtgcaacaagattggttatattgggcatagacagtttcttgaaatggagaatccaaggcggagaagtaaaaaatatgatggaaaaattaagaaaagaccacgtcctccagaaatgtcgtgggacgatgttttagctcagctggagcagatacaatatcatttgcctagaaaacacaagcaattggcagagtcaaacgtaaacgttctgtagctgagttaaattagtcagagaagagtatattttttgagctagggtattggaaggagatgtctctcagatataatctcgacgtaatacatatcgagaaaaatgtgtgagatagtgtacttggaactcttttaagtataaaaggcatgtccaaggatacagacaaagcaagatttgatttggaggatcttaaaatacatcgtgatttgtgtttgtttgaataccgtaacatgaattggaggaaatcgcctgctaattatatgcttgtcttcctgaatgctatgaattttgcaaatttattaagtctgtgcagttcctattgtgatatttttcacacgcaagtgcacgttgttggaaatattttacca

SEQ ID NO: 99235 - DNA, 607 bp, Cannabis sativa
  modified_base (128)..(140): a, c, t, g, unknown or other
gccaaaagtaggccagacgagccaccgcacaaccgctggcgagggacaccaccaccaccaccacaagccttttctgaccccgaaaacctcatgctaaactccaccctcaagctctctctctctctctnnnnnnnnnnnnntctctctctctctctctttattgtgcacggtggtcgagtgatctagtcgtggtccgatcgtggtgggtggtgatctgttggtgtggttgccaagtttaagaaaagggaaggaataggagaagggcttctatgtgctctaccgctgtcactgtgggtgggtgggattggcctgggtagtttatgtctgagagaggggaagaaaggagagagaatgattgagatggaggctagggttgtttttttttttggatatgagaatagctcgttttttttttcttgaacaaggatatgagaatagttaagttagtataaatatatatagaggttcgggtataaatgggtgggtctgggtggcacccaaactcgaatttacaccaaagtgtgcactcggaccaggactcgaatattcataggtgggacttgaaccaggatgcttcttaatcgtaaaatacttgcacaaatagcta

SEQ ID NO: 99236 - DNA, 584 bp, Cannabis sativa
  modified_base (507)..(508): a, c, t, g, unknown or other
tatatagaaaattgctaaaaaataatgatagtgcttagcatcttcttcaagaggacgatctaatttaatcgaatcgaatgaatccattacaaaaatttggatatccaattatagttggattagataaaatgttaaaagttgaattctacttagattggatcaattattggatgttattctcaaaatctaattaaaaactgattcaatccaattatatttatttatcaaaaaaattatttatatatatttattgatgtataataaaaaatatacatttaattatatttctagtggtttttttcttttgcgtgtagaatttataacatttggttgatttatgtatttgttttgatgatgttttgttctattttattacttagtactattgttgttttacttatttcaaaattttaattgcattacacttgtaacaattaatgatatttttataaaatattaaacttaaataaattgtgatatttaatttttacgtatttttcttcatanntttaagttaatattaaaattaggtgtatacttggatattaaatcaatctaatctaattagtaattaaattggattg

SEQ ID NO: 99237 - DNA, 579 bp, Cannabis sativa
ctctctctctctctctcctatctccctctctctctcacatctccatctctctctttgttaaaaaaattgaaagggagatttcgactgcccactttcggccaccgctgtctgagtcgatccacatcaccgcctctcccgctctcagtcaagataagatctaatttttatttttattttaattttaattttgattcgtgtatatttttatttgggtataatttgtatcgatatatttatattgctttaatttttataattttttatattaaatttgtatatatttgtgtatagactacgtataaataatatatatatatgtatttttatgattgtgtgtataaaaaaattgtatccattatatatgtatcatagtatatgtatttaatatatgttatacatatatgtattctttatataatttgattagtgtatatataattttattttatgtacatatttgtgtgtatatatattagtgcatatatattttttttgtatgtttatatatatttgtgtgtatgtatatataaatgtatatgtatgggtatactcttaatgggtattacctatgaatgggta

SEQ ID NO: 99238 - DNA, 1140 bp, Cannabis sativa
tccaataatcagaatctcacacattaactcaaccttagaatccaatgaaaagcatactaaaatcaacacaattaatcataattcaacaaaatcattccttcttctacacacatgcatctcaagaacctaacaacccaaaaacatgattttatacaagaattccagcaatataaacttaaaattaaagctctagaaagctaccccaagcttccaaatgaaatcgagcttcaattccctcacaaatccaagctcaacaaagcaattcctcaatgatttcaacaaaatgtaaagatggagagagagagagaggggtcagttttggggtaagagaaacaaccaaaaaattcatatcctttttactcaaaattccattttgttacaaatagtccaaataagctaaattacaacaatgcccctagggccatataacactcatttaggcattcaagggtaattatgtcattatcacataacacaccatttaattaattctcagattaatcacacatccataaaatgccaatcaataatcccgaaaatgaatttcggccccgaacctagttcgacctgaaatttccaattgtgactataccacgccgacttgtcagaaaacacctaaaaaaggacacaacaagtatactatataataatatagtccataagcacgcatttaaattaaattcaaaattttacccttctttggtcaaaattacaaaaatgcccctagctcaccaatagggtcttaacatgtcatttatcaaattaattgacatacagtaaattatataatagtataactccatattaatacacatataactagttagggtttgctaatctattttcttaatcttagggtattacactaactatcttaggcatgttagcgtgatttttaacttactgtgcagcgttgctaatcaacgagattatctaaaactgtgattaactaaaattttgcttatttaattaacaacattaaatagcatatttataaaattctgggatcccgtttacaaaagcatttacataagtttaactatacatatacatatacaaaagtacgtcgcctagaaactatacaaaataagccatgatgtcccaaagatcgtacggtccaggcctaactgccctgacatg

SEQ ID NO: 99239 - DNA, 1132 bp, Cannabis sativa
aagaccacaagaaggcatgatcttaccaacagggccaccattaaggcaaatgtttagagaggaggtggaaatgcactgagaaccccaactacagaactgttgagggaaaccgaagcacccgagaacatgatcaataaatttccaactcagcctatcataagctttaactagatctatcttgatcgcaaagaaaccctctttacgtttcttcctgttgaaagaatggataatttcttgcaccataacattgttatcttgaatattccttccaaatacgaacgctgcctgagtagggcagataagagtgggaagaataggttttattctatttgcaatgatcttcgagatgaccttatacaacacattacaaagagagatgggtctaaagtaattcgatctcttcgggttctgcatttttggaatgagcacaacattcgtcgagtttacacccttatgcattctaccgttgacaaaaaaatcttcgacagcatcacaaaaatcatccccaacagactcccagtagtgtttgaagaaaagaacagacattccatcaggacctgggtctttatggttactcatggcgaaaagagttcgtttgatctcttcataggacgggcaacaaatgacctcgacctggttctcattagaaatcctctctctgaataaatggccacagtccaactgccgatgacaatcagaactagaaaaaatgcttttttaaaaaaatccaagaattcctgaccaatcagctcccgctcattaatccatacattatttttattcaaaatacattcaatggcattcctccttcctcttatagcagcaagaatttggagcatttatcaccatccttaagccacgatattcttgcatgttgcttccaataaatcgcttttctggctctagcatcattcaagttgcgtctaatttctatctccaaactccaatctctagtaccaacgggcaactgttgaatttgatccactttctgttccagctctttaatgaccccgtcaattttaccaaactgggttctattccactgaaggagagctacccgagttgctccaatcttcttaaaaactcgagcagggtcccaagaatggaccaccgaatcccaagcattggcaac

SEQ ID NO: 99240 - DNA, 661 bp, Cannabis sativa
ttgacaatagtggctgccgtaggaatagttttaggatttgaatgatatatgtttctttcctttatatactaggtttagtttagagtttcacttattgggttgatgctattcttactggactgaaaattaaagaaaagggtcattgggttgctttatatattgggttgctttatatatgtatataatatatttgattttatatatacattatatatataatgtaaaaaaaaaaagatgggtaaattaagaaaatacttagaatcctaaacctattttatgtaacagaaattaaaatgtataaaaaatatataacgatagaaagtatatacctttgagatttagttttaaaatcatagaaaaaatagaatctattgtcttgggctgatcttacctattgggttgggctgaattgttagttttaaaatatagcatataattgttagtttgaaattttaaaactatcgtcactatagtatgaatatgacattgccttttttaattagtataagacatggtatacgaaataaactaaaaagttggctcgggttgttaatatatggaacagtttacataatagtagaacatataaaaagttataatttaaattaaatattataatatacttttatatttaactgctatttgttgacattttattatt

SEQ ID NO: 99241 - DNA, 554 bp, Cannabis sativa
tttattaaatcattattagcttattaccatattctgctgtgctttgggtaacactagcccaactaaaaatatgggctagaatgatgggcttaatcaatggcccactctttcgcttttatttatgactatgaagaagattgatgaaattagactctactttttttatattgtcattttttatttttatcttcttttttaaagtttattatttttacattttttttaaatattatactaattttgttcctgtcactttaagatactctccatgtgacttccttatgtcagtgtattttgggtacaatatttataaaaagaggtatgtttcaattaaataaaaattagaggtaaatatagttaattgattaataaaagagatatttttcaacttacctcaaaaaattcgtacttaattttttgctgaaagattagtacttaaattaggcctgcacatgggttgagttgggcagtttttgggcggtttggcagtttttttatttggcggttttttaaaatcacaacccatacccgcccaataaaaatttgggttgggc

SEQ ID NO: 99242 - DNA, 861 bp, Cannabis sativa
ggctattatgagagtggacacattcctatcaagggtttttagtgtactgagataggtaatttttttatatcctgggatccaggcatccttaaagatagatatagaagtaccatcacccacttttttttttgcaaaaatccaacaagaggagttctttgccctaaaatgttattctagactagagaagggcagtgccctttaccagaaataagaaatgcaaaatggggatagtatcgggctttgaggagggtagctacaagtgaggaaggagcctgaagaagatgccaagcttgctttgccaacattgcttgattaaaggctttcatggagcagaaacctaggcctccatggaatttggacttacaaagatcagaccaactattccaatgaactttctagttgtgttcagttccaccccaccaaaaatttgccatcatggactccattcttttgtgaaaatagttaggtaactggaaacagcacatagtgtaagacaatatagcttggaccactgaattgagaagtaattccttaccacctttggagaaaatgtggagttccacatgtttagatgtgaccacacacgatcgtgaaggtagaggaaagcttcctttttagagtgactaaaggattaagggactcccaagtatttctcaatagagacccgaataggaacctggagtagggggtgattcggtttttgttctcatcggtggtattgggagaaaaatagagcgaggatttatcatagttgattagttgttccaaaggcagactgtaatcatgaagtagttccttgatattgttggcagcaacgggggaggcatcactaaaaagaatgctatcattagcgaagaacaa

SEQ ID NO: 99243 - DNA, 690 bp, Cannabis sativa
tatgactatttctaatacattctattacattgaatcaaactccaacttatctaatagtttactcccacaaagtttgagattcatatccttatatatagaaattattatagttttctaatctctaaatattgtagggttggaacttggagggcatctatgattttttttaaaaaaataaataaataaataatctaatgggtccataatttgtagattaagccgagccctaacagaattggtccccagccatgcatgttacaagttttgaggcctaaaatatgtataatctggcccagcataaaagtgagagcaaagtagcttttgagctgtgttaatgtccatgagataaaagcaccacaatgcatagaattcagtgaaactttagtccaaaaaaatatttgggctgcatgagttgtcctaataagaaatggacaaagtggcttttgagctgtgttgattgattatccttcttttactaatcactcataatattgttaaatttttcttataaatcttagagagaacccctataatgatgatcatataggaataaactcacttcatgaattcaatttaaaagtttgaagattttagtagaattgattaattactcgattttgttttcatataaggtctgagatttgattccctctttactacttaaatagtttagtatatagtttgttttaa

SEQ ID NO: 99244 - DNA, 722 bp, Cannabis sativa
gactcatggtcacaagtgttgtttcttctagttatttgctattggttggaacttaattgagaggcaaaaattacagagaagtatttctttatcttaccttttggatgcagtttgtgctatcatatcaaagtaatatgtatactatttggtattagtttcaaaacagaattagagaaaaatgtcccttgtttcaaaattagagaaaaatagccatttttcattcttcctatttcattatattcttttggctattttttcctcctaatttactcttcgttattatatacaaatgtaattatctttcaccttagttgcctaatgtactccacaaatttctttaaacaaccatactactcttgactagtgctggaaatacatgttggattatttgacacggtatgaaatcatgaaaaagtttgagcttggatatgacacaacacaaaaatgtataggcatgacacaacacgaaaacccaaaatgtatgacacttaagtacaaatttactaactctaaaatttaaatataataatattgtaatttaataattaaaattattaaaaaaaatacaaaagtaaaactatacattaatttatttcggtgattttacaatagacccccttaaaagggatgtactgatgcacccttgacttgtttcggcatccagaagaattttttagtctatttttttttcatatttatgtacgttataactatttaagata

SEQ ID NO: 99245 - DNA, 862 bp, Cannabis sativa
ccaagagcatccttttgatcaaccagaatcttcagcttgcgaaggatctccatggaatcaagcttaacagatttatcaaattcagacatgaaaaatgacaaagatttcatctggctaaataccttgctggcgctactgcttccagactgatgatcatcttcgagcttggatcttagagcttcatagtcaatcctatcgagcaagtcatcagcttgatagatgacatcttgaagcttgaacagccacttcctaacctcatcgtttcgaagttgcttctcctcagcatcattgagcagtacattagctgataacaacacagtgttcagctcatctagctgatccaagatcactttctttccctggaacagccggggtatgtccacagaggccaatcgttcaaacaagacctgaagtgaagcagaaagtagagcacaggtaaaagatcagcagccaattttcattgttgagaaaaagtagtaattaaggaacaaaagctaatatatttacctgaagtgaagaagatagcaaagcaccagcaactagttcaacagccatgtttggtaaccaatggagacacttagagagagcaaattatattcaagctaagaatttagtttgatgaacaagagtgaagggaagccgtttgaaattaattcagatatgtatattatatgattattagtaggacaatagtttgtttattatatgattatatatagaaagctgtgttagtgtgtttcactattgtaaaaacccaagttgagcacacagtgatcaatctggtattgatagttttttgttgctttttaatataataattagggggctgtgactgtgttagtggactaggcttcaatggtcc

SEQ ID NO: 99246 - DNA, 1150 bp, Cannabis sativa
cgatctctagaaaattattggagatatgagatgtagcatatctccagccactttgtcagaaacaacttaacaatggtactttaaatttgctccaggaagattcaattcttgggctgagttttctcaagaattttacacacaattcttgtcctcaaggcttgtaccatcacaactagaagaccttgtcgaagtcaaacaatgacaaggagaacgattgaaggattacatttagagattcatggccgaggccaccaaggtcaaatgccttacaaaagagggctgatatacaaccatactggggggtatccttccattaagtgatttctggaaagatattcagagaatttcaactaacaacatgaaggagttcctcgacagagctgacgacttcatcaaattagaagaagttatacgacaagcccagacagggcatgtcaacaataggcagtcacaagacatcctacagtctcatgacttgctaagggctcaggtaggtactagcgacactgcccaaacctttggtggcaagaacacaaggagtaagcgcaacaacaataactctggaagcaaaaaggggaagtttaacacttctcccacgccacaaaatcaaaagaacaaggaggagaagcatacatgcttcaccctcctaacggagaaacttgagaccatcttcatggccactcagggaacagtctcctacaaaaagccctttcccatcaaaagggagttgagcaagaggacatgtcgaagttctgtcagttccacaacgacttcagccatgacaccaatgagtgtcaaaatttgaaaagagagattgaatacctcataaggcaaaataatccccatctacgtcgttatgtgtagaacgaccagactcaagcacaaggtgtctagaacggagatccaatgccaccactagtggcaggacccttaggggtcatcattggcagactccacattacaagagagaccaacaaagctagtgagcgctatgcaaagggccctctcactcgtctttagattctgagctatccaagacagaggcacatcatcatccaaattagggacttgtccatcaccaggacaagctccctctgcaattcagtctctacactaaccgatgggccatgggctcttacaactctaggag

SEQ ID NO: 99247 - DNA, 1491 bp, Cannabis sativa
  modified_base (128)..(139): a, c, t, g, unknown or other
  modified_base (1122)..(1125): a, c, t, g, unknown or other
tactataatcccataaagtaactttttgtttaattataactttataagaaatattgaaatcctcaaaatttttattatatttgacttggttatcttcaaacaataccaaattattattattattattnnnnnnnnnnnnattattattatttattattatttaaggatagtctaaaaactaatctctagtatcaatactttgctagagactaagaggtttcaaaatttcttcatatactttttttcttttttccgtttgtatggttctttcatcatatacttttaaacacatgtcacattttttttttgttgtgacttatttcatttaaaccttaatatacatatgattatgtacgagtcttatgaccatgcaagagaatacatgaattaggtcaaattaaacagtttcttcactattttctagggaaacaaacaggtggacaagttaacattggttttttcagattttccaaagtatatatatataacccaatttcatgtttctaagttggctggctgtgataataacatgggaaggaatgatgatgagattcaaactaaagatcaatcagtttacttcttctttctttttcaactcatacgtacgttgaattattattaaagaatatatataagttttttgctctacatcaatattcaataaagttgctcgttttggtccaaagtaaaagaatataagtatatatattctattagtcacactgatgaatgaacgagactaaataatatataattaggtaaaagatgcaccaaaatatatatcaaattattcattttattgaatttttcacatatatagggacctgcattgtccccaaaagttaaacactaacacatcgattaactccaataaaattctagattaatttgtatttgaactatccttgaaagagttcgatagtactcatcggtgaatattactactattaaaaaggcttacttccattagttctgaaatcgatttttttggaaagattgtcgctaataaaaattactaaaaattttacttttagtcacaacttgtgactaattataaattattattcttgtgttgtaactaaaatgtccgtggctaaatgtattagtcacaaaaattacaannnnttgtgactaaatgtattttttgtcacaatacttgttgtgattaaaattaaattagtggcaacttgtgtctaaatgctatattttacttccattggttctcaaatcgattttttgaaagactgtcgctaataaaattacgcgactgtttagaaccgtcaactataattgaatattctcgacgattttaaacaattgtaacaaatctacaacagtttaatatagtcattcaaaaattgattaggattttttattgggtatcctagacgttttaaaatagtaggggatactcaatttttttattattttttttaataaaaatcccaaaatcaatctatctcattttcatttcaaattctctctctctct

SEQ ID NO: 99248 - DNA, 713 bp, Cannabis sativa
tatctatatccttttaaaacttgtatttttatttttattcttacaaaatttgtattttttccattaaaaattatatatttcattaatgtttaaaaacttacatagttcaatttttccaataaagaaattgtcaaataaactcaagtaggaattttaagtggaatgaaaaacatttatttatttttgttattttgatttcttgaagtataatccataaacacacaaaaaaaatattataaattttttgaaacgtcaaaattataattatcttatttattttatttgtatatatggaaagaagaaaataatgttcatacttctattcatgattcataacacaacaacttttataaaatatgaaaatataaaattttaaaaaatttaaataaccgtactaaaaatatactataacagatgttttaaactcctttatttcaaaatttctttaaaatatattattcatgctctatctttataaaatattattcattgctctaaacatattttattaattgtttgaattttaataattatttttgtattgaaatacacgtatatattaatattatatagttgaaatgaataaaatatatatattttttaaaaagtaaagttttggtaatgtattgtaaaaaagtgatgtatggtataatgtaaaataaaaaaaaaaagtaaaattttaatgatgtattttaaaagggtaaataccattt

SEQ ID NO: 99249 - DNA, 919 bp, Cannabis sativa
atatatatatatatttctattttcaaagtgttaagagtgattttgtggaattattctatttcctaaagaatggatatcatgctcaattgttcaaaaatatatatatatatatatatatatatatttatataattgtgtataaatttagttcttttttatgagattttcgcattatatgtattaatatatatgcatctctgtgtgtttttggctatgggtatagaagaatgtttacttggctagtgtgttgattgtgctgtaagaagttgagtgaattcattttataagaaacaaacttttcatttaatttttcttttcatatttctttttgggctaatgatcttgttttgaaagggtttaattgtaagtgaagatagccatgcatgtagaattaagtgattggcataacgcaaatttgaatgagaggattagtttaagttattggaatgaaatccatgtttagtttatagtgattatatatgtacatgtgaccaaattaaaatgaaaaatttgtgatcttgatagtgtagagtaggtggaatgtttgacactagcatattgttcacagtttagtgattaaacttttaattatagttaactagttcttagtcaaataatgtgattagtttattcaaacaacttgaaaggttgtgagctatggagttgacactggaataaatatggtacaagtgagtttttttttttaaaaaaaaaactttattttaaatttgtgtggctctaatcaaacttgcttctcttatctcacttgcagtacaaaagtgtgataacattttcaagttatgtttatttcatttggttttggttcctctttatatatatatatatatatttatatatgggtgactattcaatggttacatttttattgttcctatatggttacatttttctttaacct

SEQ ID NO: 99250 - DNA, 545 bp, Cannabis sativa
tggtttcactatacaatagacgtaagcatgagatgaaaaggaccatggagacgataaaccatggaaatcacaatcccatttcgttctccattcacaaggaccgttcatggtccaaccaccatcgatgttaggacgttggatgttcgttcctcacattgcatgcaaagcatgctaaggacgttagacgtccatttgattgatgccctggttgtgcacacgtattggacccgatcgggtctagagtctttgacctattttgcgtgagaagaagactcaaacaggtcttgacttgcatgacccactttcgactactttattagtggccttccatgaccaccgtggtcgtggtgggtccctagaatccctggcccgatggtggccatggtgaccgaccctaagtatataatatatataaatacatatgtacatatacaatgtactaggaaaaagttacgtgcgaggcacgtatactaaaatttatgctaagtattatttactttatttaaaaattatacaattaaaaattaaagaaaaaaatattatta

SEQ ID NO: 99251 - DNA, 542 bp, Cannabis sativa
aaaaaaaaaaaaaaaagtagataagagattacagtatactatataccatatatatataacataataatatatgaagataagataaacaccacttacaattttgaatgtaaattagtagaaatcaccattacttaatattcaaagtattattatctttgttcaaaaacttatttttcttctaagcactaagagaactcttatatatatatataactttgagaatcatcaaactttggactatgtttgaaagttagatttttataagggaaaaaaatatagaaaaaaagtagaaaataataataataataatataaataatattatatttggtatagaaaaaaaattatataaaaaatactcaattgaacaaaacttttcattttaaacttaaatatttaacttttttgttctacacacttttttttttcctacattttctctatcttttttttcctcaccaaaatccaacttcacacgtagtcatagagttttctaacaaaatgcctttttttttatatagaaaactaagttagtttaaatga

SEQ ID NO: 99252 - DNA, 957 bp, Cannabis sativa
aagatgaggtaaagtttacgttgaaagatattgcgatgaaggcttgctttgagatgaaaattgcaaaatctaccaagtcattatatgtgacaaaatgcattgacaagtcatgcaaaaaggcagtgtgtgtagcaaaaaggcagtgtatgtagcaaaagtttctcaatacgaacctattgtaacactcacacttgctcctttatcagccgaaagagaaagcatcgtcaagcaagtgcagaagtagttgctaatgtggtgaggtcaagttttgacggtcagaaagagacaacgaaacctaaagcaataatgacaattatgcaaaacaatcacatgtcgatcacatattggaaagcttggaaagggaaaaagattgcaaagaaattcaaaaaataccggatgtgttttgtctcgtgacactgatgaaggctctaattgttcttctccatcaaattcttcttgctcttctccatcggattctacttgttcatctccattagattctgcttgttcttctccatccaattttgcttgttcttctccatccgattctgtttcttcttgtccactaattatgatttttcttctccatttgtttctgattgttcttcaaaacttcccattaactaatttaaataaagaaaggtaatattatattaatcgagtacaaacataatagtcaagctttacccacaaacggttgagctcaactcaagatagttgagctttatactaacattacaagaatttagagattacatctcgaccataaatggtcgagctctactccgtatagtcaagctatacactaatattttaagacttttgagactacattggtcgaactctactaaaagcagtcaagattataatctcgaccatttatgttggatctctactaacactaatcaagttatataatatatcaaatagactttgaaaatctcaaacatatttggt

SEQ ID NO: 99253 - DNA, 934 bp, Cannabis sativa
aaaaaaaaaaaaaacttatttatattattatttatcactattatacatatataatattcatgtcatatccattcaaaacatattcatttcatgtgtttttcccttaagctattatacaatttataaacttttttctttcttcgtttgtttgttgtgtcactatattttcaataatcaaattgtataatagtttatatttacaaataaattggtacatcaaaaaaaaaatataatttaattattttttatattactaaaaagttattggatattgagcaaaatttataattttactgctaaacaaatttttttacagaaatactatttttttataaaacaactttaaaataacaaaacagaacaattaaaaacaacagtagaacaactgaaaaaacaatcatagaacaataatgaaaacttagcatagtatgcagtataaaacttacataatatttttgaaaaaaaattctaccccatactaaaaaagaaaaaaaaaataaaaattttagcatatggtgtaaaaattccaaaagaaaatgcactttatattatttttcagtcccgccaaaaaactaaacactaattttccaagattgtcaaacaaaatgatttttaaaaggaaaagttgcctttttctaaataaaataaagggggattttcataaatataagaattgaaggtatagtttacttttttatggcataaataaataatactatagagttatgagttttttttatttttttttacatttatatgggtttttcttatgctatatttttgtaaaaaaaaagtggaaatctcatatttgtaaaacaacaataagttttgccggaaaagttattggcaccggaaaagtcaccagcaccggaaaaagtcacccacaccaaaaaagttgtcgaaaaagtcattgtccccgataaagtcactggaa

SEQ ID NO: 99254 - DNA, 518 bp, Cannabis sativa
attatttacacgttgcggaaatataatatagcattacagcaagatgaaatcaatattctttctctaccaatatttgtaataaaggaaaaaaaaaagttatgaaaatgtaaaaaaaaaaaaagtgcaattttaggtacttaatttgtgtaatttcctcttttttaaataaaaacttgagcctctaatggtaagtattttttggaacataacttttttttttttcatttagaagagcatctttgaagtatatatgggcctaaacttagcaccaattgcaatagatttacggagtaagttgaaaaataccatttttattaatcaattaatcaaagttacctctaattttatatttaattgaaacatacttctttttatatgtattgtatccaaaatatcctgacataagagagttacatggagagtatcttgaagtgacagggacaaaattgatataatatttaaaaaaaaaaaaagaggtaaaaaggatagactttaaaaaagagggtaaaaataaaaga

SEQ ID NO: 99255 - DNA, 633 bp, Cannabis sativa
caatatcccacattaaatgatgcccttgttcaccgctactattattgggttcacacacaaaattatgaccacactctatgagtaatgctataagagagtaatgctaattataactttctattacaattttttagtcaatttttacgtccgaaattatatgtcgaaatattttttttcatagcggtatttgttataattacagtatgatctctgtaaatttttgaaaaatttcgaataatttacaataccgaaaacagagttcctaatattccagtttaccatgcacattaaaaaaacttcaaacgtattttcggcactgtaaactatttgaaatttttcaagaatttacagggataatgttgtaagcataacgaacacccccgtgaaaaaaaattagaaaaaaaatattccgacatgtgttttcgagtgtggaggttgtaaccagaagttgatggttgcactcctctatactagtagtgtctgacacttattataaaaaaattgctatctttagtaataatattttagttacaacatgagttttttgttactaaatgtgatttttaatcacaataaaaacttacttacgactaaaacataatatttagctacaagttgttattaatttaattt

SEQ ID NO: 99256 - DNA, 527 bp, Cannabis sativa
ttttaataaaatataatatgaagctatttttaattaatagatacaaaaaaaaaaaaatatattcctcaacttatctcggtcgtcagttgtgggagagaaacagcaagtgcttcatggaatgtattatggcattagtgttttgatgatccctaatgttattgctttcattcgtttaagatttttagaggaaatcatatgaaatatgattttttttttaaataggtttggcaaatatgagatttttaacattgtgcatattgattcacattttaatagaattttgcttcccataatcttattttcatatttttataattaaggattaattttcaaaataacctattttagtgggcatgtttagggattatttcataaatatacaaaaataacaaaaattttatatttttacgaatttaatgttttttcatttattgtttatggattttaattttcttaacaaaaatacggaatgttattttttttgttatttacgaaataatgttgttttgatgttgttactgcgggga

SEQ ID NO: 99257 - DNA, 675 bp, Cannabis sativa
agaatgaatcaattgagatgcctgctgttggaaccactttcaaaatacctgagaagcctccacaaggaaaaactgctcagagaaaggctcggtttgcttcctctggttttacaaatgatcctgctcctgcaactgcatcaacttctgctcctacaaaattggctgaatcaacttgcgtttgggaagaatggagacaagtcaacctttgcttctcaggaagatggacagcatcatgaaatacttctgatccaatgatgatgaataagtggtccaatttctttttctcttatttttgctttatgtatgcttaaactattatgacttagttcatgtttttgttatctttggctccttgatagacaaaaagggggagtagtattttttttgattatatgttacaactctagacccttgtttttcaggggagttggttgtttgtggtttgtgcacttttccgtttaaaaagttgctttgttttcggtttgtaagcttttccgtccaaaaaaaaggttctctgttttatgtgttagagtgctttcatgcagggtgagtattatctatactcttttatttttaagaagctatttgctttggtttctaacacttgatgcaggttttctcataataaaatgttttgtcaatcaaagtgccaaaggggagattgttaattccatt

SEQ ID NO: 99258 - DNA, 550 bp, Cannabis sativa
aacaatataaatggaaaactatttatgaagaaatgatgtctttcttctattgttactaatgcattatatagagaacacagaaaaaaataaacaagaagaaagtctttttttacgaatcgtgagagtgttggatcgtagctaaaaaatttaaagagaaaacgtctttgtttaccaattaattaaacacatttaaaaataattttaattaaataaaaaataataatattttaataaattcagatggtggcaacaatgcgcgtgtagtgtttaggtcagcctttatgcgactctccctcttctacaaaagtaagtaccccttagggcttagttgaacactgtatcagatctccattgcattgtagagaactgtcaaatataccctctaatatttaatattattaatattattgcttaaaaataatataaatggaaaaattgtgtgtggaaaaaaaatgtccttttaattctgatgtattatatagaaaatgcacgaaaaaataaagggaaaaaaacagaaaaatacaaaaaaagaaaaaaaattacaaaaata

SEQ ID NO: 99259 - DNA, 955 bp, Cannabis sativa
tcttgtggtacttgacactttaaactgccccttagcattttttttttcaaacttaggatgaatgaccgaaatagtaactaataataaaagtattgttattgtatactagtaatatttaacacaatttaaagatgacactttataattagttagcaatattttttaaaaattattatatgctgaagagcatgtaaggcaccacattgttactttggctactttagtagcatatgtctaaattacaacatttgtcaataataataattaatagtaagtacaaaaatatttatgaagatctcttattataaaaatgtttttagtactacggtgattttatgtttatttgtttattatcatgtgtatatatagatttggaaaaaaggtggacaggctagaatagttagaaattatatttagaagaagaaaaagaaacatcactttgtttgatttttctattaacccaccattcaatttatttggccatttaatttaataattttatactttcttaagaatattctaaattattagtggaatctacttatcaaactattgagttaaaataagaacataaaaaataaaaaataaaaaagtgacaaaaagaaaaaggaaaatgcaattaaagaattttttttgctatgttttaattgattcttaccaaaagataagtgtattatgccatttgaaatgagtattgttatttattagacactaataatatttaatactttttataagtagcgcttcacaattgtttaacgatattctctaaaaattattttcttacgttatataagatctgatacttaattacaccaatagcaatgacactgagaaaagtgttagacactaatagtattttttaacaattttcatttgaaatagaatattatttgtcatatttgatgtcatatatatttttaaattaaaatgtgagatttgatactaaattttt

SEQ ID NO: 99260 - DNA, 550 bp, Cannabis sativa
ctactaagagacttcggagaaccacaaactacctcaaagtgtcgggcatgggctaaggcagattaagttcgcgcttaggactcacccagctcaagaacccaaaaaaaatattttctttttaaaagtatacatattttttagtcatttttaaaacttaaacatatttttaaataaaggatcaaataatttttattttcctaaaactcaccaaattttaaggtcggtcttgcctcaaatgcacaatgatttcatacacaacaagttggcttttgcctgagccaactcaaaaacctctccaccttatcttcaaacaaaaatggcatacacaacaacatcaataagagcatctccaataaaaatgtaaataagtgatacaaatgtaaaatagaactcactttgtaagaaaatttactctaatgatgtgtaaaattatgatgcaaatatgtcacataacaaaaagtgttttaaatataaattactaacatagcatgataaaaaactttacatcataatagattaccattatatcatttttaataccattatgtca

SEQ ID NO: 99261 - DNA, 601 bp, Cannabis sativa
tatgtggtataaaaattctaaaattaaaaataagggaaaattaggtaaggataatcaagtacttttacaataactagacaagtaaccaattattataagaggataaccaatttcttttgtgttggtttttcccatatttttttaacttttttttttaacaaaaaatttctcataaaataaaattttggaaaaaatatcataatttacaaacttatagtttaaaaactataaaaatgaaaatcccccgaactattaattgtggaggcccatttagataaagactgtgggctgcctaaattcaccttaagcccttgaggaaattacattgtatacccactttactttatttatttcaatttttacctctattttcatatttttttagatatacccacttttatggatgatgttcccataagacgccttaggttatgtaaattatatgctacatttaagtagaaaatgagggtatattaggcattccactcaaaaaagtgagtatattttaataaaaatataatatgagagtatttttgattaatagatacaaacaaaaagtattttcaacttattagaactaaccaagatatgttctccacct

SEQ ID NO: 99262 - DNA, 1087 bp, Cannabis sativa
actgcagttaaactcggtatatatattctataaatactaagagttctatatttatagtagagtaatcatagaattattaaacaaacattatttggttgatgagactcaataaataatctagtttattagagcttagaattataggcaccttgaaacactgtctagagaagggataaagagttgtataatgttatttcaaaaaaatctattttaaattgtcaaaataataattatttactttgtaataaataaataattttttaaattaactaaataggaaaaagacaaaaattgttaagacaatatttgttgagagaaaaattgttaggataaaagacaccatccttgtcttaattcagacaaggtaggtgcctatcttcctatgggttttcactttttggattatttatctaattaattaattaaaccagataaatatttgaatttaaaaagtggttaaagatatttcaaagtagttgaaatattctcttaagtagttgagagattccatcataaatatcactaaccgaatttggttacacatatttatttatttaaataattaaatatgatttaattaatagagatttaactactataaatagaagcctaatttggaaatcagaagatgctttttcaacatataatttttgaaattatcagagaaaagaaaattattttctctctcaaatagttcttgctcatgtattgagaattaaataagaacaaattatacactttatcctaatagcccacactatttcttgtgtgtggtgggtcgatttggaagacactggtatgagttaaatttgcatcatcctcatcatctggattaaaggatacaacatacgagaagttttgaggataccctgatagtcatcaaggggtgtatattcttatcttatattttattgtttagatttaatgtatacacatatggagattcattggactatggtaaaatgataatcagagaatacgaattcttctgttgcatacttgacttagtacaataaaaaccaacaccatggtccccgaattgccaccttgaaacactatcaatgggtagagtaaatattgtatatgg

SEQ ID NO: 99263 - DNA, 761 bp, Cannabis sativa
ttctatagctattaacagaagttcacaaaggctttacgacaattacaccggggggcaaagccaatcgaatgcagacgagatcaaactacagcatcgactgggcctttagaaagctgaccgaccatgtcctcaacaatttggttggccatagaatttacattctagccggccaccacctccacatgctggttggccatggcctcatccaatcgcccaagcaatgctccctcagtatggctggacagctagtcttgccctggctagctcgatcaacagcagtctgctcttatacttctggtctacaatgactgagaggtacacaacatcttgctagcaggattcattgacaaaagggaaagaagaagagaccaagccaactcaaagtagcatggctacacacaaggagttaccaggcccgtcaataaatagatcgaggaaagaaattcctcacaagagaattactccctgaagaatattcattgatagcaaatcccttgtagcaagcatgtttccactaaactaaaaaggtctgcaccatgttacaagataacagtgaaggtgcatacaagtctggcgagtacaatgagaactttgagttggaacttctacccacacactgaaatagggaacaacttggtaagtattctcactagccaacttgtcaattaagttcctctaatgtttcattgtgtaggaacccataaaagcgctagtacccactgcctgattggcgtgttctcccaccgttcttcaatggtggc

SEQ ID NO: 99264 - DNA, 727 bp, Cannabis sativa
agtggaggcttttgataagctttttaggaaggcaaaaacaactcatagagtagctcgggatagcttgaatcacggccttaataaggatttcctttcccgcttgggaaaacatagtcgctttccagctctttagcttgttccaaactttatctttaatcacctcaaacacctctttctttctcctcccaacataactaggcagccccaaatacttggcatggtgaggcataagccgaacgcccaatctagaagcaagagtctggcccatgtggttggtaattcgacggcccatactcacttccaattttctatgttgatttgctaccccaaaagtcttgtgtagcgatgcaagacttgtttcattgtgtcacactcccacaaaggaacacgaagctatcgttcgcaaagaaaagatgcgacactttaactccattacgaccaaactgaaccccatttattctaccagcccgctcagccgcatgaataaggcaagagaggccttctgaacaaataaggaaaaggtaggggacaatgaatcaccttggcgaagaccccgagttggttgaaacttccctatcctttccccgttaataagaaccgaaaaggaaacactagtaacacacctcatgatcttctcaatccactcctcttcatagcccaaacccctcatcatggttatcaaaaaactccattcaacccgatcgtaggcctttgacatgtctaactt

SEQ ID NO: 99265 - DNA, 579 bp, Cannabis sativa
agagatgaggatctctaatctcagatcgcatctctctctttctttcctctaaatatcactcctatcttgatatctggtttgacaaatggaaatgaaattaataatcatagggccctgacgaaacgaaagactggctgatccgagatcgccaacgtgctattccttgggatgacaggttgttgttgaaatggattgttgctgggtcgtttctctctatcgattcaatcggctgggccaatcatatctttcttcaaccaaccccgatcaaggaggttctagcgcggacgtctgcgtcgtaaattcatgagtcattccaatcattttatcaaaaaaatatatatatatggttgcatttacataaaaataaaataagatttttttttctttaagattcttgtagaatttattttttctctttttttttttttgcaaaactattttatcgaattataaagatcattgcaaatatctcattttactcatttttttattaaaaaataatttgtcatttttttttaaagatggataactcttttcttaatatgaaatgaaaccaatgagttacaacatttaagatat

SEQ ID NO: 99266 - DNA, 603 bp, Cannabis sativa
atcgagatcttgaagatagataaaattttttgtattttttcttcttattatccagaaaagagacatggtgggagtatgtagtggtgaaagagagatgtgggtagtggtgggtggtgggttttggtggtcggtagagcgaatcggggttgggtaagttgggctgggagggaagaagaagaagaagaagtagaaaagataaaaaaaaaagttaattaattagtttttaaaataatttatttatttatttattttaaattattttcaatcaaaactacgacttccaacaataaaatatctatacgtggtacttttaggagcaacaaacagaataattacattgggtacatacgagaagctcgagtttgaagactattaccgtaattttttaaagttagggactcatctgcatcaaaataaatttttgggacttatgccttaatttaatatcagcatgtgtcattttaggagcaactaatagatttgttaaaatgaggaccaacacgcttacaaaaatctcgagcttggtgactattactgtaactttttgaggttggaaatttatctacatcaaaatagactttttttggagcatataacgttatt

SEQ ID NO: 99267 - DNA, 916 bp, Cannabis sativa
tcgggtcaaggtccaagttcaagttagggtttgggtcggggtcccggtccatggtccaggtctgggtctaaggtccagatctaggtacgggtcagggtctaggtttaggtccgtgtctaggtttgggattcgggtctaggttcgcgttcgggatcagggtcaggggtctaggtccgggtcagcatctgaggtcctagtttgggttcatattcgggttcgagttcggatctgcatgtggggtccgcgtctaggtcaagttccatgtccggcattcgattttaagcctgggtcagggttagggtcaggggtctacgtccgattctgggttcggggtccaggtcgaggtcaggagtccgcgttcgggtccagggtctggggtcggggttatggttctagggtcggggtcagggagctgggtccgagtcgacatccaaggtccaaatctgggttggcatccgaggtttgggtccgggtccgggtcaaggtttgggttcgggtccatgctttaggtacggggtccgagtctgggtttggggcctgaatctggggcccgggtttgggcttgggcttggggtcagggtccgggtctaggttcgggtccgagtccgagtctgggtccaatattggatctgaggtccaggtcctgcgtctgggtctaggagtccaagtttgggtttgagtccaggtccaagtccgacatccaggttcaggtcccggtctaggtctggggtccaagtgagttcgaggtccaggtccgagtccaagtccgggtccgaatttaggtttaaggtccaggtatgtgagcaaaaatataaaatataatatgttagacaaaaaaatatttttgaaaacagaaaataacattttgatattttttattttctaatttttcaaaatttagtctaacaactcttgt

SEQ ID NO: 99268 - DNA, 521 bp, Cannabis sativa
aattcagcaaacgactaaacaagttcaggaaactataatcttaatactcttgttttaaccagtaaattgaaaaacacaactagaatcttagcaactactaaaataatagcaatttcgtaattaagaagtaaaatatccaattataaagtatatgggatttaacagccaaagtttaagcaatatagatgtgagtggaatgcataaatttgtcacaagcttacaacttccaatagcattatggcaatatagatgtatttgaaaaacacatacatcaaacccttaccatgatgattaaattaatatcataataatctcagagaagatcataactaactgcaaattagcacaagtttctatcataagaaaacgccaagcaaaagactttacaaaactataggaaataatatatgaaatattttgctaaatgacacgaacagatacaaaaaatgtaactaatttactataaccctttttattctgtaataatatatgaaatcgcatctgcaagaatgggaatgaaa

SEQ ID NO: 99269 - DNA, 649 bp, Cannabis sativa
atttcacaacatttgaaaaatgctttcataagtagggttttcgttaagggtgttcatcaaaccatttatttgaaatcctgcggtgctggtgcagttacggatttacaatttttccaaaccgcgcagtgcggtgtggtttgtagtttaaaatttaataattgcgttcaaaccgcactgctctatatcttacaaagttaattaccaatttttacaatatgatttttgttctttttcatataagaacaaatatatatgtaatatatgtatatattacattatttttttttagaaacaattcaatataataatttgatgattaatatatatgttatgtgttgaggtttgacctcttgaatctatgtttactgtcagttttgacagttggtatctatctaactaacttaactgttttgacagttaagttagttagctgcctactctatataagccttgaagtttcctatgtttgtaggagagtttttagacagaattttcagagggttgagaaagattgagagagaaaattgagagctgtaattgacctctcttgtgtttgagagagagtcactcgattgacactttgtaaggagcaagactccatttgtttcaagggttttaatccctagttttgtacctctgttcagattaa

SEQ ID NO: 99270 - DNA, 946 bp, Cannabis sativa
gaccccgacccccatcttggactccgacttgaccttgtacctcgaaccttagatggttaaaccccgaacccttcatccgcatcccaaacctagagtcggacctttgacctagacctggaccccaaactcggaaccgaaccccaaatcaagacctcaaccctgacctttgactcggacctagcctccgaccccagtgttggatctctacctattttctctcacctcaatttcttatctctcaattaaataaaataaaataaaatttacaaaaaatatttttatttttaaaattaaaaaataaaattagttaccaaacacatttttattttttaaaaaataaaatacaaagctgttattaaggctaccaatataaattgatttagcactttaaattacctacattttttaaaaattgtaaaatattataaccgcacaattcatattagtaccatacaacaaagctccaaatcaatttatcagaaaaattgggatattcttggatctgacatctgtcagggtctcctccaaatccttaacaatcagggggacatcacaccgatcaataacactattcattcccaaaaagaagaactctaaaactgtgtgtgattttcgaccaattagtctttgcaatactctgtataaatgcctatcaaaagtcctggctaatcggctcaaaactgttcttcactctattataagccccaaccaaagtgctttcctcactggccgtcaaattactgataatattgttattgccaacgaaataattcatgccatttattctagaaagtcaggcaaattaggttgggctgctatcaaactggatatggaaaaaacttttgatagagtggaatggtctttcatctctcactttcttcatcatattggggctccttcgagttttacctacctcatctccaaatgtctttccacagttacctac

SEQ ID NO: 99271 - DNA, 1698 bp, Cannabis sativa
tgagaaattagattttcgagcaaaataaaaaggtatgatattacaatttacatgacagttttaatttaaatactgtgactcttctgtcaatcaaataaaaatgcatatgggctttgttttccttaccatggtccatctggggaaaatccattattctgttcacatgggcaacattattatttggtcaagtaatataatttaatacaaatgtgtgtgtgaaaggttagacatttcatagccagtgttttgttctttttcctttcttctacctatttcagtattcataaaatatatatataaaaatatttagtctattttctctatagtaattatttaaaagcacttataaatttttaaactttttgaaatagtttaatatcaaaaaaaaaaaaattgaaacagttactttacttgtcacacttattaaaaagaatttacatgtacaatattttatatttctaccagaacacatcttttaggactgtaatataagtttgtccagttgtgtacacagattaatacaatacaatattttatacttaaaaaatattgaagagtatcctcttttgaggcactattataaggctaccctttcgataaaatacaacttcaaggttcatgcatggaattggaatcaatataattaggaatccccttgggctttcatatttttcagaaaacttcaaagcttaaattgcagtttgaatataatatattctttattgtcaaatccaaagaatatgaaggaaatttacacactattaattaatattcctatagtaaagtatataaagaataacaaattctaatgaagcatagcttcatgtactttttttgtgtggaaaactttcttgttatacctttaatatttgtcttttatctttttaatattggcactttttctttctttacaatcaaatctctctttttctacctttgtcattttgttccaaattctgtattgcaggcttgcaagattggagctggtaaatgaattttggagcttttattatgtgttatagagcctcatattattaatatttagagaatagtagaatgtataagattcatgaactatttatttcattatcaattagttttgagatagaacctcatccatcttaaatcacaccataccaaattttaacatggtattagaacaaaactgttatccaaattttccttcatcagacaccgtggcacggtcggagtaagggaacggtttccaagtaaggcatccgagagaattaaaagaaatgactcctggatccagaaggtggcaagaggtgatggcttccggaaggagcatccttcgatgaggaactcggataatgatacaggtttcggagatcttggacacgtcaaatcctaacaaaatggagcaacaaagacggttatacctttttctgacacaggatcagatcttgtcccccgtgccagtccatggtagtgcgcgtacgcaccctcgagcacactttttgcccaacggcctaggtagagagtattttgtaaagaagcgacctttgcgcaacacgtgtccaaggtcatataaaggtcctcatcaatcattttacaccgcacgatgaagaaggtttcccccagtgaatggtcaaatcatcctttttgtagtacaagccttaataatgtgtggaggacgaaaccctaggtgccctttaccccatgtgtgtatataaatat

SEQ ID NO: 99272 - DNA, 3900 bp, Cannabis sativa
aaacaaacaatacaaagagctctgttttctttcctaagaaaaataactccaaatattgtaagtgctctcctattttacctgttatgcacaatagtattccacctaaagacatccatccacttatcctcgtcttcttcaagaacttgaacatgtagtaaggggaaagagcttgataaacttgtgggttccagcgaaatatattatacaagccgagggtactgatgcatagaagccacgtcaacacaattggtgcaaagaagaatccaactcggtgcgtgccataatgttgaagtgcaaataggcacactaatatgaagcaagttattggaatcacagcatctggaattcagtcagagggcggaagttaagaaagcaaagatggccagctaaaactacattgaatcttctatgctatacacaaaagcataatgaaagataaatatttcctgaaaacacatactgatagctaaacttttactgcacaaataatctagaaaataagaatcattaattatggcacacttggtgaagacacatgatataactatttctacacgaacgttcctttgaaggctaaacaaatatgtgcccctctcgcttaataatcttgactgtcattcctttctcctctagggaattgagattagtctcattactaaaaaatatatatgatatttacaatatgactccaaaaaagctattactcttgctttagcaccttgcagatatctttcagatcttgggtcttcatataactgtccacaaggatgttttgactgagaatagcaaattcagatatgaaacagagtacaagctgagaagcttacactggtggtgctccttagacatggataattcaaggccagaaactgctgagaaaactacaaagaagaacatgcataattaattagttctaaatacagagagaacaaatattcattatattgaaatgaaatctacctgaaatggcaggggtgagaagcccatctccaattaccatacaagtaccaagaagaaccagaatcagcacagctgtatgcaagcccttgtacttctccagtatacttttcacccttgaactgtttttactttctggtgtgtgttctagtttatatgtagaaagtgattcatcaacagcttgtcgattgggtaaaagactcacttttgcatgcctacataagagtgaatacagagcaaaagtaccacctgaaagagcattattaataagaggttacataacaaatagaagaaaaatacaaatggaactgacaaatatgttgctcaatcagtgacttaccctctccattatcatcagctcggagcacaataaagacatacttgcagagagggactaaagtaagagtccagaaaacaaaagatagaaccccataaatctcttcgttagtgtctgagtgttgaatgtcttctgcaaatgtgctcttgtaaacatacagaggagaaatgcttaggtccccatataccacaccaaggctttggtaagctaagagaagggtgttcttccatgaaccctgaaacaaataaaattgttaagatattaatcatccattccagtgatataaacagaaacttcagaagggattagttaactaatatgtatagcatataaacgcagatccatgtaaattgaacagatgaagtgaattttcaacctttggactgttccaacactttctgtagttgagatccattgtcctcaacactcaaatcttcaaactgaatttcatctgagaactgttaagacagtagttacctgcagatctgcattgagataggagaacgttctattggttatctcaaacagaatcaaagattttctacgttaaacaaatgaataaaattcattaagaaattttcccaaaaaacctatccaattctctgccttattcccacagatagagaagacaaaaggacacgtttacccatttcttttattaaaacccacatgacatccatacttctatcctattcccatccccaccatatctatagaaagttgggcacataatttctttttttttttttaacaaaagtcactcaagaaaaagtaagcagattccaagtgggcaatccctaaactcaagtaaaattataaacataaaacaaccaaagcaccaactactttaaaaattatggactgtggagtcataattgcaacatttgatctcttctatagtttctctatactaacctcttctcagtttgtatggctggaagaactaggaaaaactgaaacttgggtacacctctcaaatcttcaatcttcaatgagacaaagatgaaataagaaaaacaaaagaatttttttgcttaacagtgggagctgaggcaatcatgcacatgacagaaaactgagagaaagataacattttcttttcacaagaaaaagataacaaaaaaacaggacaggggttgaaaggtgatgtcatagaaatcaaaaaagcacagtcacgtgatttgaaacgacagttacacacaattctaccatactaccataccataccataccaaacaagagaccacccattaaaagctgattccatctctctcccaatggtgcatcattattattagatatattcacatcccaccaaccttttcattatttttttcctttcatcctgtcacaactcacaaatctcaaactctctcacatgatcatttcaccatgtcgtttctcaattctagtggtaattaaaacatattccatttttccaaactccccacctaactttattgagcattaattctatagtccctattatatctattgttttgttgtcctagcaggcggttataataaagaactacaaaataaaaataaagtggtaaaacattattttcatgattggtaacttagtcaagaaagtgggagaagggttaagtattttctgaaagagcatttatagcgcacaaagaaagcctttataaattggtattatattaggttcattcatttcttgcaattaatctagagtcagcttttcccatgtgaagcaaaatggtcggtttcaaaagttaaaacctgctctgtttcaagcaccgaaattttatccaacctctaataaaacccttttatttgtgtaatgaagcacagtaataaattaacccactttagtcctttttcccaaaaaaacaaagaaaaatcctgctaaattttcactcgacttgaaaaaacaaacactttagtatcaaaatggtcccattattcaattcaatcacatcattgtatttgtaatcaaaagtagatcaaacccacttgaaatgaaaataaataaataaaataaagcgtacctgcattaaaataaaacataagcaagttttgaccgctgtactattacttcgtccaatattggaaaaagctctcagatgaaatgttgaagttgaaagatgaatctcaaatgggttttaggtgaaataaggtttatttatttgagctggaagaacactttcacttcatttcatgggtccctgaaactccatgaaacccattaccaactttaacgtgcaaaaaaaagtagagcattaaaatagggttttcctgtgaaaagaatcaaaacccattttccaattaagcttttgaggatggtgaacggagattttagctacagctcggtgaccggagcgaaaaggcagtaaaatttactgtaccaaccgacaataatgccgaatgtatgagtatgagtatgactatttaaaaacgaaaaataaataataaattaataaaaattaaaagaaattaaaaatgtatgtttataatttttaagctaattagatattttctctaaaattttaacatgtaacatttttttgttgttaaaaattttctttgaattattgaaagtttttaatttaagtaattttgtctaattttatttaatt

SEQ ID NO: 99273 - DNA, 2095 bp, Cannabis sativa
atatatataaatacataccaaatacaaatacagaggtaccaacgatgatggaatttccagttccatgaacttgttgagctaaagatgccgctagacaccccagtcctcctcctaatatggtacccagtcctcggtttaaacctttcccgagagtagctcctgatgatcaaatatatataacatatataaacttattaattacatcatataaagaaatatttatacatatatattattactacaagttaattattacctgcgaagaactcaaagatgaccaccacagtcatgatagcccacatggcattatctccaacttgctcataaagagggtcaaggagatagagaagagaaaccaaaaccaaagcaagtcccaccttgacactatgaattactcttctcatcttttgcttattaatacttcttgtcctttctctaacgtaggaagccgtgttggaaataagagaagcaattgttttaattaataaattcatcctagtattttccttttttgttggagctactactgttccagcttcaacaacatgagactccgcatgtggaattgatatcaccacagttgaatccattattaataatccccaaaaggagaaagaaatgtgagaaaaaggagaagactccttttagtttgagatatcttcaaaatcaatacctttatagctgtgctagctggaatatatatatatatatacatatatctatatctctatatgatggtcgtgaatgatcaatacatatatatatgtgtgtatatgatagtttatatattgtggtaagttgggtgatgataaatttggctatgatataaacccacttatataacatggagatatccccacgaaatgtcaaaagtgggaagatacatgtagtggtcactggtcagctccaaagtggacaaaacctatcccacctaaaccacatgagaatataaatatatgacctaaaaaactgagacacaacatagtaacatctcactaataatctctctctctctctctcttaatatatatacataatattatggactagaaaaattaattcctttctacaaggaaaaatgttcagtgtatagaaaatggtctcaataaaatgatatagtaaatattttcgttaaaatcattatttttttgaagtgacatatatatatatatatttatactaatacatgcgtactgatgatatagacttaattagtgactctagtggaacacgcctgcatggcacaaggatagttgatttatatatataaacatatattcttctccaaattctgaatgatgaatatatctagatgacatgtgcatagatatattgttacatattaacgtggagactagtcctttcgcaacaatatattattatgtgtagtcataaaaatactatgaatgcaatgcattaatataatttaatattaatcaacgctgcatgccgcccgtagaaatattcttgacaccttaattgctagcggatttactagctattgcactataatatacagagtattgttatttatatatagtgcccaacaccacaggcacacactgtaattaattagttagtaatttttttatattatttattaaattgatttgtatagaacttaatattagaatacactaataactatatatatcatcttttatagataaacaccttaaccttatggtatgctagcatttttcatcatatttgttatttgaatacacatgtatttatcaatatcgagtacttgacgcataataactatatactatcatagtactattgtatggtcgattgatcattgaaagtgatgtcatacatacgtataaatatattgttaaatgtcactaataatttaatcagtatctactatataaatatgatatattggtccttcccttggattttctataccctttgttctcacaatttcagggtctttaataatgttagggttgttacgatatcttccagattgtggcatctctcttttcggattggaactcaactcaaattcttccttgaacattaatgttagccgtttaatctcttcctttgcacggttatacgaatcctctgattttgatgcata

SEQ ID NO: 99274 - DNA, 2856 bp, Cannabis sativa
tgtgtgtgtgtgtgtgtgttttgggggttataaatgtaaggggagaggtgaatgcatatcaacaagaatgacattgtaagaggaatcaaaggacaaggtgtgcaagggaaaagcgtgaaaccacgccttctaaagactctgaaagtgagaggttcgagtagcagcgacaacggacctaaaaggtttaaggacccgaccaagaatatgctgcaaccactctcctgcaacctgtcactagggaccacacacttgcaatcggggaacacatgcctgcaattgaggatcactctcctgcaattggggaccacctgacactagacaagggtacgaggtacaagaccacccctaacacctgcgacatgcagcttgagaaagaccttttgtccccatgggaccactttgtactcaggccattagagcctataaatactcccacctcaaatgtgagaggggattggaaaatcatattgagagaaataagagttttctccactattctctctatttcaagatagcaatctgggttcatgtttcattttcctcttcatcccatttctaaacttaaagcataagttggtttttcggccataagttagttgacgagttttcaccgttaacaccaagtaaggggtaaattggtcttttcacctaacctatctagttttgtccaaagtgtgattctagagatatttggctgaataaggataggactgaacttagaattttaaagatttatcattttacaaaaaaatgaaaataatgataacactctctctccaatctttctccgttctctcgaccaaaaaccaacccaaggaaaccctcaccaataccaaaatttttaaagttgttctttcatcaaactaatcagaaaatcttgctagaaatcagcagtgaagtgaaggaaataaaaggtaaacctaagtcctcttattctcttttaattttgaataaaaatattagttttaagtaggatttcataaattagtttttgtatagtgtgattagtgttcgattatgtttttgagtttgaattatagtagacaatgagttgtttaaaggttgtttgttgttgtatgggtgaaagcttcaagtttgagttcatggaactcaagcttgagctttaatggtgaatttttgattttagtgtaattttgtgttctgtgatgtttgataggtttattttgggtatttatactattctagaagagttggtgatatttggcttaggtttcggcaaatttgagttagaaaaactcgagtttttggtttctagtgcaaatcgtttaactagtttaggattcagttaatcgaatggtcaggtatgcacttgggaattcagttaactatttcttgatccggttaaccaaatgaggcccatttttggtgccttaatttttgtgttttatcgatatttaggatattgtcacaccatttattgatagaaaaacttttagttttaaatttaagtcctagaataaattcaaataagttgtttaccagtttatcgctgttgtgacataggagcccggatcgtcgagcgatttctactcaagttgatcgtcacgcttgaatttagacttgaggtaagaaaagtacaattgcaccacatagcatgccaatatgtaattcaataattatcgtctataagaaggagttattactctattgattgtctcattaggcaacaatataagaaagagtcactactctaatatgaaattattattaggtttcttacttatcgattgtctcattaggcaacgatagtcattgggtcaccactttaggcaacggtgagtaacggttactttattaagtagcaactttagtttgtcttattagatcaatatctgtctagtaattttttttagtggataatgtgattttctggttatggagtgaatatgtgattatttagttataactatatgagcatatctgattatgtctacgtgttgatattcactgtttatgcttttgcttttctttttgagttagtcacaaatgctttgtggtgcaagtaaggaaatgattaagctaggtcaactatgagttagaggtctttcataactgtattagtttatccggctagcaatgccgagtagtcatgatttttgttttgtggaaactttgatgagtggaagtattttgttgtaaagctgtaatggaatcttttataaattttttaaaaggagatccccaactctaattattttatattgtcaaaataattttatatctcatatagttattacttaaagtaaaatattttgtaaactattagtttattattataaactaatttataaaagtacacatgtggcatccttacgggttagggcgatacagggtggttccactgctggtcatggttttgctataccccaaaccccaaaaaaccccgagatcatcctagtgtcgttgccatcactacgagcccgagatctcgagacccaccatcgtcgccatcgtcaatgctctaagatcccatcatcatttttcagtgtcatcgccatcgtacgcatcgttcaccatctcatattttctctctcacattcttcagatctgcttgctctcacaccctcagtcttgctattgcggaagaaaaagaaaaacattaaagggattttattgaattgaatgaatactaattacagggagaaaagcctttaaataggcaaaatagaggtaacatgtaacagaactccttaaatcaaggagaaccgaaagaccagggatctgcactgatgtaaaacattgaccatctaagccaaacatatacaaacaagtatatgtatttaacagccacttaacagagtaaataataacagatatacactaactaacagagta

SEQ ID NO: 99275 - DNA, 2483 bp, Cannabis sativa
  modified_base (50)..(62): a, c, t, g, unknown or other
tgaacttttatccatgttagaattcttttactaaaattagataaaagtcnnnnnnnnnnnnnatcttaatagttcagggggaatttctaacgacaaaaaaaaaatcagcgggtataatttagtacatgtcaaaattcggaggggaaaagctataatgagatgctagtgacaatacttttagttggaaaaactattttaattgcgaacgagtattgacatggtcggctaaaaggtggggcagccgagacctacactttaggtcccaaaaaaactaaaattaatataactatataatatatatatatattcagaatactataatatatacaaacattattcacaaaaatatataaaaaggtagtagcacacatgatagatgttctttattatatgtatgagttaataaatttaattcttaagtactctttcaataagtttttgttttttagctggttttaaaaaataagtaatgttttaaaatatggtaaaatatgtttaatgtatttattattatctaaaaaaaagttaaaacacacaaaaatatatatcatattatatatttagacatatattttttttaatatatagagaaatgttaaaagatactatagtagtatttaacaatacttttaaaaatatcatatgcctattaattaatacaaataaataatgtatctcatataatttaatataataacttttttgaaagattgttaataaagtaacaatacttatatgtataaatatacatctgataagaaataatagtacaaatttttaaaaaaatcactctaatatataatgtatacagtaagatttaaagataattgtgtccctttaccaaaaaaagagaagaagaaaattatgtcaagatttaattaattagtatttatttttaatttggttaaaaaagggcctaatttcatattttgctctaagccctataataccttgagacggccgtgagtgtcgactatttcttttagagacgaagagtgtataatataaaccaattaaaaagtatgttggtataataatagcatagatatattagaatttggaataaaattaatgaggttacatctcaaaactaatagacaatggaaggaatagcacattcattttatctatgacaatttatttctacacattatcaatgttggactaaccaagatattaaattgcacatacagatacattattggagagaagttgaaatgctattattgtcacaaatggagaaatgttaggcataatttttttaaacaaaaaaaactaacaaagaactttcaaactctaatctcagtcctgtccattgctccatctatagcaattaagattattctaaatcatgttcatagcagacaaattgaagaaatttttctagtatattggctgttttgtccctcttgatcacctacccaaatggcaaacagctttgcaattaaagctgcagatatcgacttgttaacaaaattgcgaaaagagcatttcaccaaactagtgtttaattcccttatcagtcaacccgtgctgcaatctttccagccaatagcggcagagtccaacttgttcctgttatattaattttctacgtcagaccaattattaactatgttccaatattatttgattcctaacaaaagttaaattgaagattaaaaaaaatgtgttgcatatggttcaagttttttggtttctcagtgtagaaaacaatgagcgttgtcttcttgtaacaataaataaaaattataatttgataattggagccaagtttaagttgggtcattttggctaaagctcgtgaagctagtattcatgcagtgtagtagtacacataatatagctgaaatttgttgaaaaagggataaccgcggttggtcctaaaccaaaaaaaaaaaaagaatagttgaaggggatgaaccgaacaatttataatatattattcaagatagaaagtgataataatatatattgtatgtaaattaattagggaagccttttttgactttgaattttacggaaactggagtagaccgccgatgtagattttattagcaacaagaaaaagaatcaaaataccatgtgtgcactgtgcactgtgcactgtgcacttttccaatatctttatttttaagatatataagttagataattctcgcatttcagtatgggttacaaatatataaaattattagattgggatgtaaattaaattattattattattattattattattagggggacttatgaagtccctcacctccatttgaagtttgtgacacctctaatataggacaatcacaagctaactgtaactccttataacccgttttcttacttaatagtacaatttaaagtgtcagataaatagtttattattaagtaattttatttacaaaataaacttttattttacgtgggtgttattgtaaatataattttttggtcaaatgcagtagaatctctattcaagaata

SEQ ID NO: 99276 - DNA, 1183 bp, Cannabis sativa
ttttctactttcttggtaagagtatttgtgttaatctaaatggtttttccatcagcaggtgcttcattttcatctccatctctctaatgagagtgcactatgtgttccctctcaatttttggcttcagatgcatctcaacctgtttccaaaattatttcacgagtgcagcaatttgaaaatcctgttgctcgaaaagaaaatagttgccctaaaataagctgcagtgctggtggtttagatatgcatcctagaaattccaagccagaaccttgccaaaagtatcctggcaagagcaagaatcctctgaggcactacaaagagttcaatgttggacatcttaaagattctgagctgtatgatgcagttaaactctcaattgcagcgtctgaagcattggttatacatgaaatagcaaatagtaggtcagatttagaagaaataatttcaacagatttactggaagttacccttcgggtgaagcagacacgattggaatggctagaagattcatttgatttatccactaaagaaactgatgagcttgattctctctcagatttggatgattttgcaatgacagatgcttttgaagatgtaggattgacatgtgatacttacaatcttcaagttagtggctcagctgtttctcatgtcaaagagactccagcctctcaaaattgtttcagatatgacaatcattctgtcagtactgaactttgggctcggcaaatcaattttgatgatattgccacaccaaaccagcttgaaaataatttaaatttagatacagtagaaataacagatttgtctttagactctcttaattgtgagagggacaataatcttattgatggttctactcctagtttaaatgcctccgccatagcaaataaaaatgattcatccacagccaaaagtccacgtgatatagatatggcacaggtaaattatactgacataatttactatctaaggtatctaataaggaaaaacagaacatgcaaaacagtttctttcctctgtttatgcttcctgcttttagataacctgcctattactatatttattatgttagaatgctggagttgtgatgtcttgacaccctgtgtagattgtagtcactcgaaataacaatggaatttggttgtaatgtccatttttatgaatgttgtagtttcaatt

SEQ ID NO: 99277 - DNA, 1422 bp, Cannabis sativa
ttggctatattcctccaggtaaatcatattgtattatacaatacagtgtaccaaacggatccttagtagcttcactagctcttattgcttttacatgagattgaatgaattgtctctcattttcattgccttgtgatttcagaatatgcatacactatgcaagttacagccccaggaaatgtttacagctatggtgttgtcttgctcgagattctcaccactcaattaccagttgacgatgcatttggtgaaggagtagacttagtgaagtgggttcagaccgctcctgcaagaggcgaaactccagagcagatactcgacgccaaactcagcacagtctcatttgggtggaggaaagaaatgcttgcagctctcaaagttgcattgctatgcaccgatagcacatcagccaagcgaccgaaaatgaagcaggtagtcgaaatgcttcaagaaattaaacaaaactcataagtgaatttcgggctaaacttttccgagtagaatctgattagatgagagtgtttactttcttggatagctagtcagcttgtaactatatttgaaaactgggaaaagggttagttggtgagttaatattccaaggagaggtctgatgaacaatcaatcttttgtattttccaatgtggagatgtatgtttacatattattttaagcttaattttataaatgaaaggtaaaatcttatacaacataaccttatgaaccagatactatcgatttgatggtatataatcagatggtataaatataatgaactgtatgtatacatactcatagcttagcttgaaccgaaataaacatgttagtaatatagatgatcaataaatttatgtattgtaaatatagaggagtgttgctgtgaacttcttcattacaatttcttatttaatttttgtgcccgaaaattacatgtcggaatatttttttttttacaatggacaatggtattcgtttcgttatgcttatatactaaataccgctataaaaaaatttgagaaaaaaaattcgtcatgtgatttcaggcatgaaagttgtaaataggaaattatatttaacaatttttggtataaatattatttaagtacaatgtgattaattatctaattagctctaaatgagagaaaaattactactaaacaatctttgatttctttattattattatcttaaagattgtgtcgtaaataatccactctaaactaaacctattcttatatccaaatcagttggaaaatcagttaatttcagttgtactcattcctattggaaagttagttagttagttaaataactaacttgtctcaagttgttgagggctggacatgtcagctactaacaactatatattaaactcttgtttgtaataaaaaaaaggtaagaaaagagagagacagagacaga

SEQ ID NO: 99278 - DNA, 4998 bp, Cannabis sativa
gagagagagagagggagggagagaacagctccatttatggcacaaatgtgggtaatgaaacttaaaaatggaacacgttcctctttgaagtttacttgcaaaacagatacaaaaaactgtaaaagatttaatttaaaggaaatcattatgtactttatgttttttcaaaatatggccattcacttagtgtgaggttccttatgataccaattaattcagtactcgaaagcagctaaaatggaaagactttcgaaattcagctataggaatcacaaaagactatgagaatcttcattcaaagagagagaggggggagagaggatacaaacataagttttattcatctaataacaaagtattatatttgcatcaaatacatacaaaaaataaagctacaatctatgctccacatgatgaatttttatattgttactgcattatttccattcgtgtatcatattcttgaatgctatggtatatgtcactagttatcttgagccaacaacaccaaaatgggcaaatgaagaaggaaaaacaatcttaagattttataaataacattaacatataacctataaatatttaaaaccaagaagatagagttatgtgcggatactacttatagtcaaagaaaggcataaagataagataaaatgataggtacaataaaatggatcattatataaaaggtaaaacaaatgaaaaagaggatccccttgccaatgaaggaagactagaagtttttccaaattcgtcatctccaagaaattcagcaatgacttttgtaaccacaagtgctcaaagatactcagctactcccctacagtctacaatatgatccctttgttctaaccgcttgataacaaattataacaaaaaaaaaatactcacagtagacctaattaacaaaatacctaataagttttactataatttgaaactaagaataaaccctgacaacattattcatatattgtttagcaaaaaaaatatcaaaacattattcgtaacaaagaagacactaagaaacttatctctgccctaacaatttcagaccaaggttgttcagaattccagttcattatccttaatcaatgaaatgagaatgtatgaggtaaaataaagcaaaatagatgagtaaaacctataaagaagagttgattaagaagacaaaatgtattaataaatgaacatatgcaccatctccttattacatacatttggaaatttaaatttgtaaatatgcacaaaatcataatcatttgagtattaaaatagacaaggaattgtacaaatgaattttcactgaaaccaaaacataggaaaattcatgttccctaaatctaaactcaaagatttatagagcttagcagctatactagaaaatattagatatgaaattgaccaatatggtactccgatgttttcaaaaaaatcaatgatacttctaaattcaattggaagtatattgaacgttcacacgaatcaatcaccttgaatagattctcagtcaatttagaccttgattaaagcactctaacaaattcacacacacacaacacaatgtttaatctaatctaacccagccttgaaagcccttcagatgtacctatcctattttgttgagttctgaatgaaagtgttacaataatacattagttacaaaagggttagatacaactatttatagatatgagctatttaggaagccactaacataactgcctagattcctaactaacataactacctactagttctaactagagagtgattagacttaactaacacatgtgcacagtacacacatatacataagaatctcctccttgaatacaactgtacacaaaagtttacaaaactctaatggtcaagatcactatgatgcagtcaagtgatcttgagttgatttagataatgtctaaactttgttgttagcagtggcttaaagaacatatttgagggattgtcatcagttgagacctttagcagcttgatctttctctcagaaatgatgtcttgaataaaatgtagcctgacatccatgtgtttcatcctttcatgaaagaccttgttcttgcttagacataaggcactttgactatcatagtatggagacactactctttgatcaacccccatttctcttgtaataccttctaataacactgcctcttttactacttcagtgcaagcaatgtactctgcctctatagttgatagggccactattgatttgagtgtggctttccaacatatagtgtttctatttagcatgaagacatagccagtttttgatcttctagtatcgaattctcctataaagtcatagtcggcatatcccataataccaatgttgttatgatcagatccatatactaaatcaaaattcaaagtcccttttagatatctcatgagcaacttaattgcctgccaatgtaatacacttggagctcccataaagctgcttatcatactaaccccatagcaaatatcagttcttgtacaaatcattaggtacataataattcccactatgctaatatagggtattttgtccatgtaggtttcttcatctggactggagggagcttgagtattagaaaatatgaattgttggccaattggtgttaaaaatggaatgcagtcttcaaaaccaaacttcttcaggatcttcagaacataccctttttgagataacacaagcacccttttggagttttcccttataatctgaattcctagtatcttccttgcactacccagatctttcacttaaaattccttgttcaactactccttgattttgttaatctctattttttctttgcttgctaatgtcatatcatcaacatatagcagcaagaaaaccttgatatttgtgttttgtcacatagacatgcacaactgtcatatgcacttctttcacttaaaatatcagctctcattatcatcaacaagcttatagacacttacaagattctgagttatggagagaacttgtaacacagactgtaatttaagaggacatgatgaattatgtgatggaagagcaaaaccaccaacatgagaaattaaaagtttcttacaatcaaccacgactaaggtttcagttccagtgtaagcttgtggattttcaagatttgtagcatcaaaggtaacatgagttgttgctccagtgtcaacatgcatgctagcaaaaattaccaccaaaatcttgaaccaatgtggtggaataagcttgagaatcatactagaaatacctctgtatcgatgtacccttactgtaggttggttggaccgtggaaccacctaatttttgtcaaaatgatagtgacaaattatgagttgtggggcctgatcttagacacacttgatggatgacatttgttgattgtatcgaggataacctctacaacaacctgatgaggattgaggaacttcatgttgaggattcttggagtttgcatatggtcgaacaccactaaatctacctttgcaaaagtaaagattagcttgcattttttacagcaagatttttcatagattaatgatgttcaagtctgctttcatgagaaagaagtagagcttgaacatccttaatggtcaaggcatcacttcttgatgtgatacatgagacaacagagttaaattcttgtcgaagaccattaaagagttctaaaattaaatcttgatcggtaacaggggatccagaaacactcaatgcattagaaatagattaaatgttatcaatattcttagagatagagagacttcccttttgaatgttggagaattgacccttgagttaaatacgatgtgccttagtttgactggcaaacttttgttccagggcatgccaaacagcaaaaaggagctattgtagttggcaactaatgcaagaatgctctctgtcattgaaggagctgatccttcctccaccactataagcatactctagatttggtacgacactaataaggttctgaggtagggaaactacggtgaatagaatctcctcaagattgtgaccaatcacagttgaaacgacttcaaatttccaagagataaaattgagtcaatcgagtttgagaatgagagagaacgtaagtcaattagcgaaaagattccatgattaatttgaaggagcaacagaagtggtggcatgggccattattttaggagtatgatcaatcattgaagagacatggacaatagtcaacactactacaaaattaggctttagaggcagtttttaaggcctttcagcgtcggttttagtgaaattcgctaacgacgctgttccaggcgccactataggggtaaaaacaaccgacgttgtaaggaccctacggagtcgattattataaaatatccgcctccgtagggtccctacgacgtccgttattatgaaataacacactccgtagggtccctatggcgtcaattgttatgaaataactgactctgtaggggcttcctagaactttttttcaacttcaaaattttgtgttttaacattatttttttttttgtatttttattaaaaatctaattttattttttttcttatatgtatattattttttattaatataattaaattaagtctaaatctatatatataaaggagaagtatcaggcggtgccgggacgctctaaaatacttcaaataactctatctcttctctccttaattctctctcttttttattttttattgagtttataaaaattaataatttaaaaaatatatttatatacaatctaaaatctttatttaccaatattaaataataattaaaattttaaagaatatctatattgttattttctccttgatttatttttgattcatcgtattttttttaaaaaaaaaattatttaataattttaaaaaaagctaaaatatctaacttatatatattatctttgtatattaaaagtgcctatctaacgacatttctcggtttaacagaatatactttaaaaataaaa

SEQ ID NO: 99279 - DNA, 3114 bp, Cannabis sativa
agtattgtttgattagaaaaaaaaaaatggacattaatttatacaaatcaagaattcgtggatgagaattctttaaagtcttattgaaaattttattgcagtacgatgaaaaattattacaatattaataaatgctgaaaatgtaagttgttagttatattttattttgtggtttttagataaaatgtttttaggaaaataattaggacacacttaaattacacacacttcttacatacaaataatgtataattaatctcaatcatataattaaaaaataatatggtctaattaacttaaaattataaatagttaatatttattataaattattacgtaaaataactgtgtacaatttaaatgggtatcactcatgctcttatcagtttttagctgtttttaaaaatctagttcataaaaaatttggcaagcaaatctttattgtgttttgtatcacaatttttaaactttttagtagaaaatttgaaggtttctattgttatgatgttttctcgaaagaagaatacaatttttccaaaacacttttatgctctttaaatttctttaatttatataaatacctatgccatgaaaaaaaaaaaaaaacagtgcatatgaaaatatgtaaaagtataaagaaagataaaaagaatatgcaattgattcgtggtacatgagttaatatataccattcccccctagaaaataagtttgctttgtttttcttaagaattaaagttttatttatttatttaacattttattccaaacaaaacaatctcagatagagaaaatgacatcctctgatcgagtatacttttcattgaatacaaaatattcatctagctatatatgtatactttttgtaccgaattaatttaacatttggcaccaaatatcaatatactctaacatatccgcatctttattttacaagtaatgtctatagtattcacactaatttgaacgttatataggaaaattatactataggacatttaaaatagacctcatttataggacatttaataacttatgcttattggtgaggtgcatcataatattgtaggagtgattgtatggtaatggtatttaatgaacattatgattgaattttctgaagtgaaaattttaaatatttttcatttattttttatttgttttttttattcttacttggtgagatttgagagattgttttcgtacatagggtgatgttactctatcattttggttaacagaattactaggcgatttttccttacctgagcggtaggcctttgtatttgagtacttggcttatcgtcccacgtaactctgccgtatagattaatcagatggctttgctctggagcattggccacatttttttcagtaaaggttggtgtgcagtatccgtattattccatggcaattttttttttcaacctctcccatgacacattttccttacaagattagaagtttcagggtcttttggatttattttctttgtagcattattttcttaaggagcaaggtcatcaagaatattttcatcgtgagccatttcgcctaattcaattatggcctctaatcttgttagagcttctcatatttgacaggagaattcctcttgatacttcttttggtttcaagaagttttttagccattcaaatgacctcaggatctggctcatagtaatactcctcttctttgtcttttccatcatcttcaggatcatcgtcctcaggttcatcctctggatcttctgggtcatcttcattgatggggatttcatcaacatattttttagtatgttgagtcttcttggtaggacgactgttacttctgacgaatctcataccacacctgctttttcctgtagtgggaggattcacgtcatccattggagtgtccccatcacaggcaccaggtttgctgatagtggtccttgttgctaccattgttgaagtatacaactttgttaccaactctttcttcagctctcaattaaatcaccaaaatattaactgagatttttagaaatcaataaaatataatgatgctaaaaatatataataaacaaaaaaataaaagtagagttttacatggttaaaggattaatgacctctagtctatgactcaatattattatgataagactggaaaatcttattgatttacacaagtattttgccaagtattttaaccctggaatttgcttgagcactccagaaatgagattctaaccccttgtatgaatagattttctttatatttatagtgatatggttctagtatgtacacattgcccactgatagggtaaatacagattatacatattgacttcaagcttatttagtgaaacccgacccataaggcattgatcttttactgacgtggacaccacatcaagttgatatgattcttattcggaagatatgattcttgggcatgatcctaagaattaagccctgatattatgggatttggtaattaatgaatgtgatactgagctggatatatgcatgcttgtgaactattaccgtggaagctttgttaaatgctattcaaacgcacactgtggtaaaggtttatctcgcccaaatgagtcgtctgtccagaatctagaaagcttaactttgttaatggatccagtccattatctttattgggcctacgaatgggcctattatatttaaactgactcaatatgaaaataacttaatgattaagtaagggtattttagtcttttgccatttaagttttatcagttaaatccttagtggatttatatggagctaatagatataagctgggtaaaagttagattctaaatattaaatgatagagtcaaactaagcattacacaatacactctctctccttcatctctcctctatttcgaccctaagaaatccaaggagacaaaggaaatttcaaagctttttcttcggttttagcaagaatttcaactagaaattgaagtgaaattgttagcctagattaaggtaaaatctctaagctctttttctttaaggaggcgtttggttgggaggaatgaaaatataggaatgtgaatgagaatgggaataggaataggagtggaatgtaatcaaatttaaaatg

SEQ ID NO: 99280 - DNA, 1508 bp, Cannabis sativa
taggaacacgtaagccaacccaatatgtaacatgtctatgactattgagatataaatgatgttaattttggtggtatatatggaactcagctcaccaaacaatactaatttattatgttgttgaacaagtagtgaatgcttaatataattcagtatgatcatataaagtaatgataattaaattaatttgtgtacttacgttatagatggacagaaatggaagagggcagggtccacacacagatgaaatcactactatcttccctttgcttcttttcaagtgtggaattgcaaagtgaatgctgttaattgtaccccataaattaacatcctataccataaataaacttaaaataattattcctctacgttttgaagaaaaccattatgtgacaatataaataaaattattaccataatagatttgtaattagaaatgtcatcaatatcttcaaactttctcagtattattatcccagcattgttcactagatgatccactgcttgtatcataatccaaacacattaaaattcaattgaaaccttaaggattgcaaagaataaagaaaaaaagttaattaagattttttttcttaaagtttgaacttttaaggtcgttaaaaatactacctgaattattaagattgttggatttaaggacttttgtcaaattttagtaaaaatagtctaacgtagatgaaagttcagaaggcatgatttagtacatgtcaaagttcaaaggacatgatgatttggtagatatcaaagtctggaggcatggtttagtacataaacaatcattgaaatagtaaaattgaatgaaattaaacaaaaatccttaaatctaacaatctcaatagttcatgagaaatttttaacagctaaaaaaattcagggaacatgatttggtacatgttaaaatttaagggacaaaaatcctaattagccaaaaaaaaatgattaattacatcggccgaagtgatgaactgcttcatctataaatctcttacaatcttggagcttagaaacatctgcaacaatagaaataacacctggggatcctaatttacgggctgttgttgtaacttcttcaagattgtctctaactccaactaaggctaaaaaagctcctcttctagcatattcataagcaagttgcttcacaaaaattatttgaaacaatagtcatatatataatcatatgtttataatattatacatactagattaatgtatatatatatatacctgtccaatgcctcgagctgccccagtaatgagaactacttttctagccacgttttgttcagtggttatagatgtttttatagattgtagaaacttgaatggaatatatattggtagaatcaaaaagtgtagaaatatgataatgggaggaaatgcaatgttcagcaaagagtggatccattccataattgattattggctaaattttgttattgagagatagagagtataatttccttagccttataaactcttttttt

SEQ ID NO: 99281 - DNA, 3166 bp, Cannabis sativa
caaaattactagttacaaataatatttgaataattcgagtgtgataatatacatttaaataatgtattgtatactacataaatttcaaaacaatcatactgcgataaagtgatgaactatttgaattctgatttcgacaactaaaaagtaattataaataatgattaaaaccaatcactacccaacaattttaaatatacatatttataaatatatatggttttatgaggctacaagatgggaaactactactttatgtgagcatgtatgattgtgtacgattctatgtcattgtctttggtctctcttctctttttttgtgtttgctaatgttatatgcccattgttatatggtgccttttctattcttgtgtccaaacacacccaataaataggggtagtggttatagtggagcaccactacatttagacctttcaatctttttttttttttaattttcttcttcatcttattcttttgttttctttcttttttgcttgcccattttcttgttactgttttttatgtgccttcattaggttctttcatgagcaattgtttcattttgggaccattcatggtgaattaagactattgttcttttgaagaaaggcttgttgagttttggtgctcaaatttttcatttagtgcgaaaaaaagtatagttaaattaagagcattggtattgggcatcagtagagcttagcacttctaaacacgtcgcattgcgattgactaatggtactctctaaaaattattatattaaactatatgagatctaatacttagaccaatagtgatattaacacataagaaagtactatgcaccactagtaccttttaacattttttttaaaaattaattagaagattttttctcacttcaaaaacaaaacaaaacaattttaaaatcatcattgttagctctttcttcttataattctagccccactattacaaaagacaaaaacaaataaaccatacaactaaaaataatgccaagttcatgagcaagaccactaaagtttttgatgttaccttgagtgcattatcttatcaaatgagttgtcatatattcattggttggacatggtaaagacatgagaaatgggggcatgggattttaattcttacaaaggaataaaatccaaaaggtataaatggatggatcatcaaataaatatgtgttttctttcttataagtccataaacattattaaataaatatgtgcttagtgatcataactaaatagggttaataagatgttgaattttgtaaaagttatcggttagattgtttattttattaaataataaaaaaaattgtattttttaaaatagtataaatagactgagtttaatttttaacaattttatttttaatacaatcaacttgaagacaatttctagtacgaacagtagaatacgtaactagttttgtctcaacatctttatatcatgttattattaagttttattttgacaaaaaatcaattcaaagtactatttagtattattttaaaaagtaaaaaaaatctaatttgtcattttataaaacagaaggtccatacaataacttttataaaatataagatccaaaaataataattacccaattaaatattaagtttaataattattataaaaaatattgttaaccatttataaaatattatattgtaataatatctaataacaacactcttattaatttaataatgtcaaatttagagtttataataacccttgaaaattttatttcctttatggctatataagaggactttgatatacatagtaaaagttagctttttgtgaggtaggattttacaagttgttagggaacaaatagagatgagtttattaataatgcttaagattggtaatgatttcatgtttagtttttaatttatcctttagtggaaaagagtggattttagaacttaaaaaagaaaaatgatattctatcatacactcataagagtgtagggtgtactaatgatatcatcattgactcacaaagcataattaattcatttctagtttactttgtgaattcatatttgggtaggtaattatttagtgtcttgtgttatagcaaagtataattttggtacctttttaattattattttttatttagtaccatatatttgtaaaatcagtcactaaaatagcattttttaggatttcgatcaataatttttctatattgctcaaattactcattttttttttaaaaaaatatataattttattaatagcaatcactgattcccatattaaaattagaaaaatgagtcaaccaatcgaccgcctgattcacaatttgcttgacacaaaaactcaaataaagttggataaaagagattacagcatcataattaatcttaagaactctatattcagtttcctctaccgcttagaagacacaacagtagattctgttgcagcagaaacccttacgtaactacagcgctaacaacttcttcaattgtagaaaacttgttattcataactactaacaacaattatctctttttttaggtactttaaattgtcaaaatttattttaaaaaaatattatgacacatataatgttataactagtctagctcttaatttttaaaataaaaaattatttaaaaatgcgtttaacaaaaaatgaaaaaccaatttttaaaaagttctatttagtttttattttaatttgttattttttataatttcaaaattattttttcgtgaataatatcaatatgtgttatcatatttctttcccaataaattttacttatttaaaatactaaaaaggaagaataatttaggtattatggtaaaattattaaccaaaatcatagataaagtattattttgactaattttataaatacaagtatctagtaatctaacatcctgatttggctgaatctaacaattattttcttattatttttgtgctggtatggcttgaggtatatcttaggtggtgtttagatgggagaaataaaaacataagaataagaataagaatgagaatgagaatatgaattggaattaaatgaaataaaatttaaaatatataaaaaaaaattgataaaaaaattattgaatttttttattatgtattggaatggtctttctttcaatttcaaaatggaata

SEQ ID NO: 99282 - DNA, 2096 bp, Cannabis sativa
gtgtgccttgggcttgttgtgatcataatgagaaatgaggctagacttgtagggggagagggttgaagagacaagggctcggagctcaaagataaccccattggttgagtattaggtttggctggcagccaggcagagatatatatccatataatgagtgagatttgatagggataattttatattatataatactcttttctttcttgtaaaagggtttttcttcacacacacacatacacacttcatttaagcataaatatacttcactgcctgtctttcttgataatgaaagatatcatttttgggtcattcatcaacgtcatcatcactctctacgccgccgttttgactgctactacagccggtactgttcaacgacagctggtcaccagcgacggcaacaaagtccaagtcttcttcgtcctcatcatcagacacctcctcatgatcatgaccgtccaatatcttatgatcatgatcgtgatcatcgtcgtggccaatgggaatgagttgtgatgatgtcttattattattattgtttgttgtttggccagcgattgcaagtggctccgtcagtagcttcccatctcgaggaggagagaacaccactggcaaatagtggtccatttcgcatgggaactttgagttcttgaagtgctctttcaatgcctccaatcccttcatttatttttaattcatttatatatacatatattttctcttgaaaagaaaagatgaaagataaagaaatcttttgtcttttataacataaaaagtaaataaattataactcaaaagaaaaaaagagacttttataagactttcataatcatcatcatcatcttaatattcaatacctgtactctagcataggtaacttcacagatctttcttgagttgaatacttcccaatgttgaagatgaaatgccttgtataatctccatgttgcctccggggaagtcatgttcacgaacccatatccaacattgcacttgttactatacattaacataaaatacaaagaattaatcatcaatatcaatgtaactttttctgggttttgtcttatttatgcaaagattaaagaaattaaggcaaagatcataacttgaaatcaataggaaggtatacgaaatcgtaagaagaaaagggttgctcgttcccgccgccgtggtcttcgttagcaatctgttcgttgcagtggatacagtggttatccaacatgttcaatagcagcttttgactgtaattataaaaataaattatattaatatttttatataaaaatactaaaaaaaatagtgagagagagagagagaatagagagaatgaccaacctgtacttgttcggtatgttttttatcattacagtagttctggtatctctgcaattcgattccgtcatagcttcttcactaatcaagaaccgcgaatcaaacttctttccctgtttcattccttttctagaacgactcctcagcaccgtcaccggaatctgttgttgagactgcaccaccgccggcggaggagaagacgacggaagtagctgctgcgtgttaatactgttatgggttttcctcgaaagcctcttgagaacagcccctccgccgtgagattccctatcccgatcagttgccactcctccattaatacatacattatcagaacccattttactacttgaacaacccttgttagagtttcccttcctgactgggaattgagcttgagcagcgtaagcacgcggtggtatattgccgagttttcgaactaccggcggcgaatacttgtgatgatgagtagtagtggtggttaatgagttaataaacttccgactgtggccaccaccgggacgactgaattcaattactatttgtttgccgttaatttctctaccgttcatttccataagagccttagctgcgtctcttatatcaaaaaactctacgaacttttggtgcttcttcgaaggagtttctcttaattcttttataggacctttattaagaaagaaagaaaaaaaaaacaatcgaaagagacccatcaaatcatttttattatatgagaaatgaaaaaaaaaaaaatataaaaa

SEQ ID NO: 99283 - DNA, 3012 bp, Cannabis sativa
gttatgaaaattgcttgtcatattgctacttttctatgctcgcgtccttttatttatttatttatttttgaaaggtatccattttatgattttagatgactagaaaaattactccttatgtataggcataattgtttactattgaagcaacacgcatatatgccaaagtggaccccatgataccaaattgacgtagaaattgtactaatatattatacctaatttttcatttttggcaacttggaatacagctttagcactatctttttcgaattgaattaatgcatcagccatattaacgaacagtaacactcaacagacttatcgatcaaggcagaaaacatttaaatctgcagtttatttgccaattttgtgcaaatttatagatgtgccacacgtgctagatagagtacttctagagctaacataaaaatttcaattcaagttggaaaattgagtttaatcaaacttttgtatgtcatgaaaattgagtctatattattgaactgtttaaggcaaccatttcgtctaatcaaagttttgtccttctgtcatgaacacacaatcatgcatgcatggctacattaagctaattaagattacacactttataaatgaatgaatcttatattatattagtaataattacaaggtcaatgcaatattaataattacatacatatagctacaaaagagaacatctggcaatttaaaattattaaagaactatagctcaaattagacatcttgtcaccttaatttaaatcaagcaattagagctagggaaagaaaaaaaaatatgctaaaaaaattggaaaactttcatgaaagcaactattgtcaaaaagatgaaaagtaccattttttttttcttataagaaccatttattattgggtctaaaaagacctttgatgagcaaactaatagcgtgatattctctttaacttttgcttgtcaaatctatttccaccattgttcattgaatccctatagcaagcacaacacacaaaaatggcttgagtggaaattctgaatttgaacgttgaaccaataacgacacacgtaatcttttcactacccactatcgatagaaggataacatcttcttaccatgataagggtattttagtcatatttcttaatattcaaaccttttggatttagtgcttaatcttaattaaacattggttaaatacaacggttatacgaaaacatccaaaactaaaacccgacaacccaaaattcctattttaataactactattcactattttatttttttgcggtaatgctttttgtattaaaagaaaaaaaagattaattagacattaattgaatctgactcgcctgaagatgaggaggaacgtcgtcgtttctggcttgaaatccgtcgtttgatctggtttgataaatatctatctctatcaaattatcttcgtcaacgacgtgaaaatctaagcctctgtgtctcttatcaatgtcgtcgtcccccaaagctatctcaattaaaccatctctgtcttcctcttcccacctgaagcacatatttaccggcgaatcccaaaacccagaggccggatagtctccgtcggacgagtcatcagaatctgaatctggatgataataacgcgaaaacgtatgctgcttttcagtacccagaattcgattattctcatccttttggctctcaccttcatcttcttcgtctccttcgtactcttcgtaaatgacctctaatggtcccctcaggttccattgaacgaaagatacttcaaaacatggattcggatcaaaacccatttcggtttcggagtccgtttcggatttgtaatcgacccagttggaatcttcatcttgagaacctgaaaattgaccagggtaatcagacgaatcgctgtctttgttatcgttggtaacaacatcatcatcatcagcaggagtagtaggagtaggagtaggagtaggagtaattgttgtatcattatcatctaattctctttgggtttggaaatggagtttggtttcgtccctcttgtgctcatcttcaaatctctgaacagcaccaagtcgaagaagagtgagaagcaaaaccccagtcaaaatcagaaccggagagaaaacaattctcatgaattggtaaggaacgtagaggaaaatcaaagcgtagagagtaacgatgctcgaaattaaaggatttgaaaacatggtcgatatgtgagcggcccaaaagttcatcattatcatatttaactaaacccggaagccaactaactcaaatcctactaataaggaatcccatagagctaaagtaaaagtgaaggtggagctatagaaagagaagaaaaagtcaataatggaatgaggagacttaaaaaggttggatataaagagagaaggagaggggtttaggcttttaagtagaagtattgatttgcgtgggtgggtttatggggctttggggacttttggggtgcgtaaagaaaagggcataggcaaggcatcaaatattttagggtagagtagtaaatagtgatattattgaaaagaggagaatgtggggcttgaatttgattagttcactacaagtgtggtgatggggcaatggtggtgttgttatggtggtccgttactatacatatatataatgcttttaccaaggtcatcttgttttgtttttgtccccattaaatcaacaatttatccttaaaagatgttttacgttttacccattatattcattcatgaatttaatctctctttatctcagtttattcaagaccctgtcctgattcgaggttcttagctaaatttttataactacacacatttttagatgaagaattttattaagaaggaaaaaaaagaagacccttctaatctaatgaagtagctagtatttttgtttcatcaatttcaattttcaattttattaacaacactcgagttctcttattgggagcgggaaagttgattattaaactctgtgatcttttgaatagaatagaatttag

SEQ ID NO: 99284 - DNA, 4381 bp, Cannabis sativa
ttcttagctaggcaatcattttactacaatattaatttttttgttgttaccaacttcaggattgatgttgcatcaaaaatgaattatacatgaattttcaaaaaattatcaactgcaacgaaaaagacaatgttggaatttttttcaccaaaaaatttatatagaaatttaagtgcaacaaaaaaattaatttttacacaaatttttgtatagaatattaagtaatatagtgcaaaattggtttgttgaattgtgttttgaatgatttcaggtgtgtgaacaagactataggccttatgtaccgtacgtggcttggtgttgaattattattattatctcatttggttttatgatatgtaatttgaattgtattaatttctaattgtgtgcgtgtgagtgtgtgtttgtaatatgtaatattctgctttacatacatagaaatggcaagatttctacgttgtaatgtgtgaaatgactatcttatcacttaatgaaagttatcgtttgttatgaaatgcaatcaatttggccacaactgccatttttcttcttataattataaccagccgaatagataaaattttgaataatgataataataataataaaagtttatatttcactgacatttaataactagtgggtaactattttggatttacatacaaaagataacattttctatattaaattataatgtttttttaaggggataattaatgattttatttataaaaaaaaaccatccaaatatgcaagtttaagcatatgactcatattctaatataatgcttaagcttctttttttcttttttggttgaaatatataatgcttaagcttcatgaaggagaccactcattttcatgttctttagataacaaaatagtgattttcttcttcgacgactcgttgttgatgtgttgttggagaagacaaagccacgagtgtgttcagttgtttcctagtacaaaaatatcaatgaagcatgaaattttgtacatgtaaaaaaaaatgtagaaattttaccataaaaaaagattctacttaattgtataataaatttttttcttacaaaataatattatgtgtaaatttcacttttttttttctagctacttgatagaataccttggagtttttctaggataccttcacaaattcatctctaaattttgtttttctcaaaaacttcaatattccatcaaggtaacttgttgctatttttggagtaatcagttaaccaaatatcataattcataatcaattatattgagaataattaggatgatcaccgcttatcttcaaataagggtggcaattcaagtcatgacacaataatatgatacgaactcaatatgaattattgtgggttagggtcataatagtcacctgtttatatccaatatattattaaaattattaatttatagttaaagtatattaattttcataaaaaaatatataaattaaaaaaaaaattgcatataagaatacaagataaataatgtatatttgatattgggaattttattcattatttatgataaattattttaataaaaattaaatatgtgataccaatcatgttggtaaacatgtattgtaacataagtatagttgacacgtgaacacaataagttgacgcgagaacacaatgggttggattagagttgagatttcttgacaagaaacatatgggttgaattagagttgatcaattaaatatgttaatctgtataacacgaacacaacacaaattaccactactagtaccactatcttcaaatgaacttataccccaatagaaaaccatacagatttatctatgtggatgtattccaaagtttatataaatcaacattattgataaactaaacactctgtagaccaaagaatatatatacaagaaaggtaaattagtgttgtaagcaaacccacaccaggaacaaacataaatcccattccaaaatcattatagacatgccatcaacaacttttgcatgtcctaattatgattcttctctattaacaaaattggtatgagattggtttatagagattttattgcaaaaaagtaaaaaaaaatgatacatatataacagttttcaatcataacaataatgacttccccatagacatatgtttgattaaatttagctgcttaattccaaaatcatcacattacattaaattaatttaatcttgtagtttttttttagctatttactaaaactttacaagaaccttctattctgctatgggtgtattcctttgtataagaaaaggcttgtgactcgttatgtgccaaatttcggggcttcttacaatatttgcttatcaaacatgaaaaaagcccaaaaactctttgtcaactctaataagttacaataatgatgttacttgctttgaataatgttaattctgtaacattcatttcccatttaacactcatggaagcacagcaaaaatgatagataatagttttcttcaagataggataaatattccaaatgcactttctaaaacaatgtcgatcttcttttctcattccatatttattaataactatctaattatatatttataggttttacatactaatttcaaattactaacaagccctgaaatagtgtaacaaaagaggcataaattaataccctttcccctaaacccaaagtattaaatcaaacataaatgcatacacacactcacatattgttacactatgataatcctatagttaggggtatataaatttggttagaaattcgtaaatccaagatcgccaaactaatatgtaaatagaagttatatgtatattcttgatatgattttcataaacaccaccaaagagcaaaaagctctaaggggctgagagctaggagatatcattaatagatggcctcaatcataataatatttctgatacaagaggaatattcttagcggatgttgatagagcaaatttagccaaaatattagcaacaacatttacagttttaggaccataaataaaattcacaatattaaaactagttttttggtttttttgtcaaggtggagattgttaaatgataagtttggctcaaaagtcaacttgcattagagttacaaagatacggttcaactttcaagagttttggaatttattttttgtcacgtctatcaagaagcatgctctcttatttattacattgaaagatgagctacctcatttatttcatatgggtggtagttgaagttttctttctataaatatggagctcttagaagagcatttgtaattcaaaatttgtatctcaatgaataaaaataattcaggtgcaactttgtacaattgggttcattagaaaatttgagagagagagcatctgtctatccaaagtttggaaaacactctcagaaatgcctgagagatattattagtgtaggaactttgtctctgtattctatatattttattttctactcagattaataatatcagctgcctcctgtggagtagtcgaattacgtaattcagtgagtttttgtttactgctttgatttatatttatcgttatctttcgttatttattgcttatacgcacaacaagattgaccagataaattttcattaaatcaaaaaaatttatggttaaacgttgtggaatagttcctccaaataagaaaagcctccaaaagttattcttggaaagttgttaactcgcagaagtaagtcctggaaaactttcttgtccctccagaaaggttcctcgggatagctagccttcctctgaaaagaagattcagatggctaattttcctcttaaaaaggagtttcaataatctactccaactggctctatcctattcgaaagctccttcagcgtgtaattttggttagtatttctggaagctctcatgcacgttcccaaaagcacctatacttatgttgacatagagatctcgctcaaaagagagttggttaagttaaatattacctaacttaaaagcttaacctcctgcagccaccgactttaggatcttgattttatgcttataaataccatcaacacttatcatttaaagcagactggattgacaagtttcaagaggagactttgagtttgagagagaaagagattgagaggtagagagaggttaatagaaaagagagagattgatttgagttttgcatgaagaatcttctgtagatgaagaagattcttaagtaagagtgtgagagttgaaacaccttgaaagaatctaatagagaatcctttcgactgtattgtatatgttcttgctcaatcaataaagaagattttgtggtgttctatgtcaagagaaacaaagtcagttggtctcatccaactaactttctgttacatttagtta

SEQ ID NO: 99285 - DNA, 2413 bp, Cannabis sativa
aaatatcagctttaatttctgtaaaacaaacagtatttacagttgagattattttttatttattttagtgttttattttttaaaaaggaaaaaaaaaacacaaacttaaatttttttatggtattcctctttaaataaaatgacatgttcccatatttttaagttttttcttaaaaatactatatttagtgtaattaagtttctatgccatatatatatatcaaaacttatcatctttttcccatatttttgtatattgggcctgatgttgttaatatattgggccagcaaagagaaagtgatggtattgggctttggtttaaaattcattttgacttaacgttgtcttcttctctctttctctctcttcactgagaaactggaatgagtgtttttcagtttcagtcttcacactcacacatctcccttttccctccattcctagggttttgaacagggttttcttcaaactcagttcatttccatccctaaatctcgaccccaaaccctcgaattgcttccacattcttgttaatagagcaccacagacctcaaaattcatggctttttcgttattttctacgccacaacaacagcaacaaccacagtcatcgccgtttcagactcagcagcagtcccagccatttcagcagaccagtcctttcttttctcaacctcagcaacaacaacaaacgccccaacaatttcaacctcaacagcaacagcaacagcaatctccgttgtttcagcagccacagcagcagcaatccctgttgtttcaacctcaacagcagcagcagcagcaacaggtgcaacaacaacagcagcagcaacagcaacaacaacagttgtttttgtttactaacgataaaactcctgcgacttacagtaccaagtgggctgatctccatcctgattcccagaaagttttacttcaaatcgagtatgttgtgttttgaagtttgaattttgttgggttttcgttttctcttgttttttaagtgatgggtttaattggctgctaagaaaatttcggtagagaatgctaagggtgctatattttgaggaatcatttttgatgttgttggactatagaatagagattataattttacatgaatttgtgttttgagtttgagaaattgagattttgttggaaggttctataaaagatttttgtttaatacttttcaacttagcagggttcattggagttaactagctatgattaatgttttattacatacatatattatctacatttcaaatattataataatgatgtgcgttttatacttgaaactttttgtttcattagtttattatgtatttagtacattcttgattcgatatgtgtgattttaagttgcttaagcaatgtatgtgattagggaacggatactggaatatagagatgagagccagaggcttgatcagtgtagtcggctttatgattcctcagtttctaatcatggatttgagcaagacgcaagccatattgttcaggttagcatttcgacgggttaaattccttccagtttctttgttttcttttaacactctatacaagtgggtttggacttgtaatttactgttcttatgtgtctgaactcatcatgaattttccagaatttcaatcttggttttgagttaaaaaagctgaaaaagacagccttctctgttatatatgagaatgatatgataaacgagtagaatgttactccttaagtcttaaaactagttttgaactctatttaatagattatagctgtattacttatcataggactataatgttacaattaagacttaagcttgaatattgtggtaatacaggaactcagcggaattagtactgatgtggaaagacaaaaagctttgctgttggaactaatgacagttgtgaaagatatgttacgaagtactgaggttgctgttcgttctttcatgatgctacgcccaaggtttgttcatccaaattcaggaaatgcttctatagccacggcaccatcacaaccttctggagcaacaggctctagtagtcaacaaattgctacatctattgtccctgtttttgatttctacaatggaattccacggaagccctccccttttctacagcaaacagttgctaggtttgaaaagtatctcaatgagtgtcgtcagtggattgaagagttagagcaattgcttttcttagactctgaaaagagcacttgcaatgcagcatctttgttgcagtctcttccaaaagttatgtcaaatgtccatgatttttttgttcatgttgctgctaaggtattcaaaagcactttataattgttatgtgctatatcaaaaaaacatattcgtatcatatttagtactctgcttaaatgtgaacaaactattataccatttcgaggcttatatg

SEQ ID NO: 99286 - DNA, 5036 bp, Cannabis sativa
gaccatgagaaaaaatttgactgacaaattattttgggtgctaaaacagataagggtgcatcaatgtatccattttaaggggatgcattgtagaatttccctaacttttttaagaaaataccgtatttttgtaaatttatactttaaaaaccataaaaatgaaaatttcctttttttaatgtaaacccaaaagatccattacagcccatattattctctgagcccattttcttaggcccaagaatgtttttcgtctttccaagagagagagagagagaagacagtcgtgacttgtgatcttcgtctgaaaatctacctcagtttctctttctatggaaatcaaatctggtccgaatttgatttgattacagcctacgcaggattcattccacatccaaacccttgccaatggatgaaccggtgctttacgagactcgtcgtcatacttcaaggcctttctctctcaattatcctcctcaacaggttaccgtttccttcctttttcttttaacattttactcaaatccttcatttctgaattctagcattactgttcactgagctcaggttgataatgaatccagaggcggctttctttcgcttttttcagttcaaggtacacagatttcgactttttatataacttatttatttttttttttaaatttaatgttttattcgaattctcagcatcggagctttattaatttgctaattactttcaatcttgttctgtcaatgctctttaaagttttacattgtataactcgtttttttgattatttttcttggtgttaaatctaggattctgataattgtacttatctgaattggttgagtgtgtcaattagtatgtatgttgatattttcttgattggttcggcataggtgtgagcaaactcaaggaaaagtgggtagaaagcaagcaaccaagaaaactgaggaaattaacttctttgtttgtttctcctagtggcgagaatgttgccgtggcttctggaaatctcataacttttttgcagaagaaggatgattattcaaagccctgtggtactttcagtggtaacatttcctggctgaactcatttacttgtgtatttgtatcgatcatcggttttgggtgttgcattgcatagagtttagtgtttatgtcgaaagatttggttggtttccataagataggaacatttttataatttgcaagcattgtaacagctagcagctttgttacgtttacaaccggaacttggtcggaaaatcatgctattcttggagttgttgatgatacagatactctgtattttattaaagcaaatggtgatgagataacaaggattatgaagaggcatttaaaggtctctttaccgattgtaagcttgattgcaaatgtggatcctgatgttcagacatcttgcttgtaagtgtatatattttcttacagcctttgcacatatacataggacagcatgtatgaagatgattttttcttttggagtgattatagtacaataatatggtacataagttgaatgaaaattttccaggtgtagctttactatattgacatcggatggttctcttcaacatattgagattagtcgggagccaaatgtctccatcgagaatggcataacccagaagggaaagtttggaaataatgtcatttgcattgattcccatccagaacttcttttgtttgttgtagttactagttctgacagtcttgcactgacctcaagtggaaatacaggtatgtttttcttactagttttccataattttatttctatccccgttgttgatcattttgactcgtaacaagtccttaaacataattgatattatttgtattattattattgaaatatgagtgctagcaaactttcaaaatatttaaaactgattttccttcctagctgaggaaaaccgtggtaacaagaaaaatgaaacattggaaagcttaacgtaatacataaaaatacataagcctaaagctctcaatatatcaaacaaacacaaatagcaatatagcaacagatattatgtagtataatatgcagatgattattttttttgtcctgtctgtctcccttttatttgctttacatacttggtgtcttgcattactgtttatgttctgaggtttcagtcatctccgtatctggtgaaacattgataactgatttctctcactagttttttgttactccattttatattaaatattgtttctttatatctatatcaggttcttcctgtctttcgctttggcataggagtaaagttatggatttagagcaattgtccactgttcagtttgacggtttattttcaaagccaaaaggttatataggtcagttggcatatccaaaggttcaaatttctccagaagctgaatttatttgtactctagatgtgataggatacttgcatatttttaagctggacaagaaatgtttttcactttcacatataacggtaggagaaagatgtgtttcgcaagttaccagtgacgttgtggatttcacttggtggtctaaccgtgttcttgctatttctaaaaagcctggtgttgtgaccatgattgacatatgtagtggttacaaagttcaggaaaatgaccctgtatattctatgcctgttttagaaagagctaaccagtttcaaggaaatctctttcttttggagagtatgtcaaaggaggagagagataatctatctaattacagtggaacaagtgcctctcattgtatagaacagattacagaagatggttttaataacattgacatttccaagttgagttggaacctgataacgttttctaagaaatccattcatgaaatgtatgaaactttaatcagcaacagaagttaccaagctgccttagaatttgccgatcgtcataggctggataaagatgaagttttaaaatcacagtggttgcattctccacgaggattaactgaaataaacatgtacttgtcaaaaatcaaggatcaagttttcatcctctcagaatgtgttgacaaagttggaccaacagaagattctatgaaggctgtgcttgaatatgggttgcgccttactaaccaatataaattttctgaactacaagattctgaaagtaatcaaatttgggactttcgtgtggctagacttaaaatattgcaattcagagacaggttggagacatatcttgggataaatatgggcaggtaccatgcttttcttcctatttattgttatttcagtttgtaaaggaaatgagagcaaaacttataatccgtagataagaagtttttatttgatgcctccattgttcatcttaacaagctgcgataaatctattttgataaatctatttttttcaatgcatacattaagtttgtttttaaaggtaatagttactacaaagtactaacccactgtttgacaattctgcaggttttctgtacaggaatttaccaaatttcgagtgatgcctgtaaatgaagctgctgtaacgatggccgaaagtggaaaaattggagccttgaaccttctgtgcaaacgtcatccttattcacttgcaccttttattttagatatattagctgccatccctgaaacacttcctgtacaaacatatggccagcttcttcctggaaagtctcctccttctagtacatttgtaaggggagaagattgggttgaatgcaggaagatgataaattttgttaatagcttacaaacaagtaatgagatcgacattcagattagaactgaacccattgtcaaacagtgctcaggttttgtttggccatcaattgatgaactattggtatggtacaagaagcgggcaagagatattgatgtatgtagtgggcagctagataattgcctttgcttgcttgattatgctaatagaaaaggcatctatgagttgaagaaattccatgaggatgtttcatacctgcaccaactgatttatgctgatgacagtgatggggaaataagtttgagtcttgttacgtgggaggaattatcagactacgaaaaattcaaagtgatgctcaagggagtcaacgaagaaaatgttattgaaaaacttcgtgataaagcagttccatttatgcagaataggtttcattattcaaccgtagtctctcatgatggtgtaacaaggaaccatcttggtgatgatcatgatgaggccgagtcatttttggtaagatggctgaaggaaattgcttcagagaataaattggacatttgcttgatggtcatagaggaggggtgtggagatgtccaaagtagtggcctgttcaaggatgaagttgaagctataaattgtgccctggagtgcctttatttgtgtaaagtaacagataagtggagtaccacggcttctatattgtcgaggcttccgcaagtacatggtaaattcttctttagatgtttggttttatccttaatccttatgaattatattttatcattttccctatgttttaattttttttttaaatgtgctttacaggtagtataatatgtgatggtagcttggagagaagactaaaacttgcagaggggcatattgaagtggggaggcttctatcattctatcaggtctgtattcctcttgttacaaaaatgcttttactttggaatttatgccttcatagatgagggatcttcagaaagaaagaaagattaaattatgtataagggtataatactgatgtagacttccgacgaaagcctttatgctacagttatttgaatattttggctgataccgatgcattaattccttagcttgtgatctggtttttttttttaaatagtattccctatcaatccatgaaaaagaaatagattgtgattgcatatattgatttttgttcttctgttttttaggtcccaaagccaatgagttatttccttgagtcccacgcagatgaaaaaggtgtcaagcaaattcttcgtcttatactttcaaaatttattcgccgacagcctagccgatcagatagtgattgggcaagcatgtg

SEQ ID NO: 99287 - DNA, 7539 bp, Cannabis sativa
cacctatatgtagtttaaacatactataaaatcatagaaagtgaaaatggtaattttttctatcaatttaaatatgtgataagattcaatataactagacaagattcttttttttttttttttttttttttttgagaaatagacaaattcttagttggtacatataaaatttacaatgagacagaagtacaatatatgataaaatgaaaaagaaaatcaatagagtgaaagcaagtcaattagtcaataaataatttattattgggcacgaatagtacccatcactttcaataagtgacgttttataattagttaatgatgatttttaaaaattatcttttgaagttatatgaaatttaatatctagttacaccaataataccgaaacaacttttagcatattacgtttgaaaaacatcatatctattatttttgagcattgttattggacagcagtaatacttaacatctttagacatgtcgtcttgcatttggttagcgatactctttaaaaattattacattaaatcatattagacccgatacttaattaaactaataataataatgacttaaaatattagacaccactcatgctttttaccatttttcattatttcctatctattctactagtagtctagtaccacgtcttagcacgtaaaagtcaaaggtttaagtcccttaatacctaatcaaattccattttctttcttatatatatgtaatcctttttaaaattataatatctagaagaaaggtcaattactcaaatgggaaaacgattattaaattaaacaataaactaaggaaaaagtcttccaaaattagttgtagttgagttaagattcacccaactccactccttccttccaaaaaagtcaaaggaatctcttccaaacaagactaataaatgtccctacacgcataccaagaatgtgactttgcttttgcaactaaccctttttctcatttgacttaaatttgtgtttttttttctttatttcttttttggtctttcataagaattatattgccactcaatattggaagatttcaattagacttagaaagaagagtaaataaaagtttgcatttcagctaaaaaattataggagaaccatttgtggcagtacaagtacaacttttgtatataaccaaatgttgcaaaatttgatgcttacacttaataaggtcaactaatgcagagacaatatgtgttgaattaatcttctatgtataaaaataatgtaaatgcttggtttcaaagagagagagagctatgctgtttttgtagtgaagttggttctccaaattcacttggcaatgttatctacattgggggtctacctaccttgatgattaaattatttgagaacttggggtttgttttgctcatcttttcgaatgtactcaatgtcatccaaacggtaggtcaagaggatatcgagaatagctgaaaaaagagaagagaaaaataatcatagacaagctaattgagagtttgctcttgaactagttactaaaatataaagattaatttagatttattttccataataactttaacatgtattaacttgtacctaaaaatttaaagtttgttaataattttctcggaactattgattcaaaaacttccatccaattttatttaattttactaacagacatctaacgtagcgattgtttatatatacgaaattataatttatgaaaactacctatttgttttttgtttgatcgaatgttacttgcagtatgccaacaatctgagttttgtttgtatacatacatccatatccattccaagagcatttaccaaattgctctttatcttgtgaaatagaatgagcataagaagtactccttccatctccaaaagcaacctgaaaatgagttgcgcataatttagtacctgagtttgaatgttgatgcaaaattatatcaaaatgaaatccagacaaaaaatggagtcatatgacttcttatattgttttaacaggaagaagtgaatttgtttgttttttcctgttgtgaaaacatcagcaaaagaactaataacagatcaaacttcaaagtgaatcagtacaataaaactaaaaacaatgagcacaaacatttcaattgcttgaacttattaagagatttgctcaattacaaagggctttacaaaccaatccgcacaccaaaactttgtccacagaatttacaaagctcgaagctaatactctccaaaatagactaaacaaaatgccacccaatgacacctcattctattggagatagtgtccatctttatatactcaagatccccagtttgattatacatctaataaaatatctctaacaaaatatgatgtcaaaaatatgtaaagatgtgagcctttaaaaaagaccttgcctttaaaaaggctgggaaaaccgtggtaacaactaaaaagcaataacttagaaatttctaccttaaaaataataacaaaaacaaaatagaaaagaccaaacactaagacataaaattttcagttatttactcactctctcctaaagtcaaaaaaacaaaaaaaagatgagcctgaaaacctttagcttgatcaaccaacctaagttgccacccaaaacttgactctcccaagccctgctgttgcttcctcctaatcttcaaaactttttttgtttctttcccaccacacagctcaaaaaacagcaaaaatggaaccaaagtcccataactatatatatatatatcatatttttattcatcacatttattatctgaatatgatcagggtgatatttgcataaagtattggtatatacctattgtcaaattaattaaataccttttataagacctaattagatggtaatatgggaatagtaataaatatgtaacatatatttgacagtgttggtattacaatattgtattgcttctttgtaaaagccaaagtttaatttggtcaaggatattaaaaccctactgattcaaaattactttcataaagacacaaggtctttaagtaattaaatttgaattatttacaattctcatcaaattgaattgtaattcaagtgacttaaaaataagtttccttctaaaataactttatgtctctaaagaatacatgatcaccaaccatatgaactatgttcaatttgatctcattgggtatgtaggcaacttcattgttaaaattaagtataatcacaaattctcaaaatctcaaatgaggtcatttacctcgtcaaatcccaaatgagatcattcacttcaaaaatcccaagtgaggtcatctacctcaaaatatcaaagcgagttaattctccacaaagttctcaaagatacaaaatcttttaacacacctgaactacgtttgacttgattcttaaaaaagggatacgtaggcaacttagttgctaagactaagtgcaatcgtcaatactgaaaattagtataacacacaaatcttaaaattccataaaaggtcattcacctatgaattttttgcaaaaattttcagaaagtggtcatctaccgaaattctttaattcaaattataaaatacctcattttgaactacaaatgacttgatccttcataaagaaggtatgtaggcagctcagttaattaattttactgaattcaacaacaattccaaactcaccccaaatcttccctaaattatttcaattatttaatattatcgtaaattgaaatcaaaaggtgtgtcctttaaataaaaggattgtaattaagatattattcttataatattaaatgggccgaacttaaattaattaaaatcttatactataaatttagcatatatgaaatcatgttttacattatttttaatattctaaatgtaaaatttttgcttaacatgtacttttctcaattgtaacattaagtagtgtgttgcctttcagcctagcatacaaaagattattagctcatatgtgtaacattatagaaaaaaaaaattgaacaaatagattataatccattttccaaacaacaatcatgcagactagtttagaatgatgagatatataagttgttagttcacctgtgtgaccgaatacatgtacaaggagaagtgaagaacacaatttgcttacttctcaagattaacaaaacaatcaaatattttcctctcaagattagcatcagttacattgaagaagtttcagttaaacaattacaattcaaaatatttcagctttatctaacatttttttcatctcctcttaacattcatctggtaatcaaggcatgaccacatctttgtcaaccttttatttctttacttataatgattaggtaaataatataaatagacatcaaatttccatttacttataatttttgtcagcttcttcaagtattacagtcacagttgctttaatatatttacagttttgattgaaaataatagtaataataaaagcactgattttagcatatttgaaagaaaatgaaataaaagtgcaaagacataccacttcacctccaaaatcagggtgcaaattcactaattcaatacatgcatgtagtaataaattgaaggttggcttttctttcacttcttcactcctcatgaggctgttacagatataaagtacataataattttattgacttgaaaaaaggatcgaaatacaaccacctagtatcaaagggtcaattttatacttgagtaaacaatggagcccaatgctttactatttgggcataaaagagggttaaactctttactacttgagcctggaaacaagtcaagaaaacatagctgacccctagttcttctagtagtagatattgtgcgacttttgatcctctgttggttggcatattcagcagttttcttcgcgaacaacaggcctgtgaggcttcggagcattgggattcccttgctcatagaaattgcgaaataaagagattgcttctgatgcccttattcctccattgcatttgaatcccttcccttgcataactccaccaccaccaccaccaccgctaatgtgtggttcagggttactcgagtgcaatgacaaaacggatccacatcctccgaatttctcatttgcacatccatagaaaacttcttttataccaagaattgacaaagcactagcacacatgatacatggctcacatgtaacataaagcatacattttgaaaagtttttagctatttcaagctttgaatgtcccattttcacccactgctcaaggagagaatcaattgcttccatctctgcatgtcttgtagcatttcgtgtctcattagttcgatttcttcccaaggctacgacattcccatcttcaacaaggacacaaccaacaggaacttcaaggctgtctaaggcaagtttagcctgctgtatagcaaggtccataaatgcaagagttgtatcacaatacttttcttcctttgtagaagattccatctgaaaattttgaattttgaattttggggcttctggatcttcacttatttaaactttcatttaagtgcgaacccaaaacattgtcttctgctttcatgtatactataattgatcttcggtctttctcataatgtagaaatctgtaaatgctgaatattcagctacatcattattcaatacaatatgaatttgtgaatataagagctagagaaatatgcaaaaatcattcatctgttcaagaattagagatataaacagaaatcaacaagagtttgagcacagcaaccgatcaaaaacatcaagtataaacagaaacaaatcacccaccaacaatttcaatggcttcaaaatcataaatacccaaacattttaaggttagaaccatcactcaatagcagaaaatcaaactctttgagaacctattatgttatcacgctagctttggacgaatctaatgataattttagcatacctgaagaaaacaaggagtggagactggagactggaagccaccgatgcttgaggaaaaatgtctatggacgagtgaagaagacggtttcaagaaaaaggaacaaagagaagtagaattatttgtttggcataaatttaagggaaaatcattgaagtatattttttaagagctactataataaattgttttaatgccacattttaaaaattattaatgtctttttttaattttatttaatagtattataactataatttagaaacatctatagtaagagcactcaaggaagataaaaataattagttgaaaaccaaatacaatacaattgaagaacttttatatttggaccaaaatagaacacaagcaaagataaaactaattggttgcacttaaaataaagatctaaagtttatcatgaaatgagctgctattgagtcaactctaatgatagtatcagtagcaagaaaataacattaaaactctactttcccaaataaagagaggaaataaagaatttactttaagttcagaatcaaacagaatttactttaatccattatggaattaatactctatgggcaacagggcaagtaataggtcgaacatcacaagacttgaaaattaagtaaccatgttgatctaatgccaaaacaagggtcaatggagaagaagaaaaaagaatgtaaaatacaaacatgtattcaaatatctaaatcacctagaaaaggaaaacaaaatattcatgcacattagtgtatatatattttattacataatagcatataaagtgagaaaacaaattaaaaataaacaaatagttacagagattaattagtttccaaaaattgtagttgtgccttgaaagcaacaaacaataaacaactagcaaagtatttatataatacatcttttaattgtactaaaaatacaaaagaggctagttatgcttgtgagtttttattccacaacacactgtgtcttagagacattttatcaaacagttcttatgcattataactctaaccattagaatctataattaataaagagaagaaacaaattatacacaaaagtatatacaaactatcaaccattaaataaaatactcatacatatatgaaaacatgaataccaatacagaattatatgtcaacagtaattcaaaatgaaaaactttaataaggtaaagaagacatgttcccaaaatcacaaatgatatcaacaaagcaaaacttattcaattaatcccacaaagcattcagaagaaggaagagagacctgccattgatctggtgaccaagccaaaaataaaagcgaattggagaaagagaaataagtatacaaaaaatagcatagaggtgggggcgagacttacgagatttgtttgagacctgggaatacctttcttcttcggtctcaaccagcggagaaaagttgagcaacgaactcgaaatgaatatatcataataaaattatttttgagtaaatatttttagaaaattctagaatgcatcctcttaaaatggatatattgatgcacttctatctgttttagcatccgaaataatttttttgtgaaattttttctcatggtcatatacgttatagtt

SEQ ID NO: 99288 - DNA, 8092 bp, Cannabis sativa
acacatccaatcacagtaggcagcaaaaaatcaacaaagaaagatacattggtggctgccattgcatagtttataatgtaagacggcatcggtgagaatcgcgcaagcacaacaaatttccacccatctcgttccactcctctcgatagcacatggaagtacttgttcctctgcacccactccattgctgagctcgaattcctcaatactaatctgcacaaacaaaaccatttcattgaaacgatatttctctcattctcatcagtagtgtattaatagtacctattacgtacctgccgatccaaaaggaaagagaagccccgagcagcttggccgcgaagacaaagagaacggccgggaagaatccgaaaaggatagaagcggcggcctcgaagaagattgcatatggcaaacagagagcgattgtgagggtgtggacgagaacgtagagtgggattgcccaaatccctagttgctccgaccattccttcagcaacctcactcccgcttccttctcccacccgtatttcttactcaattctcttaagatcgccaacacacccactgctgccgcgattttccaccatttcgccatttttcatttgcagaagaacagtcttcgatcgcgatcgatcgaaaggatgaagaagaagaagcaagagacttcgacttttctattcactatgggcctagcccaactctgttttcatacggcccattcccggcccattttgttcaactcttgttttaggcgtgaagaccaagggtaatcaaccactacagactaatttaattattaaattaattattttttgggtacgaaatgcaattgtaagaagttgagggtccggagagaataataagaaagaaaataacaaaaaaacgttaaaagggagcagagactggagacttggagactcagagaaagagagagagagagagagagagagagagagaggtgaggtagatctatccattgctttgaatagatctatccattgctttgaatcgttttattgtttttgttcatctgatctgataattcatttacttgtgtttaggcttttggcaatggcgatccaagggaagacgatgataatcgctctgcttgcttgctttgcctttcagatctgcttttcttctgatgcggtaacctctttttctttgttgtgtctttcgaaaattgaaatttcatagaaatgaatactcagaagttacttctttcgcagatcttttacgaatcctttgaggactctttcgaggggcgttggattgtttctgagaaggatgaatacaacggtagactgaataaatatattataaacaaatttacatgtcaattgtatatctaacatttctctgtcgtgtaacttctattatatgtatgttaatttcctttgctcatttttttcggtcttgcttagatttagtactagtaccaattttttttaaaattttttttttatttctttaaaggttaaaatctagatacatgattgctaaaatcactgttcaagaaatcacaaaagaataaattttaagaagcttctattataaactgtgtatatatttggatagatatgaatatacacacgtaaataaaaagtaatgaaggaaaagaattatattaagagaaaaaataaatggaacaaagctgtatagaatctctagatttgtatttatgtatgtatgtaagtttgattcttgtttctctattttcttaatgtattttttccatcttttttaaagatttgctaacaatttttaaaaagtacagccgatatgtttatgggttcaaaaatgcaaattacaaaagtgaatctatgctaagcctataattctgtttattatttgcattgctgaaaaaacatattttaacattcttacacaggcacttgtatctgtttaaattcactttcttttcttttaaatgactcctcgttgtgcttcctctatgttattcaaatttcattcaatcatgatattatcactcgcctcacatttctgtccatgtaataatcattttcccattgttctatccactcatgtagtaatttgtagttccaaagcattcctcttagcactctaatggtgcaactccactggaatattgctttaacttatttttctcttagggacttgggaaatcaaattttctatgtgattattttggtcatattgtactttcgtgacatgtttgacaatgctttaaacaagtcatctagtattgcttgatagcttaagttatttgttgtaaaatttgtagtgatttataacatttgatttatttattataaatttttgcaatgttacctagattagagtggagatttcttatccacaaatctcgcatacattgatttaatgcaaaactgtcattttcttaaataggtgtgtggaagctctcaaagagtgagggacatgatgatcatgggcttttggttagcgagaaagctaggaagtatgccattgtgaaagagctagatgatgttttgaatctcaaggacaaaacaattgtcttgcaatttgaggttcgacttcaaaatggtctcgagtgtggtggtgcatacttgaagtatctccgacctcaagatgctgggtggaaagcaaaggaatttgacaatgattctccatatgcaataatgtttgggcccgacaaatgtggctccactaataaggttcacttcattctcaagcacaagaacccaaagaatggggagtacgttgagcaccatctaaagagccctccatctgttccgtctgacaaactcactcatgtatacactgcaatattgactcctgacaatgaagttaggattctagtagatggtgaggagaagaagaaagcaaacttcctttcgtctgatgattttgagcccgctttgattcctgcaaagacaattcctgacccaaatgataagaagccagaggactgggatgagcgagcaaagattccagacgcagatgctgtgaagccagatgattgggatgaggatgcaccaatggaaattgaagatgaggaggctgtgaaacctgaagggtggttggatgatgagccagaggaagtcgatgatcctgaagcaacaaagccagaagattgggatgatgaagaggatggtgaatttgaggcaccaaagatagataaccccaagtgtgagacagctccaggttgtggtgaatggaagaagccaatgaagaagaaccctgcttataaaggaaagtggcatgcacctctgattgataacccaaattacaagggcatttggaagcctcaagatattccaaatcctgattattttgagattgagaaacctgattttgagcctattgctgcaattggtattgagatctggacaatgcaggatggtattttgtttgacaatatcctaattgctgctgatgagaaggtagcagaatcatacaggcaaactgcttggaagccaaagtttgacgtcgagaaagaaaaggagatggccgaggaagcagctgctggttcttcagatggtctctctgacttcaaggtaatacatttatagatgctctttcctttgtttttatatttatatgtgtgcatgtagtttatgcttccggaccatagtattatctaatgtgaataaactattgcagaagaaaatatttgaccttctgtacaagatagctgatctgcctttcttgagtgcttacaatcccaagatcattgtgagtggcagtattatggaacttgtgatgattctcttcttaagcgagttttcatggtgttttaaaatgctgacatattgtatttgtgatgtaggaactcattgaaaagggagaaaaacagcccaacattacaattggcatccttgtttcagtcgtgattgtaatcctgactgtgttgttcagaattgttttcggtggcaagaagcgaccggtatgatagtttaatatgttttgtaatgactgtttgtttgttgggtgctgtggtatgttaggtgacaattacaaatgtttgttggttttgttaggtgatcaataatgctgaagcaaccacggtggccccagagtcctcaaacaatcaaggaagtggtgaagagaaggaagacgagaaggagaaggacgatgcagcagctccaccccgaagaagggtttccagaagggataactgaataaaaatagcatttactggttcttgaaaattttgatttagactgactacttgtgaggttggattctttgcttagtttccatttgattatagaacgtttcaactcttttggaattgattggtggttataactatttatgtttatcagacgtacgacgatcctcattttgaaggttttgatcccatgtgcttcattccaaaatattctctaatagaaataatcttggatacttgagtgttttttaaggttaagtttttggttaatttagtcattaaaaaaaaagtaaactgcagctctttccttttaaagatgtcctcattttcttaacgtgatgcataggctggccagttgaaagttcaaaacaaaatcagcccttgacacaatttcttgaaaatacaaatttatgttttgtcatgtacaaatttaaagttatattcttctggtccgtagtctgagatgcatggagacttgtgtgcatttactcaatgtgccccattcagtactaaagagttaaaaagcatcaataaaaacatagaaactaatcagaatgtgagaaacggttctctctacaattgagcatgaacaacatgtgccaacctcaggaaaatatgcgacgtggcataagttatacttcttgaccaaatcgtgaggaagtaacaccacacaaaatgacaatattaattgcatttgcgaattatgatcataattagaagtgaaattaattgtgagtgcgtaaaatgatctattaagcaagtaatagtagtaataaactagtattaatgataaattacagcgtatgacccaccaaatttctccataggaaatagggaaagaatggtgaaaataatcagtcaacaaatataaatgaaagaatagattgagaccaaagatgcataggaaatagagaaagagaataacgtgttcctttggtggcctaagattcttcctacaattacactttttgactctcttttctttgtttattaattaacattattcccctcttttgatcagtactcaaatataaattaaatattcttttcaaaatttatacaatgaacactttcagaaaaaaaaaaatgtaaaatgaatttccgttttattgaaggtattaatttcattatataaatatatataaaaaagaagtcttgaattatggaagttttgacatttgagtccaactccacacatattaataattcatattaacaaaattatggaacatgggacagtggccactggacagaggtgaaggaaaaaaaaaaagctaaaaaggaaaagagaaagcttgagatgggatgagacagtaatgaaaatctacgattgtgtaaagtgaaaaagaagagtcaagagtatggtgttagtggtgtaactttaatcacaaaaaggcaagaagaccaacatcagcaaagcttgttacctctccaaatggggatccaattccagatagctcaacccatctgaaatctcgatctctatcttcctcactctcgggtatcttcttctgcattttagcttcttcttttcttttcttttctttcttctttttttttttttacaaaaaaatgtttctttactaatatgtaaatgttcaaacaaagctacttttgtttattgttttcaattatatgtatctatagtatatatttataaaattattgtggtggtgggcaagtgagaggatttgtgttttgggttgaaataaaaaacttgagcaacaatgtacggcagtaaaatggcttctgactccaatcgacacataattgattcacatggtccctccatgcgtgtttatcaagtttggaaaggaaacaatgtaagctgatttagcactctgcttgtattcaaacaaataaagtttgagtagtcattagcatataaacttcatcatttattttcttgcagagattttttctcaaaggaagactcatatttggtccagatgtgaggtcattgtaccttacaatcttcctaattgtgactccagtcattctgttttctgcttttgtttctcaaacacccattaatggtagacacagtctcggaaatctcattgttatcatatgtgttgtcttcacaatatatgtgagtgaattctcttttcatgtcacattcaatatttgcaatggaattagaatacatgaattgataatggaactattacatttcattccaggttatatttcttctcttccttacatctgcaagagatcctggcattattcctcggaaccagcatcccccagaaggggaaagggattggggggctgcaagtcatgctgataatagaggagctggagctggagctggacctcccacaaaagatgtcatggttaatggaagtgttgttaaggtcaagtactgtcaaacgtgcctgttgtatcgcccgccacgatgctctcattgctccatctgcaacaactgtgttgagcgttttgatcaccattgcccctgggtaggtcaatgtattgggaaggtatgtactgtgaacactaaacttcagtatcagtaggaggcttatcataagatggttgaattgaatggtttcctttcccatatacagcggaattacagattctttttcatgtttgtctcgtcaacaaccatgttgtgtctttatgtttttggattctgttgggtgaacatcaaaaaaataatggatgtctaccactgtaatctgtggagggctttcataaagtcaccagtttcaggaattctgatattgtacacatttatagcagcttggtttgtgggaggtctcacagtgtttcatctctatctaataaccactaatcaggttcttgtgtcctattttttcatacatagtttcgtttggtttgctgttgtgtgttctcattatatgactttgaataaaaaacgttgtgtttgttatactattgcagaccacctatgaaaactttcgatatcggtatgagggaaaagtaaatccatacaaccggggatgtgttggaaattttgtggaagtatttttgtctagaattccaaaatctaagaacaagttcagggaaaaggtgaagggggattcatcttctgcttttaacagttggagatctttaggccatccaaatccaatgagccctcctgagatgaacaaaacaagcattgacatgatggagatggagatggagatggggaagcgacaggcagtgggtgctgaggattttgaagatataaggagtcaaatagagagtgttggtatggaggcaaggcatagaaactgggaaattacacctgatattcaaatgttggcttctgagtttggaatggaatatggttccacgccaagacagaaaattcatggaagtctttaggcttcaaagccaaaaaaaataaataaaaatgatgggaattaatgggatggcacatacatacatgcacatgttacttgttattatagtagacaagacaaggtcacatggggattgagatgctttgcttgtattgaattagaactttatgatatatatattgtataatatacccttgttaagctcaagacaagagaaaacattgtaagctttgatttaattcgattcttttttctttgtttggtcagttaactttgaagggagccaaggagaaaaaaaaaaaatctttctttgtcttcatattaacaaattaccctatttgtagtttgattggaactggatgaaagggtgaattttaaataacaaggactaaagtggggttcaaattctaattctaaagaaacttacgagatgtacctaactaactacttttgcttatgtaataccaaaagaaccttgtttccttcttcatcattatcatctttcatttcattcgttctataattagctacatttccttattcttaccaaatcaattttggaggtttggaagaccataactctaattccaattccaaaggcgcatgcttgttgctttggctagatgtggttgtggat

SEQ ID NO: 99289 - DNA, 2189 bp, Cannabis sativa
ttgattttctaagcatagaaaatcaaatttcccttacaaaattatcaaacacctttggtttccgccatggcagaacaaccaccttacccctactcccctactgcacccttctaatctcactcctctttctctccacagcaacaccaaacgaagtagacccatcatcatcttcggcagccatagccaggttccaacaatatcttcgaatcaacacagcccatcctaaccccaactactacgaagcagctgatttcatcgtctcccaagccaaatccctctccctcgagtctcagactttggaattcgttaaaggaaagcctctgatcctcctcaaatggcccggttccgaccccaatcttccctcagttcttctcaattcacacacagacgtggtccccgtcgagcacgacaagtgggactacccaccattcggtgcggagattgattgggagggtaatatatacggtagagggtctcaggataccaagtgcgttgggatgcagtaccttgaggctattcggagattgaaggcttctgggtttgagccaatgcgttccatctatttgtcttttgttccagaagaagagactggtggttatgatggtgcccagaagtttgctcagtctaaaacttttatggacatgaatgtagccataatgcttgatgaaggtcagtattattagtatgttttgattgagattagtgtaactaatttgattaaataaattagataagattgggaaaaatttaattttattattttaattagagaattttttttttttttttttgagaattacttcatatatctttttttttttattattatttatggtttgtgttagagagataggtggataagatattatttaattttttttggtttaattattgggttttaaaagattgtttaattttttttgtttaattattgggtttattttttgaaattcaagccgtgcaaaaaaatttcaaaaattgtattgtttaattttttggatttatttatttgttaacttaaaaacgttaacagtctgttaagttattcggtgtaaggctaaataaaaaagaggaatcgttaaaaaaaatcgttaaaaaaaatcattaaaaaaaatcgttaaaccaacaattgccgttagataagcactttttatatataaagattttaattgtgatttagattactttgttagttaatatgtaaatttttgtaaaaatgtaaaaaaataaaaaattgctaagaaaaagagtgtgctccagtccatctcctaggaagtcgaagttaccaaagggcaactacggtgactagcacccttgtaatgtgttatatcactattggtgtattttaatatcgagtcttacttattttactttaataaagattataaagaattactaaccaattataggatgccacctcatagtagttctaactactttggtgtcttatgagctcaaggagctaagtgctcctgctcctcaagaggagccggttccaacacacttcaaaggtggcaaaatagagggtggggaatggagcagccgctttcaacttgccaaactaaaacatgaaaatgttagattagcaaaaaaactacattggttgcctaatgtaaatttatggtcgaaaacgatcataatagttgttttatagttgcataatacagtttttctgtcactccaacatgattattttactaataagatgatttcataatgctattatttatacaaaacacttggttttggggaatagggcttacttcgccagatgagaattacaaggtattttacgctgaaaggagtccttggtggctggtgataaaggccactggggcaccaggacatggtgcaaagctttatgacaacactgccatggagaatttgatgaaaagtgttgaaagcattaggcggtttcgggattcgcagtttgatatgttgaaggctggtttgaagactgatagcgatgtcatctcggttaacatggtcttcctcaaagctgggaccccatctccaactgtgagtttaactcattctttagatctttagttaacaactaattcaagaaattttcttttgcagcatgcgtttgtacaacttatcattacattcattgatgaaagtaatgatcctaaagtatttgataccatttattttttcagggcttcgtcatgaatttgcaaccatct

SEQ ID NO: 99290 - DNA, 5588 bp, Cannabis sativa
  modified_base (5531)..(5545): a, c, t, g, unknown or other
gggcataaaacccaacacacaccaggcgagaagctgctgccagctttgcccgatcggaggtaaggtgattcagtgaaattctcgtgtcgccgatgagctgctttcatgtgaaggttgtatggtttaacgatgaggtgctcaggggtattaaaaagccgtgggtagaatcgttctgaatgccccatgagtccacaaataaagtagaaggttggaacgttttcataccgaaaaatggcgtagaatgaactgccatcacgcttcttgaatttcattcgtcttttcaaagggcagtcaagagatagagtgacacggatccgcaagaactcacgccaaacacctgtgaagttgtttgggtcggattcgtgaaacttaccaacataattaccagcatctttggccactttcatagttgagaaaccggactatagatcatgaatctgaacccataagtcaattgtattgagcggcacagtcctaggattgccaccttcgttgagacgctcgattatgagttgttttcgatcgtaagtccacagactgcctttgataactcgctgaatgtctatctcatgatagaattgaaataaaaaacgattttgatcaagatacgaaagccgccctacaagacaccattggctgtcgatttgttgatcatcgtcggcctctgcatcttcatagaaggttttctctgcttcttcctcttcaagctagatatttttccatccttcttctatctcgttcaatcgtgcgctactggaagccatgggacagggacgtacgagggaggacaatcggatcacaggaaacaaaagcgatcagtcacaaaacactcacagtggagggacatacaatacactctagagagagagactttttttacattggtatttatttatttaaaattaatgataaaaatgagacccaaaacatgtatgttctctctccatgttcatcttatttcctattctctatctccatgttcatcatcttcttcttcttcataaatttctctctttttttttgtttcaaaatccatacagtcacgttttttatttttagttttctcttcgtgttcttattttatttcatgttcagttcttcttcttcatcttctttttatttttttagtttttctaatttttagtcacatttttggggaaaaataagagtgattttttaattctgattttctagaattgagcttgcaaaataacatctattgcatctggtgttgaggctgtgtagaagaaggttggttttttttaatcattttttattcttttgttttttttgtttttaatttattttagtgttgttttacggttattttccataatttatttttttacgtcgatttcactgttcttgctttcatctcactggaattaatgattgttttcagtgtgttctcgtagtgctgtggtagttctatcaatgagtgtgaaagttggaggctataaatacattttttcttcattctctatggttattttgtgatttttttttttattctagttatcctataaatacatttgacgagctcactagaatttttttttttgaggtgtgtggttcttttatgtttttctaagtagttatatctgtttattgttttacatttgttttgtgttgttttagtagtttttttattctgcttttttaagattgggcttgcaaatataactgctattgcatctggtattgaggttgtgcagaacattgttagtttttttaaatcattttttcttttcttttgtttaatttgttttagtgttattttgccatgattatttgcttgacgtcgatttcactgttttttctcaatctaaccagaattaatggttgtttttcgattgttctggtgttcctgtggtggttctgtccgtaggtgtggaagatggaggcctcgttttgttttggtatttatagtatatataaaaaaaaattggctaagacactatataagttatttttgccgtgtggcagtacttttgtaaagattaggttaaaaattagtattatgtaagttttccaataataataataataaagcccattttttggggttgaactaggccaggaggcccatttggtggtagagacgaaggagtgtctttcttgttgcttgttccaacttccaacttggcgtctctctctgcctacacaacacaacacaaaacaactcaacagattacagagaccgaaacaactgttccacattcataatctctcagaaatacagagattagattaagataatatcccgccaagagaaaaaaccttctagggtttctcgtaattgggcttgttatggcgtcctatactctctctgctgtcgtagttgttccatcttcaacttcacaatcttcttccgggagccactatagagcttcttgtcccctcctctcatggcgtctgaatcgatacgacctatccacctcctttattggtcgccagctctcgattcggccctccaatttgatgcatttggctacgaagcatcggccagctattgccacagtgctcttcagcctcccaactgcgtaagtttataaatgtatgtatgttttggttctgagtctcccagctttttatgggtttcgttgagaatgatttgccatggtttcttatatttgtattcaggaaaccagagaggactcctcaggagaaatccccaaagtgagttcttcatttctttggactttgctatttgcttcatttcataggattatttatttgtttgtattgatttgtgggtgtctgattgaattttgtccatttttttttgtcagatggtccgcgagggcgataaggtcgtttgctatggcggagttagaagcgagaaagctcaagtatcccaatactggcacagaagcacttctgatggggattttggtcgagggtcagtaacattttacttattttggcttatttatttctgatggggatttttgagtttaattctcctatatgttttttgagggttgccttctcgttctttttaccaagctacttcacttgggatgttcatgttcatagttgatgttaataattgcgcttgaaatgttctagactagtttactcctccttcaaagtatactatcttttatgtattcaaattgttaagatatttgctcgtttatagcgtggatttagtctgtctcgttttcatagttttaaattagcataagtttgtggtgaaactttcattttataatggagtgaagcaaaaaccataaattaatcattgttgtatactatcttcaaggggaactgtttcttagtatgttattatcactaacccactcactgatgtagataactgtaatctgtagtttatgccgatttatttagtgtctagtgtctagtagctaaattctttatgcatttggccttgggatctatccgattctagtatgattttctatttcttaggcctttgatctgttttgaacttttttatgttaaataattattttatccaaactaagcttatcaaactttgaagaagaatatttgttcaatcttgttctttaagaggtatctcttgctaagaactcagctggtggcttttaactcaatttaatgtgctttactgctgtgccagagttttctattgtgctctattttgccttattttctacttttctctacaggaacgagtatagctgcaaaatttttaagagaaaatggaatcacacttttcaaggtgcgagaagaaactgtaaatttacttggaaaatctgatatgtactatttcagtcccgagcatcctccattaactgaaccagctcagagagcccttgactgggctgttgatcagaaactaagctcaggtatatatcatgcaagtaaccttcatacttttctatttaaaacagttttcattgattttcatgggataagctcctgcattatagatttattgcttaagttcaggtactttgacttttgattgcataagaaatatccactcaacttcagtaggaattggcgttttagtctaattattacaagttgatcactaaaaccatctcgtcgaccacttttactccaattcgacataatcctcattgaattcaaatggaatcttggttggctgtaaaaattgatggcattttgttgccttgtcgaattgtatgtacactttgattcattggctcatcatgtctaatacaggtgaagaaggggaaataacggtatctcatctacttctaggggtttggtctgagaaattgtcagctggtcacaaaatattggcatccctaggttttgatgatgagaaagccaaagaacttggcaaatccgtaagttttggggttcctagtattatatttgagtaaattcttgatcttaagaaagaggccactaattttgttctttgcttttgcagatggacaaggattgtgttttaagctttaaataataggagttcatataacctcttgattttgaaaaatcgttagtttcttttgtaaacttctcttgacagtctccaaaggccatttcttccctccctgtgctatatttgttaatgatgaagttacttaaatgggtatatttcagaattcaattctagaagtttcatttttgtaaggaaagaaaacaaattgacatatattatagacatcctaatttttcaacaaggtttggcaataagtagatgaaatcatgtttatgccaatttctactctgaaatatcaaatagcatcttattttttattggaatattaggaaataaaccacattttgtttgctgttgttgtattcataaaattacgacatttcaaattttaatatttttatataatttttttaatagtatgagtaattatttcacaaattttttatttttttactcagaaaattagtactgttattttatttttcgtccacatgacgtagtatgttcatgttagggttgtacatcggttgatttggtcggtttatcttatatatatattttttctaacttataatctaaagtttgagttagtaaaatttaagtgtaacttgcctaatttaaaaaaaaaaaaaaatctgtaaaccacccgtctaaatctgccattttttttttggtttcaaagtcaataaaacttaaaaagataaattaaaaatatcaaattctaccaaaccctaatacaatatatatgactttgaaactaacaattaagtatataaatttatattattatatatttaatcatttatgttatatataataaaaactaaaaagtatatataaaaaaatcaaaatccaataaagtcgggttggtcgagttattcggtttagttgggcgggttgggcctattttcaacccgcccaattaacagattgggcggtttgtaattttttcgggttatttgggtttgtaatttttattaattttttcagtttggtttgagcgggttattcgatttgggcggtttacgaattttttcgtacaaccctagttcacgtaggcaaaattgagactacgtggaatactgttggaaattattttacccagatcttagatctactcacaagnnnnnnnnnnnnnnncctaaatatgaactttttaaaactatgaaataaacacatataa

SEQ ID NO: 99291 - DNA, 1981 bp, Cannabis sativa
agttcaataattaaataaactttccatgatcgtctatatatatatatatgtatacattaattaatatagttcaataattaaattatattatatatattaaaaacacgagtgatcgataggcctgcagcgaagaggacgaaacacttttcttaatttataagttatgctcctaattcccttaattataaaaacaatatatgtattatgtatatatcgattgttacatgaacgttccaattatgcttttgtcaactgttttacaatttgaggcataataaccaagtctctaacattcaattcaagagcttgatattttttttttttttaaataatgttggttgaatttcgtgaaagtcaacctcatatattagaaatatatatgtctttttctttactttgaattttctaatgaagggggagcaaaagaaatcttggtcatttactgacctttcaaaaataactaaggaatactccataaaacgcctgtgtggtcaaattgtcggcagagtaattttggcaccataacatgtcactcattccttctttgcttggtatcgatcactatttattataatttgtactttgtagtgaactattcatagcagtagacaaaagttcaaacaaatacagttcatatgtcaacgtaattattgtagtttttttttataaggacgtaataattattgtagtttttagatagcaataaataaaatttagcaattaaaatttttcatatgagtaatatttaaggaatttaacaaaaccgccgttttgtaagtgtataaattaactctacactactaaacaacatttttagaaaatccttttggagttgttgaaagttatttgctgatataataatatttaaatgatttttgaaaggttggatatcttactttgctatgatattattatttagaaacttcaattttaattttaaactttctttgtgtgttcaaatttttagtattattgaacccgaaactaaaaattttaagtgtatgttgcagggcgattttaatttgaaaaacgacttaaataaaaaacacccttaataaaaaaatatatcaaaatctataggactatcaaattagctctgcctatatcatgtattattataacatttcaggctatgaaaaatagtattgcaataatatatgatataataattagctcataaattttgtcataaaaaaaaaacaaaatcgatgattgttttccaaaaagggcaataaaataattaacaaagctatggaaaattttccatttaaaaaaaaaaaaaaaaaaaagctatgaaaaatttgaagggattgaaaggccaaaaagatgaccacgtgtgaaagtagttggtaggattctgcactgctttttctgcgtagccaaagtgtgttgttgttgttgttgacaacttcttaatagtaataccactttcgtacttctctctcttctctttaatcattttcaagtcaatggtcaacccttgtgccatttaaattggccctcttcttctcctcatcacccaatcatactaaacaacaacaaacttaacccactaatctccaccgtccagatcaaccccccatgtggatcacggaggcaaccataagctaccacgtcatcacatcattacaaaatattacatcctagccttccaactaccattttgttattattatcaaaatctatttctatatatttttaaaatataaatatatgtgaataatctcatcaactcttttctaaccttatcagaaaaagaagaagaagaagaagctcatgaaaatggcgtaaagtaaataccttttgtggcgtgatatgtgttgccatggagccatgttattggtccaccttccccattatataattacgatcataacaaacaatatgtaaccaaataataatttgtagtataaatatttaagttatttgtaaataaataatacttaatttaattttcgacagtaataatatttaagttata

SEQ ID NO: 99292 - DNA, 1930 bp, Cannabis sativa
gttgaaaatgttccaaaatgccagagattggtgttcttgagaggtttacttgctattcttcatgagggtcccctttttatttgttattattttcttttggatatggtaatgctttctaatactgtttccttttcactcgttcatgttttacagcagaaacgttgcccagtggctggagtagctcagttttttttattgtagacgaggcttaaaaaacgttcaaaggtatcatattttgacattgttcttttccttagtttattctatatgggatttgccagggcatttaaattaactattcctattgggctcaaccgtgagttacttcctaagcattgttacaagttgagttcgatagaattattatgtcagaaattcattctctgttttaatttaaattttacaaatgctttctataattgcttaaacattataccaaactcaacttttgttgtgacacatctcaaaggtgtatccttgagtagtttaaatttactgttgttttcatgtatttttgtctagtaagacaagacaaaacaaccatttaacattatcatttaagaacaaaaaagagaaaaaaaaaatcaaatttttaagtacgatgcttttccatattttagttaaacagaatatagctttgtaaactgtttctatgtccatgaacttggagtgaaagattgaagttgtagatatgtgtatggaggttttcttcaatctttttaatagttttccattgtgttttgcagatcgttttcttgatttccattgtggtttcttggatacaattgagcaaaactgggatccctcaagaatattaacatttttcatcaactatcttgagatatttcattgataataataacaaagatgtgtaacgcgtgtcgttgcaaatgcaaggtctccaaggcacacaaaatgcccgtttaattgatttttactgtttttgagtgttttgttttgtttttatctttttcagtagtgcagagaatttcggacagttttcttttgctaatctcaaatgattgttacacacttgcataaattatttatacataataatgtataattaattttaatcatacaataaaaagttgatgtgttctccaaatagaattatttatggtaaaaattaaatatacatcatgtataaatagtgtgtacaatttgtgaaattattccactcaatttatattcagaatgtttgaatggtagtgagtttgataagtctgtgaagacaaccttggcttccctatttatacagtgtcggtgggcagtttcttgtatacaaaaacatgatgtaaggaaagaaggaagacatgaatgtgttctctttgtttgtattatattatgttgaagctagggctcttcatggaatttctcacaaatttgtctacacactcttaatattatctacaaatattataataacactactaaattgagctttagtagttgcattgtcttttagctttaaagagaaatacatatattattttatacaatatctttctctctctcttctattgccacatgggcagtatctcttatttatttttggctggatgactaaagatttctctggttcttcactgcaattaataatatggtcagttgtattaataggttacactcggtttaatgtctcatggctggtaatgaaacgtatataattgaataaattatgtcatacaaaaagctagaaaagttattaacctatttataactaagcgggcaatatattaaattgaagggggtttgattggtttctattttgaagcagagtttgttttcttgccttggactggagggagctgcaagaagggattaccactatgcccttttggcatagtttttggaaaagctaaaagttactttttgaaaaaactgtgaaaaaaatgtgtttggcaaacagtcaaaaaacagctttttg

SEQ ID NO: 99293 - DNA, 5810 bp, Cannabis sativa
acacaccatccaattacactcatgataaagcttatggaatgataatgtttacctcaacaaagcagtcatgaaagagcaaacgaaggagttttccggggacagttgggtctcttgaagaggctgttctgacagtgtttctgatcataaactcagcagaaggacatgaagctgagtagaacccaaaagagaggtccccacaacaaggagaaggagatataataatacaaaagaagaagagaataagatagtaataataagatgggacttttagtctagaaaaggaacctgtagtttttttctccattaggagggctcaaactcaaaagttgagcttttcaaaaacttgaatatcattgagagaaagtagaaataataataatgataaataatactcttatacgtaatgaattggaagtatacaatgcatttaaatctgcatttaattagttagttgagatcataaagtagtagatatcacagttatagctatttgattattagactcatgttcaagaaagagagagataagttataagacctcatttaaaacttgtaaaaagataataaaagactatgatatgataatgactaaaattgatgttaatcacaagttttttggggtgtgtttttagttgagaaagatactaaaaacacaataaaaaaagtcagttatttctagtaaaaataaattcacttttagttatttatttttggctaattaaaatttttgttccccaaactttaacatgtactaaatcatgtctccaaactttttcaagtcatttcaaaattttcccgaactattgaaattgttaaattaaaaaaattgtccaattttactaatagaaatctagcgtgaatgaaaattcaaagagcacgatttgatacatcttaaagttcggggagcataattcgatacatgaacaatcaccaaattagtaaaattaaggaaaattggatagaagtcctttaatctaacaatatcaatagttcgaggagaatttttaataacctgaaaaagttacataacttggtacatgtcaaaatttgaaaagcaaaaattctaattaatcttcttatgttcttgtttcattcttttagaacagaaaaacaccacaaaacaatggtcttggtttcagaaagtttaaggcttatatagagtaacattaacatacaaattcttcaagtcaggaacaaaaccatcaaacttaatcattaaagtttgagtccaaaacgtgtcggcaaggtcagtttggccagttgtacacacacccagaaaaacaaaaatggcactctttaatgacctaggataagtcaacatgagcagagaaagtagaagtagtactggtattagtagtagagtgagccagactttaaagaatgaggttcccagctataccattaaaataatggactaaccccacaaaatgcataatgaccatgcctgatatcttttctttccccataatggcataccatgatacttgttgacacatgcagcttctgtaatgtggttctgccttgtttaggtaggtgtttagctcaccttcaatgcttggtttagtcccatctgttaagtcagacaaagttagttaacgtgtacaccaatttgtttttcctttttaaataaataaatgaatggggccaaaggaacaagttcagtaaaaaggacattctctggtcaagttgtataaaaaataccatgtcaaaaatcaatctacttgaactagaatgtactaacgctattatttttacttaaaatgggagattttaccactgaagcttcattttccatcttcttccaactcgtcctcatcctcatcctcgtcgacatcatcgatggggatgttttcgctgttttcatcaacggatcctgtagatatttataccattattttaccgaaaacgatagctttgttcaataaaactgtgtctaaaataagcagaatcttgacacttggtgaagagaaagaaataaatcacctctattaagcagtgaatctggtgtctttgacacttccaagggttttgacatgttatcaagaaggtagggaagatctagaaactgcaagaaagattctgtttgaggatttcgagtataacctgcataatttaagattaaaagttttgtaaatgtttctctttccatgaaaataagttttttatactcccaacctttaacaatcgatcacaatctacaatcccaacaatgaatttacttttttagcttgttatgaaaatgattaaaaaaaagtataccacgaggtgagctactggagacagatctcgaaggatcgtaacagggaactgtccttgcgaattcaaaaggtttggctcctctttccagtagcctggtcttcacccattgtcgacattcttccatgtcaagatgtaaattcctattatacaaaaccagacttagtagctctctctaatagaagtttataggaaaggggccatgcggttagttggttagttggattaagtcccacaaacctaaaattcattctttgcctggtctgcgggaatatagagttgaatctcctagttatggctaaccattcttcatcgtaatgaatttcatgaggtcctgcttctgattcgatttcaattatcttaaaaaatagtcaattcgaaaagatgttagctatcagcaaatactacaaagatgcatcattttttagcattaaaccacatcaagtacctgtaaaaatttacgccctggaaggcacttgtcgagagcaagaaagtttgtcactggaccaccttccccatgtcgaacacgggcagcaaacttgcaatgcaaatgtgctgaaaaccaataagggggttttaatttctccagcagttcggcagcaggtttacttccaagtgttctttcctgaatctagatacatctcaacaagtaatcatacaaatattattttgatgctataaattaaaggaaatgatcaattcacatatgaataaatcatcaacaaaacccataggaaaaggaggtcatgctttggtagcatggtttaaagagaacaatatctaatggtttgaaacaatttttcaaaccaaatgtatcatgataggaactctcaaaatctcagccaagaacaatcacaaacaacaccagaaatctttgtttatttcttaaaccttagcctccattagagactaagatcaacacattacaaagctcatttacacccctaaattaacttctgttctacataacaaattcactaaaataaaactcctaacataacataacaaataactactaagacaactaagctaagtaaaacaacttagcttagttatttatcctcttctcacataagtgaacctcactagtgatctatcatactagtgatatgcatgctatgaattcttcttacatttttaatgtttcgtttatgaaattatattattaaaaaagaaattattgccacttgaactaaagatatgtaaaactttcttcacacattttccatgtttattttatgatatcaaatgaaaatatattattagcattttagcaataatcccagcttccatttaacaagcatgagaatcaacaaaataggaaagagtgaaaagaatcaagcgccatcaattgtctctaaacacaacattaataagcatttcacagaacatcttgacatactcaatcttacctccttctcaaaatatggcttgaaccgaacaagttgcttccagtctccacagtcagtgatgccaagaggccaatcatgtgaaagaaatatgtctataggttcctgaacttgcatgagtttgtggacgtcgtattcacgcacatgatatatcgatctaatggtgctctcattatatggaggccgctcaaaatgccctgtgctcggaagagataaaatgaaaaaacatttccttttagagttcaccaatatatgataggataatttctttttctcgcaaagcacagaaataaaacttctcataattcaacaaagaaaaatatcctttttaataataacacaagttcatcagttaaagcctctagagttgcaactattatgaccgaagaggcccatcacaccaaaatacagcttccatcatcatttagatcaagagtttctcaatatcaaccttgagagttgttgtataataagcttaactagctatgtcatctatctgttacacttaacaaaccctaaaatgataacactcgctaacttcccacaatataaagatttaaaatgtaagcattcatcttcagattcttaatacttcattcagatacaaaagtacacaagattcgcactcaataagtaacatgagaacacttcactcacctgaataataatttcgattattatatattccagagagtccaccaatgcgaacatttccaaacttgaccactccagaaaatcccaaaaagtatatgttaggtgcagcccatcctccatagtacctaaagtaaaatatacccaacaaatcatcacaaatcaacttactgaatgtcatggaagtagaattgattcaacagttctctttcatgtctagggatttctaagagagaaaaagcctaacttttagggggaaaaaacaacaaaaattgagagatactcacaattcccacaagtaattggaagcttcgtgattgccaccaataaaaatggtgggataaggagcaatttcctgacccgaatagtacttccaaaaggagttcatggagcggtatttgggaggaacatttaagctctccaaatcattctcattcctcacagactaattccaattccagaacaaaaactaaaccactcagcttcttcttcatcataatcatcataaaaagaaaatgaaggattgaaattagagaaatgagtacctgaaaatcgccgcaacagatgaggagatcgattttgatgttgttaagtgtttcgagatattggagggttttgtaaacattgtcgaggtcaccatgcatacaaccttcgacagctattttcatggcgtcaaacccaaattcaatcacgctcaaagtttcttcctttctctctctctctctctctcagactcagaccagtgatgatttgccgccaaggcgagtatgttgtgttttcgcctttcttttaacacttttgtttttaattttatttttggaggagtgatagtgtgaactttttattacaatgttttaatcaactaatatttttttcaaattttattagatggtggtgttcgttatgtttacaatattattcttaaattttttaaaaaaattgaatgatttatagtgttaaaaatacgtttgaagttttttaagcacgtgtggtaaattagaatatcagaaactctgttttcgacaaagtaatcattttttttcatggtggctatgcccgaagtgtgcacgacagtttagcaaccacgacgttcccaagataaaataatctttgtacaatacgttctacaccgaacgatatcgctcaaactatactcctaattattgctctaagaaaaatcgtaaaaaagaagagaaactcttcatgcacacttcgggcagaaccgcctcagccaaaatctttattcgataattcgttccagttttattgtttttaattcggcataacagtttttccttaaaattccatcgatttgggtctttttctcttagaaatttctacatatttagggtgtgtttagtaacactattttaatcatttttttttaattagaagagtgaaactattttttatttttgtaattttttttaatttttaattgagaatcaaaattttaaaaattctaaaaacaaataaaaattattttaaaaaaat

SEQ ID NO: 99294 - DNA, 2767 bp, Cannabis sativa
gactcgaggagcaacggatgttgtatttgatcaatatccacagaaacagaatcatctatgtcattactaaattctgaaaaagtagggcataccccattgatccacagagcatgaccggctctagcaaaagcaagatcaatttctaaaaccttatccaaaagatactctatgtctctttttgagtttgctatctcggatgttagcatactcaagatggctatctcctcagctttctcagcactcgaaagcttcacctccatgttattcaagtcgactatatccccgggctccacaaaatatgttgcaccagaactactagcatctagaactacagcacctggaaccaaatgcctatgggaagccctaaccccgacacacatcctactccgacgttttgtaactaatggactgtcaatgccaccagcctgaaaaatcttagatgacacttcctttaacaaagcttctaacttttccatgtttctctttctctctgatctaataatctctaaatcatcactagctctatcaagtatgatcgaaagattgcaatctatacaaaaacctatctttctaaccaactccacatgtaaattgcaattctggagcagttcaagaagaggcaagtacctatttataatcaaattagacaaaaatttagaattcaattctaatcaaaatttcaaaattctctgtttttttgcctatcatattcaaaagctaaaccactaagtcgaaagagaaattcagctcttatcatatttgcagcaataactactcaaagttttggctttgtaaccggcagaaacccattgattctttttagcagcgacataatttcgtataatttcgtcccaacaggttccatttgtgagtttgtatgagcatatataaggacacgattaatacccatttaatcatgtattaacaaatatgtattaatcgtgtccaaacacgtgcaaactctcaaactgaatctcttggaacgaaattggataaaattacacttttagtaacatcaggtagttttgccgctaataaaaatcaatggttccaaccgattacaaacttaaaacattaaatacttatgccgcaaatctcccaatcataaacagaaatgaaagcatttcagttcttagcatcttccacaaaatcaaacgaaatatttatcaaactaacaacatgaaaaaatgttaaattagcaaaataaccacattgaattcacactacaggatgtaaatttatggtcgcaaaatgatcatatagtgtaattttcagtcgctcgtacaaccaaaacatggttatagtattcaaacatatcgttaaattcttagacgataactctagaattttaccttatgcaaaaaaatttaaaaaatttaaaaatttcatgagtttttagagtaagttgttaaaaatcttgcgaattgataaaagtaaggaattatttggttatgcagttcaaaaatcattaggttgaactttgaattttatccaaaagttaagaatagtaaagtctacgattaattactagaactgaaaaaatcaccaaattcataattattttcgatttcataagcttaaaaagttatcatcataattcaaaatcaaatattacctctcattgcaatcatcactcgaagccaattcatccaatttctcgtacaaagccctagcagccataagcgtcctcctaatctcacaaatctccttaatcgtaagcaattctccagaacttgccgaattcaaaatctcggaaacatcctcaatcgccgagaaatcagacggtttagaacccataacctccacgaccttggtagcggccacggtttgatccagaagcttctggctctcctcccgagaccggccaaagggaattctggcattctgtgcggttgagaagcccatcgatgtcgatgtaaacaccgagagctgtttgcagagcgatccccattcgagaagctctagggtttcggattggagagtctgtgagagagtggcggtggcagagatgaaggagaacgaggaaggtttgaggggtctggagaagaggtggaatggaggcggtggtggtggtggtgatcggaatcggaatcggaggttgaggagttgcatcggaggaacgagttgactcagtgagttgaagagcattgggaatcggtttccttatccatttccaatggttactctgtttcgcgccttatctgaacccattaccgttagccgttattcttattttttatttatttttgagttttggcgctaaagtcaatttcacttgcacttagtttagattaaatttggtccaaagtataatataaaattatatttgacttatttttttgtatttgtgctccaatattagctataaaaattaacattactattaatattctttcaaaaatatataaaataattaattttatttatattattttaatattttattcaaagttaatgaatagtattaataagtggcaaagaggttatttaagggaaatttacacccattactacctttatcattttttttttcatttgtacaggcacagtcattttaacttttatactgttttctatttttaaatatttttggcagtatactgcctttggtaagttttattaatattggttttatggctttacaagtgtcatgctcgggttgttccacgtttttttctctactatgtcattcatttttccaaagcattttataataataataagatagaaaataatgagtagttgtgtctccccacattaaaattta

SEQ ID NO: 99295 - DNA, 726 bp, Cannabis sativa
aagaagccagaaacaacaagaaatcacttttcagagacaaaaaaggataggcgtgtgagatccatttccccaagtttctggcgtagacatccacaaggaaagtcaagattgactgatgaggagatacttaaaaagttttcttcaagaccaatgcccacggaaagagacactagggtaattgccaccataatgtctaataacgggcccacttacaagcaaatggtagaaggcccacatatcaacttatgcaaatctcgccagccccataactacccagagaatactcttttcccatggcctgctaatgcagaagagactgggctcgctgaggaactaatgggcccaatacaagttgacaagtttgaaccggccctaacactgtatcacgacccacttgatgtgtctgaagagattcacccatgtcctcaagagagaaagagaaaagctagtttaaatctgatgccttttgttcctagaacagaatcaaatactagagttttctctaaggaggcacctactctttcccctttctcccccgaccctgtaaattctacattcaaattgggttctggtgcttcctcttcagcaacaaagaaggacaagagaagaaagaaagggtctcgatcgagattatcaaccgacatacaagatggaaccagcaaggaaatcacagcaggagaaagtgtggccaggaatttggttgaatcaatggagctggtggagatt

SEQ ID NO: 99296 - DNA, 3611 bp, Cannabis sativa
  modified_base (3544)..(3546): a, c, t, g, unknown or other
tagttaataatatgggttttctggcattggcttattactggagttttgcatgcaagggaagtatgcgcgagtcattttattagttctcttattacttattgcttatcttggatattctcttgatgcaggttacagaagatcaaaatcttttgaaggaaaaagtgcaacacctaagtggagatgctgggattcagcgcatggaatgtgctttatctgaaacaagatccagctactttttagcgaaggaaaatggaaacagttctgggccactgattactccttttatttctccaagcctacctaattccacacctggttcgtctgttgctagcacagatatgaaaagtcatatgggtgaggattctacaaaaccgagccgagtagttcgttccttgttcagggaagataataatcctgaaggatcaaattcttcagcaccaagaaccatttcggatggacagctaggatcttctgttgagaagttggtcatggagaatgaatttattgtaaatgaatttcttcacaagcagcaagatgcttttagtgatatctttaatttgtccaatgaagatcaaaatggcatgaaggtcagtgctctgtcatattgtcactagggtatagtgtatgctgaattagtaaacataagaatatatagacaactaaatgtctatttatgagaacgtgtttcctagaattcttaggctatatctggatataatagtttaaaagaaattcatgaaattttctattttcttttgcattctttcttctttttcaattaaatattgtagcaaagaacatagtcaagttgcttcacatcctgctgagaacaagagaaacagcttgcatatttgtttgcttatcgaacctaatttcatcatgttttgcaggcaaaggtaagagaggcaatggagaatgctttctgggatagcatcatggaatccatgaaaagtggagaccctaactatgatcgagttgtagaactaatgagggagatgagggatgaactttgccagatggctcctgagagctggagacaaaggattgttgaagctattgatttagacattttttctcaggtagagaagcctcttaattcatattttattgtttctgcaaacagcagtaacatgggtgtacaaatttcaaggtcttcactttgtttttgttttgtcaaggtgcttaaatcaggtaatttggacattcactatctgggaaatattctggaattttcattggacacattgcaaaaactgtcctcacctgcgaatgatgatgaaatgaagactgctcaccaggggttaatgaaagaattagcttgtgtatgtgaagccagagatggctcaaaccattcaagtgtaattgctatgatcaaaggtctgcgctttgtcctagaacagattcaggtaagaacatttacaaaactttatataaacatatacgaggatgttcttatatatcagggctatatagctttctcactattcatttgctgggaataaagatattattttataaattaattttattaatgtctctctttaaaagctgcatttttaatttcagggttctcttttcttttctcctttccctatattgtttcatcactttgccacagtagttgcatctgtttatgatgtacttattttgtatggaataacaaatttattatatggacttattcttgtaggtgcttaagcgagaaataagcaaagcacgcataagactcctggaaccattgttaaaggggcctgctggtctggattacctgaaaaatgcttttgccaatcgccatggatctccgtctaatgccaattcctccctaccaaaaacatctcaatggctgtcatctgtgtggaatttcaaagatcaggagtgggaagaacatgtgaattccatctctactttggaccgtgaaagttcatctcatggatcaattccacccactaccctccgaagtggtggaacttttgtgctcaaacccaactcagcttctcttacacctgatgctaacaccaccacaggttcggatgccaactccttgttaaaattaataaagaaataggttgaactaatgtttcttttccttatcaatttttctgttctgctcaggtaatcaacaactggaatgcaagggagaaaaagttgatctgatggttaggctaggcttgttgaagcttgtaagcaatgtatctggtttgactcaagaggttctgcctgaaactttcacactgaatttttctaggctgagggctgttcaggctcaacttcagaaaattattgtaactgctatcaggtaattggaaataaatcgataattctcctggtgatgagtgactactagttttgaaatagactagtgactgactgagatatgtttatgctatctgcagcattctcatttgccgacaaactcttctaagcgagagaatcatagacagccctgcagcattggagggcatactatcagaatgcagtgagagcctagtggatctcctggatcgtgtcgaggatgcaggaattgaagaaattgttgaatcgattagtaagttcttcacagacggtagcaaagacaaccaaaagcttgaatcacggaaggcggtcatggcaaggatgttaaccaagagcctgcaagctggagatcctgtgtttgaaagggtatccagtgctgtccacttgtctgcaaggggagttgtgcttgggggaagcaggcctgatggaagaaaactagctgagatggcactccggcaagtcggagctgctgtactgactaggaaattggtggaagctgctgaagttttagtggtggctgctactgtgtcagttagtgttcatggagcttggtacagacaacttattgataacatgtgaaagtttgcatatacaaagacgtacagaataagatattgtacatatggtacctgtaacagcttgtgtcatgtgtataaagctgtgtttaattatttaactggagttgtagatggtagtggcttcttcttttttatatgcaaaattcttgggaacacaacaggaatgtaaatatgtttggatgtaataaaaggtcttgttttctctcgaattagcactttcattttcacaaatgaaaaatgatcaaatatttcaatggcttggtttggccgattaaggatgtttgagtgaagccatcatatcagtcaaaaggttattattttattatttttgcctaatctgtcaagagaaattataacccatttaaaatatattcgagggttggattggcttttattacaatatttgttgaggaagagtgttcatattatgggtgttcacggattggaatggtttgaatttttatattttttgaaccaaattaatatgacggttttttgaatattaaaaatcaaaccagaccaataaatttctcaaatcaaatcattaagaatggtttagtttggtttgaaaccaaggtttaagtagaatattttttaggataaatagcggcataagtacccaatgtttgtaaaactgtaattatgccacttacagttttacaaacattgggtannnatgccgctaaaaataaacattgggattatgccacttacaagcttaaaacttttggtacttatgtc

SEQ ID NO: 99297 - DNA, 8098 bp, Cannabis sativa
ataataagcagggatgtagtgtttagagaggattatatagccatgaagatgattgaggaaccagttgaaactgctgcggtcaaagatgctaacacagacagtttataactcgaggtggagcaaggtatcaattctaaacagattaggaaagtttagattaatgacactgaagataattcaaatgagacacaacgagatctcagcaactttcagttggaaatagaaagagagaggaaagaaatcaaattcccagacagattaggctatgcaaaatttagagctttgtccttaacagttgcatatgagattgacagttagttaccatcaagcttccatgaagatgtgaacaggaaggccattcaagaggaaatgatgtcactcaagaagaacaaaaccaggttgttgttagaaaactagctgggaaaaggattgttgtctgcaaaaggatattaagagagaaggaaggtaatattgaggatggaaccaagtggttcaaagaaagattggttgcaaagggtttcacacaacaagaatgagtggatttcaatgaaatcttctcaccagtggtgaaacaagcttccattagaatgatactttcaaaggctactaaattggatcttgaagtggactaaatggatgagaggatagcattcctacatagaaatctagaggaagaaatatgttatacctatattttgagcagtaataataaaaaagctaacacgtgtaagctagaatatgaaccaaccccaaatttatgcattattaaatgcacttagataacttgcctcaagaaatacagttaataaaaatattcaaactcgctgctatatagaaaatagcgagacaggaataataactattgactgatgagatagcgagataaataggtccaactcgggttaaacagaatatacaacagaaccatttagacaagtagataatgagtttgcagctcattgatttccatactcgtgattatgagtttgtagctcattaatccacatacttgtatgttcaagtaaaatctcaatatttattctcctcgctcttgacgcgttggaataaccatcttacctatacctcactcaataactaaagaaggctgcgagatgcatcgatcgtaactcaacacttaatactttctctacaaagatatttaagaaagacatcacttagagggtgagaacaagtgagcacaatcagcttaactgcctatagataaatacaaagagtcgttaggcggttatttatgattatctcatgtgcacaaagataaaacatggagaatgttcacgtttcatgagcagttacaaatgatcacatcctagacaataactgtcatcctagacatctgtaaatagagatagaatctaggaaagacaggaggtccaatctttgggaaaaaaatagataatattgctattattcattcctaaaaatagtatcattatattcagtatacaaacttataaatcttgaataagattgactcttgaattatgaagatttaacttcaaaactacataaaaaaatcttcttgttatttattgcttccatattattaattactatacaattaattccatagtttatttagtacaaaaaaagtaattatttagttaacaaaaatctaagttgacaaaatatatatgtaatagcctgaagggtttaagagtggggataacttacttaagaaacgacataagctcttgtgttcattttatttatattttatgtttgaatttttttctcgtttgtgtatatcattcgttgatccgtttaacattgtttatggtatttttttaatatatcattttattaatctgtttataattcatatatatatatatgtattaatttatatatatagtgtagagatgatagtagtgtacgtaccataacgcgatggaaccatacgaaatcgctgaacgatatcataaactgagccataaattgcaaccatgttggggtacttaataggaatgtctttgaccaaactttccaaacctttgttgtaatccttcaccattttgttcatcttcccataacatttcttggtggggccacctatgagcactcgggcgggcacacaccccactggccctagtgaaagcagtccaatccgacgagccccgagtttgtaaagttgttcaactaacttaccaacctcagtcaacattgtttggatgaacacttctggcttctgtgatgagttatcaaattgtaagaagtagccgtagatgtcgttggatcctgactccaagaagaataacgagttttttatgctcttttcgtctgtgtggttttgttccactaccattttgaattgttgtagttgaacttggagtgaggtgactccctgcgtttcatcaaatttatgtcgttaattttctacttataatagatataaatatatatacatacatactacataattattacactatattgtattacactgtatgtatgaataatttcttcgtttcaactagttagtttattttattaacttggcatgcttatatatattttgatacttattagctagagttaattagtagtatagcattttagttatgttttctttttaacaaacttttcctcttcaactgctagtctctttcactcaaactgctattctcaccaatcttttttaaaatttctatcacataatcgttccctccatgctacttctccttgccgacaccaagattccccttcactgactttctctgatcaccaccatggattcaataaccaatgatatgcacactaatctttcactcactgatgaggaaagatccatcttcacagttcctgaatactgctctacgcagcctgttactcatcaccacactctactggccaaagtccttactcatcaaaatatttacagcaaaatctttattgaccaaatgtcgggtcattggcgaggtcgattccacgttctgattactgaatataaggaaacagatggtttatttcatattaagttcggatgcgatggagataaacaaagggtcttgaacaaagaaccttggcactttcaaaaccacttaattgtgcttcgtacaccagatgctctgcaaaatgtctctaaggaagatctgattttcactcctttttgggttcaaatatatcgcctaccttttttgagtaaatctaaaatgttggctgaagcaattggaaatataattggtgaattcattgaagtttttgatgattctaccaatgaaggttggggtcctttcttgcgggttcgagttaaactttgtactaataagccattgttgagaggtctcatgatccggctgcccaaaataagagatgaattttggattgactttcgttacgaaagattaccggaattttgctttgaatgtggtcgtctaggccacccttttgagaagtgtgttgctttcatggaaagaatggataacggtaatgatgatgatttccaatatggcccatggatgaaaggggcaaaattaccaaccaataattatgatcgctacagaacggattttgccaaaggaaatgcttggcctttacttacaagattggcccgcactacaatcacatccacacttccatccttaatttcccgtggacaacctcaccctcgtgttctacttgatggagaatcttccaatcaccaactatccaggcctcaacaacacaccagtaccattcatccaccatttcctacacatattgacaccaacagtcccatctcacaaactccttcatcagccactaccattccctcctctatccaaccgaatctgcccaacacacaatgttccaacgccagccttagcagtgatttccctaaatctctcactccctacagccatttcagtaacattcctcgctctgcatctctgcaaccttacaccccaaacattccctctcatcaaagcaacatcaccaacccacattcatcacctcctgcattatataccagcaacaattatcacccaatttcccacactagcaatacaaatacaccagtatcacctctatcattctcgtcaaacacactcccacttacttgcaacattaatgatcagcaacctccaccatcgaaaccatttgcaagcaacttgaaccactccacttcacacaccagtaaccaaaaaaataagcaagttctccagcattctactgagacttttactacatctgatgccaacacaaatggatctgctactgttgctgtcacggatctttctcacttatacatacctgttttgcagagcaacacttatgctacttacccacctgttcttcatccaatctctctcaacaccactcatccacccacaactattcctcaatctatggctcatctcccaacctacactaaagctaaagtgtccatagccaaagaaaatcagccttcagcaaccacttttaaaaggcaaaatgactccttgtccatgaggagtatgctgaaacgatgtcgaaatgcccaaggatcatcatcttctcctttgtcaagagacgataacattgagactctagtttctgaaaatgaagattctagtttctccaaagactcaagtgcggaggttgcaaggcaaccccgcaactcatcatgaaaatcctaagctggaatgcacggggtttggggaactctagtgcgttcagacatttacggttgcttgttcagcagcaatcgccccaagttttgtttcttatggaaacaaaactaccaataaactcagtttctcgcttccgacaatcactcctcttctcaaatgggttggaatctcctcgcttgggtcttagtggtggcctaatgttactttggaaagatgatattgacatttctctcttgaactttggtccaaatttttttgattgttatctgaagatgaatgatagcccaactttccatttaacctgcttttatggtgctcccgaagctcataacagatcagcctcatggactttgctccaacgacttgcggatgttgctcctcaccttccttggtttgttataggtgacttcaatgaaatcctttttaacagtaacaaatcgggtggatcacttcgaagtgaatctcaaatggaagcttttcggaaagccattgataaaggatgtctacatgaaaccgtgatcgagggtgatcctttcacttgggcaagaaatcgtacagcctctaacaccattaaggaacgcctagattggtgtttcgttaataatcattgggaggattttttccacacaccaaatgtccagcaccttgactattatcagtcagatcatcgtgccatctgcgcttcattcgatctactttcagcacaacacaacaccagcaaacgtaagagcaggttcagatttgaaaaattgtggctgtctgacccggacagcaaggagattattgcttcaaattggtcaaactctgctacacttgatccaattttggctgtaataaacaacctgacttcttgtgcggacaaacttcaaacatggcatgacagcaagtacggaaagatgaaaaaaaacattaaaaaaactcaaaagaaagtggagcaactcaacaactctctatctcagaccggcagtcaccttgatgaattaaaacaagctgaaaatattcttgatgaattattggcacaagaagaaacttactggcagcagcgctcgcgggtcgattggcttgcttgtggggataggaatacaaaattctttcatgctaaagccaatgccaggaaatcaaacaatcagataaaatttcttttcaatgatgttggtgcaaaggtatcctctaaagatgaaatctccatggttgtgcgagattattattcagatattttcacagctggtccaatagatgatacagcccttgcctctaccttggagtgtattcctactgtgatttctgatgatcataatgcttctcttcttgcaccatttacaaaccatgaagttggaaatgcattacaaaccatgtctgcggataagagtccgggaatagatggaatgtcagccatgttctaccaacaacattggtctattgttggtgaccaagtttcacaagccgtgcttagcatcctcaataatggtgcggatccttcaagcctcaatcgaacacttatcactctcattccgaaaatcaagaaaccccataccatgaaagactttcgtcctattagcttgtgcaacgtcatttcaaaattggttacaaagatgattgttgccaggtttaaggaggttcttcctttggtaatctctgagacgcaaagtgcttttttgtctaataggttgattactgataacattctggtggctttcgagttggtccatgctattaagaacaagaccacagggcgtcatggaattgcctctctaaaacttgacatgagtaaggcctttgatcgagttgaatggcgattcatttaagaggtaatgagaaagatgggttttgctactggttgggttgcacttatcatgaaatgcctaactacaaaccggttttcttttctcatcaatggtgaagtatctggttctttagtgccaactagagggttacgacaaggctgccccttgtccccctatctctttttgatttgtgctgaaggtttgtcgaggctacttcaacctgagcaagatatgggcaacttacatggttacaagctaacgagacatgctccatccatttctcatttgttgtttgccgacgactgtctactcttttgtcaagctgatgaaagttcatgccgagccatcaagagggtcttagatacatatcgtctagcttctggacaaatgatcaatcctgacaaatgtgtcatgtctttctccccgaatacaactttagctgcccaagttttctttcaccgccatctatccatgcctattcgtgaatatcatgaaagataccttggcttgccatcttattcgggacgagataagaaggtacttttcagcaatattaaggagaggatttggaaactaatgcaatcttggaacgaaaaactcttctcagctggtggaagggaagtcctccttaaagctgttgtccaatcaattcctacatatgctatgagttgcttccgtctaccggtctatttttgcaaataacttgaaagtatgatggccaacttttggtggggtatgaatgagaatggctcaaagatacattggcgctcttggaatttgctatgcaaaaaaaaaggtgaaggaggtatgggctttagatcctttatacactttaaccaagctcttctagcgaaacaagcatggcgtctacttgagaacccgaattcactcattggacaacttcttaagagcaaatattttccacacaattcattcctagaagcttctatgggtcattccccatcactaacatggcaaggaattacatggggccgtgagctgttgatcaaagggttgaggtggaaaattggtgaaggtcgatctattaattgtggttcggatccttggattcctggtcacacaaccttccttcccatttgctactcggggccttccaatggtgtggttgcaaattttattactgaagagagacaatggaatgtacccttactgcagcagtttttttgccaacttgatttggagaaaatcgtgacgattccattaagttacttcggtacagcagataaattgatatggcatcatcaactttcaggaatattcacagtacaaagtgcctatcatcttgcaacatcgctggaagatgccgacatcagttcatgctcaacgtctgaattagcttggtggaagctgttttggtcacttcagatcccccaaaaggttaagatcttcgcctggcgtatcactcatgatgctcttccagttgcaacctcacttgttcataggaagattatcactgactccacatgttccatctgcaaacaagcttgggaaaccacgggtcacgctctttttagctgcaaatatgctaaagcagtatggcgatctcttaattacaggtttgattggcatgcttgtacttctatgaaacatggtgattacttgattcatcttgcatcagtttatacaaaaccagaaatggagcaactgttttgtactctatgggcgatttggactgaacgaaac

SEQ ID NO: 99298 - DNA, 3974 bp, Cannabis sativa
ttctcgaaatagtgaggagtttcctgttagcccaaatgtttttcgagaagggcacgtcccttggtatacaggagactcctcagctgtttcttgaggtacgtcgccagttggatatgcgtgatgtgttcctaggttgtgattagttggatttctcaaaatggtgggtgtttcctagtaactccatggtcatgcttaacaacgcatgccccttgggtcgcggggagacacccagccattttttttgaggcactctactaaatgcacatttgcaatttacaccttgggaaggttggctggttttctcaaaatagtgggtgtatcctagtaccttaatacccatgtaatcgacatggtcattaggatattaagagacactcaaccatttcttgagaggccaaaccaactcttcaagaaaatcttgtgttttgtgtgcgggtgaggtcacttctattattctcacactttcataacactgaaaagatcttctatcttctagatgagagacttatcaaacagccagatgctcggctcaggaggtgatgccttcgctgacgaccaggaccaagagaatagttttattccgacttttatttctgagacagaaataccagctgttagaactacgacgttgggtccgctgtcctctgaggacatagaaaggatggttcaggaactcgctgaactagggacaatcgagattcgtgatagcaaatctacggtatctgctcatgaacatcttgttcactctaggcatgctcctgacgttgaagtagaggagatgagtgaggactaggagattccttaccgcgagtcagatgaggaggacgacgctgagggaagtggaactgattcattggataacacacaactaaacgagcccttctcatgcgaggagttggtctcacgagtcaccaaatccgacctcactacttttaggaggttgaatttgttgtgacttagcaccatgcgtcctcgctctactcagagaccacatctttccttcaccaatccgacaataatccccatggagaatgtggttgtctctatacccattcttcgatgtggcttattgcttcccttccatccattcatcgctgctattcttaagcggtatgacgtatccccctttcagttaaccccaaacagctatcgcagacctcttggattttatgcgatgtacatggagtacgcgcatagggagccttcaatggaggacttcagctatttttatgatataaagaatgtgggccttcataacagtttctattacttcagcaagtgggccacttctgaaatcaacggggtagaaggcatggtttccaatatgggagattggaaatctaagtagttctatgtatttaaagttccagggattaggactgactttaatcaccgacctagtacgtccaacttttcagtacttagttaatattcatattaccttatgatatcgattaacatgtactttcttattgatcgcagatagaccagctcgacctgttctggacccagctcacagagaagtcgcagaagttctcggtagcctccccgttcacgatcgcgattggcgattattgtgcacaactccaaagctgcgagaacataagctaattcttgagaacgcaagccttcatctagagccagtatacaaagagccgtctgaaaaacaaaaagagaaaatagacaagcgtcttccgaacaaacttgccgaccaacatcaggtaactcatcgtgtatatgcaataaataatcataaattgtttatttttaacttaacttttcttgtcctagcagaaatgactttcttgaagcaagctccagtgcttaatcgcaagctaaaaactagaacgacgacgacttctcctatcgttccttagaagaggaagagtgacgtagttgcaattcctatttccgactcatccaacaagcaaacaaaaccttctcaggacaaggggaaaaaagttatgatcgatccaggtgttcgagctcgtgacatcctagctcttcaagagaagttcatgggcgaggaattcatgtcaaagtttgaagggactccttctgaggaattaatgcctcgctatgcgaagttggctttgcagtttatcactatgtttttgagggcgttcgttgcttgctctaaggaggtcgaccttttgaagaaacagattgtccagcttcaggagaacaacaaaaagctgaagcaggacgcaaatgctaaggacaaagagctcgagaacctccagaagtccaaagagcaggtggaacttcaagctaaactctctcagtcaaaggtcgaggagttgtctcgcgacttggagattgagagggagaatgggaagaagaagtacgaccaagcggtctctgactatatatatacaaccttgtccaaggtaccagatttcgacttctcaattcttggagtagaggcggctgagatgacgaaagcattttgcactatgtcgcctactcagactcaggggtgcgaagggaatcttttcccttaggacgcagagactgcgaatactgaagaggtcgctgatgaggctgctagtaaggtcgcggaaggctccactactccaactgctccaaccactccgaacgcttgatttatctaagtttttatttctttaattattaaactctttttagcgagacatgggtactcgcgttttgtacttggacaaatctcactttgctttctttctatttcgaaccgcatatatcccttcgaggatatttacttatctgtttgctttttgcggtacacgggtactcgcatactatatagacttaatcgaaaactatttttttaattacagcttggtgtaataataaattttttttaaaaaaaaatcgagaaatcaataactcttattataagaaatcaatagtacaaagtaggctatataccccctatacttagaacatttatataaataaattgactaagtataaatacacgacgagtactattgttacattgtgagtgctactgataataaaacttcagactttcgtcattccaagctcttcatatcgcagtaccatcgagttctgcaagacgataagtcgcatggccaattttctaagcgataaggtagggtccttcccaattgtcaccgaaaaccccatgtgctgggttctttgtgtttggcatgacctttcgtagtaccaaatcccctactcacagatttctctctttgacttttgaattgaaatagcgagcagttctctcctgataggccgcattcttcagatgagcctgatcgcgtttttcctctaaaagatcaagttggaacaattgcttgtccgcattttgactgatgttgagaacatctcttcgtagggaccctgccctgacttcgactagtatcatggcttcgcacccataagaaagcgagaagggagtttcgccagtcgtggatcggggaattgtattatacgaccatagaacttgcggaagctcttctagccatacccccttacgctcttcaatttttcccttaatgctatgcttaattattttattcacggcttctgtttgcccattactctatggataggcaactgctgaaaacaattttttaattcccaactcatcgcacaattggcgcatttccttacaatcgaactgttttccattatctgagataagtttgtaagagatgccaaatgtgcagatgatggaattatacactaactctcgcaatttgacagctgtaatagtcacaagggcttttgccttagcccacttggtgaaataatcgactgcgactacaccgtatttgacccgcccttccctttgggtaattctccaattaagtcaatggcccagaccgcgaagggccaaggacttgttatggagtttaactggcttggcggttggttggcatacgtggctatctgttgacattgtcacattttttagcaaagtttgaggcatctactcgcagtgtcggccaataatacccttg

SEQ ID NO: 99299 - DNA, 9039 bp, Cannabis sativa
  modified_base (35)..(57): a, c, t, g, unknown or other
  modified_base (2178)..(2185): a, c, t, g, unknown or other
atttctgatctatattaataagcaaatctgattannnnnnnnnnnnnnnnnnnnnnngcataaaacccaacacttactgcaattcgaggacatcaactccagaagttcatctaagatgttactcatctatctcagtttatctcaaatgttgatcaagcaactcagatctacaatccaaaattcttgaactgggagattcaagatcaattactcgtctcatggattctatcatcataaatgagagtctccttatccgaatggttggctgtaacactgctaggcagatatggcaagcctaagaaaaatactatacacatcaagtttaatccaagatccttgaatttagaacttaactttataatctcaaaaaaggctccctatcattggatgagtacttactaaaagtaaagcaacacgttaatttactggcctttgttggtgaatctctgtcagctcgagatcacattgcagcaatcttcaagggattaccaagcgagtatgacacctttattatctcctccaatactcgaattaaagagtattctgtggctaaaattgaagctcttagctttagaatcgaggatcgaaaaatctgaaaaagagatagacagagtgtcaatcttgtagttgcaaattcaacaccaagatcatctgataatttgctacaacttgaagcaaatcttactcaattcaacaagaatttcaaatatcctggtacacagagaggtcagtactatcctccctatccaaatttttctccttttaacttctctaattttcattctaatcaagttccttatatccttgaattttttcttgagaagcatcttcttcctataaccatagaagaggttctaatactggagccagaggaggaaaattacctcaacatcagagcatacctcaatgttagctttgtcacaagcttggccacactgtcatcgactgtttttaccgatttaacaaaagtttcacaggatctgttccacctacaaaatctgcctcaatgcaggcaaatttggctcaaaccagtcactacaagaaatgtcatgcgcttttttcaacacatttttgcactggcaaaagtttgatattgtgctggcaaaacgaaatctatttttgatgtgttggcaaaaggggttggtaaatcaacgttggtattagaacttttaccgacgctaaatgaaaagtgctagcaaaaatgacttttcccagcacgtaaatgcattggtaaaagttatatttttgccactgcaaatatgagctggtaaaactttgacctttttgccagcgcagtttgcgagatgcactagtagatgttacttttactagtgtagtaacaaactgtgctggaagtgacattttttgtaatgactcctattgatgatggcagctagtatcataattctggtgccataaattattgtacaccaaatctgcaaaacttgatgactactgcagattacaatggttcaaatcaaatatatgtgggcaacggaacatgtctgtcaatcaaacactgtggccaaacttcgttgcttcaaataactctgccaagcctttaattctcaataaattatatttctcttagtaagaatgcaatatatatttggtttattaaattttaaaatatttttattttatatgtattatatttttaaattattattttttacgttaaaaatattaattatatataattttttaataaatatatataaatgtctggattaaattggatcgattacttttatatgtcaatcaatatctaatttgcacaagtacgaatatctggactttgcaaattaaattggattggatcgtacagattgaattgaattgagtattttatgaacattcttaatgtaaatagtatattttgtacatatgaacaattcaacatagaagttaacaactaaaaatgagtaaaaatacataaaagtttagaggattttatcgtaatgaaaaatgagtttttgtaaataattgagtttttgacggcaaaacctttccaactgttgtttcgcttgcatttaaccctccaagcttaaattttggcggtaaaaccctccaaattactgaactagtagcaaatttaaagtgtcattcggttaattgtcactatgagttgcttatgtgtacactcttgtccacatgtcacatttatattggtacacnnnnnnnnattatttaaaaattattttcaaaattcatttcaaaattaaataaaattataaaaataaaaaaaaatattataaattttgaaataatttatatacttttaaaataataatattagttgtattaatataaatttgacacatgtacaaaaatatacatataagtcgtctatattgataattagctataaaaaatagataaaattttaaatttataagtagtttagtagtttggagagttttactgtcaaaatttaaatttagagggttaagtgtaagtaaagtgataattgagagagtttagaacaaaaaaaactcaaaataactgggtgaaactatttaaaggtttgctgcaattaagtctagctaaaataaataacaaaattggtttctctaagcacaaaaggcagaacgcatagagccaactatgaacactgttttgtgttcttagttccaaaagtagtccaacgaatgtaatatggtcaatgggtcataacttgacaagttttaatcgctaacacaatatgtgattccaaacattacacgtgttctcatgaatcgaatcagttaaacactgttaattgacagtaaagtaactcctcttttttttttttaaactatgtgtcaagtggaaataagagttatattccttaaaataaaaggagatattgttttccaaatatctcgtaatgagttattatggcagaagaaaaatgggctcctgtggaggtggttaagtcggctagattagtccttgatcattggaagattgctaattttgagtcgtctcatgctaattttgttactggtgatgttattggcagtaatctttggcgtaaaccagatcattttactgtcaaggtgaatgtcaatgacactatttttaaagttcaacgaaaattcgtatttggttgtgtggctcgcgatagtcatggcaagcttattgaagctgtctcggggagtaggtggggttgtgttcttcctgaaattgccgaggtcattggtattatggaagcgttgagttgaataaagcgcaaaaggtgggaaaaggtagttgttgaatcagatgctttagttattgtccaagcaattaaaagttcaattcatatgccatctcaattcaagttgctggtggaggactgtcgtttaattttatctactttaaataatatccatgtttcttttgttaatcgatctgtaaatagggctgcccattgtgttgttagagggtcttgtttttcgtcagattgtatgtacaatgagcttaatgctccttcctctttacgagacaatgtaattgcggatgcaagttgattcttaatgatattatcctttattttattttattttttaaaaaaagtgatattgtttggttagttataatccttaaaaaagaatagaattgttaaaaaatattaataactcagtatggaagagttagtccattatattaagtcttatggtttagacactatatctcttgctaatggtgctactcattcagcaaaacttgtaatgtctataaaataagatcatatttggtacaaagatatctttttatatttgtggtttcactttcattcatacgcaaaaaacctacttaaagaaatttcataaattttcataaatcaaaacaaataaaaggtatcaaaacaaattaacaccagaatatactcccaagtgtgcaggagtgaaatccaaagatgcactaaagtttcaagacattcttgtcatcatccaactaagaatgaaaataaataaatgaaaaataatttactctttaacaagaagccaaaacaattcactctcacttttacatctcaatcttcctcacatatatgcctttcattttctcccccaaaacccttttctatcttgttctttctcttttccacttatccaaacataattgtagccatccaagtatgaattttgaagctctgtgcttggattggacaaattgaatagcctagaaatatgtctcttctattatgaatttttgacaagtgttcacatagaatgagatttgagtaaaaccctttaaggatgagacaatttaagcatgatttttaccaaataaattggaatttttacacaagtttttatttttttaacttggttttcaaaactaaacaaaacccagttcagtaaatctaactctctctctgtttggataaactcactataaaaaacaaacatagaggaacaactataaaggctgcagctttaagtaaatcttcattctcttttgagatcactccaattcttgaccagtctccactatacctgaacattttaatgtcattatttcattataacaatcccaataagaaaaattcttaaaaagaaacaaactttatctatctatgattatatatggttttatagtaatagaggaaaaagcttaccctgcatcaatgaatcctaatccaaacacagcaatggctgattgagtaatgagtgtggttgaaatcctcagtggaaaaatgggacctttctgagtttttgagttctcagaaaaattcctcttttgacctaatatgataccaaatctcttgccatttttggtcacatataataaaggagaggaaaacttggttaagataaagctctttgctgcaaccactgccattttcttctcatctaaactcttctctgcctcacatatcaaatttctgaaatgctataagacaagataattcacaccatgagatgcttgaaaaggtgagaagttttttaagtgttgagggtattaaggtaatatcacatacatttttgagaaaaaaatattgaagactaacttctatttgtggcttatgaattttatatatataaaaaataaaactttataataatgtaatgtgtggcctgtatatttttaaaaaattaataagcatttacattcttattttttaaaacattcatgaaagagtgattcaaaaaactctaaaatatggaatgtggatagggaactctcctatggagagacgttttctttattattattattattattattattattattttgctttttaaatatttttatagtattataattaaaataaaaattactcaaaatcatatagagtcgtagtgagtgttggactaaactggatatcaatatgatcaagattaatattgacaaaactatttttaaaactaaaaattcttatgaggcaggattagtagctcgggatcgaatggtttaattttagaagttttctcggttattttttggggggcatgttcagcatgttattgttgaattaatagatgctaaggaagctttaagttggataaagagaaaaaaatagagagataaaattattgaaattgataatttggtgattgttcaaagcatgtttcaaagttgtctacatatgctttcttcatttggtttgttaataagtgattgtaaagatttgttatttacttttaatcatgtcaattttttttttttgtttcacggtttgtaaataaaattacatattgtcttgctcgtaacttttatttttaatttaactgtctgtttactaatagcaatgtccattttgctcatcaatgggctcgatatagggcccgataggtccgatatcaataagacaatatcgaacctatcgggccctatatcagacccatcgtgtcacaataaaacttaaaattatgaggaccatagggcccactatcgggccctatatcggatctatcaggctatcttcttcaaccttcaaccccttcaatattagactaccatcgtgccctataccgagcctacatcaaacatgcatcgagccaggcaaaaatcgaagattccccccaaaacacaaatcctagcctaaaaacctaaaaaattacatattctccactaaaaacacagacttaatcctaaatctaattgctttaaccccaaatcatgaaaaataaaataaaatgattacagttaaaaattaaggattacctttgacgaagacattgtcggcgtttgatggtggtcgcggtgtttcgtgggtcatgtgggtgatgtggtcgcgaggttgaggtggttcgtgagttgtgggtcgtgtgggtagttcgattgtgtgctcctccgtgtgcatgtttatagagagcgagagagagaagaggaaagagagagaaatagagttgttcaaataggaggggtagaatgagattttagaaaaaaaaaatgatttattctactaatattaaataacttaggtttaggaaaacaattttggccaataaatgtataattagtcaaattttccctttaaaaatgtactcaaaactaaaattttgtccaaaggaaggataactgtataaataatttaaattattgggcgtttcggcaaaggcatcaaaagtttcttgtttataaatctcaaaaatcaaaattacagagacacatctaaagttaaacgtatttcataattacccctttaaaacaaataagtttccataaacacccctacagaacaactcaaaagagagagaagtcaccataaacagagtgacagtagtacagaccaaaacccttaaacccttgacaatggcgatcacatcacacccacagcctccccaaatccaaaggttccctcagtccaaatacatagacgcagtccggtggctacctccagtcacggccttggaccggttcgcagccatcgcctttttcgactccgattccgacacttcctccgttgaaatatactcaattggctccaacaacccaccaaacctagctcctcagtcttcgtgggtttctccctcgagggtctcttctctcaaagcctctcaatcccaacacagaccttttgttgccgctgcaactttttcgagctctctacatgtcctgttctccgatccaatggacgcttcgtcgctcgaatcggagatttctatcccggggaaggttttacacgaaggacccatttcttgtattgatttaatggacggtgagcttgagtgtttgactgttggagaagatgggaagatcaatgtggtgtctattggggtttcgaatttgaatcaccggagagtttttgatagcagtggtttggtttcttacactgcgacgaaatgggcttctccggctgagtttgcgactgctggatatgggtttagtcttcaatggtgggatcagaggaaacccggtggagctgtttctcagttcaagggcgactggtgagttattgttattgttattcattgttgtatatgctttgtttttgggcttcaacaatgctttgtgcttggttttgaaggaagaatttctagtgtccaagatttttgttatgaaagtcaatagaaaaaaaagttagtttgagttttgttagagagtctcacattatcaatgtatcaatgtgtggaaaattaatacaatatgtaacttaaacaattggttttgagaccatttttacttccacaatatttgttgatgttgtgttatgattttgttgatgttgtgttatgattcatgattcattaactaataactacataaatatagtttgttactttctttggagtggtagttgacttgaaatacaaataatgaaacaattgtactgaagcttcattatttaagttaataagaaattagtttgaactcttgttttcttgtgattactgaatactgattactgtgatttggttttggttgaaatgaggcagggctcaaagaagaacttcgggaattgttcattccattgatattcatccatcacgtaaacatacatgtctggtgagtttgctattcctattttagtttaattgattattagataatctttttacactattggtaacggtgttggattagtttctagagatcagataacaattcagatatttctttagtatagtataagggatttcatcacttcttcaaaatatgaaagaaaaattatcccaagacaagtataaagctgtcatttagtaaatgactaaaagtgagattttcttgttctcatttcaacaggagaatgaacttttctaattttctgataattgtcttctgtctcttgacgtgtgatacataatttaaactattcctttagtttagatagttcctatggaatacttggattatgtaaatttatgttcggttttcttgcttgtactaggcaggaggttctttaggtactgtatttgcctgggatctcagatggccacaacagccaataattctttccggggttgggacaggtgatgccggagctcattctccatccgaaagtgaggtttgggaggttcagtatgaccgctacgcaacgtctgtgaacatgggaaatagttcatcttcaaaaattttgccagctatgatctgctcagaagatggtatccttgctgttattgaacaaggtatatatatgttatttgaatcttatctgtcatgacaggaagctttcctataacacaatattttcatagagctcgaataatacgaaactattaatattccaacttgttcaggtgaagaaccccttgagcttgtggcagaaccatgtgccatcaacagcttcgacattgatcgacaaaacccttcggtaagtgaaaatagctaagcaaatttgttttgtttacatgctcgatttggtcaaaatgtaaaaaattatgtttattgacaaatttcatgttatggtgaacaggatgtaatatgtagtttggaatgggaatctattgcagtgttgtcaaggtcataatatccatgaaaagacaaagtgttgtagagtttaatttttgtaattggttcattattttctggagcatgtaggaaccaggaaatgggatttcccctccctgatacttggtgctgaatctgtaacttaaccaatggaaatgtagatttcagcct

SEQ ID NO: 99300 - DNA, 6302 bp, Cannabis sativa
  modified_base (6227)..(6235): a, c, t, g, unknown or other
agtaattaacaaaaaaatgagtaatttttttgtaatttactttgaaaagccgaaaacacattctctcttttatagagttatagatatataagagaattaagagtcaaagggtgacatttaatttgctggaaaaatggtagatatacagtactacaactggtaagtaagtataaccccttttgagtgtagtagtgtcttctttaccagtggggtgaaacagttgtgagcagctgacctgaataaggtgggtcactgtccaaaacagaacattgacataataatttctatttacccatttccagtcaagtagtataaaaacctcttttatttttctttctcgatgttatgttatgtcattgttatcaaaaccacatttttcattttttttttcttttaggtacatacacaataaatttcaggattcattatttctttacaatagaaaataatacttttctcttttccgtaaagaaaagtcagcttttacacaaatcccaaaaataaaaaaataaaacaaaattactactactactacaactacagctacaatcttctagtcaacaatatgcatatgccgttttgggtgctttttcccatacagcagcaatagtgaggagcttatttattctcatttttaaattaattattgctttgttttcttcaaattcaacctaaacttaagccataaaatgatgatgagaatacacccaaatttagatctacaactttagccttaaagggtaatcaaattcaaaactttagtgccacaaacaagtatagtaactagtatcaacaatattggtttaactctttactacagtagctaattaaagagatctaaaaagggggtaaaatccagacaatattatatacaaatacgtaacaattaaatgaacctatgatgactttaaagacttagtttaaacaaaaaagaagaaattgactgtactcaaagatcaatgtggatcctaataactctttttaaaatgatattttcatgaaagtctcctcctcataacccaaaaatcaatgccacttcattcagatatgtatcttttccaatcttatacgtattctctccaccttttttacgtctctctctagatctctctctctctctctctccctcactccctccctctctttttgtgtgtggcaaaaataaactgcaccagaaataagaaccagatcaaagtcagaataattaggtggttcgaccacatgcatgtatatacatatacttgactaataaccttcacaacatgcatttcaaaataagagatccataaaatgaatatatttccattgacaaactacatacactaattattaggtcaggtataaatttactactgtatatgtgttgtgtaaattatgttttaaaatgttccattactgtttcttcagagaccatataaataagtgtgaacgggagaatttcccgaagggatgcatgtgctaattttaaatacgagattattagaatcagatcaaacaatcatgaaagtattttatttcacagattataatttgtagccaaaattgaccctttgttaggtgaggactagtttagcttagctaattagggtagttctagtgtagtgtctctacatgtcttcaaaacctaactacctaaaagaggcttgtcaaaacaacgagagacttttctccagtcaaattaccacaaaacccctctatctacctaatacttgtctagataataagggtacaagaacaaaagaaaattttctctcttcaatatctgaaaaatacagttatataataatgtcatttaaatatcctaacaaagcttcacatcactatatgcgagtcatatgtaatttgttagtagggataatgacgaacaaaatttcgtcataaaattaataaattatataaataaaagccaaaaacaaaacaaaagacaaaaggaaataaagtgtgcaagtaaacctaaagctactgctagagttcagatgggttcttattatagttgacaacggggaggacactctcttgaaaagacaataattctcataaccgacccctctgctctatgcaataaagagtaatattagctttctactgccaccaagtgacattaccccattaatgaaagaacaaggcaaattacatataaaagcatcataacactcataaatgcaaaggcagatatcaaacctcatgtgggcagagaaccaaatattattattattttatcttttaagttttaacaccacaaaagaataatggacaagtaagatgcccaaaaagttttttaacatgaaagaagaaactaaaaaccaagagcatcatatgtaagtacacgaatagagcaactaattattgtagtaaagaagagaacatacctatattgaaaaaaaaaatatttgaatgatgaagtgagatgaacaaaagagcgggaggtgaggtgatgatggcatatgctcaactagtcggaccattaatattattcctcctatcctcttcgtcatcaaacttgtgccacagctgagtttgcggacccaattgcagaaccggcgactcggggttattattaaacaaaagttgatcttcctcacgttgtagttgttgaagaggattttgaccatgttccgattgctgctgctgatcttgttgaacaagatcataaggatgttgatacccacttccaagaactaaaccaggccccactgctgtacttgtgttgctaccaatctcattgaactcagctgtctcatcatctggacccgtaccagggtcatgagcagtggtaaacctcgcgagattttgttgaacgggacgttgttgatactgactcagctgtcgttgttgctgttgttgttgttgctgctgcatcaaagccattttctgttccacagtaagcctcattaacatatcttgttggtgttcccttgccagttgatgagcgtcaaagaaatgaggcgatggagtctgcctctgagcctgaacctgcgcttgaacctgttgctgaatctgttggtgggcatcaacatgttgagcttgaacctgagaaggttcacggatgaccaattgatgacttgtactcccaccaggagcacccataatagagctatacggattattgtaaaccgaagaagaagaagaggggttcccttgatgcggcatatatgggtttgggtaaaagggaaccgcattttggggacccaaataagcagcaagctcttgtttagcggtgattagatcaatgtggacttgtttgagtctttgttgaagaactgagattagacccacacagccataaaccgggtctctaagacgcgcatcggcttcgtaggcgagagagttgactgcgtcttcacggctgtcggcgctgagttcttggagtagtttcgaaacattactagcaccaaatactttgtgaacattcacgaatttctggggttggtccggtgggaaatacggtgcgaacacgcattcttgagtacattttctcctttgaatcttgcacgccgcgcatggagaattcgattgcatttttatttatttattttggaaactcagaaactgcttaaggaaacaaaaacacacaaaatcaaaccctaaatatttttattttctacaggaaagacaaagagtactttatttccatggaagagagataaacctagagagagagaaataaaatagggggttttagagagagaaagagatgaaacgccattggaaaaaggaataataatcacagcttgctcagggaagaagaagaagaagatgaagaagattcaattcgattaagatattaaatattttatttattaaaataaaaaacattttccgatttttttatatatagagatttgcattaaaagcttctcataatcacgctaatctaatatttggtattaaaagaaaacccgacaagatgagtcaatatgatacttataatcaaacagtaacttatatcgaaagcaatatattaaattttatattatataataatgataacaaaaaaaattttatattaaaatacaatgaatttcaaagcaaaaaccgatgagcttcaaaagtacagaagcagtgtgatgatgaaaactaaagacgaaaaagatagtgcaactctaatgaaaatgaagaaaaaagatggcgtcatcaagaatccgatttacaattctataatcaaacaaaaaattttgacggcacactatttgaaaatctcccaaaacagaaaggaaatgatcaatctctctttgattcattaattcgatacaaaaaagaaagcaataaataatactctgaccttgtataataatgaattgatttcgattccgatcaatatcgactccgatgatgaatgattccgcttattcctttctcatcgatttcatcaaagtccatataaaaagagaaaacgccgagcgagagttcatatatatggagatcaaaacttcgttgtattaggtaaagaaagagaaagaaagatcaaaaatggttatttagctgatgaaaaaaaaatgagagggaaaaagaaaaaacctagccgagaagagaaagagagtgaagttcagtccagaaatttgagtttcaagatcccaatataagagagtgaagatttgcaaataccttatatatatttttaaaaatacaattaaaatgtgaaaatttgttattttgagggataataataaaaaaaaaagaagcgaaaagtcgaggaaaatagatgagagaaagaaagaacatttccatttaccatagtgcagacgtcattattattttgcttaacagtcaattctggccgtccgatcaaaatattttggtccttacgatttcttttttttttttttcaagaaataaaaaaagttaatagtaataacccctcttattctgagcaggaattaattgcctttgcctgagttacctatttgtctctgtactgtctgctcttaattacgaaattacccttctttcaacaatttgaacgttctttgtatctactgcacagcatgtaattgtcccttttttcacgaaaatatcctttcgttttagtccatattattctatttgtttcagattttattaacatagattatttaaataagataaattgccattcaaaaaaaataatataataaaataaattggaataaaaaaattaaattatttgttctcagaaatatcttttaactttgaatgatgtgtttaaaaatattctttattagtaacaatattacgtacaatttaacaaacattacacaattattttttgcatctctcacattaattttaaattataattaccaaacacaagtcaacttctatatatacttcagccccatttcctcaaatcatgaataaagtaaattatatttattctatatatcaatataaaggtgataaataaaaaacactaaatttatcaatcttctttattttttcttctattttttctataatttatagttgtcaataaattaataataacaataaaaaatatctattttctactatatattgtttaagtaatttttttttgtaaggaataatatttatgtaactaaaattcaaataagttgatattggaatttaaataattattatattgtaataaataagatcgattttgacttttttttttgttaaaaacaaaacaatatcttattgatggtatgtcaaaaaaaatatcttattaatggtagaagtcacttggattctactttccataaaaaaactaatcaatatcacaatcatttacattttttttcaattatcattcctatacgtaccattatcgcaataatcaattggaagatttgtttgctttgctatatatgtgattagaaaaataatttgagattttatttggacagtaatttaaaattattttaaaaaatatatatacataaaaatagaagaaacaaattgttatatatatatatataaatgtgaaacatttaagatgaaatattatttaaaattgttgcataccgttggaattaattctgttattttcattaacaaattttaattcccgttgattttgtcaatatttatcaattcaagccttcaaacttttttcaaagataagcatccaacttattaacctgtaataaatataagaaataccaataaaaaacttttgtatataaagtcataccgttatagcattaatattcattatatataagtttgctatgtgaaaaaaaaataaggggatttacactatatattatttttttatttttttnnnnnnnnntacggtttgagtttctaaagtagttaggagtttctatgtagaattctgtaaaaataaaaaataaaaa

SEQ ID NO: 99301 - DNA, 2208 bp, Cannabis sativa
tatcaagaactctatttttcaatactgtaaactattcaaaatttttcaaaaatttacaagaataatactgtaagtataacgaataccgctaaataccgctatgaaaaaaaattaaaaaaaaatatattattaacaagtgatttcagacatgaaaattaacaaagagattgtaattagcactttcaggtatgatactgtaattacaatctctccaaaataaccaagcacttttacaaattgaatagaattgaatttaaactattatgcaaattggcacacaatttgaatgcactataatcaaaaatctgcttgttatataaaatatatatatatatatgtatgagcaaaatgttttccaaatgcacttctttgtctgactaattaattaatagtgtactttatacatttacaattttgattgttctgatatgagaaaataaacaccaccaccaccaatgccaatgaaaatagaatataaaatgtagcacaaaacagctttaaatatttggtaaaatttgggatgaagacagtcttctctttcttttttccttttttctgatcccaatcagaacagtctcatagaaaaaagcaatgaacaagataaacaaactataatccatggaaactctttcgcgggatggtaatcaaccagacaatctacatacaacagctctaatgctttattgccttccaagccactcaatgaatgacaggctttagaggatgagctcttttttccgaccagtcaacagatgaatcaatttcttcatctaattctccgacaatacttctgcataatgtagaacaaagtagtatcatggctttgagaaaacagcaaatttaccatacaagaatgacgataaagaaatgaaatactacaaagtagattctttacatgttgtcgcctctgattatatacaaacccagcactagttgctgaacaccttcctgcaaatcataatcaatgacgagttataatgtgattgcaaataaggtaaagatctacaaagaatcatagttttacatcttagcaaagaaaaaagaaatgcagacctttgtggagaaaacccgttcatgagattcatcgagaatgatatttgtagcctggtcgaagcctttcaaaactccctaaacaaagaaacaaatactgatcacaatttgataagataaagagaaaaaaagaatggaatagcagtcttaatacagttcatagtattaccacaatattgcgtccatcgtttgtgataaccgatattgtttctgcacaaatatggaaattacagataagaacaagaaaaaaaacctttgacaaagaacacactaacaaatgcaactgatctgagatgaactgagaactacgtttctatctaaatctaaatatatatacaaacacaatgataaagcaaatgaaatgcaaagactttcacaaaagtatcatcatttccaacacaatattgagccattgcccctcttttctttttctgttaattgatcacataaagaactacaaatcctctaaaacatcaaatgagtatattagggattattattatgaattcattcacttacgatctacaagagactcaagtccagggccaccagacatattccaaacctcggaaacaattcactttctgcattgaccaccacaaaatacaattacaatcacaatattttctaaaaaaaaagattccttcaactaacggagcaaaaacaacgagcatttattcaaaacttaaactcaaaaccctaaatgtgtcgcattcttctcggatcgtttaacaaaagaaataacatcgaggtgatgtttagttggaggtaaggaaatgaaatgaagaatgaattatttttattccatttatttgttttgttgtatcttaaggtggtggaatgtcattccgattgaatgactgactattctattaaaaaatagaaagaaaaaccactttaatacaatataaaagtattaacaatattttttatcaattttttatgggttataaatttgtttccatttcatttatattcttattctcattattaatcctattcatataattttattattccaaccacacgttacctgaaaaaaaattaaagtaaccatttacattaaaatgatcaacccgaaaagagaaaacaaatcagctgagctataaattgcttatttttatcagggttgttcatctgatccaatccgcacttttt

SEQ ID NO: 99302 - DNA, 2735 bp, Cannabis sativa
tgttgtggctgttgggattctaaggtttgttaacttgattttaaaacaagcaatttgtatttgttttgttatataagtctgtaaagtttcgtattcctgttttataaccctgataacatggtgtgacaataacaatgacaaagtacatatttgttaatgcaaacatgattctgtaactaataaataaatggttgtatttctatattctgtaacagttttgaattgtctatatacaatttaatgttttacgaatttgtaatatacacaaaaatgtttcaaatatgttttttgtctctacattatatatgtgctgatattggttgaaacagactatttcttctttctttttcctgcaaggattggttggatgtgcaaatgcctattgaaggcttcattgaataagaatcgagtttggaaggctgatataattggaagccaagccaaaatagctagaggtgtaaataggacaacacccattccataatcatatgctttagcaatgaccctggcaaagtcccatattccagtgtcatctatctttggccttacagcttgagcaatctgaaccaacaaaaattttcatttcgaaaacaatcaagtaagatttgaagtctgatataagtatgaactgcatatagcaaaaaagggaaaatgtgtaatgcgtgtaagcttaccgtgatcaaaccccaaccagttggcagaaatgctaggcagcatactattaagtccctcaatgatagttggcagattttagagagcatgattatggtggaaagaacagtaatgaaaaggcctgctttgaacagcctaaacctgagttggtagttagtactcaatttttttcttccgatgttcaccgtctgcatagcatgtttaaatcatcttactgccaaaacaactataaactctgtatggcaaacttggaacatttgatttgtgctattcaatggtttcaaagacatttgtctacaacttattttactgctatagagagaaaaaatggtaagagttttttgatttgaagtaaatgcaattttacagaaagcatgaagaaatataccttggctaacaggaatacggcaagaatcacaatccatgagagcacataaactaggacatttttgctctgctgggagatgtcaaggtgataaaccagaccatattgatacaggaaaaaccgaagagaaaggagtatttcaaacagcctggaaaataatcctgaacaacgaagatgagcttgttcatcgttccaccatgattgccaacttttgtcttgttgaattcctatgccaccttgctgtctgatccacttattccagtctttccagtcatctacaatcttttcccagctaaatccagatgggttaaacaaaaagggtccaaacaaccaagtgattgacataaaccaaacagaatatgtgatcaacacatatgccatgctgctctcataggatcgcctaaacagatcataaacaatcaagaggagcagtagttcaaatcctttaacaaagtggcttcttgagtacagtctatagttctcagtgaagctggtatggaacaccacaaccttacgcccggtgggtctatatttagctcccccatgcataattgtccgaccataatgatgagtttttgttccaagagcaaaagtgaagaaaacagcagccagctgcaattgcataagaacaaaatctttaagggcagttaagaatcctttctctagtccaatctccatcaccattggcaagcctgtaaggagccccagctgtataaaggactgggaagcaagagcagtttctaaagattctatgttatgcactctagcctcaataactagtgctttttgtaacccactcagaacaagatatagctgtccgtagaggaagacatagattccaatcactgacatctgttatgttacagaaaaatatttgaatcagcttaatatgtcaacttcccagcttttatgattcagaaatggagaaagcaacaatttgtataaaacctcatttatagcacaacagaaatttctatgagtttgaacaaattaccaggctactcaaataaaatccaattgttgtgaaatagcaggatagcatccggaagaaatcaaactggcgtccaaggcggtatatgtcacggcttagagtttgttcactgtttccattagctactttggcttcaaacttggagatctgattcaaacccacatcacgacctttgccaacttgcatgtattcgtggtatgtaatacatcctcttcgcaaaatagaattaaagcctacataaaatcagatgcatgcagttgtaaattatgctgaaatgtattatatgagctcaaagtatgattttttcgttaatattttttaggtgactagtatctacctgcaaaaacatcttcactcaggttgattgtttttgatgccttgcttatgccacccctcgttatgtgaaatattctatcaaatacatctggatgtccatagtggaatcgtaccctgaattatgttacattcaaacgataggaatgagagacttgttaaaaaaaaaaagataggaatgagaattaacatgaaagagacaagatttttttttacatattattacatagcaaaatagtacagtggatcttaaactcaagctcatgcaatgctaagcatgcaaccaaataggtttggttgggaggaatgaaaatatagaaataggaatgtgaatgggaataagaataggaatgg

SEQ ID NO: 99303 - DNA, 2202 bp, Cannabis sativa
atatcattgtatttattgggatcaggtattgcatatggacagaaatgactattatggaggagagtctacttctctcaatcttactcaggttatttttgtcattaatataattttataaatatataaatactagtaatgataggtgaacatatataattatgttttaaaaaattaaatatgaaagaattcaacacagaccaaagagataaaaaaggatgaatgagaaagctcataactaagtttgaaaatcataacttgtttagagatgagagctttatttatatactcaatttaatacaagaaaatgaattttgttataagagagtggacagataactaaatgttaagcctacgaccaactaattaaattgaattagttggttggttatcatcccttaaacgaaaagggatggtgacaactttaagtttggttttgaggtaatgaaacctattcttaggcaaacatttagtaaacatcggcaatttggttcacatacggcacaaaacgaactgaaagctcattattcaatatttgatcacgtacaaaatgttgattaatcttaatgtgcttgtgtcgagcgtggaagactggattggtagctgaagcagcaattccctgattatcaacccaaataatggggatatcagcaacttaacatgaagctcagtaatcagggaaagcagtcacttgacctttattgcagtgttggttaaagatttaaactttgactctgtagaagatcgtgcaacaacttgtttcttggcagaccaagaaataagattaaggctaagaagcactgcatatccccttgtggagcgtctgtcatcaatgctagcccaatctacatcagagtaaacttttaatggacattcgaggaacaagcctgagaagaagaccttcagagatagtcccttttaagtatcgaagcaatcatttacaagcttcccagtagacaaaagtgggagcatgaatgaactgggaaagtttcttaataatgaaagcaacatcgagcctagtaagagtcaagtattgaaaagcacccaaagtgcttctatacagactcttgtcttcaaaaggagaacctacagtagtaagtgaaagcctataggcactactggtaagactggaaaaactcttaagtagggattgaacttcttcaagtgaaagagtatcacttctagaagttacattagaaacaataggggttgaacttcggatcaagaaaattgagtaaatgcaggatcaaatcaaaattagaaataggatggccagcaacagataaagaatcacataaagacttgatcttatcgatgtaatttgaaatgctgagattacttttttgaatgttcgagagcttcccttttagttgaagtaatctggccttagactgaccggaaaacttctattcgagcgccttccaaacagaatatgaactagtgtagctcgcaacagtatcaagaatgcctttggtcatcgacgatctaagttgtgagagaagtaattgaccttttttttgccattgagtaaacacaagattaggctctccattgacaagcttgagaggtggcgtaacatcactgaagagaatcttgtccaattcatggccaatgaccgtgggtactacttgagacttttatactaggaagttagctcgatgtttgagcataagacataaagtgagagaattggaaaatagatttcaatgttgactagtagagaacgattgtgtgggttgagtggcctaaggcaaggatcaatgactcctacaagggacgagttgtcattggagaaagtcatggatgttggtcagaaatgctctgataccataaaagaattcaacagagattaaagagagagaaggataaatgagaaacctcataaccaaacttgaacaccatagcttgtttgtaaatgagagctttatttatatactcgttcaatacaagaaaatgataagactaactaattaaattgaattaattagtcagttactaaactaaatataattatttaagataaatctcacttattatatgtataaataaaaataaatatatcatttcttagtgtatactatgtgtggtaataagtagttctcataaatgtagatcttgaaagaaaaaaaaaatatatcaattgtgtctatcattttccccattttctaaacttgtatcatattcttcatagctatggaagcgttt

SEQ ID NO: 99304 - DNA, 7799 bp, Cannabis sativa
aattttataatattttattagttgccgaaaatctcagtcaacagaactcaatgaacacaaataagagttcatgtatacttaggatttagacttatttactaatgatcatcatggtgttatgaataattctttcatggtaaacgacatgtgtaataaaagatgttatttcatatcggtctattcatgcataatcaaattatacacaacatctacactacatgtatatctacatatgtgatccaaatcaaaatcacacacattagagtatagtgtataaaagaataataccttaagtttctctttcgtttaagctcttgcagctcctagctggtgccatagcgaaaacgaggtaaaaaatgctaggaaaacagagattggcgacaaggaaattgaagaagagaggaccaacatctactactgatgttaaaaaaaactaaatccatagattctgtacttggtattgaaccaatggatttcaatgatgaagagaatgaggagatggggatatgaggaggaaagatgaaggtgttgattcacagtgtgatttaaaacagccattatcttctaactcatctcttagagctattaaacagcaaccggatatatgtaaagacttcgcgtatattctaggatcgaataagcaatgcaatagtaactccagaccggggatgaaatctcattcagctaaaatgagacctggtttgatgggactacaacaagagaatatcattagtgatgttgctcaattcatggaggccaataggctatgtaacagtaatctcaaacaaggtatgatgtgtaataaatttaaaatagagtttttactaacaaaatttgaaaaaacattacaaatatacaaatatttgatacttataccgctaaaataaatattgaatttataccgtttacaaatttaaaactttagatatttatgctgttattggaaagaatataagaaaagagaaacaatgacgagttttgtctagtgagaaggaagagaagataatcactaacgattgccaatttcttatgcccctctaaaaacaatttggagcaaagaatctccacttctctctaatggaagacctatttcattaatgttcacttagctaaaaaaataattattatgtatatagaaaaataaatttaaaaaacaaaagaaactcaacaatgatattaataaactcttaaagagtgtaaaagaaaagaagcagaacagaaaatattggttcgtatgtatgaaaccaaaacacgttgggtagattttttgcttttctctcattcatccaagaccactacagcttgaaacgtgcttaatggcctcttcttccatttccacaagttggcggcagaaggtttcaacatctcgagcctcttctttcaacgcgaaacgatattccttccactggtaaccggggccttcctttgatattggagtggaaacttttcccaacacgttgaacccctttcgatcaatagatagcatgtatgcatcctttagagtaacaccacgtacgtcagttaatgatagagttctcaccaatgattaaccagaaaaaactcataaaataaaattaaatgccttgaattaatgaagatgtcctcagaagcaactgccactaacatgtcacactatgcttattataggattacttcacaaaaataatttctggattattgtatcagatgtccaaaataaaattgacttgttcaattgtgttttgacttaattattaactctctcataaattatattgacaagatcataatcagctatgctctcagttgctgcaattcatacatagtaacattgttttactatatctcactttatcttatacctttgcatttgcattcaagtacgtgaggcaaaacagcatcagggctcggcgccttgcttcactttgattaatcccatcaattatcttagcagacaaaggagctgcaaatgagagaaagctagattagaacaaacactcatcctctaaggttgtatgagagagaaaatcaatccttaaaaatcactaggaataaggttatcacctaaccgatcaactttagaagagttcatatcctcaaagtctacttcatgggtgcttccattgccatcaatgaaaacacatgatctgaacaagtaaaaatcttaaagttataagatcatcaaaattgtagcttctaattggttttctgagtgaaataatagaaaataggttttgataaaagcatctcaatgagcctcaacaattcattccaactttatagccaaaaggcttgaatatgaaaagtactagaacaaggacagctcaccaaaatggagagagaaaacactaacaataaagtaatattctctgaaatcaataacctaaaggagagagaatgaaaactagcaatattacctaatgattgcaattaaaagttagtaaaagggcagctgatacaactctgtaaatggtgaccaaaaatgacctgtgaccaatgagtaaccaatgaccaaatgagtctcatttactaatgttctggtcccttggcctagatcaaaatcctcctccattgtggatttcaaaagctacatactgccactcttatgacagttatgttactatcatgcatatacataccattattcttatccagatatgttataatcatgcataaacagaacagcgtactagttatcttctgaacataattctaattggacagtacaatacaaattttagagtatgagatccttaccttggattaaacttataaatcacgtattcttcgtccgcttctagtaaggttttaaggttttcagttcgagatgtatcatgaatattagaagagcttaatacaccagaaactgtgtaactgaactctctaattgcattctgttcagagaagatgatttctctgaggctctctgtggcagactgatctcataacaaaaacagaaagctggtcagttgaataattgagaatcacacacttaggacatgtttagtgcactgtaaaagaactccataatgtggcaatcaaatgcagcactgtgtttggtagagcctttctattgtattacacgatacaaaatccaaccaaaaatcaaacacagatttgttaaaaaaacaaagtactgcactgtactgtataatccaaatgtatcgtgaaaagtttttttagacaatacaaactgtcaattgacagtgtactaatgagtttcattcatctgaggtatgtcactacaatcaagcactaatgagtttgcaagtccttccatcaaatataaattaattacactaagaaccaagaacaagaacagtaaataagatcatattctaaagctctctctctctctctcttgcctctctttttgcttgataaaaactatatcatcaatttgtaagataatctgatcttatctatgtttgtatagtcttaagataccatccaaagttaaagatatttggaaaaaaaaaaaggtaatgatattgagatgtttattaaattttcgaccagagagaaagagagagagtggaataataagttgtaaaactatataaagacacaattagtaattaaatataacggttttctaattggatcaattcagattcttcagattaaggcatagtccacaagtactagaagtgacactgtaataccttttcatctttatggggtacaacatcaccagtcagagcaactcgagctggtaactgcagaatgaaatcaaatcatctttaggtgtaacactgtaagtactaaattatataatttaaagtcaaatcctttatgtatcttaagtcacacagcctcaaatgttgtcacaaagggcaccaccataactattaggcagccaccatcactaaccttttttatcgatctgagcaagcttgctaatggaccagggtagggagtagtcacggaaaatgagccacgttcatcgatgatcatgttctggaagagaatgagaagcaaatacaagacacaaaactgagactaaacaaattttataaaacttctacttaatgattctaatgttttctcttaaaataattatgaaaaatgtagagaatggcatatatgtgattgttcatcaccatgattgcacatataaaacaaaaaatacaagcttaccacattatgcaactccttctcaggcacccaaatatatggttttccctttctcaatatgtatttaacctttgatgtatatatatcattcttgctgaaacaaacagaggtataagctatcatttaaagaagcttgattgacttttattcttttcttcagccaattgggtttacaatttcgtcaattttctttatgaattttgataagtaagagcataacttgagctccctccataggaaaagtaacatgaaaacaacaggaaaagccttaaatataagggtacctaccttcctttagcgtcagctttaatggtgttgaggtggccttgccagtttgaagccaaaatgttctgcaaatatattaaaggtcagagaagtagttatgttttgcccacaaagaacgaaacgccatagcattattcagagaaaatggttgagagggaaccttgcacttttcggcaaatgttaacaccgttgccctgtttgccttcatgattagattcgttatgtttgagtagcgcacgcacaccaagtgctcgatgaaattaccgcttgatatgtagaagagggctagagctgtggccagtgggggtgtaacttgtttattaaatatgtaattttagacttgcctcgttttagacattcttaattttaaacttaaaagtggcctttagtatactttaaattgattcggggtctggagccagggctcgggtcgaggccgagttcaggtttaggtctgggtttgggttcggggctagggtctagggtctgagttcggggtctagggtctaagtctggggtgggatctagggtccagggtacgagtttgagtcccggatgttgggttttataccctaaacataagttttccatgtaatctcatttatttatttaataaagaaaatataaaatattttatgactatgtcaattgcttgattcatgcattttgtttttacgtgattatatgtttaatatttaaattctatttgttattcgtatttttggtaagagacacgtgattcataatataagtttaaggaccatcagtggacctaaataacataagctagggttattcatcaaaccgcttaaactgtccgcactacaaaaaaaatgtggtttgaaattctttgcaatggggtcgcgatttgagtttttcctaaaccgcgcagtacggtgcagtttgcagttttgaattgttaatatgtaggtcgaaccgcaccgcaccacatattataaaaataccatttcttatatttatttaggtccaatatgtgaagacccagcccaaagcccactaattattatatgttgaatcttgaaactttttttcatatttatttttaaggcttgtggtatttttgacaagtgttgttcaagctttgttatatttgtgatagtttaactatgtggtgatagtccaaaccgcgaaaaccgcactacactattttttgtagtgcaattttggcaattttttagtttcccggtgcgggtgcaatttgagaaattagaaaaatcgcatgtgcgggttgatttgaaaaaatggtcaaaactgcaacacccgcaccgcgagcagccctaatataaattgggtcgagcccaagatgcattctacctttcgggaattcaataacataactcgcttaggtgaggttttgtcaagccttgtcatattcggaaggtctatctccgtgtatctagaagaggtcctcaacatgtatccgaaagcctaatatagtttctcattttctatctcgcacaagattatgaattttttttccaaaatctcagacagagaataatatcttgctaaaaggggaactggataattaaaaatcaagtaattaatatgtcattaatgacccatgaatacaagacacagtatgaacatctagcttcgtgataaggcctccatgtcagcatacacaaggtgcctcataggctgggctgtactaaataagtccaaagtcaatgtattatttgtaaactccctattagagggaacatgataactagtatgacctctataacactataaatactcactgaatctttcacgtaaagggttggaaattcttgacttagttactcaggtaaagaatagagtgctcatactcattgtaatccattatgcttttctagcctacttcataatttggactaaggcttgttaactcccagatcacgtaaaaaactctgagtgtcttcttcatatattacgttttgaattatattttctttagctcttatatttaataattaatttctgaaaaactcgataaatatttggtgctttcattgagagctaaagaaagcaatgataccatcgacgattagatactgtaattatgctacccactggaataaaatttggtcttcattaccatgaatattctcatcaaaataccaaaattggacttgacaaagattccacttagacgaccagtcaccaagaagggaaagatctgcgtgatgaaacaaaccttcatgatgatcccatcgatgaaggagaagaagaaaatgagtctaaggattcaaatcctatggatccagaagacaacaaagtcgataagggagatgagcccacgaactagattctgaggtcgttaagatggcccaaaaactaaaagaaactgaacaaaaattagtagcacaagaagagttttctcaattaatgctagaaaattttacgatgtctgaagaaatatttggaggaaactagaatcgtgatgaaaatatacctaatgatactacttgtcaggataccaggaaaacaaatcataaagatcctaacactcataatcctcctaaggataaagggaagggaaaaatagcagagacctccaaaaaagttgctcccaatgatcgacaaaagagaataaatcctgatagtcaacctcataagaaaaagaaaggaaccaatacttcaagacaaggtcatcaaagtaattctagaggcagaactacacacaaggagaaatctcatgctaaagcacgaaagtccactgccaaaaaagataaaaagataaaagtaattttttgggatcaattttgaattatatcataaaatattgactttttttaataaaaaaaattatacttatcaaagacttttgtgtaggctaaaatacatagttttctcataagttttttgtatggtccgatataggcccgattgttcgttatggccaaattactccgattttttaattttttttgaatggcccaatacctgtctaatgtaggttcgttgtatggaccaatggtttgttatggccaaattactcaatttattttttttaaaaaaaatgaatggcttgatatctgtctaatgcaggtccaatttatggcctgatggttcgttatggccaagtactcaagtttttaaaaagtttttttgaatggcctaatacatggtatgatgtaggtccgatgtatggcctaatggttcgttatggccaaattagtcataattttttaaaagtttttgtattgtatgatacttgcttgatataagtctgatgtatggtccgattgggtcttataaaatataaggttagaaagccaaaaatggcatcgaacctgcatcagactaggaattatttcataggaaatgttgcagtaagtaaatgaaaacatgctcatgccacaaattatattattcaagaaagtccaaca

SEQ ID NO: 99305 - DNA, 1300 bp, Cannabis sativa
  modified_base (423)..(436): a, c, t, g, unknown or other
attgggtttggagagaagagaaagtaataagatgctgttgcagtagtggtaggtagtaattataattaaagacttttattagtgacgtcgtctgtgatgatgccactgtcactgtgcaatctcactagatttggcatctatattaaaaaccacttttttaagacctccatctcatcatcatatttctctcataaaatcaaaataaaaaatcatcatatttttttaaaaaaaaaaataataggaagatcctaatatatcatatttattttttttttaaaaaaaaaacaataaaatctcagaaataaaatgctatatatatttctctcaaaaacacacaatatatgcgtatgtatgctgatgtggccatgcaagctacagctgctgacgcctccattttatatatatttatttataataataatnnnnnnnnnnnnnntaataataataataaagataaataatgacataagtccccaaatttgtgagtgatataatttcaatatttatttttagcagcataagtacttaatatttgtaaaactgtaaattttttttttaattttatcagtacaaactgtatttttttttaaataggctacatataaggtctaatttctagatcattgggtctagacaaaaatatatagtatcagttacttccaaatgttcctttaataaatttaaacggagtctgtactgacaaaattggagaaaaattacagttttataaacatttggtacttatgtcgctaaaaataaacattgggtttatgccgcttacaaacttaaaactttaggtacttatgccgctatttaccataataataatataataaaagactgtttttttgcaaagagaaaaaaaaaattataattagttttttttaaaaaaaatattgatttactcacattaaagataggaatattcaattatctgatttctaaaatttatgggaagaatgttaaaattacaacaaatatagtataaattactaaaatttatagtcagtattataattttttttaacggactaagtactttaagttatatattttcgttcagtcactattttttattaaatcctatcaaaatagagtatttatggcataaataaataatattttagattttatacatttatatatcacatgtcctaagattaaatatctaaagttatatttatacggtactttccttacacaagtctgttaaatcttattaaaatatactaagatgacaagtgtcaacatattagttgtttatttgtattttccataataattaattattaattgttgt

SEQ ID NO: 99306 - DNA, 3746 bp, Cannabis sativa
ctttcattgcatatattattgatatgattacagtttgttttccgcatttcatatcgtttgtatatgctatattacatatactacattatagtctaacaaatatgtgatggcatttgatacccgcacaatacaatttagtagctaactgttataccgatgcaaatttttgctagcaaaactattatttgccaaactttttatgcacgggtgtaagttttgttggcacaaatatgagccaacaaaagtgtgtctttttttttaaaaaaatatttaaataatttataataaatatcataattaattatataaattatatttaaaaaaatataattaaataaaaagtgtattatcatatataattaagtagtatcctgatcgacctacgataaaaagatgctcgagttgtaaaattagtaactaaataaaaaattaaaagtaaaatattaaaaaatgttcgagtaatctagtgcacttactaaaattaggatttcaatattttgatcatgtaattataatttttctttaggtcagaataattataactagctacatctttgggattgaacataatttaatattaaatgaataatcatgaataaaacatgtgatttgagcaagtcaaaataatttatatttttttattgataataataatatagattacaaattacattggtattttaattaatgcataaatctctaacagttatatgttggtgatctaaaataaaggaatgggaaatgggatgaagaccttttgtaaggattgtcttcaataatgaatgctgagatgatttcaaaaattcttaagttttgaatgggacgtaaaagacaagatcttttggcactatagtaagaacgaggagttaagaatggggaattgaatggctagtgaactgcagagcgagaagtatcaatcagatgataatcaggtggtgcagtggtcaaggaagctttggaggctgaaaattctatcgaaagtgaatcactttgtttagaaattggtacattcttgaatgcctatctagtcgacacttggaaaatgtgggggtactggtagatttgagttgctctaggtgttcaacaagtgtagttgaatcagtttccgtgcattatgggatgggagtgcaatgataatagagcttactagaacgtgtgtggcatcaagcaacagctaagataggtgggggaggggggagaaatcttttatcttcttaatgagactttctaaacaatgggaacaaaataaatttgagacttttattgtggttacttggaatattttgtatattagaaacagtgtaacacatgggggcttagcgatgggagatggtggagtggtgcactaagtttttatctgatttccaaggagcaaacaagagaggggttggggcttctcatagggaggaagccaatttgataccaccagagagggagttggtgaaaatgaatgtggatgcaggtgtgcaaaagggaggtggtaactcaaatatggggtgtgtagttcgggatgagagggggcaggtgatgtttgcttcttccatgatgcttacccaagtacttcagccattacaggtagagttattggcaggcaatttaggcaggcttacaaatgggaattcaacaacaaatactagcattaaatctgattgtctagaagttatctaattattcctaaaggaggatagatgtactgatattgatgtaatgttagatcatattagaactttattattacatgataatattgttggtatttcattttgtgatagatgacataggggcattcaagatagcccattaaggctactcggtccaaatggatcaaccacccaacccatgggtaaagccagaaaaaggtgtctggatctcataattgcttcccaaagattaagtcagatatatagtatggaagataatctaacgttcaaccaacatgcattcaaagaggtgaaaacggataccttcaagagtcattcgggagtggaagttgaataggcgtccgagagatcatcttacgtgacactcttccaacaagaatcttgaaaattttggctacatgtcccatctgtcagacctcgaaaaggcgcacaacaaaaagaaatcacatttttgggccaacacccgccactcgaacattccctcaccaaactaataactcatgctaagctgttatcgtcaaccgtacgtctatgtacgaaaaatgactgtctacacattgagccttacctacccaacccaataattaatatttaattgtatttcccatattagtgggctttttctactttataaaccctaatgagtctgagtaagcccgactcattagctaaaatacctataattaaggcttcacccctttatgcaaagtgttaaaaaattcttgtatgaaaaaagcattaaatacttcataaccgaagtgtttaataatattgactcatggactaagactctttaacacttcaagtcttcaactacgtaaaaacctaacttaataatattttttgaacttaattttcttttaatttgattttcgaaaaactcactaagcacatttatatatattgtgagaccaatagggtaacctgttgtcccaaatagtgtcttcatcttgttccatccataataatttaacgtggcaaaactaaattaattataaaaacatactacaacaaggttaacaaacgttaactattagattttaatcattgtttcttttctctttctctttctctttcctctttccaatataatgcaataacatggcgattagaattttagttttgttttgtatttttttaaatggaagaataatattgatttaatttttttttattaacttttatttaagtagttttaaatctcaaccaatttggaccaaattatttaagatcggactaaataaatctactgtcaatagtttagtcaattcaaactatttataattctttggttcgatcatgcttttaaaattctcatctgtggttcaatctaaactgtttaatctttaatatatacttaatatgattttttttgggaatattggcggctaaaccacctgaattttacggtttgtaacacttaatcacaaaaattgaatttttggcggctaaactacctaaaccctagttccgttttgctctgcatacaaatttttagtggtctacgtaatattagttttaaaaaataattataaatacttaaaaaaattaaaaaattagaattttttttttcttttttactttttttaatttaaaaaaattaatttttttttttatcttcttcttcttcttcttctttcttcttctgtttttgcagaccctcagctctgccgaccctcagcttcccaccatcaaaatccaccacctgccctctcctcgtcctcactcctccggaggtccggctgccaccccaccccaacttccaaatctgtttgtgtttgttgaatgcatctaatcttatatatatatatatatattttttttttaatttaatgataattattattataatttcaggtaatgaaaatggatggatcaactggcagagctggtggcaatgtgaatatgttttttttaccaaattacaagctggggaaaacacttggtattggttccttcgggaaggtcaaaattgtagagcatgcaggggcggacccacattgtagcgaggggggcagtcgccccccctgaaaaaaaaaatcggaaaaaaaatgtatatgtatttaaattagttacaacatatat

SEQ ID NO: 99307 - DNA, 10937 bp, Cannabis sativa
tttttccaaattttaagttttttctataaatgtccataattttcaaaatgcttttaagaaattccatatttataaaaaaattctcttctacttaagcattatttatttttgggtgcccgtgcccctacataacataaaatgagtttctgtttctctcataaatggaataaaacttccatgtaatgacgaatatgccactgacatttgaacttatcaaacataaaaactgaactcgtgaagctgacggaagatatttgtctttgtaggttttttcatgttcttcttcaacgggcatgtccaaggtaaatctgaaccatcacgtaattaatttctattctatctttttcacactcaactttctatctttgatgcattcttttttacccaagttgagcttcgactcaagtaatgtgtttttttttttctttcactacgtttaacacctagacaaggattttgaaaactgggcaaaaaaaaaaaaaaaaaactaaatattagaaaaggggttcgatgtaaacatttgggcaaacgttaacatcatacataggtaggatttgaagtcgaaaaaaattaaacttatactggatttgggtttttgtgtatttttgctagtaaagttccttcctttatttcttttttaaattttcgtcgctgaaatatggcatggcataggatctgcactaaagtggtatgtatgatatggttctgaaattgaaacatatgcatgcattcaccaaatggatgactttgtttttgaagtgagacactagtacttgattgtgtgattaagaaataattgttacatgggatcaaaatttgatacaagaatgttcctgttggtattgggaaagtagtattgctcctatggggatatttattgctgctattaaggttgtccctattgacgggtctagtagtagtagaggtgggaagtgaagctttaatgaatgattattaaactcagttgcagcagatactacttgaaaagtgtggagattcttctcactttagcactagaggaacttttttatgacaaatttaatgaccctttagcacttgatgaacctttttcaaacaaatttaatggtgctcgtgttcactgattttttttaatttattatttcaaaccagtttagcacttggagaacctttataaaacaaatttaatggccttgagctgacttttcaaagctctattgattcaatttattctctatcaacagctaaaaaaagtgaatctgtgacgaggattgaatatgaatatatgcattcaaatgcttatcaattgccaaagtctgctgttacatgttatttaagcaaagacatagcaactttggtttcacatttcagattttcatatagaatttggtactctttcttttgagttttgatttctagttaaacaaaatgttcattcatttgctcctttcatcagtttgctctggatagtttctgcagcatggaaagtataaataagcgacatgaggacaatctcaaatttctcacaactcaggcaaatcagttagatgagactattcttgatttgcaaggtatgaatttgcccaattatgaaacctttgtactaatatcatttttcagcaactttttattttgaatattgccaataccaatagtattcctggaagttagtgttttttgtctttataatcctacaagactatgtaactgttcaattcttctgagccaaacttgtattcagttagcctcggaaagtatcattcgtcaaatggagctggaacaaatggagctggttcatctcacactgaagaggaaacaagggaaaaaattctaaagctagaaaactctgcagctggcgtattgtactggcttaattctcatcatgcgactcaaggtttagatttgggatttaccaaggatgtcttgggtgttgttgctactcttgccagagttgaagatgataatcttagtaggttagcatttttcaccgttctcttctttcttccattcagtttaaaaaatgaacatcagcagagtcacaattggcaatataaaataaattctgcgcattgtgcaagtaagcttttatcactacttgaaaggagattactaatgggcttgtttctttgttattatgagctaggcttatgtcagagtatttaggattggagaccatgttagctattgtttgtagaacttatgaaggtgttaaggctttggagaagtatgatgaggaaggcaatataaacaactcgacaactggtctacatgtggctgcatcagctgtgggaatgaaaataattggtcgttttcttgtcatatgccttgaagatttggggtgagtacttagtgttatacttttcttatattgtattcttgtctttggaaaagaaaattgaattttttttttcccgttttcaggcaatatgctggtgaatttgtcgctgatgatccacagaagaaacttgctatccagaaaccaaaattaccaaatgggaagtgcccagatgggtttattgactatgcagtgaacttactcagtttggacagtagaaacctttcttttgtcacaagcaatggacaaggtctcagggagacactcttctacagtctcttatctcgcctccaaatctacaaaactagagccgagatgttacaggctttcgcatgcataactgatggagccttgtctttagatggtggaatgataaaaaagtcaggtgcattcgccctcggaagttggtgagtataacacaattttctatagcttaatgtctactgtgaacttctaatggtttccgatttcttattagtatttttcttgattcaacttatggatacacattattgtgagatgcatctgttctatcaccttaatttgttttgttactttgtaatacagtcaggatgtagaggtgaagtttcctttagcatctggaaaaactaatgtgccggcagaatacattgaatgtgaagatagaatcagaaagatgaaatgggaacgagcaaatgttgctgccgatatgagaagaatacaagagttaatgaattatacacgagccaactttaaagggcaagcatgattttgtgacacaaacatttcgaaccaagcaatgtaattctaaatatcttttgtttcccagaaaaagtggattttctttgacatagatttgttagcacaggattttctttgagaaagatttgttgctttgacaaatccatatcagcactctatattatcaacgcaaagattcatttttcaatgacaagaatgatttaattggatcattttttttttgagataataataactttcgattgagtagtgtttttctaaagtaaatatgatctgacctgttgtattgaccaatgaaagatctgcgaacaagctcaaaataaaaattctgaaaaacttttcaaaattcagcgttgtaattcaattaccacgctgaattggctagagtatagtggcaaccaaccacatcttacttgtgattattgaaaaactggcctgtttcatcttggaacactctgttttctttttttggaacggttgggaaaacattaacatacattagtaacattacattttatgtcaatttacatgcattttatgaatgtggcactcactacaagaagagatgtatttcatgaattttgcactccctacaatttctttcattattcaatacactccctatatattacaagaagagatgtatattattcaatgaacagttaattatagacattttagataattaactaaggacaattgcaactaagtacaatattttagtattaactaataactagcatcaccaaacgttgttagtcttcttccattgcgcaaagagttcttcttccattagtacaatcgctcctacacatgagatatcacgttgtgatctggtttattccaatctaatgcactcgctttttcagaagccttgcaagagcatccacctttgcaatagttgcaaatggcttaaagaaaattggattttcgttgtgtttcagctcggaaggcaggagtttcataaccgcaactggctgagtaagtaagttataagaactaaccagaggctcttagaagagagtgtggaagaagaggagccccagtagcattgaagtcatcattttcaacttcctattcatcagaagcaaggttctcatgatccccaactcacaacacctgataaagatcccatttaagatatacaagaaaataggttattagtaatgtatatgcatgaatcgctaatacccgtccattagtaacctggattttagggactgaaagtgagagagagagagagagagagactgagttgttgagacagtttgaaagaatcataacgaggtaaaaaatgagtaagaattttgcacaagggcaaatcaataattagtaaggcagaggcactaattgaaatagcattttgcctctacttcacagtaaagaaaaacataacttagtctatagataattaggtagttgctgtcccattaaccatgttgacctctgtattggcagacaaagatccattattctcgtttttcttctcaatgaactccttatcacgcctccatgtcttattgtaacaattttgtaaaagatgtccctttttaccgcaattgtgacaaaatttgttatctttctccaaatttcgcttctttggatgcaaattgtatggttttgggtgtctcatcatttgcacatttctgtcaggtagaccgtagcttgccggagtgggcgattttcgcttgtgctggtttcgtaaatcttcttcaacacccaaacgattcatcaacatccaaaaaggcagatactcctcacacatcagcttcacactaatgtccttccacgatggaggaagcttggagatgatcacgctaacatgaaatttctcctcaacagtcataccagcagcaacaattgaatcagctattctattaatttcatgaacttgttccaagatagatctatcctctaccatcttaaattcaatatactttttaacttgagatctttctgtttgatattcctcacatagatgaagtagccttaactcttgccacagttctttggctgtcatagtcttctttgagtatagattaaacaggttatcggatagagaactaaagatgttgtgaacacacaggtagtcatcattcatccatttctgttcagcagcttttgttcgactaatttcttcagcacttgcttctgggcttagagcaacacttggacctggttcagagaggacatattcaatcttcaattgctttaacaacagttccatctgttgtgcccaaagcaaatagttcttcccatccaagcggacaacttttattggaagttcacgaggctgaatatcagttgttgaattactcatgtcttcttcagcgtttttttcatcagtagttgacttacttatgtcttctttattttttttatcaacagtttttgatttactcaagtcttcttcagtttttttatcaccagcttttgatttactcatgtcttcttcagtttttttatcaacaagttcagatctgcattatatttatagaatattatgttagataaccataaagctcttgttcttttttttcagccaaaaagcttattatttacatctagactgaatccaaacatcaaaactcaactctcaccttgattttgactccagtttcctaatagtttcttcgattgcaggtacattattcttgaaggtagaccattggtcagctggcaggctaattcctaaaagcaaaacaatagaacagtataagcactgacacaaattgtgtttttctttcttctaggagtaaaggaaggacattgaaactacaagataatgaccaattactatgaacttatcagtattccatcaaaataaaaataaaaggcaatgagcaagcttcttagtctacattggcaaaggatttgagctttggttatctactcaacataaaaaaaaaaaaaaaaccattaatattgtatgaatttattaggaacattagatccttggtaatggtattactgtatgtttggctcatgctgagtaactgtaataccgctgctcatagtacgggtgttcgggtgcagtttttgactatcttttcaaactaacttgtacttgcgttttttttaatttctcaaactgcacccgcaccgcgaaactaaaaaaccgcaccgcaaaaaatagtgtggtgcggtttagactatcattaaataattaaattatcacaaatacaacaaagcttaagcaacacttgtcaaaaataccataagacttgaaaataaatatgaaaaaaaaattcaagtttcaacaatacaataattattggacttgggttgccttcatatatttctactaaataatgtaaaaacatttttataatatgcggtgcggtgcagtttgaaccgcatattaacaatttaaaaccgcaaaccggaccgcaccacgcagtttagaaaaaatttaaacagcgaccgcatcgcaaaaaatttaaaaccgtatattttgtgcagtgcggacggtttgagtgatttaatgaacacccttagaataaaccacccacatatttaagtttcatcattaaaagaaaaaaaacaaaatctataacttgaattcttaattcttataacattcttaaatctctctgttaaccacacaattataatgtgcatctcgtcactctttacttgttaatctccatgaaaaacgagaactctaccacataatttgatagataaaatgattctatattttaaatagcagccttgaattgcagtaatacttgtggttcagaaaattaatgcaaaaactgaaacataaacctaaagatggagaagattcacagtttatctccacacacacacacattttatgtatgattacctttattagaaggaagctgctttccatctttattaaagaattccctgattgacacaaaagttttgcctttgaaatcatgaaccgctacactccttttctctgaaagctaaaatgaaactaaatgggtcaagttaattttcaatattttcccagcaaccaaacagagcagtgaactaggtttgaacacctttcgaaaagaagaagaaagaaaggaaaaaaagaactaggctttaaccttacagataaagcgatcacccctctcagtaacctccttgcagttactcttctctttctccttctcctgttcttcttgctccgccgccgagaccagaaaagtctcgaccgcaatcctcaccaacttcttatactccgccccagataaatcgattccgagacgctccgaggccgcgactcggactttatactcagtcatctcttccaaactcgtatttctcagtatgtccaccactgtctcctcaatcttccgagccctttcttgatccattttcacgcgaaagtaaaagagaaaagctagagctttcgacaataaaactcaaagtacagttgtagtaaacaagaaaataggttaaagatttgagtatttgtatttgattttgaggtggaattggccatagaacttggctgaagcgcaatagcattgtctattacagtcacaacgaaagaactcaaataaaaataaatatgaaaaaaaataggttccaccgagacttgaactcgggttactggattcagagtccaatgtcctgaccactagaccatggaaccgttggtggtacatttagaacttttatttttatataataatttttcaatagtaaatttgtcattaaatttttcctacaatttaacaagttaatcatataccagccattgaaaaaattaatgccaaacatatttataatcaaataattactgggcagatgattggcagaattttagaaccttacaaatccgaaaagtaagtcttgaatagtaatcccataatagcttggaaagtgtgtcaacccaatccaagcgtgccaattgccaagtaactatgtaagtgtaccctcatatcataacagtattttgcacttccattaaattctatatccattaccagtcaaaaggtctaatcttaatgactggactctaataaaatttaagtgatgtttttttatatgaaaatatttattgaaatacaatttcttttaacaaaaaaaagagttgtgtcataaaacataaataccagtcattaacactgaagaatataaataaaaatattaagaataaattttaaaaataatttatatttattattttcttatattaggatgtccatatatacttttgggcaaatataatgactggacttcactatttatctatttttttttttttcaataaaaagggacatgcaattgccatttcttgaaagtaggaggagacatttaaaaaagcctattcaccaaacaaatacctaaaaaaacttttaacaatgaaaaaagaaaaatgcattgcatgtaaagattgtgctgatcttaagtttttcttattgaataatcgtccatatatacgataaacaagtcaaaattttcattaaagttggaaaatattagtttgttttgtacttaaatgtggaacagtgtattattatcttctaatacaatcaatggatttagcagcttatgctatgtctgttctcttcacagttattcttgcccataccattttaaaaagacttagtagtaaatccaataaaaggcttcctccaggcccaccaagatggcccattgttggaaaccttcttcaattgggccagcttcctcacagggacctggcctcattgtgtgataaatatgggccattggtgtacctgagattgggcagcgtagacgccatcaccaccaacgaccccgataccatacgtgagatacttctcaggcaagacgaggttttcgcctctcggccacggactctggccgcggtgcatttggcgtatggctgcaatgacgtggcactggccccactaggcccacaatggaagagaatgaggagaatttgcatggaacatctattgacaaccaagcggctggagtcatttgcggcacaaagagccgatgaagcccaacatcttgtgagagatgtatgggcccgggcccaaactagaaaagccatagatttgagggatgtgttgggtggattctcaatgaacaatgtgacgcgaatgttgcttgggaaacagtactttgggtcgggatcagctgggccacaagaagcaatggagttcatgcacatcacccatgagctgttttggttgttggggttgatttatttgggtgactacttgcccatttggagatgggtcgacccttacgggtgtgagaagaaaatgagagaagtggaaaagagagtggatgattttcacattaagattattgaagaacataggaagagaaaggcaggtttgagttctcaaggagtggaaaatggagaagagaataatgaaattgactttgttgatgttttgctatctttgcctggtgaaaatggaaaagcacatatggatgatgtcgaaattaaagctctaattcaggtgatcacttactcaaatattttgaaacagtaaatgatcaacaaagtctgtatttttatttatttaatattgacttttaggatatgatagctgctgctactgacacttcggctgtgaccaacgagtgggcaatggcggaggtgataaagcacccgcgggttctccgtaagatccaagaggaactggactcagtcgtgggtcggactcgaatggtatccgaatcagacttggcccaccttaactacctgcgctgcgtcgtacgagaaacttttcggatgcacccagcaggaccatttctgattccccacgaatccctttgcgccacgacgatcaatggttacgaaatacccgctaaaacgcgcgttttcatcaacactcacgggttgggccgaaacacaaagctatgggataacgtggaggagtttaggcccgaaaggcattggttaggtgatggtagccgagtggagattagccacggagccgatttcaagatattgccgtttagcgcggggaagaggaagtgtcccggggcgccacttggagtgactttggttttgatgggtctggctcggctctttcactgttttgattggggtccgcctgagggaatgagcccccaagatattgacaccactgaggtgtatggaatgaccatgcctaaggctcgacccttgttggccgttgcaacaccgcgtttgcctgatcatttgtaccactgaaagttttcaatttccactcataatatataattcataattttaaataaaaatgaaaataatttagtcgatttacagaatgggcaactggacagcatttcatttaataatgaatggattgatttatttctaaacttgtttgccatgaagtgtaaacttgtgtagtgacccgctcaaaccaaattcatgattactacattatgtacttttttctccacctgatgttattagagtaactacgcaaatatacaaaattctataagatttacagtcacattattattttttccaagatggtatataactattattatttcaaagagtaactatttcattattataaatagtaaatgaagggtcatgcctgatggtatgtgatactgtctctctctctatagagtgtttttcgttcttgggattgttgtgtgtttagtgagttttttctgagagttttgtttgccttccatggcttcatcaagtggcgttaacaaagatctagagcaaaaatggaagaacatttgcttggaagatgaggaagatgaggaagaaaatgaagttgtctacgaggaggaggatgtggaagaaatagagttcgatgatcgatggtgtctcgttggaagattgctgacggggaaggtttcaaacttcatgatttttcagaatataatggcggatttatggaaaccggggaaaggaatgtatgtcaaaatcatcgaacaaaatcgatttctttttcaa

SEQ ID NO: 99308 - DNA, 1628 bp, Cannabis sativa
cagaggcttaagctctacaacaaggttcctcctaatggacttgctttgtatactggaacaactgtcactgaagatgggaaggagaagaaagtaactcatgaaattgtacctttcaagcctatcaatacttcactatacatttgtgacaaaaggttccatacagaagctctaagtcatctcttggaatctgatgacacttttggttttataataatggatgggggcggatacctttttgggacattgagtggcaacactagggcggtgcttcacagagccacagttgatcttcctaagaaacatggtagaggagggcaatcagcattgcgattcagccgtcttagaatggagagccgccacaactatgtgaccaaaactgcagagaaagcaactgaattgtttattgatcaaaagaccaacttgcctaatgtggctggacttgttcttgctggctctgcagacctgaaggccgaccttatgtcctgcgtttgaccctcgtattcgagccaagatacttaaggtggtagacatctctcatggaggcgaaactggcttcaatcaagcaattgagttgtcttctgagattctctccaatgtcaagttcataaaacagaatttgttgatggagaatttcttcaaacaggttgagcaagacactcaaaaatacgtctatggtttggatgatacaatgaaaattcttgaatttggcgcaattgaaaaactcattgtatgggagagtttagatatgaatagatatgttctgaaaaatagactgactgaagagattattgtgaagctactgaacaaagaacaagagactgatctgagtagttttcgggatttagccacttcatctgaacttgaaactgtggaaagtatgcctctgcttgagtggatagccaatgagcacaagcagtttggttgctcgcttgagttggttaccgataaatcacaagaaggttcaaagttttgtaaagggtatggtggcattgggggaattctacgataccagcttgatataagctcctttgatgagccttctgaagattcggagtaagaacattgcactgctagaattgctacaacattgaagtagttaagtaatccattttctctaaatcttgaagaagtgccccctggcctgttgaacaactatgaagaattctatcgtgttattttctaatttgcatctttgtttttgtttatagtttgttgctgtttaaatgttttcgtttgtgttagtctttcctttatttcctgttcactttagtctgattgtctgaattgtgtttcttaccttgttctatgcacttatgcatgaatgttagtcctgtcatgtttttttaatctatttcaataaagttggtattcacttgcaaaaataatgttatccattctctcttatattcatttatgttaagtcttgctcattcattgttatctttatgatcttgggattctacatgaagaattactttcaactccgatcttacttctcaatcttcaggagggtagctttagcactaaacaagctgataaaacaaacagaacttataaattttccttttgggttaattctgatacaaatcgtctacttgtaagtgttattttgtgtgctctagttatat

SEQ ID NO: 99309 - DNA, 1758 bp, Cannabis sativa
  modified_base (1707)..(1707): a, c, t, g, unknown or other
tcacataccaatattctatcctcttcatatacatgattttattataccatcacttacacactaaacaatttaaacaaccaaccacaacatcaatgccgccgccacaatacctatcttcatcccctgcctcaccaccccggaattcgacaaaaccggtggatcagctgcagcatcagcttgcggaggagccgaactcaccggggcattatcagcaacgggttcatcagcagcaggcgcaggcgaagttgcggctgttgtcggcgtatcggcaaccggtgcatcagcagtactaggtgcagtggcgggagtattggccccagaatttttggatggggaaggagcagccccggacttgtttgacggggcgggagcccttttgggagccgcagaaggcgtagctgcctttggagatggtggtgatgggctggactcaatgcccggtacttggaccggcgcagtgatctgtagaacggagatgttgaatggctgcgcggccacagatttgactaacttggcgtttagagaggcaccctttacggcagagccgaaggcgatctcaccctcgttgatcagcgcgactttgagaaaaccctcttgatcaacggcggagccggaggcttggaagagagtagtgacggtagatgtcttttttgaggtagtaagcttggtaattttctcaacatcgtagtaatccaaaatcacatgaacgcttaagattttcttaattacatcgagtgacttaccggagagggaagctgcggcggagttatcgacaacgaggacagtgatagtttggcgacgattgatctcatcgttaagctttgtctgagttaagtagttgttgaatgtactaagctcaggattttggccaaggagttttgtgatgttgaaagctaaggatgatgataatgaagagaataagaaaatggcaacgagcatgaagagaatagaagaggaggaggctttgggattagtcatcttcttaatcattaataatattaattaattaatgtggtcattcacctacaaacaaagcccgattgtttagaatggttttgagggctttttatatatatgtaattatgagggggagagaattgtgaggagataaagctttgaataactaaattaagttggaattgagtggattgggaaagagtttctcatttaggaagaatctcgagaattttatgggaggggtggtctataagatgtttacatatatatcttatattatatatgttattatataatataaattaaaatattgatttggcacatataatatattatatgagatagaaaactaggacaaattggatttgctcaatgagagtgagtactagaattcattatgtagcaaaagatgaatacaaaatagccatttaggcactgccatgccacatggcattatagaaaacgaggcataacaaccttttgtaacaagagaatattctggaatgtaaaaatatgacagctaatcattgataatgattgggtactgctgcaacagtagatatacagtgtgccaccacctacacactattcctaacaccaccccttaaacgaaggagtgaggcttgttagactataatatagtatatgaaatacaacatatagataaacgatatataatgcgaaaaaactataaacatatcaaaatgtatatgcaatgaatgatcgaaatacctccagccattgatcttngagcttcaatccctgcgatagcttcggtattggagttcgggcttcctcgct

SEQ ID NO: 99310 - DNA, 1749 bp, Cannabis sativa
agggatagtgagccaaaaaagagccgcttatgatcgagttgtccaagatgatgagcaaataaaatagctaccatcttgaggggggatgttagagagtctcacattgctaacgtgtggaaagaatagaatatataagatgaatagcctactcctccaattatcaattgatttcgagatagaatctcattcatcacaccggcccaccagtcctatactgtgataataccgcaaccttacatatatttgaaaactcggtatttcatgagcgtacaaaagcacattgacatagactcacattgttcggaaaaagatccaacaaattgacatagacggtcatattgttcaaaaaaagatccaacaaggtcgtctcaagctttttaacgtctctacaaaggataacatcactgacatcttaaccaaacttctattcccaaatcagtttaaaatgtttgtatccaagataaatgttcacaacttgtacatttcattttgagaaaggtctattaggatgagttagttttatgttattgagctttttcctttgggttagtctctctttgtttgagctaaacacctctagtataaatactaccatttattttcttttacaattgaatgagaaatttacttcttctttttttatcccttttcctaatattgtgtacaaagttatttatttatagtggccgaggttaaagagtaaatcttcatatcatattatacgagaaagaataaaaatatataaatattttaccaaagtcgcgactccatgaccagctagtgctcctgcaatgaccccaagaggtgaagacgctgcagcaagagctgcatagggggcaaataaagacatgagatactcttcttgaacaaattaagttgtaatgaaaccaaagagaacttggctaaccctcactggttacttgtactaattagtaattacctattgtagagaaaaatgatttgtcaccccattcagcaacaaaaactaagaagaaagtactaagagcagtgctagcagctgctactattccagcaccatttcctgaaaactcggaaaccgctaattctgcctgttttagaatcgaaacatgatacgtgaattaatgatttggagaagaacataaatggtaaacagcatttccgtatggcaattattcttacctctttctgttcatcttctgctttaaggctatcacttgagctggcatcgaccaaggttgaaaccccaaaatagatctgtgacaaatacaattatcatactaacagaggctccatttggttattgagatttaacttcataaaatactttggctattatcaaagattttttatataggcaaaccaacacctgcccaaaatataacatccaccagaaaactgatttatttatgattgtaacatttttttacaccgatggctttgaaatatggtcaacacgtaggaaatttaaatgaattaatcttggattaatatataaattattgtattaattatttttccacattacagtagctcctatcgaaggaagaaaggctatgtaggccaagtttaattattatttagagtaaggtttctttttaataaattgtaattagttgaggaggtgggaaggttttattctataaatatagaggaattgaactcagtagagggattatgaccctaaattgtttgtttttgtggaagaatagtgttatgaagcaaatttcagatattaatgttcctagtttatcagtgccatcgtaatat

SEQ ID NO: 99311 - DNA, 11465 bp, Cannabis sativa
aatagttcaggaaaatttttaacgaccaaaaaagttcaaagaacacgatttggtacatgtcaaagttcgaagaaaaaaattactaattggccttttttcttactattatatatttttattgatttaatgttttgtaaagtaagtcctctattaataaaccagaaacataaatagataatacactaaactcataaataaataatatacaagagaaagagggaaaattttgctataaaagcacctacatttaacattacaaggaattttgcaagcaggctatattagatttttcacccgtccaaaaaggatgaaagaagaaaaaatattttctctaagaatacatatcccaacccaacccatcacttaccttgggtctttttcccctttttccaatatgaataaattattctaaaaaaaaaacacccaataatattatttttccccaaagccgaatggtgatttttgcctgcttccaccttctccatattgttcattccattttctaagttcattcatcgttgtagcatcatatgcaactgaaggccccacctatacacaaaaattccacaaacataaataatatatatatatataactcaaatgactttaaaagtactattggtgcctggcacccttctcagtgtcatactgttactgctttaggaaatatcgccaaccaattataaaacgccacctatttttgtgtatcgggtcccaagagtatgcttttgtatgatatcaaaagcatactcttattcactcgaggtcacatactaccaaccatttggcagtgtctcatttgaataaagttatgcttaaaagttaaaacaattaacaaaatcagttgttctcttatgtttcaagcatggctaagcaaagtgagtaccattaaggttatttcaatagctttttattttattaattactttctcagagaaaaaaatcttcataatgcactaatttgtttgcctcaaatttctttcctaagagaggaacccttccagtcactccattttacttattttttaacttcaaaaagctgtagaatggctgaagttaatattgtagtagagaggacaacacaaaataaagaagaagaaaaaatggattagccaaaggcctaattcctcaagacatgcaaaaactaactctttaaaatatacacaattatataatagggaataaatatattcgagtagaataaacaaaattatcttaccttggcttttgactgaataaaatcatccacattgagacgccttaagtttggtgctgcaccatttatactttcctataacaggacaattcaagcaacgtcaatgggcacagatcaattaaaccacaatcagacatttaggaaaagttgaaaatgagaaacaagaataaatacaacaaaaactttcaagaattagaaaattgcactactaatggtaatcccccaaaatatgtcaataaatcagagctttgtattgtatactagtgaaattaatgagagtaaatcatagaaaaatagtgattttgagacgctggcataaagctaaattgtaagtattgtggtctgaaaaatgtttaaacacaataatcttgtctttaattcataaaattgaaatattcctaaaagaaccgattcaaagttcaataaaagtaaagagaaaacaaaattaaaaaaaaagagcattctaaacacctacttaattaattgtagttttaaaatgttcttacttcccaggcagccactttacaacgcgtattctaatttaacttcataaacattcaaagaacttaccttcttttcctcctctagaagttcttgtacaggtctataagcagcagcgatacaaaggttctgtcggagaaacagaagagaatgaatattgtaagtatgagatactaaagaatcacattaaagagaaatgaaattagctacgtaccttcaaatcactaccagagtatccctcggttgcagaagctagtttatcaaactcaaaaccaggttctaaattctcttgtgaaagaaatatcttcaaaatctttaaacgattttcagcatccggtaagtctacatatatcctgcacaacaaacaaaaacttggtaaacatttcaaggtttttgcttcataaacctaacacctgatccaggccccataccatctgcgttatgttgagatataagaagtagataaaacatgtctactcgtgttcagatctcacaaatgacaaaacccccaaaagcatcaatatgcatgcagagtaacaaaaccataacaatacagaccttctcggtaatcgacgaattacagcatcatcaaggtcaaagggccgatttgttgcccccagaatcaggattctttggctatcttttgacctcaatccatcccaagcagccataaactcatttctcattcttctggttgcctcatgctcaaaagcaccaccacgcgcaccaagcaaactgtccacctacgcaaatccaatattgatgtaaagaaaaccatatcagggagtctagagcccaaatattattttccaaggcgaaattttgtttctcctcataataaacaaactatataaaccaatcaaaacattatacagcaaaaaggaggaccagcagattacaaaaactacttcagatgtacaaccaaatgcattatcaatgccaaccatgtgtaaaccctaagaaattttaggtatgcaatacgaattgagcattatgcacttcaatttttacaattaatgttcttttagagcgagagagataaagagcttacctcatcaacaaatataatgacaggagcaagcttgctggcaaaggagaagagagctttcgtcaacttttcagcgtcaccgaaccactgtcacagaaagatgcaagtttataacaactcccaaacaaaaacatgagtacacaattgcttcaatgcttctggttttcttcatccaaaaaagtaaatgtaaaatcagtcctttcacgttaacattggcaatatgacatttcaattttcaacctatcacagattgacaaaacagtacatcactctagtacatacaaaaatatgcagacaccaaagtatcatctggcacatgtttaatgcaatatgaacacgatccaaagctacataaaaagcacaagatattacatggatggagcacatacctttgatgtaagtgttgagccagttatacttataaagttagctcccgcttcggttgcaagtgccttagcaagaagggtttttccagttccaggaggtccaaatagtagaattcctttgcaaggctaaataaagcttcacataataagcaactgacaaaaacaaggaacaaatatcatcctatatcaaccaagaacaacaaagaaaaagatataatacccgcaacaaatttccttgagaaaaaagttccggtctcctcattggaagtataacaagttcctgcaatgccttcttcacatcttcaagagcaccaatgtcatcaaacttaacaccaatttcaccaggagccaccactgctgaaacaaagttggtctcgtactcatcctttgcaagattctgtaatgatatatgtacattataaaatatttcttaatgattttccggtaaatttagtaaaaggatacgaaacataccttcaatgtctgtgacggtttccgagatatagcttcctgctccttcatcctcagaattgcaatttcaatgctttacagaataaagagggatcaaaattagaggatttcaatttcaagactatgtgaggtgtgcagtcttgcataagtatttagtattacaaatagtataaaaataagactacatacctttcacgaggaatatgtagtctttccccttttgtggaaggaagcgggcaagatgacaagtaatgatttttagcccaaccaacaactttctcagcttctgcaaaagtacaagaaaaattaaaataaataatacatgacacattgtttacatgcttcaggagtagtttctagattagaagatgttctgaaaggttttgttcttaagaccattagttcagttctgatggctacccatcctggtcaagttggttgtgacttgttcactgaattggaccaactcaacccacgcatacactgaatcactatgtgaatttatccttaagatttactaaggtagctaagcactttttactattttgtcatccttccctatgggattttgacgttggagtattctataatcccacaaattacttgcatcaagtgtttttttaaacacaaactttaatcctatcctcattaccaaatccaaaaagcttcttaagcatctaagtatttcctctcactgaatctagaacagcaataggctattttttattttcttttgttgaaaaaaagggaaagaaaattatttgacatttttcaattaatcaatagtacagtaatatcttactgtgctttgttaagatcacaccatcagtgtttacatgcaataagtccatgcaagacagctcatgctcctcaagaacctgcaattcaataaaaaacaaataagaataacattattaataataataacaaagctaattgcgccattgaacccataaagagtattgcaaaataccaaatctaatacattcaagtcccttcacataaacaagtcgaaactcccaattccagttaaacataagaagttcccaaatttaggactagtaccttgtgtaattcatttatattactccgtgatatgataactctcctatcttcctccacctgtttacaaaatgttcgaaggtgatcctcttcctgcaaaaagcacatacaaaatatatatgaaacaattgtgtatatatacaataatgtttgtataaaaaatatttgatataaaaatctactatcctaagtaaatgacaaattgaaaattcatagccagatgtttttgacatgtaactctagtaacgaacttctcagcattctcatgctgagaatcatgtaaaatgtttagcatttgattaattttctcaactcaactctacatcaacattgacacatacaaaatttatttgattcctaaataatccaatcttattaaggatttttgctaagataccaatatatataaataatatatatatatgtatagtaatcacatagccatgaattctggaaattatacaaacaatttaaaaactgttgtggttgattggtgagacatgtttttttatttaaaaacaccttttagattgtatgcacattgatgtgataactggttaaactatttccttcagttatattcttccgttatgttttctgcccattgtctttagaggataccttatcctctaccagtctgtactgtgttattttcaatatgaaacacctttaagatgttttaaaaaacaaagaggaatagttttcctaaccactattcaactattgagacctacaaaagaagataatagacacgtaccttgggaggatatacactcaaagtatttgtgaagagcttaaatatttcgtttccatctgatctcttcgttgccttcagtccctcagtaagacgcttcaaggataaaggctgaaaaattacatcaaacttaactcattgacacaagaaaacaacaatagctacaagaattgctgatcttcagcacaagaatcaaatagcagaaatatctgaaataccaaacaagcttttttattcaaaagcagacaaaggtcacacttccatgagtgaccacccaaatttagtaggaaccctcacttacggaggaaaaaaacatcaaacaattttcttttcgtttatgatagctaactgtatagtttaaactagcagaaaactctatgaaagagttttaataataatagttcagttcaaaatcgcaaataaaatttgtaagtaatgaaactttagaagtatctttaaaatgcattattttaaatattaagttagtttggtaaaaaaaaaacctctaaattcaggattaagttcagtaaaaaaaaaaaagaaaaaaccatcatcttaccagcttagcaagacgaccaaaatttggaagtatcatcgtctgtataacaaaaaaagtataattgtcagaaaaaaacatcagcctaagaaacaaacatcattctagtcattcatatacaagcttcaaaacaattaataaattaacttacaaatttctctttctcctttgatccagattcaactttgttctgcccacaaatcagaacaacaggacctgatatctgattaaatatatcttcaaccttctcgacaaattccttacgatttgactttggaactgccctagacaaccattgagaagagtctggaaaatatacaataagaggttgcagtgcatgcaatacctacaagcaaaaccaaatgcacttgtgaagggtttgattggtaggtattcgataattttgtcatgtagcacagcagctaggagtctagaaaaatgttttttatggggggggcctgtctgggtatcattttgaattctagggtttttcggggatctttctggacagaatgtatccattgtgttcttgaattaattagattcatctcatatcatttatcctgtaaataaaataataaaacaaaacaaatacacttttgagacccaatccctgaaaaaagaatatggtgttttttttcctataggaagcaaaatgaaatagcttcagagagctaagaaaaggtagtgaaaatacctccaagcaattttgataaatgaaatcttagcagaaattatagctcatttcccatttttatttcctcttcattcaaaagtaaataaataaaaactaaatggattggcacagatctcttttctatttttatcataacatatgacaatatcaaagtatacctcactaagtgcctccattgcaacataacaatcctcagcttgggtatcaaaatcatgctcaatatccttaactgaaagtcaaggaaaacgtgtcagttgtcataaaaacaaaaaaaaaacaaaacaaaacaagcaagctgctcctgctacaaatgaatctgaaaattgcattaactaagaaacacaatagataaacaaaacagaggatgaatttttgataaaacagtattatggcttctgaaatgaaaattttttgttatgttagccagcttgcacatagtgcctacatggcatgttttcaaaaaaagacctccaaaacccacttttaaaggatatgcatgaaataataacagaacttttagtatttagaagagcttggcggcaaagcaagtttattacctcttccaaagaaaagagaaaaaaaatatccataaagccaaaggaacttatttgagctttaatgggactttatgcctaatccattatgtggtaaaatttcacctttatctcgatatatacaagctaatttatgctcctaacagcaagtgaaaaagcatttgcttcttttcaaccaacacttaaagcaaagagtagaaactaccccaaaaccttcatattacaaccgcatgcccaaaaaaaaaaaagatttaaactacatgcagtacttaatgaaacagaaaataataaagagctgtaactttgtatgcttaaagtagagaaatcaactactagacgacatagtgtatacagcttgataatgtagcttccataggtttaaaagaaaaaaaaggcttaccgttcatccaataaacaggtggctttgcaggtttctctatttctttatcctccttagttgcatcactccctttgttttcaccaatatcaaaaataactgcagcttgatcgccactaacctcatatacctccccacgttggcccttctgcaacaccctgcataatgtaagcgctctgtcagaaaatgctgacagaatgacatacacacacgagagagagatatagagagaggagggtaatcttatttctagaagttcaacagttgtggtctttaatcacataagtaatggaagtgcaaggcttcacacagagcagaaataaacttaagggagtcggtcaatttttccagccaaatcatcattactgataatacaatcatatgcaacaatggaaaaggtggctaactcagaaacaacgaaacccttatcactttaaccataaccatatcctcaagtaagggggaaaaaacgaacatcattgtccaaagaataccggaactctttgcttagagcgaacaatatgacccagggcaagcaagaaaataacaaatgtaacttccaaccaccatccattcacactccccacatcatcatctttattaggaatttttagcaagatccgaaaaattctttgcttcttttaaatcaattgcatttcttttaaaaatttatggtagcctgaaaccagttactgttatttggcttatgatctattagctaattctgtaagaaatgaaaattgttttgaggtcaagatcaaggtaaaccaaatgaaccactggtaacaagaatatggaagccggccgggtcaacttaagctctagagagaagaggacattcaattcaagcttttccctttcttccctatacatctggatgacttaccaacccacctgccacgaataatagtataagcatttgttggaccatcagatgttgatatcttccccaatatgatcctgtattgcattatgcatgtcaatgtcaggtgtgggttgaagctagagacactattggatgagatcaagctaaaggtttaagagagaccacaaatgacctcttcctctctcatgtaattagttttattttttcattcgagtttggtgagagaagtttttgtcaaggggtagaaaagaatttctccaggaacgtaaaacaatgaagggataatttataaaaaataaataaataaatctccaaattacaatgtaaataaataaattcatacgagccttcacatttgacattacaatcttatttaaaggtctaatccattataatatcacaaaattttaagtaaactcaaataaattatctcatgacaaaacaacaattttccaaaaaagaaagaaaagaaatcaatttaagaagcaaacatggggtgatgcattacctcttatcagcttcactctgagtggaagatccaacatatttcacacggtcacctaaaagaaagtgacaagcaaaagagttattagtaattaaattgtgaatatattatttatgtgatatattatagcattaacaccttatacagttattggtgtaaatgaatatcaagtcctacatatttatatttaggttaattagaattaagtggagcacgttacttaattgtaccaataataacatgcctcgtcttctaggatgttgggcaccatggtgccatatagcaatgctcttagtttaatgaagcagttggtaaggtttggaatgcataattttaatgtatgtgcttataagtaatattcacactccttttttaagaatgctgaaattaaatatggctccttttaagttgaaatatcagcatctaaaaaacacacagcatggggatagtacgttcaaattctcacctctcttcaatggccgttgggatttagaagactcatcagcctcagcattggagaattcagtcgaatcaggttcaccagaaactctctgtaacggaagtgtttgtgaaggggaagaaaatcagactcgtaattgatgtcaactatttaaataatatattgaaaaactaggacacaaaaaacttaaggagccatgaagcaattaattgagcaacctacaataacaagaagctcgcaacctcagatacaatttgatcaaataagttatatatctgatttcaactttctctacagtatctaagactgttcaaaaccatattaattataaccattagcacaaaacaccaagaggacatagattatgacaacatgcattggcttctcttccacacaatccaccaaaacaaatataaaagaacagcaccaccaatctggcctagcagtaacacataaaaggactaatcagattcctggagacaacaaaagcaccgacatggcacactagtacaaatcttctatgatcttcatattgtgagctaaataggcatgagacccaaggttaggacacttcaactcaatctctagttgatcgaatcaacttgaagataattttttactaatatccacttatacacttcgaagtttaaagagacttatggtatagcttgttttctaaaatatatataacttgttagtaatgaatgttatatcatgttacaagaaacatttgatagtgtatgtagcttgctaattgaatattaatagctctgcaatgtttttataaatgttttcaaccttttggtggtaattatttatctaaactatagttttgatgcttataagccactgggatgatgattcctaggttagattttatacggagtatgatagacttctatatcaattaaaagaatttaatcattatatggttattatatgaataaagctaagaacaccacttcctctgtttctaaagtagtggctaggtttcaaaatctacaaagaaaatcagacgtgatataaaatcaccatccacgtgagtgcaataaacatggtaaacatggtactaaatcattaaatcatgttcgtctattataaacatattgcattgtattatagcataaaagttgaaagaacatgacttgatccattgaacctgcactctaactgtttaaagataaatagaaacggggaaaggggaaaatgtgagttgtatcataccttttcgaatttctcacaattgtgtggaacttcaacaagctttcggagggctgcttcagcagttgatacttcatcaatatcagtaccgtctgactttgcctcattactactagtccaatcttcttcattttcatcctccacctcagactccgaagtatagtcctccccgcgttcggtactatcatcatctgattcactctctgattggcaatcatcaccaaaatcctattgcaatattaattataactactttacttttagccatcaaacaaagcggaaaagtttcctcatgtgctaatatattaaattattacaatcttacataaggagcaagaacactgctgtcgagcaccagtaaaggaacttgtaagtcttgcgcaagcgctttaactagtctctcgcggtatagctcagtgcctgaagggggcgtgttaatgcaaataattaaatcaaatattgtcactaagggaacaaccaatatacacaggtagacgataatcacttagtaggatcaacaccaacctggtgcactctggagcagaattctgccacttgaagacgacaaacgggcaccataagatgaagtgacctttttgtgattcaaatgagaagcagcacattccaccaaaagctttttggtatggtcactgcgatacaaaataagtttaaaacacttaagctactcctactagtaaaaaaaaaaaagagaaacattgaccgatatgaataagcaatgagcagtaattac

SEQ ID NO: 99312 - DNA, 3110 bp, Cannabis sativa
tactaatatataccctagcccattatgatcgtcagatgcacaatcaaaggttcaaaaaccttccttactcatagggacataatggcatgttgtaacatagtctcaccctatatatatatatatatattgatatgttgaacaataagctataaaaaaagatgcataagcaatttaatatatatgtcaataataataatgataccattcattttaactattactcatattttaagaacttacaagataattataatatttatggttttcttaataattttcgttgaagggctttatagtttagttctaaatatatatggtgaacaataagctattaaaaaagatgcataagcaatttaatattatttgtcaaaatacaaaatttatccagcattcattttttaattattctcaaaacgaaatttgccaactagcacatcaaaaacatagtgtaaaatattataaaaatgggtgcacgatggcgtgtaggtgatgggcctaacatctctgtcaagggcgagtcatggcttcctcttgaaagcaatccgtatgtaatctcaacccatcctgctcttgatacaacttttgtgagtaatttgatgttaacagatggtttcggatgggatttggagctgttagatgatctttttaatgatagagataaaatggctattattggtattccacttctgcaaaattcgggtgctgattatttttactggtttcatgatgtgagtggctcttatactgtgaagagcttataacctgctgcagaaatttaaaggatcttggattaccatagcagcctctaaattttggaacgagctatgggggttgaaaattccaccgaaagtgaagagcttgatgtggagatgatgaaataattgtctacccattatgatcatgctcattacaaaaaaagtggttgtcaatagtctatgtacaatttatgctctgcatgatgaaataatattacatatcttggtaatttgtcctttggcgacacaatgttgggaaagggtagggattaccactttgataactgtcaacatgtcttttttgactggtgtattgcaacatttcaagctgttaatgacgagaaatgctgcatcattgcaactttgtgctgggcaatatggagtgcaagaaataaaaaagtatggcaaaacaagtccacaaatgctctgtttttgtatgcattggcgggaagttaccttgcacaatggaaggttgctcaatcttcagatcaagaagaattttggactggtttattaccaggagagggtggtgagcggtggtgtgtgccaaatgtgaatgaagtcaatgtgaatgttgatgcttctatttttggaggaaaccaaggctttggttttggtttggtggcaagaaatgagcatggttttatgttggagggcaccattaggctttgtaatgaagtcgttaggccggagctagcagaagttattggcgttagagaggcgcttagttggataaagcaaaatcggtggtagcatgtgatcctcgaaaccgactgccttgtggtggttccagaaatacgaaactcctttgagatgaactctttatttggtcaggttattaaaaagtgtaaactttttcttgtggatttaaagtatgtttctatttcttttgtcaaactttcaccaaacttagtggctcattcgtttgcaagagctgttagtttatatcctgatcgtaaattcagtatgtggctcattcgtttcaataccttgtttggtagcggagtttaaaggttaataaagtttgattaccttgtttcaaaaaaaaaaaagtgtaaaatgtatttgacttgtattgaaaaggtatcatggctggttctattgagtatcttgtacttagaataggtttactagtattgtaataatgtgcatttctttaacaggtttttgttcaaaataagccattggaaccctaaaaataatgcaatttagttgaatacaaacttaggtaaggtacattaggattttcttaaaaaaaaacatttaagattttgttttattacctcaaaggatgttgacttgcctctgcctttctcttttcctctttctttgcctcttgttgatgatacttatggttgatatggtccttaacatagttgtgttttgttctacattttctcagccttggcaagtggtgttctctttcttcttgtctttgcttttgctcttatcttttgttggttgtgcttgtggttgagatgggcatggtgttggtttcttacatgacttgccattgtcgccaaattcatggcagttgttacactttttctagttggttgtttctttgaagtaggtggtaaaagtctctcctctcctgcaactcttcttctacgatgctttttaggtcttcttggtggttttttcacaactagtggtagtaactcttcatcgttaaattgaggccacatcgattcattaggaattagatgaataacttgctcaaatgtttccttcacatttatgtagtgaagtatagagagcaataattggctatgtagctatgtaagcaatcacatggatacatggtattcttctcacttgccactagccacaagcaaaagaattcattcagccgaacattagacattttttttttcataatccacttgaaattcttcgtcaccaactcttgtcaccaatgcaaaagtgttttttttttattattatttcctgaaccttaagatggacttttggagtgagcttatgctcccatttgtcagctgtgaattttctttcatacatcatggctatttattgtattcttataccttccaacaactcaattggggccttgtatcgattatcttctatccaatcgttgaatgactcaacaaaattatttgtgagatgttctaccttcacatttgagtcgaacttgttcattgtccattgcctgaagtcaatattctatagctagtcatgtgtcttctgattgaattctttaattcattccattattatcttaaaattctcaaaattagttgtctcaattgctgctccaaaagagaccataaaggtgtgatgtgccaaacttttttaccatgttattttccaaataaaaataatagaaatgat

SEQ ID NO: 99313 - DNA, 1953 bp, Cannabis sativa
ataaatatttatttaataaccaaaataccattataaaaaaatttattatcgtcgatttctaactagcatatatattttttgcatgagtaagagttcttagaatcgacgtgtatcatgcagatgcaaaaactatcttattttgtgtcaatttacaattattgaatacaaaaatctccgtcccttagaagtgacgcaaacgttataaaaactgattttacactgtttgcaccagtttttaactgacaaaactatacacataactataaacttaataataaatttagctcaaatgaaaactcaatgctagaccacaagactaaaatttgtactaaatttgacataaaaataagtttgtgttatatttgacctatttacaattgtactctaataaacaatatgtcaaataagtaaaaaaaatattatttattattaatggttatttaatattttattaaaaatataaaacaattattattactagtattatttatctttttttttttttttttaaataatgattatatagtaaataaagtacgtaaatttttttgtaaaaatcaataaattataataattaatagcgtaatagtaaataaaaagtgatgggctaaatttaatctggaatttgacacaatttttgttttggtcaatgaataaatgatttcaccaaataactttataatctatacaacaccaattttaataggcctgccacatctatatcatagcttctcaaaccatgctatatcttttctagctactttttgggcattgtatctctaattctaatttttacaacaatcttgatcttttttacaatggagtctatagtgaaaattttcaagttccataatgcttcattacacgatctcaagatgtggtacacaactgcaactaaggtcgtcgagagaacatgcatttggaacctgccaaatttagattttgaaatctatttcaccaatcaattttgtataacttttagcatgttgcaaatatgacaacacttttttataacaccattgaatatgatattattttttaaatatactaaaatgtagcaatacaccatacttttagtactttattagagatgctcttaatatttggttcaaattttacaattttgatccaatactcaaggtacaaattaacacccatagtcattaaatttttattgaaagtatattaaaaaaaatatttaaatgaataaataaaatattaaaagcttttaattaataaaaattattaactagtgacaaatgagtaaataaaaaagataacatttattgtaatacaaatttagtcgatgctatatattgtgctaagtttggccaaacgtttagcaagtgtaaaatttggcataagttgtacactactattggagctttattttttaaacattaaattacagcaaaatctctaaaatttttaacttgctagcaattaactcctcaaactcatttttttttttgttgcaaaaccccccaaaactcatattttgttagtaatttgtcattttcatccaattttagttatgaaaatcatgttggatcattcatatgtacacattataaacatgacacaattgtgttggtacatgtaattaattatttaaaaaatatcaaaaatattttaaaaatttataacattgttaagaaaattaatgttttttcttcttcttactctcctaaccttaactccctctctcactctctccctgaaaccattacaagccatgttaatgtatgcctaggttctatacacatgtccatgcctttagtcaattagttaggtacttatttgttaacaagttcagatgttaaatctgttaacctcttagtcgtaactcgagtatgtaaatattctgttagtagaggtatttagtctataatacctctaacttctcaactgaaaattaattgattcatcattgtaaatactgttgggttttgt

SEQ ID NO: 99314 - DNA, 7284 bp, Cannabis sativa
taaaattcttgtgtctttatatttctttatcatatatttgttactataaatcatttatcgcttataaaatagacttgttgtcgttggctaaaatcgaggtcaatacttataaatatatatatatttatatattattatactttgtaataaacgttttgcataattgtcaacaacataataaatgttcaaattaatattaaatatataaacaaataatagtacccacattggagctttctctctctacgttcttgcagctctctctctgaacgggtgccatggtgaaaaggagatctaagattcaggggaagttgaaatctactatgaagaagaagaaaagaggccctgttttcttagctgatgcgaagaaaaccaagtgaatggatgaggtgttgggtgtagaaccaatggaatttttagaagaagaagaggatcgattaacaagtgctcctaaggtgaattctaacttgcaggattgctttcaggaacctctctcacctaggtcttccctgaattggatactgcaacatgaataagtaaaacgagatttcaacttcttcctggaagctagtctggcatgttcgaaagagatttcgaaaggtatcaatggatgacaatggatgatctggaacttaaatattgggaggaaaagtctctattcaaaattatagggcaggttggggaaccaataatggtggatgcagtgacaaagggacgagataagtttagttaccctagggtgctaatcgaggtatctattcaccaggattttccttataccatttattttgagaatgaatatggctctaatgtacctgttaaggtctcttatgaatggaaaccaatcctttgtaaaaattgcaaaggaatgggacatgagacaagtgattgtaggaagaaagaggggaagcttcatgggtgggtgataaaaaaagaaacaaaaaaacaagcaagcaacatagatgttgggaaacaaaatactgaggcattccaaccggttattaaaggctggaaaattaaggagaaggagcctatcaaattgccctaaacatcaaattctttccaagctttggtgcaaacaggggaaggtcaaaaggacaaggcaattgaaggggaaactcaatctgagatacaagaggggaatacaagagaggggggagatccctctcttgtaaataaataaaataatttgttagaacgtctgagaaatcaacaagcagcataagcaacacagtgtaaagcaatttattgtgtctcaaaaagctaatttggttggtctcctcgagatgagggttaagcctccaaaacttggagacttataccaaagaatgtttataggctggtgtttcacgtcaaattcaacatggtataaaggttgtagaataataattgcttggaatcctctcttattcaatactagtatccttaaatgtactagtcaattgatacatcttcatgttgagactgtaaacaaaaggtataatttctttatctcttttgtttatggttttaatgatgaacatgggaggaaagttctatggaatgatcttcgaagcatagcaagacaagatccttggatagtttttagggattttaatgatatcatttataaagaagagagaattggtgaaagacctaaggttggcacatctactgcttttttagattgtgtaaatgattgccaaattttagatatcaaaagcagtggctgtttcttcatgtggtgcaacaagcagcaagcaagggatagaattttctccaagattaatcaagtattggctaatcaatcgtggttggacatgtttacgatggctgaagctatatttctcaatgaaggcacttttgatcatactccagctatgttaaacatttatcctgatttccatagtggaaaaaaaccctttaaatacttttgaatgtggacttcgcacccaagatatcatcaggaagtaaagagaatttgggagcaacaagttgttggaataaaaatgcatcaagtcgtcttgaaattgaaggccttgaaatctttctttagagaattgaataaagactcttattctgatattcaggcagcagagatgaatgctaagaaagaattagtggagattcaagggttgcttcaccaaaaccctttagacattaaaatgcaaaataaggaactggaggccaaggagctgtatgttaaagtccataaagactcctgttcgtttctacaacagaagtctaggatcaattggttaaaggatggggatgaaaatacagttttgttccattctagaatcagagagaggcagtgtcaaaacagaattttatccatttcagatgcagatggaaaaagattagaagatcctgagggtataacaaaggcgttccttgggtttttatcaaaacatactgagtactaagatggttaataggagaactgtagaccccaaattaattagaagaggcccatgtattacagagcaacatgttcggctgcttacggctacttatgcactggaataagttaaaacagccgtatttacatcccagcaggcaaggcaccatgaccggacgggtatcacagctcattttatcaagacaattgggatttgattgggaacgatgtgtttgaagctatcatcacattcctctgcataggccatctgctcaaggaaagaaactcgacaatcatcacacttgtgcccaagagaaagttcccaaatgtagtaagtgattacagacccatgggttgttgcaatgtcttataccaagttgcaactaaactgataggcggtagattgaagctcatacttccaaatattgtagctcaaaatcagggggattcatagcccaaaatattatgatttgccaagacttgattaggcattatgggaggaagaatgctaaggctaattgcatgattaaattagacctacaaaaggcatatggttacgcattatggagtggagatttttagaagaaattttatatgcttttcagttcccagttcatttcattaagaaaattatgatctacatcactactcctaaattttctctgcttttcaatggatccttgcatggattcttcgaggctaagaggggcctcaggcagggagatcatatgtcaccccttctatttgtgttgggtatggaatacctcagtagaattatgaagacaataggtgataaagaagaatttcattttcatgaaatgtgtgggggattaaagattaaccactttagttttgcagacgatgtccttatcttttgtaaaggtaattttaagagcatctatttgttactaaagagcctcaagttattctcaatgacctcgggtcttcaccctaataaacataaaaatgcaatttattgcagtggaatgggagaagaggaaataagaaggataatggatgcttcaggttttccaagaagcaacattacatttaaatacctcggagtacctatttgtgccaaaaaaatatcatccactgaatgtttaatcctagtagagaagatgaaaactagaattagggtgtggagcacaaggaatttgtccgttgctggaagaacaatgctaattcagtcggtactattgataattcacacttattggagccagattcttatccttccaaaaaaagtaataaaagaattagaaagtatatgcagaagcttcttatggacagggaaaaacaacatgaatgggccaaataatattgcttgggagaagctatgcaagactaaaaaagctggaggaattgggtttctagacattggaaagtggaatcaagctattgtgccgaaacatgtttgggcagtagctacaaagaaggacaacctataggtgaagtgggtacatagtgtgtatattgatcatgaagattggtggggcataaggcccctactcaaagatgctggtactagagaagaatagtgagcatcaaagaggttgttaagctaattatgtcacttgatcagtttgcagctaaggattttaaaattgcttctgcctacaagctgcttaatcatgaataaagagatttccatgttggtaatcagctctggagtaggcttaatgttccaaaacacagttttgtactttggattgcagtacacaacaagctgagaataagagataggctcctgtactttcacatcacaaatgaagctgcctatttgctatgcaataatgcagaggaatttatccaacatttaatttttgtgtgcaaattttcacagccatgcttacaaagataaaagattggctaggttggagagtcagatctaacaacctgcagggtattctaagatggatcaattgagctaaaatgagtaaattcaaaaagagttgctacactgttgtggttgcaccttggtttataaagtatggcaggctcaaaatactttattctagagcaaggaatgcactgatctcaaggtgctagtccaagaagcaaaatggctagtgaaaaatataattacttgtataatgccaaagtgtatagatcaaagagatatagaatggtttagattgttataaggtgatatatgtatagaaaaatatgctccatggagagtcgtagcttgtataaaagatgtttgtatgcaatgaaatttttgattcatcaaaaaaaaaattaatattaaatatgtaagcataattgtaattttcaatcatataaatgatatttaaattaatttcttatctaattattagttttttagctaaacaatattactattatttattatatactaatctaattaatattcttgatattttgttatttatataaatattttaaaaaatattaataatataatatttttattaaaacacataataaacaattcttgaaattaattaaataaataataaatagttttataaaaataaataaattaaatatctttttttattaaagagtattatctatttgtatggattattataatttaagaatttttttagtaaaatacaatatccaaattataaataataatgtatataaattttaaaagtgtgtttattaaaaattaaataacatacaaataaataaaatataaatatatgtttattatattattataatcaatgtttacaattttaaaggattatagtagtcgtttataattatgaatattttttaataaactactagatgttatcaatattataaacattaatatatataaattagtttttttttcttttagacattatttataatatcacgtatttataaaagataaaataaataattttataaaattaatttaaagttagaataagtttatataaaaataaacatactaaatattttttctattataaaataaatatttattatctatcgtattatgatttattataaattagacaaaataataaaatattaaaataaaaattataaacagtaatatataaaaaaattcatatgtaactttattaaaactaatcttttaaatttttactattatccataattatgttataatatgttttagtgaaaaaaatacaaaaaaatatgaagttaaagcctgaaattgtaatactataaaagctagaaatgataaaattataactagatgagtcaattagtaatgatagtaacaaaattgaattagtaataacattaattatatacaaagttattactatatatattttttttatataaagatgagaatatttttttaatggttaaaaaaatgtataataaattataaataagtttttttttacatatattgtaattagttaactaaatgtacataaacttgaaaattttcttaaatatgataaatatatacatatataaatgttaaaaggagtgtttcacgtattattactggtgtaacaattacaatacgtcattttgtaaagtttttatattgtaatattttatatgtcattattaatgtagtattaatatttttaatatgtggttatcagtatttcgtttaattaattttttaggtgattatattacttttttatcatcattacttatattatatattttttcttttttaatgcttgattgttttcaactttaatttttaattttatttaatattaattataaataattctcattaaattacattaattgaaatttatcttacactctcgttattaagttattttaatcatccttactatttatatttacatgtaatattttagatcttcatactactgtttttcacttaaaattttattatttttttcttaaagtctaatgttattatttatcatatcttttaccatttattatccattatttatttagctccataatttttaaatttgttatatatttgtttttatattaagttttaatagcttttattaaatattttattattaactttagattttttttatatgtgaattattgggagatgtgatttgagtaattgctggatatttatggtaaatattttttataatatttatacttgtttagtaaattaattttcataatcaaaatataattttccccatttcaagcatgttttattgttatttgcccattgatatagtgggtgtttctagttttattacaatttaatgcagttttattatgattaagtaaaacttattattgtgagattttatatataatgtattaaaagtgtgataaagtcaaataatttctttgaggatttttttattttatttaatattttactagcattatatattcatatattcattgtattagtttttgagcttataaggacattggtcctattatttttgtatattcatttagtattaatttttatttttgtatattcatttaattaattttttgaaatgtctgattctatttcttataatttattattattaggcatacttaggattattattttaattgaaagtataatattttattatgcattttttaggccttatttaatttcgccagctcattttttggtaattttattctttatgttttcaatattttatttatggtttttcctttttagttacatattaatttattacagcctttattttaattatatttaggtattaatgtaaatttatttcataatttctttattatcatttattttcttttaagaattcagtaaccttaattctattttttctacttattttatacctattttgtttaattttatgtcttatatcaaatttaaaacttctattttattatatatattattaaagacattttttataatttatttagtcttactgtgaaatcttttcttatattttgtttcgcttatagcatcaattttgaatttcaca

SEQ ID NO: 99315 - DNA, 5871 bp, Cannabis sativa
tcaagggctagagatctgaacgtacggaaggagtcattatatgcagcttgggcggcataatcttgctctttttcttcgagggagcgggcactgaatcccaagttgcatacttcctgaactcatccatggtagattggtctttctcgagtagaccataatttcttaaatatgtcaattgcaaaaggaagtctacaaccctcatcccatatggtaaatttacaagttactgatgacgcctctcaatagcttcggtgggaacaggtttcagtaagcgctgaagaaaaaaaaataataaaggacatgttagcaacaaatgagacaaagaaaatacaaataacataaatcaagaaatgtcttcagaacttacgaatttttcagaatgaagtgtggttgatagggtggaagtcactcatccaagaaacttgtccataatttatttcttgttggggagtctgacgacaattttttagtcgtcaaagtaagcctcaagataataaaaacctcccgagaagtattttcttgggggggtctcttttattatatacaaacatgtgatttcgttgggagaagggccttctcatcccatcaagtgatagagagacctcagagaggccaaaattctataactattaatttggaattaattgaaaatgagcgatcccaacataattacgaaaatccttaaagcaattctcaagtggaagaattgtaccggctcatatatgttttgcacttcaagctcccatagcaatgtgagaagaatgttcgcactacactcaagttctctattgaaacgatcagaagggaagcaacttttctcatcgtgcttaacagatcgacatagattgggctggggctggggctttggtttattttttttttgtcaatttcttttagtgggcgcatcaaaagatagttttgaaaaatactctaatatgtgtaattgggcctatctttgtgttaagtgattttggtgtaggtattggtaaaattctaacagatcacatctctctctcgtctgacactaatgttgatgagctataaactctaactctatattcttctctttatttctctattattgaagatcaaataaatttaggctaaatgtcagtttctccgaggaactagttaccataaaaaaaaatgatgaacctcgttatatcttgtctctaattcatttagtttccacacttatttttttagtttatgtttattgtttgattttccattccagttcttcagatcttgttttaattgattcttaataagtattaattcactacaatatatataaatagatctaacttgttgggtattttttactgttgtgtatttctttgatttgatcactaaaaactaacatttttctaggttgctttccatagtggtctactacttctaacaaaagtttaagatgctttaagattttgaaaaatatttcccaaaatttatgcaaattataatgcatagcaacatcatgatcataacgtagttcagtttgcttccagacaaaaatgcctacgtggtgttggtgtagaataattataatgtatttttcatgtatgactttgagagcaattgtcttttctaagcaccgttgaacgtacaaaagataacacaatataaaatgattagtataaatgcccttattttactgattcagcattttcttcgactgataaatgctgaaagtgggtggtgggtctttactctttagtaattgcaataagacttttaaaaaaggacatttctgtgcaccaaaattaagcagtctgctgatgattttgcactttttgtaaataaaataatataatactcctttccttgctttacaaatcgatcaatcctaatcaatgtatgtatatatgtatcatactgtactaaaaagtaatagtggtgctggatcatgtgtccctattggtgtcataaaacttgctcagttgccagcatcattttggaagtaagaacgaagaacaaagttgacataaattgcaatatcaaacaataacttattattatgggttttcaattttcacaactaaatcctaccactttttaaacccatgtttgtccaccctttaacaactctttaacttttttttcaaagtcttaggcaaaccagcacttcaaaaactctggaataagttttttaacaagctgtacatttcaagagcatgataagatagtgtaaaaaattcaggagataataaaactaattattctacatttatacatatatgctggttccggagaacactaggtaatattgttgtgttgatcatcaaatcagaaatgagtaaatataaatatgtaaacataacaaggacgcaacttgtatgtacaagtactgttgtgattctacaatggctagaaatcagagaaaagattgcttgaatatttccattgcttactaaactgtttagatcagcttttaccatgatctatatagagccttttgaaagttttgagctcgaacgccttcttctttctaacctggcttcaattagctttgccatcaatgtgttttcatttagttcctgaggccatcttaaggaagattctgatttttcaaaatctggggttaccattttagacttccactgctgtattggactagcatcaccagccaacacagattgcaaacaagattcttccttgcagcaattttgaatcaagttttcgatcacatgatctgattttaatgtcttgggcaattcagaatgtttaagatcatctgttgcttctaagttttctctggaaaatctaactccattacatgacatggctctagtcaatctctccccagagtggctaccgcctttgatcagtacctgtgaccgaaattttttcttcaaagaattagactttgacaatccttcatgatagccttctgaagtatttttattatgttgtctttcagtgcttttgtttagtttgacaccaggtgttttgttgattacttctaatgaaagcgaatcacaatcagtagaatcttcatcgcctaaatgacgaggtgcacttccagcttcattcagttgaaacgactccaatgaatgtcgttgaaggccgagttcttcctttggtgataattgaccattttccctggatactgtctgtttagcttgaagaaaggttgttatatcgaaacctagcttctccactatcgtaattttttctgcaatgttgttttctgcttcggctagcttcatttgtattcgctcatcaagccatgcttctgatatatggagaattaacttctcaggtttgtctatgcctctttgatccatctcaagcttgtgcttcagcgatcgaacctcttgttcatagtttcttattccctttgcaaactcatcacacaagttttctaacaggatccttgcttttctctccctttcaagttctctcaaaacattggaaaaagaagaattcatttcagaaagctcacaagctagcttccgatgcaggctttctgaacgcttccttaacttcctctcatcatctagctcatctcgaactgattgtactgctgctctaattcggtcttgcacaatactcttcctaactagtttaccatccgtaacttgcttcatcaaatcatccatttgttccctatccgtctgcttttctttcagcaactctttaattcttgctcgggaatgatctaattccattttcagcgctttcactaacgatacattagacccatgttgttcttcaatactccagatccggttaagtactttgagtagctccgtcgaagttttaaggccatgatcattcatcctaaactttaaatccaaggaactggtgggagtaagagcaagcttataagttcccacctgtcagattacaaagaaatatctaaatctgtcaaaaaaaacaaaacaaacgaaaaggaaacttccgagcatgtgccttgatcatcattttctaatcaatgacacttctaggaccataaatttaacaagaaaaacttacttaaaatagtcatatattgacattattatagaacaggcatagatcctaacctccatcgtattactttcatagctaggaggagaaacaggctgcaaagcatagttgctcctttcacgtgatgatcgatgatctttcacaatggatcctgaagaagctctgcccaagctgctagcagttgctggctgaaattaggcaaagagatatcagcaaagctttaatacaaaaactttatggataccacaaagctgatgttttgcatgagtagtgtaaaactataaatatgcaattacaaagaacattttaattgctaaaatactttggttgagagttaaaagagaatttatactttccactttgccttatttcataatggataagaaacttaagtatattggtagcataattaagttatgcttatcgttctgaacacgaacaaataagataaatcaagaggaatacatatatctcttatgtcataaatatggaaataattgaaagaacaaatgtcactattaactaagaaaaaaaattaccgaaaaaaggaggaaaaaaaaggaacaatccatcaacaaagaacagaggatgggcaaaccagtaggcccttatcacatcagcgacaacaatctaataaaagcaaaagacaatcgcttccaaaagagggaatgaaaaaatcaaaaagggaaaaactcaatcaacaaatctatcaagcaaaacttcccaaaatgcaaagagcaaaactataacttactcacctcttcttcttcattgccaggattggcatgagacagatgggcaatatgtatgggaagcttaaacccattactcttgagttggcggcggcggattctgacttgtcctttgcccactttatcaagtgaagaacgatgagactcaaaatcccaaagactggcacacaacttcctagcagagacatttggtggagtactaatgagaaattccgtacaggctctatgattgttgttgtttttgaagttggtatcttcgaagtcggtagtactaaactctaacctccatctgggtggtggagtacagggccctctttctcctcttttccccaccattaatccttgctttttcgatcttgctttttgtttcctctccattttctctcactctctttgtgtttttctcatcaaacttatgtaaccctttttctatcttgggttctaataaaaatgaagtgaagtctcgtaggtcgaagttaagaaagaagagggtgcagtgagtgacagtgtcagtgtcacttcacacatttttcttcatcttcttcttcttgagcactctcttgagttgaggtgttaacagcagtttatgttgtttaactcacccttatttctttcgtctttctaacctttttacccaaactttagccacatcagcactaattatggcaaactaactcgaatggacacctgtactcacaattattcttatatttaatttgtttattgtgttacaaataaaatagacgaaaatcttaatctaccgtatatcttttcgcattcgaggaatatatatagggttattctatagtagatcctttagctttttcctcatagtatagggtaataaattagaccaatcacaaactaaagaatataaactgtattgaaattacggtgaagtgtctgtatgttatttatatatatttaatactttaatcaattaaatattttgtactatttaacacttgttttcatagaggaaaattaatatccagaaattcataccatttcaataaaaagttgatgaagaaattcatcaagaatctcataataaatttatataaatcttttatcaaatacactaaaatctactcaattaaaatgcaccctacctccatattgccattagatataaaagcaatag

SEQ ID NO: 99316 - DNA, 2606 bp, Cannabis sativa
gtgaattgcatgactaccaaaagataaagtttgaaaacaatcatagcgaattgcatgactaccaacttaataaaagaaaaatgtaaaccatcgagatctagaaaaccaaccaaccaataaggtttatcattaaaagaaaccactaccaaaagatagactgagaattcattagagccataaatactaactgaaatttgatcaagtcgttggagctcagcttcattgttcaaaggccgcacaagggtgaaacattctcgatctggaaacagagctcggatggagtcacgaatctgttgatcaattctattatgaaattagaatctccaatggggaaagtgtaattttatgtgccagtgtatttactttgacaagaaattcttgaaaaaatcatttacaattgattcgtcataatgcttcagtaaaaagttagagttggatagaacctcattctttgcagctatgtctttcccactaccttgaactggccgcaaagcaagctcaagatagtcacggggtgttatccttctatcatcctctactaaatccaaataaaagtcctgcaacatagattatacatattgaatcaattgaagactacaaaaaatagaaccctttgtcaccaaataataacagtaacaatttacacagcatctacaagaacaaaataaaaatgtaattgtccctacatcacattactacagagaccaataagaaatgaagaaattacccttagaagccacacaaaaattggagagaactgcccgagctcagaagctgaagttctatctccagaagctctaacacgaatatgttttgtcatttgtgtgacaagagaaagacgatccaaagcagcctcatctatgccacccatctaattaaagcaaaatgtttgagattaatgaaatgaaacttcttgagtaagatcaaatatcgcatcaaactgcataatattctgttccacaacccatctccacatttataatgaaaccttctcagtaagaccctactaaatcaaagacatttgtcataccaaaataagttgtacgaacctggttataaacaaacatgctagataatagcacagctaaggaaaatatttgggtgctgtacgttccctggcaaagaaaaaaaaatgtcaggacacccgaactattgaacaccataaagtgcaacagcatcatatacatttatatctatatgtattaaactgaaaggaaacagaaactcccttacaataaatatataattgaatcaaaagcatgtttctaggcaaataattagaagctgaccgtttgatcataagcatctatgccttcactgtctaatagtaagagactgaactctgttccatcaagagcagttctctttattggagcactccacaaccagagacctttagtgcatggccgatgagttgatgaaacctgaaacccgctgctcctcccaagaagctacaatttaaaaaaaaaaaagtaaagcatacttaataaattgagtctggtattatcgttctggcaatttaagaaaacaaaaacactcaggaaactcgcacactgtactttcctaatcctaaaatcactaaaattagaaaatcaacttcaatggacaaaatcataaaccctaaacaaaaaatcaaaacaaaaaaaaaatactgagcatgtttcatgtacattagcaagaaacgaaaaaaccatagacttcacctggttaagaatgtagcttttcccttggcgagcacggccacagacggaaacgaccccgatcggtcccttgacgagctgaagcgtggcaaccgcttcgggatccatccgaaactttcccttctcatcacaatagaccagtcgaagcggtctcgctggtccagtcatggacggtgcaacagacgacggagacggcgattgaggcgaaacactaggagaactttcttttcctctgaacattgtaaacatctttgttattcttcaacaagtactgaactctgatctggttcttcgtcttcttctatttcgatttcggtctacagatatataaatacatacatatatagattgttccttgtcttctccttcttcgagctttgattttcttttggcgttccgacttctcagataaaaggagagagggtttaaaattggagagggaaaggttcaggaacttttatagggaaccgagaaaggaaagatgaaaataccattttgtccctaatatccgttgttgtagccgtcttaaggaaaggactcaaccatcatttcatttgtttacatggagttctttattgaatacagcgtggaagaaatcatacacgggaatatttttccaatttttttcataccgtttcttttaattataatatcattcagcatttttcaaacattctaaataatttacattggttatgtttagaaattcatgtaattgaatttgtatgtaattagaaacaattatacaatttagcatatttgtctgaccatgtaatgttttaattacactctccaattctcatgggtcatagcccatggatgtgtttagaagtaactgtgtaattactaggtagggtaattattagggtgataattacacaatctagtaattacactatattttaa

SEQ ID NO: 99317 - DNA, 2104 bp, Cannabis sativa
tttcagtccccacagaaatcctcgacataacttctcatttcttttatcacactatgaggcaaaagaaacacactcatccagtagttccttaggccaattaaagtagatttaataagttgaattcttccaacaaatgagagttgtttcattttttttcaagattattccacagtcctctaacctccatttgggttgtctaagaggtatccccaattatttaaggggaaattctccaatagacagctttattttttgagcaataacttcaggatgaaacacaccaccaaaatatatttgagacttctcaaaatttaattgtacatcttggagagaaattcttccttttatagttcttcaaaatgtcttggagaatcaatattttatatgcaatagatcgaaccttgacaaaagcaccttgattttgattaactaaactcataagaattttagccaatcgagagcacatgagtttagaaacacatttgtataatgttgagcagtaaccaataggtcgataatctataactctagagggattatctatttttggtattaaagacagagtagtgttatgaagttcagcaaaaaactgattagtttcaaaaaaaaaaaaaatgagtgatagctttgtggatgtcctttcccacctcagaccaaatagatttaaaaaatctagatccaaacccatcaaggcctgtagatttagtactaggaatactaaacatcgcagccctaacttctttaagagaaaaaggttttaagaggtatacctgttggtcaaggttgagtttggaacccatagcaatgcaatcctgttgtatttacattgatgtggcgctagctctacccataatacttgaaaaatgaccaagaaagtgttgaacaacatctgggaagttgtcatttagggtgccttattcagtaacaaaagacacaatcatgttgtcctcctttctctttttgagcatggcatgaaagtaacctgagttggcatcccccttttaaatccatcttatttgacttctttgactcaagaagtttagatacattttttcctggcaatgataatgaagagcaccaatgttttctctgtcttggagagttctgtcgaggggattagcttgaaatttgagctaagcttctttaaagttttctttggctttctcaaaagcctctccaatatcttcaattgagtgcctattgaagattttgagcttgtgtttaagtctgatggtcttgagataaatcccttttaacctttgacatctcaaaggattgctccaactttctaggaccaccagtttgtactccttgtggtctacccagaaataatagaatcagaaaagtttgctgcctatgttctctatagcaactaaatgtacagtgcagaggcagtggtctgaacatgtttcccacaagaaatgagccaatgtatttgtaaaatcatcagccctagcctcattataaaagacatggtcaatacgagagaatattatggtatcttgcttattcgcccaagtaaatgtagagccagagcgtttcatagaacctacagaagcttgagcaacccagcttgtggaatcaacaagttcaacaacagtaatagggtttccccattcctatctttgtgatgaaatacaacattgaagtcactaagaataagccaagctttagcaacattaatcttagataaagctagccagagatcacttctattatctatagtgttagcaccatagataaaagtggcaaagaaatccttgttctgccctaccattttaataagacaatgtacatgttgcttggactcctccacaacttctacttgagcaaaattctttctccagataacaagaattctcccctctatagcattgctactatagtagtcctaattcatgaatctactagccatcatactgtgtaacttttcccctctaaacttggtctcaatgagaaccccaacacctagtttattaagcctccaaatatcagcaactgaatcctatttatccttattattcaaaccccttacattccaactgcaaatattgcaactatccttcaataattaacaagaaatgaaccctcaacccctaattcc

SEQ ID NO: 99318 - DNA, 7166 bp, Cannabis sativa
cacagctgccgccactctccgcctcctcttccatgattgcctcgtcgaaggctgcgacgcctccatcctcatcgcctccaatgccttcaacaaggctgagcgagatgctgaaaacaacctctctctctccggcgatggttttgacgtcgtgacgcgtatcaagaccgctcttgagcttcaatgtcccggcattgtgtcgtgctcagatattctagcaactgctgcccgggacttgatcaccattgaaggcgggccttattatcccgttaggctcggccggaaagacggacttgtgtcgaaagctgaattagtagaagggaaacttccaaggccgaagatgccattgacgcagctcattgcccttttcgcttccaagaaattcaccgtgcaagagatggtggcattggtcggcgcacacacaattgggttcgcgcattgctcggaatttagcaatagaatctacaattttagtaaaaaaactaaggttgatccggcttacaatcccaaatacgcagaagggttgaggaaactttgctcaaattacaccaaggacccatcgatgtcggctttcaacgatgtgatgacacccaacaagttcgataacatgtactacaagaacttgcagagagggctggcgctgttggcttcggaccaagctttggctgtggacaagagaactaggcctcacgtggacttgtacgctgccaaccagaccaagttctttcaggattttgctcatgctatggagaagcttagtgtttataagattaagacgggtaggaagggagaggtgagacgtagatgtgatgcctttaataatttgaaaactgcttaatctcaattcaaaacacaagaggacccctcgcatttcgtttttatttatcttgttataacatttttttcttctttacaaattaaattacataagaaacatggaggaatattttaccatgtttttaactgtattaaccgcttcagaaaataggaggtttgcatttttatgtggtaagtactgttatcacccacctagtttagcaaaaaaaaagtactgttataacctttttcaattgatagcaactgttagtttttacaacgcaagtcgggttggcaatttatccgtcacccaaaatattgctgatcatcaaagtaactaggtagagatgaatacatctttcaatacatggaaccaataatcaggattaagtcgagaaaagtgtaaatatggggcgaaaatgattaataaccttaaaacataaaaaaaaaaaaaaaaaatagaatgattggctttctaataactacagcaaattgtaagacgataagaagctaatactacatatgagttaaagacatacgggcacatttctccactttccttatcccaaaaatacaagaaataaatgaggcaacgtatgcgcctcccatgaataatttacgagatttacatgtgtaatagatgcggaataccaaggaaaaataaacaaagacatcaaaaaatacaagaattttacaataacgagttgttgtctgtagtaaagcgccattttcttctgaatgtctctctgagactcgaactccaccttgtactaggtctgcatggatgtgagatcaccccaaacaaatgagctttccctgtggaacttaaactaaaccccaacgtcctataagcctaaatgaaaaaggggaaggtccaattcgttttaacagaaagggtctcaaaactctcacatgatatcagcatggcttcctcttgtcaacttttagatgaatgttataccactttttcttcttgggtcgatctcttgaagttgatctcttttctctctcttcaccatcttctttaacctcctccttggttgtgcccttactcctgcttctactggaactccgtttgattggaggtgcagcagtatacgaggcatgtatctcattcctttgcttgagaaggtcatcaatctgtgtttaaatatgaagtgaagagacaatttaaggaaataaaagatacaggatacagcagggaatcaagattctgttcagttgctaatgtgctagtaattcttaaacaaagtcacaacaaatagatttacagaagctacgcttacctcttgcatttcttgcgcgtatctattggtcatttcggtgaactgggccagaacctatcaaaatatagcataaaatctctgagaatgcataatttaaacatttgcatacaagttacgcatgctctatatcaagtccaaacctctctgtattcggcttcaaattttgacagctccaccctctttgttagtatttctgattctacagcccttagattgtctttttcttctataaacggctctgcacaaagtgcttctatagtgtagcttacgcttttaaaaaaattgtcacctgaaagaaattttcataatacaaagtctgacagaattagtgcaaaattacacagcataataatctactgtacaatgaatctatggacagaccataaacagcaaacacgtgggtgcccgccttcaactcagttatctcgcatggttgaaacccatctagctttttgaaaaaagcagcatcaggatcctttgaagcagttacctgatgtaaaagtttcaagaaacataaatgaatgaattaagtttgtgaagaccaaaagaatctagcaacagaaaactgaagtaaaggaaatgccaaatgcaagaacagcataccgagttaactgtctgatctaatcgatacacgggaaaacaaaggaaatacatcccagctgacgtaacctttccagtttttgcactgtcttcctaaaataacaaacaaaatatgtaagatagacacctaggtggcgtttggttggagataatgaaatagaatggaatggaaaggaaacaattttcatttcattcctttgtttggttgcattataaagtattggaatgactttccaatggaatgctctttccaccattttggtgaaatgactatgccattttaaaaccgaaggaattttggtagaatgactattccattttaaaaaggaaggaaagactattccaatataacaagagaaaaaatttaatgatttttgtatcaattttttttttatgcattttaaattttattcccattcccagtcgtattcttatattttctttcctcccaaccaaatgccaccttaatgaaataataagggccataattaaagtagactgatattggtccagaataagaaatataacctatggtcttacctacatcaacaacaaactaggagatagttctgaagtagacaatcaatgtacgacccacaaacaacaaaatgtacatacaaaaaaaaattgtttaaaagtacctgtaaggcaaggcttaatccaccacttccctcaccattcacatccttatcaaaatacaataactgaaagaaaaataaatgaataaaggaaaaacatataagggcgtaatctggtaaaaattctgaaaagcataaataaaaaatacaacaccaataaaaaaacaagggtctgatataacaaaagggactaaactccatgcaaaagttctgcaacatatttataaatcaaccttaaacttgcttttgtcagatgactgcactcggcaaacaaatccagcttgagcttcctcttcagtaaccgtcacttcatagaagtgggcacattgtttttcaacctaatagaaaatataatcttataacaaaataaaagaaaagaaaaaattatgactgtttttaaacaaaaggactcccacctttctggatataggttgccccagtggaagagaacgaacagtgaccgatccattaagtgcctcctccaagacagtagctgacacagtggtcttaattggaacccctagtttactgtaatttgtgacacgaggtgcagcactcataagaagagtaatcacaaattttaaaaaatatttaggatgaaaaaatctgaaaaaaaactagtaagctctgctaacctgaaaagggcagcaaacatggtgttaacagctcctaaacttgaaagatccagctccaactcttgactctctgcttcaacagcctaggaagtaatattataacagccttagacatcaatttcatcataaaaacaaaccataaattcctcaatgaagctaatgattctggctagtgaaatcaatttatttaaatatcttagctttagtattatacctcaaacccagctgtatcatactgacgccttttatctggatctgacaagatgttataggaaaatgtgacctccttaaacatatctgatgcttgaggatcatttgcattcttgtcaggatgatacctgcagtcatttgtttttaattagttacagaataattctcattatacagtcctaagagcaagacctatgactttagctatctagccaacaagtttaagagccgggggcattttgacaatatcaacaacatcgaaggaaaaagaaaaaccacacacaaacaaatagtgaatatgataaaatattatgactcaaaaacaatccataggctattagaatctactgtggcttattttattttaattttttgtaggatccccacctaactctacaatatttaggaaccaggaactataacaattgctatgtaagtacccaggaaggactcgaacctcagaccttgtgggagcaaaccacatgcctactgtggcctattgacttgaaaagaggatgtaaccgaaaatgtacattggtccagttctacttgaagttcaaaactcataattgtaaagaactttctcccaatccgcttgacgctgtaatgctcataagagctccatctcttcaaattcccacaacagggcagaacttctctgacaaatttgacagtgttaactagctagcggtccttatgcatcaaccctcaaacaaggtaacttctaattttatgcatcacacggcatagggcgagaactagttccattaagcattttaacaaactgaaagctgaaatagattcccgtacaattgaaaagatgaagcgacatagtttaagcttatatcttggttcacttttacacaaattgctcaataatgagtttttgtttaggtaaaaagcttactaaccaaactgacccgtggtagtctattgaaaagctacttttaagccgcttacaattaagcacaaaatgtaagtgagctgccttaagcaataccaaaagactacatggaagaccaaaatcttcagccatgaatcatactttatccattttaagaaagtgttatttctagttgcggtatgaatttaagaagaaaaaaatgaggaaaaaaatatacaaactccttattttattttattcactggtataaggagctatctctagtttaaaatttaatgacaacaacgatttgaattaaaatgaaactaaatccaaacaaatgtcatcgtaaacaattgcaatatttccaagagaacatgcgagaaaaatactatcttcaactcttatccacaaaaatcaaatactaccccaaattttaaagctccaaaatatatgattatccatttatttattatttacaccaaaagtactacatcatttaaaaaaggaaaaaaggaaaaaagaaaaaaaaaaacatggagaaaaaaattacgtacttgagcgccattcggcggtaagcgcttttgatttcctgatcagtcgagttcctagaaacgctaaggacctcataagggtcccgccgtagctgcttcgcaggctcatgcttctctgatttcgatctatgcgccggcattgtcaaatccgccggcaattttcacccctaaaccctaaattgcctcctttttaggccctgaaatcggtcaaatatttaccacttcaaaactcaaaatttcacctcatcgtctgccaaattttccgacaagaaatccagtcctttcaagaacacaagaacaaccctagacaaaaaccacaagaacagcgaagctccatggagcggagctggagttgcgaggagagagagaatccccaagggaagagagagaatgagactagaggacaataaattggaggggaattaggtgtaacattgttgtttttatcattaaaaaaatataaatattttatttatttatttattaagaaaaaaaatgaaggattttgaaatgtactgatgacgaaggatgcgtaatacgcattaggggatatgccatgtcactcacgcgggcagtcgtgtctgtcttgtgttttacattttaaggtgtgggcgtagtgcgcatcctggtgcccgcctagagtgaacatagaagaaagagaggagaggtggttgttttttgaatcaaattatgggcccaattactaaaccaatgctgaaaagttaagtataaaatcgcaatcaatggggtgggaactgagagggaaatctgacctcaaacactcactcagtatttaccaatttactatataaactttttcccctcttcttcaaatgctgatttattaagacaatatttccttgcttttcctttcgggaaaaatgattataaccatgactggacccagctaagaaaagtttgaaattatgctgtaactaataactatatgtggggtggggatgaattttttaatcaccaagatacactttgatgtttttgtaagataataatagtaattctacaataaaacaaataataaaaatatatacagttgtggactgtgtaatgacctgacagctgataaccttgtcatctatgttagacaatgcataaaagctgctcttttgtcatttattttttaataaaaggaaaatactagtttaattttctttacttgagaaaaaataataaataataggattgacattttcataaattattttggttaaacgttacgagatgttctataaaataccgaatcacttgaaagtttgaaggatcttaaatgagatcaacacattgggtccccttcctgcaatttaagaaggaaaatatgtagttaaagaattaaggtcgcgtttggttgaggaattggatcacatccaatggatttagagtcatccgatccaattcaattatttattagatattgaattttgctatctgatccaatctaattgaattgagtcatccgatccgatccgatccaatccgatctaatggatgtattggattggatcgggtccaaccattagatgcattgactg

SEQ ID NO: 99319 - DNA, 4030 bp, Cannabis sativa
cacgtcatctttcatattttggggatcatttacattcatttggacataacctggatccttactgcaaaataaaaggaaaaatatatatgaagaacggagatgtatgaagaataaacatacgcttaactcgagaacaatttgatgttctacatgctaaaagcaatataatactctgtactcaatcatacctgctacaacggtacaacatgactaacccagctgatgccaggaaaactcctaaccaagcaataaaacctgagcctgctgttaattttggcagatttgacgctgcatgaaagtagagggaaaaaactctgtagaattatatatgatcataacgcggggaaaaaaaaatctgcaaagattggggtagttaccaatgatgacagaatgagtgtaggtcaccaataacataaagatcatacaccaaagaaagggtgcaagtcctagctttgaaatttttccaagacgactgtttccatcacaacgtttgtcaagcagccgtctagcattcccctgcaaatttacagtattaaactcacaattctggttttccttaacatatcataacttaggtccttttggaaaatcaacaagggtgcaaacatggcacataaaagccgagaaaaaagttaaatgcagccacatttgatgatcaaattcattccataccttctgactctttcattagcttctctatatgatttttgtagtctttcatttgaaattaaacaaaataaattatagaattttctcacttcacaatagccattgctcattagttagatttccatttacaaaccacattcaatgtatcacagccaacagaatctgtctacagtcttcctaattattgctgcccatgattttaggcagaacgaggcattattatgtgtgaaaaaatttgatatagtagatatcaagtcagaataaagatatggaataataggaaaaaaaaaaccttcacaaacaagaaagaaaacagcacacgacatacaacgaaaaactactaaccaatttaagagtgatttagttatggaaaacgtacaagaaaaaatgcaacatgtctgtgattcttatctgaagcaagctgtgctggagtaaggccagtgttatctgtaattatcaagtcttccttcttgccagcctgtactaatactgtgcatgcctctaagttacccctaatagcagcccaatgcaaaggagtgcagcctgattttaaaaaaataacagaagaaaaaaatcaaataagacatagttcacaaaggccttttttcccctcctaacaataatttgaattataaaaaaagtaccctctttatcttggcgtgctctatgtgcatcaagaaacaaaagaaggcgtatactatcagcaaaacctttgtatgcagccctaaatccagacatagaggagaaaaaaaacccatcaatcaactgtgtacaagcaacaacatcaaggaaatttctaaagtatgttccagcaactagaatgaaaggaggtaaatccaactaaagcatatatacaacttaaaggcagtagtaaatgaattagtattatgatagaataaagtattttgtcagtagtggatcgtgaaaaagaaattttgggcaaacaactgtaaaatttcattagtttatacattaaaaaaaaaatcatgctcatatctctttcctttttttttcagtcatatcactttaagcatatataattaaattaaccatccatgctactcatctaccagtgcagagggcttcttccatcgttatcaggaatgtctgggtcagcattccattttgaaacaatatgatacaaaaaagcagtctggccatattgtgctgcaacgtgtgttgtctgcaatcaagaaaagcctcattgacaccatgtatatttgtaaaatggcactttcagccttttcctattcacatgttcgtattctcaattttaactcattcatacataaattaacattttatcataaggtcacactcaaattaacagcaaatcatcctaagttcatacaaagatatgaaaacgttttcttaataataataactattaaaaatttgctctcacaagctaaataatacaactaaaacctctcttttctaatgcagactgatctattcaaaatagtaagaaactacgacgtagctaaatgccacccatcactttcctaattaatccgtgaagcccaaaagaaaaataaaaataaacgtcaatctcaaactcctaacccatcacacattacataattatatttaggaatagcaaacttcaaaagttatacgtcaaagtctctctcacgaatcacagtcaagatcacctttccattcaaatcagcaaaatatgaaagggagataaaataaacctgatagccgtacatatcaacagcattgaccttagcaccctcctgaagcaaaagctctgcagcctggattgcacctctcactgcactccagtgcaatgccgtctgcccagtatggtccgttgcatttatttcccctccgtgctaaaaaaaaaacaaaaaaatcaaacccaatatgattttattaaagtctcaaatttcacatttccagatgattaaacagaacttaattgacttcaatcttctacaaccttcaataatgacacaaaaaacttaaacttttactccaaaagtcattaaaaagaaaaaagagaaaagttcaaataatccatgatcattcataacttaaatcacggaatagcccaaattccattacagaacccaaaatggaaacaattaaaagcacctcacaatagaaacttaatcgagataaacaaagagtaggagaaaaaaaaacctcgataatatactgagcagcagcagtccgattattgagagcagcccactgaagagcatagtatccaagaccatcaggctccgaaaccgagcacccttcgcactccactaacctttgaagcttctccaaatcgccgtacgccgccgccgtgtacacatcgttccgcaaactatcatccccgctaacattaacatctccggaatctgcgccgggtgcagcagaattgaccaccagagcggaagactctccatcgcgggactgaaccccgtcgtcaacgacctcgatctccgacgacattgggtccaatctccctcgctccaatgaaactggtgtgtgtgtgtgtgtgtgtgttttaccttctggtcatgcaagagaaatcccagagaatttggtactaaacaaaattgggtgtgtgcgtggtgggtggtggattagagcgttgactccatgttaaattagggattttgaccaattcgaaagctctagggtttttccaagaaagagctttggtatgggtttgacttattaggggcatgcgaagaagaggaagaagaaggaagaagaagaaagagcgagtagatgttaaatatttgagaggacacaaatccaaaaaactcgcctatgaatctcagaaactctttttttacaataaattaaataataaaaacaaaatacaattcttttgtcttttattgcatcccacataagtaagtaaaattatttgaattaatatcataaaacgtttattcttacaaaaaataaattccaggtaatttttttttcgtacaatgtaaaaaaattttagatattaaacaacttcggtaagaagttacatttatgcttcctttctaaaaaaaaattacatttatgacatgtattgacacaaattaaattttatttgacttggttttgctatttattattattattattattaagaaaaaaaatttaggaatttttttatttttacacttcaaaatatatatatatttttgcatttttaaagaattctttataaatttcattcaactataccgacctcaataatatttagcaacattaaaagagagattatactttgaaaaaatacgatcggcgtataaagaagatgctctagccataagataagcagcctgattagcaaacagtttgacaaaacgtaaagaaacatccctaaaagaagataaaagttgtttacaatcctcaa

SEQ ID NO: 99320 - DNA, 2382 bp, Cannabis sativa
gctaataattgcgccgcaaatgaacaaaattgtagtggtgccgagccaggtctgaatatcatagtagctattttacaaaaatgaagcttcaaactaaaattaatagagtttaccaagaaaacaaaacatgcaaaacaaataaacaaaatagtaacaacataaatacaacactaagtaaatggattctttacaaagatcaaagcttgaacctttaattcggcactaatgaatacaaagatcaaactgataaaggtgactgatttctcttaaatctaaccactcaacaatgaatcaaaaacaaagactaaaacttgactaatgaccaatccattcaacaagctacaagcacatgaatgaaacactagcttgtattaaggaacacacatgacttttgtttcaaactaaaacttgaactccacaaataaaattcagaatgcaaagaactaggaattaaattgaaaagttcaaaaatataaaataaatcaaaacaaacccatcaaacacattcttttagactcaaaattaaaatcaaaaatctatttcaacaacataacctaagaacagtgactttaatcgaaacttaataaagaggaaacaatttaaaactaacatgccatcgtcttcaacaactcacacaagctcaaaattcttcaatcgatcaaagaacctcctcctaaccttaggtgataaaacatgttgaagatccatttctgatcccctatatataatcactcagttgtgggtttagactgcacaaccaagatttcttaagattttttgtaaagaaaaaaagtgtagagaaatcattacctacacctgaagctttgcatttctcctcctcaagtacttttcaaaaatttccaccgaaattccaaaacacagataaaatttaatgctcacaagccgtcaatatcagcaagcattcaatgctcactcaaaaaaaaaaaatatgagtttttcaaataaaaaaaacaaatctttaaataagtgagttccaaggtataaattaataccaatctcctacaatgtaccacattgtagtagccatatactcccttttatatccacataaatgtaatgagacccattttataataaatcctcacaaatagggcattttaaaaattccccaccttaaaaaaatcctgtatatatatcctatgtatgtgtgtgcatatatagttttatagtattagacaaattcaaattcaaattcaaattcaaatatctttatttaacttgaagaaaagatacaattgctcatatggtgatttgttaagatgcaattcttaacaaatggagaattattcatataatttattatataaagtcgaattatggattccttcaataatataaaattaagcgaagatgcaattgatgagcttaatttgatcaaatatatagtagttttgagtactatttacaggtagtaaccaaaacccttctaggtggaagagaaggccttcttccatggagcaaagcatagttatcaaagaaaagaacatcacccttctcccatttgaattgaatgctttcttcttcaataatctcctcacatctcttcaccacattttgtggaatctctgtcccatctgccattgtagctgagctatgctcttttccatgcatgcctactacagtgttgaaccacattttccttcctttccttccttcaaaaaccttcgtcaaccctcttgacttcaatattgccttcacaccaccattcggtagccactccatctccatgcctagagccttagctctgcaatatattgcatgcatatgcaccaatcaaattacattataatttgataagtgggactcatcaatatcggattaagaaaatataaaagagaaaatgtaattgaatttccaaattaattaagatgaccaatatatatgttattaccttcgttctgcttcagcacgatctgaagttccaaaagtgtcctcccaacctctacctctcatggaagaaatgtcgttcttgcttagagcaatgaaggaatatgttaagcccttagtctccatttcctccacagcttctgggaactccttcatcatccgttcggttacccggaaacttggaacaaatggtgtttctcctccttctgggggtggtgtctcgcagaataggattactttcttcggaaattcttttatctgctcatcatccaaatttaatcaattaatacaattataacacgtatcatacaacatcagttttcgatttattttctttcttaaaataatttgaaataccaaatcaaaattcaaataatttgttcaataatatatgttcttatatattaaagagaagggtaattagattttgacatataccaaatcatgtctcctgaactttttttgtcgttaaaa

SEQ ID NO: 99321 - DNA, 4304 bp, Cannabis sativa
  modified_base (4241)..(4245): a, c, t, g, unknown or other
gtgtagtcaatgacatcaggagttaaacccttcccaacaaaaaaatacatgctgggccattttaacatatctccagtctggcagagagaagatcagagtttgttatacataactttggtaggttctatgttcatggctaccatcgtctcaaacaacataagaattgtgccattatcaccagctacacaaactttacagagtagtttgaaaaagcgacttttactaactaaagttccttgcttcaacaacctaaaaacaaggtcaaatgtctttcttgtatggttggcttcacaatatcccctaaccaatgcagaataattatccacactcttaagttctaaatgatcaaaaacaagttcagcttctttggtctgttcacctatgcataagttttcaattatcatatcgtacataacataatctggatttacacccctgttcgttactataatctaagaggttaagtgcctaacttgcaaggccatttctaaaaaacccagcagcaagcacattataagtaacaatatcaggtttgaaacccttttccatgtattgttttcattgcgttatgttagaaaatattgaactcatatctgaaactgtagcattagggtaaagacaccaccacactaaacaatgaaattttattaaccacagaagtcaagtataacagtatatggcaatatttaacagaaatgaatacattggtttgaacataagcatcttattagattccacttcctaaagactagtttcccttctagtatacatgttcagtgtcaaaagaaaaaagaaaaaaaattccaacaatcaaagaaacgcaacacgcatccaactgtccaacatgactgtgacattggttaactaatatagcttccctaattggtctgagcattcaaccaatacaatcagtaaaaaggatatcagtgaagattcactactaaaaactcaaatctacagtatttctccttatttctcttttttgctgcctctgcaataaacttcagaaaaaaaaatgttccaaatatctatagggaaatcctacaaaattgctcttacagatggtaattttttttttttaaaagtgcacatttgtaactcacggtttattaaagtgacttcgtagaagaaactttgtagactgaaacagataagcatcctgatcatacccaaaggaactgatactacgaacaagagcaagggcagaattccttttatcttgggaacaaagaagacacttgagaagatggttgcaagctcttggcaacataaaacccttctctagagtataaatgaaaacatttattgccaggtctaaagtcccacttttgcagagaccataaattaacttcacacaacttggtggagtgacattgaccttatagttctcaagaatagaaaatattgtcaaagcttcttttaatcttccagcttcacaaaacccgatgagcaaaattgaatatggtgctaaatcaaaatctttcaatttgaagtcaattctaagtagaccattaattgcattatcaagttctccttttttaaatagttcctctatcacgttcattgattccttgtcccttccaggaaggctgctctgatatttcaaccacagactaaaggctaatgaaaaattccctttccgggttgaccaagtcataagtgatttgtaaacagcagagctagccttacaaccagttttggccatttgattaaagaccacaaaggcatcatcttccctgtcaaccctttgaagtccatctataagggtaccatatgtgacagaatctggcgaaatccctttcagttgcatgtcctttaaaagtttaagagcaccatttatatttcctgatttacaaaatccattgattaaactgttgtaagtcacagtgtctggcataaccccactgtcagccagtttcagtagaagcttgtatgcctcgaggaaatttcctgattcacacaattgccccaccattgtttcaagacttgcagtatcaagaactctattgcccccttgcgaaagacgaagaaataatgaaggatttcttcctatctccatcttgtaaaataacatgttcgcttcctcaactttaccagctttgcaaagtccatgaataagtgcattaaatgtcactataggaggagcacaaccaagcttctccatttcatcgaaaatttgttgtgcctcctcaatcagcccctctctgcacatagcagaaataagaatggtggaagtgcatggattcgggaaccattcttgatttgagatctcaagataaagagaccgagccatatttaaaagtcccgcatcgcataaccctttaatcacggcattataacagtaggcatctggaaccaaaccactctccttcatgtcattcaacaagttcaacgcatcttgagccctcccttcttctgctaaacctcgaaccaatatggtatacaagacaatgtcgggcttgatgtttgccttgatcatcttcatgtaccagccacgagcttcagcgtacctgttggctctaaacaagccatcaatcaaacaactgtatccattgagcccaattacatatccgtctatgttagatgactgcagaaacacatatgcttcatcaaacctacctgatttacagtatccattcagcaaagagttataagccacagaatcaggataaaagccactccttttcagcttatcgaaaaggctgcgtgcttcatccaacctcctttcttggcacaggccggaaatgataattgtataagttatctcattagggataaaacctctctgagtcatttcatcaaacatcttgagtgcatcttgaatcttattacatttaaacaagccaccaatcaacacgttgtaagtagtcacatttggactgaaattcaacttcaacatctcattatagaccgctaacgctaacaaaaaaacttgatttcgcaacataatataaagtatacaattgtaggtaatcacattgggcttacagttgaaatctctcatccgaccaaacgattccaccgccttttctgccatgcccagtttcgaaaacccttttatcaacaccgtaaaagcatgagaagcaatcggtaggccacagtctctgagttgctcgagtgctttccaatacaattcaaagccactgccattgtccttggcaagcatatccatgaccagattctgagacacccgactccggaggctcttccatttggttgaccagatgtaaaaacggaaacccaataacctgttgggctgttgttgaacaaccgaagtgactatttccgggtaaagatgagggagagctcgatcaagagtgtgttccatgggatcgacggtttcgagaattgtaaggatttcattggaggtggcggaagcgtaaccatggaagtggtgaaagaaccatggaggtttagaagcgaagaaggaaaaggagagagatcgacggtggaagaaattcatgggcgagagaaagatggtttgaattgggtgccggagatagatcggtgaaccatattgggttttgggtttaatgaattaagagactgatttatttatgaaaatcaaaaggtataataactaagtggaatatttatttattttttttttaaccatgaacaaaatttcattgaaaaaaatcggcgataagtacatcgaaaaggaaagaagaaaaatcttccatctaaattagctcacaatccactttaagtgcgtgcacagttaattcataagtagccatattagccgattgacgaacatgaatcagggacgcctcgggataattagatagtagactagaaatatcatctaaaagagaaccaaagtcattacaaagagaagatcttttaggaaaagcagagatcacaactaggcaatcggactcaatagaatggagagggagaccaattccaagcgaccaatccaacgccaccataatagctactgcctcagcttggataactgtaaaattccctacaaaatcaacatagaacataataagattcaccccaaaatattaaactaataaaaataataaaagctaaaaaataaaataaatatcgagcctaaccttctcttcatccttacgacccacataaacattaaacctaacctcataccttatttggaagcataagaaacaacatcataaaaaattcctaaatcagcaaaatattattcaaaagggatgttggcggctaaacaacttgaacttgacagtttgtaacacttaaccacaaannnnnaatatttggcggctaaactacctaaaccctgtttccgttttgctctgcacacctccgtc

SEQ ID NO: 99322 - DNA, 1632 bp, Cannabis sativa
tccgcatgattttatgtcattaccattcacatgaatgagaatgaaaaggactgatgaaaaatgtgaaggaaaaaagaaatggaacgacaaaacaagtgaaacacctgttaacaattagttcttttcttcatgataactaatttcaattttaattattaaattctgtcttagtaaacaacaaagcttcaacagataccttgcaatactgccagcattttgtttatattcaaatctatgctactcagtactaacagatgatatattcagattctcagataaagaaaacttactactatcttttcattaagagtatctctttcctcaaatgtcttatcaagagtgattttcccaagctcactacgcattgtagtttgtgcaagctgaataaccgcatatatgggattctcaactccataagaagccaatttaggatccacaatctgtatcaatcaaaacccacatgaaaaaaatgagaactttcaaaaccccaataaccaactaaaccaaaaaattgaatatttcataacccaataaccaattaaacaaaagaaaccccatttcttaaaaagaagaaatcccaataaccaactaaaccaaaaaattgaatatttcttaacccaataagtaattaagagaagaaatcccaataacaaaccttgacataaagaaccccatcaatcaaaatgctgacattgtccttagtaattgcagactggtcaggaatgggaatggcctcttctttcaaggaatgaacataagcaatccgatcaacaaagggaatcaagaaatggattccagaaggaagagtcttgacatactttccaaaccgctcaaccacaaaggccttcttttcaggcacaatccgaacaccccaattaacaggaggcgtaatctcatagattctaaacattaaaaaacacaaattggaatcactcactcactcacacatttcatcaaacacataacaaaccaaaacccaagaaaaacaaaaacttactaattgttacctggatccatcgcgaccggtacggagatatcgaacggtgagcgaataaggcgaagaagaagatctgttggaaagaagaggaagtgggtgtttgaaaatggagggtgaagaagtggagagagctcgaatggaggtcttggtattggtatcaatggcgtatttgagagttcttctaaaggagttggtcttccatagactactcatcttgattggttgttgttcagttctgggtttttggtagttttgaatttgattcaaatcgaagggtttttgggttttgggttttggtttttcacaaaaatggtgtctttcttcctaatttccaattaattgactttgtttttctttctctccaagcataaacaattttggaaatcttttaaaaatacccaagaactatttttttttttttttttaagttttatgaaagatttaatgcaagtaaacgacatttgagtgtgtttaaccgctaatttttttttttttaataatataaagtagaaagaaaaatacagtttttgtttcagtaattatatattaaaaaaattacatgttgaccgaggttttcggcaaccaatataataataataatttagagagctataaggaattaagagagagatttt

SEQ ID NO: 99323 - DNA, 1827 bp, Cannabis sativa
aaaaacaatacttctttttgttgggttacattatttatgcctccataatataatccttattaaattagattttttatttattttttaattgactttttatttatttatataaatagaaacaacataatttcaaaatagaaacaactattataaaataaaacaatataacctcaaaatgaaaataatttttataaaaataaaaaaaaaatcttaaaaaaacgtaaaaataaaaaatacagtatacaagacaattccccttatttaaattgtgctacatatatctcttcaataaagttatcaatgctaaaaacaagttgtgttacattattggctaagcaatgatattatttaagaatttaagaatggaattgaatatttttaacaaataagaaaaaaagagaattggaaacaacatgctacattatgggaagaaaaagacaacttatgttttaaaaataagaagaaaactaaacttaattattaattatttgaatttgaacttacttagacatcactttcaatatttgaatttgaacaaaggaaaagacagaattcagagttaattattaattactctttttcaatatttctaccagtaataataaattaataagattgaaatcaagatacactgaaagagatgaacagtagtccataaaatataatccaattttaattacaacttaaactatgaagaaaaaatcccacttttcttccactcttttagacccttaatgatttgcattaattaatttattgttaaataacacttcattaatatttagacaaagtttattactaacccattatcaattttgtaaaatgacacacttaaaaaccagaacaatatatcttattatatacacactacttaatactcatcacaagttgttaatatatgtacatcactttactaattttttccactttctatatatgaaggaaaaactttctctccaaaaaaaaaaaagagtgaagaataaatacacatatatatatataattaattaataataacttaactcattaattattatatatgatatataatctcatcatcttatattggctaattaaaacaataaaatctccaaaaagatgttttataattatgagtagtcctttctctctttgaagtactaacttgatgatgatgatgatggattatctcccacatcacacgtatgtctgagtattctccacaagattccatgtctttgtaaagactcactaatccatctccattaattcctacacacaaatatatgtaattactttcagggacgaaattaatatcaggaacgatttatcagggacgacattcatcacctgagacgattagagagtctttcagggacgacttctgtcgttcttaatgaccatttttgttataatgaaagagagaaagtgttatgaaagaagttttatttttgtgtatatattattttacctttggagtgtgttcttgatttggttgaagaaatcttattaagaagaatagacttagttgggagaagaaatgaatccttgaaccataaccaacttttccaactattattactactctccattttcacatagggttgcttcatcatcatctttttcttatgccttcttcttttgaacattttaatatatatagataaatgatctcatttcaaattaataaattaaacttttttaatttgtgtgtatgaaatgaagtattcataaatatatatatatataaatatttatatataaagtatccaattatgcatagcaaacaaaatgaagacgacataacacaaagcaacatctatcaagacagacccctcttggtgtgtt

SEQ ID NO: 99324 - DNA, 5488 bp, Cannabis sativa
ggtaaagtaggcatatttttcatagtataaaatgtattggttcaaaaaaaaaaaatttgaaaacttttaagtatagaaaatcaaatttcccgtttgaaatttatgtgacattttattcatccttaggtgttctaaaatattatttcaatataatttgtgaggcttacgcctcaaacgcctcgaggcttacaaaattacaaactatagtatactaaattactaactagtaactagtcataaattctattaaaatttcagcagcataacgattataattgaacgttcccaaaaaatttaaagatattaataattaataacaaaatacaatatatataaaacaatcacaacaacatttaacaatacaaaaatttgttatccacccgaccacggtatatatatttacagaacctatttcactacagatgactatttaaaatatttaaactcccattaattattaatattaattattatattttgtacttatatatatgtttagagaatattctcaatatatacatgcaattttaatatattatgatcataacaagatttaaagaaggtgataataaacattttcatggtctaaaacagttaacaatttctctggcttgttaattaatatttttgttttcttcaactaattctttcattcatgccaaatttaacttcatagctaaatggcataatataaagaaacatcaaattaaggacttaaaaaatgtattcttaacaacaatatcaaactttatgatgatctttaacacaagtgtactaagttactcataaaaaataaaaatgaaaatacagaaaaatacttgaataacttttatttaacacacgataccttattgcaattatttttatgtcgctagttgttctgcctgataattttttttccttggatcaccagaagttggacaacaacaacaacaacaacaacataaggaacaacaacaatcaggaactttttccggcagaaaaacacaacatttcttggctaacttcttcaaagaattccacaaattttcttcttgttcttctcctccttcttgatttgatgttgttgttggtttctccttaggttgatatagaattgatacaaacaagtaccaaactatattaattgctatccatacacttagaagccaatagtatttatccaaatgactacaatttatatttttatcaaaccaactattaccttgttttgaagtaaacttatatactaaataaactaagaagacactaccaatgttccctaaaccaaatacaccaattgctgaatcaaccatgtagggtttcaaacttggcggggtttggtgatcttttaagaacctctcaatgctttcgtatgccaaaccataaaacccgcctagaagaaaaaattgtggaacaagatagagtatagacatatcgacaggctcagtgattttattaggatcacaaatattcttgttaacgattatgtcaattctctttctctcgacttttgcagcaataacacaacatagtaaagcgcatagcagtgataaagccattccaattcgattgagcaccttttttaagcttgtgcaacacgaaggaatgtaagaatcgacagtgtcaaagtataatttcgggaacaaatagttggccaatttgtacatgcttaggagcaagacataaggtaccttgaaaaatcctattttctgtttcattgagtatgcttgctcaaggaaataagtatttcctaaggaagatattaaacctaacaagcatatgggaaataatgagatgatgaatttggtttcttctatccttgaaattgtggcattgctttgttgtgattgttcttgggttttcttaacaaagcagcaacataataatctgttccatagaaaagatatccaaaaattattactttatttaaaaaatttaatcgtaataaattaaatttagctaaaaaatgattcattaatatctttgtgttactctttaattctacttagattgcatttagttgggggttatgaaatggaatagaatagaattgaatcaattttttttttgcttgattgcattttaaaatattgaaatacaattttaatagaatgactacttttttactattttggaataatgactattacatttaaaaataaaagaaaataataccatattccaagatgaaaaacaattactatattttatgcctaataaattttattcctattcttattctcattcactagtaattatatttattaaattaaaaaagcaaacatatattaataatcgacactaattttatcttcctatacaaatatcacaattaaaaatgtatatttttacgcacatatacataccttaacggacataaggcaatctttgcgactatgtcaagtacggtatttacgaacttgataactttattgagtagcttttgaaccatatcaaagagtttggtcaaaaaatctgttctttctctaccatatgaaccaaatccagtcaagaaaattagggttgcaattaccatacacaatgttgggactttgaatcttgttgaccaattcttgactaagtaagatattgtcaatccaattatgttaacaagaaatgtaactccaatgctcacggaatagtgaatgaccgagtcaactaagcccatttcatcgctgatgagtttttgtaaggaaactacgtaaccagatttagccaatgatatgagaggtaatgaggcatagaccaatgttgtcttcttgtcttttggttctagggttgagaagaacaaaaaccctaatccctattatttaacaaaaacataattatattacataatcactaagaaagtacaataataattattgacataatgaaattgtaaggcaaattaagaaatacaaattcccaaatctaataattagaattttgaaattaagtccccaacttttactcattttgtattttgatccccgaacgacctccctttttatagttttcatctagtaatctttctcaattttcacccatttttttagttacaaactattcattaatttgtagcgaaaattctcaaaatcttaaaatcaagcataatattttttaaattccaaaataaaaagataatttaaaaaaggttactttttatatatatttttctcttatttattttacataagcgtgtgttaaatagctagatgtataacctcttttcgaaaacagtttattatacgtgcatattataaatatcaaaacaaatataataaattgtttgaatcttaacttgacatattaaactatcatttttcttttgaaaatttatgaataatctctcataattacattatatatggtcacatctaaaagcaaaataaaactataacttattcatgtaagaaaaatgcgtacttatagagtacatctacctcatcggttatactttgaaccaatctcgattatactttgaaccattgagattggtcatcatctctatatcgaaagtcaaatcttcaacaatcgacaatcatcgaaataggtttatctcattcttaaccgtcgagatagagtaattttcttgtagtattatagacaattaatattaattaagcactaattaaccaataatatgttttcaagcaattagtgaatatagggtacgaaatcttacaagaacataagctaaactcgaaacaagaaccatccaacgatcgggaattcgtttacgatttcttaagaatctgattgggacggggagtatagcagtgaaaccccaaaataaattgacaatggcagcagcatgcctgaaattgatctccatttctctagtcaagtatgccatcaccaaaaataacccatattctgctaatgtatctgaccaacccaacactatacataataacacaataattaataaataatcataattaacataactatatgcatgtatgaattagagagattaattaatttttaattaattattacctgctactcttagaggagaccccattaataattattgttcttcttccaatcccaagttttgtatatatgcttttattgtacaaaaattggatatagtcacttgtatatatagctttataattaaccttattattgcagtgttggacaagtaaagtaaatataaatacatttttgattaggaccactttttaataaatatgattatattgttaaaaaaaaattggttatatagtaaaagtgttttttttttttttaaatattacaatttaaatttaaatttactatatatttctatcttttattttattttatatttaaatgtgtttatatgatataattttttttaatatcgcaatttaaatttaaactcatttcacatatttaagaaagtatttttttattattattttttatactaaaaaataaatatttctattattattattttaaaaaataaaaaaaatgtatgatatttcaaaaataatgaaaattattgtaataattaaactaaaattataattaaaaataaattatataattaaaaatatacttgactaaaataaaaattaacatatatatataactaaatatacacgtgtattatatataatattaacataatatatacacatttatatatgtgaaaaaaatgagattttgaacttttaaagattcatatatattaatataaaaaatatatctatttttttaaatttttataagggtttttataaatatatgaatatatgatttgctttactatcactctaagaatttcccaaaaaataaattctcctgtttttcacgtggatgtacggtcttatagtataggtacagcatcaaaattattgggccattttcaaaactatggtacttttgaaaattactaaaaaaatatgtgtattttaaaataatttttcttatttttaggccctagtgttagcgagttccacgtaaggtgtgaaaactaaatatcatatataagatgcataaactacttcttttatagtcaattaattttgagatagaagctcattttatcttaaattctaattagagccaaactaaattctaacgagtatccgatccaatctaaaaattagtcctagaagatgagccaaaaagagttgcttatgattcggggatagtgagccaaaatagccacttgtgatcgagctgtgcaagattggtgagcaaaaaatagtcactatcataaggggaatattagagagttttacattggtaatgtacgtagaaactaaataccatacatataagatgcatgagctactcctttcattaccaattagttttctggataaaactccatacaccttaccatataccaggcctgaccttaggctaaggcaggctaggctcgtgtctagggtctactcaaactcaggacccaaattttttatatagtatatttttttgcattgaaaaaatagtatttttgaattttttgtaaaaaagtgtccaataatactcacattttattttggaaaacttacaaaaatac

SEQ ID NO: 99325 - DNA, 6227 bp, Cannabis sativa
  modified_base (4504)..(4504): a, c, t, g, unknown or other
ttccaaatcatattgtccgtacgtaatacaatctcttttatttattggattttgtgccttattagtatgtgattctagtttaagggttcatggtttgatgtagcttcgtgatcatgctttgttagtctccagttttttgagggaaagaaaggaaaagaaactgtctgcagcttaatatgctctgatctaatgctgagatacatacatgaggccttatggttaaagggtttaagaaaagtactctataatataatctaatatgttttgactaatgatgaaaactcagtacatggtttgagctattggtaagttacaatgaggctctgattttgtccatacatgaggctctgattttgttttattgtgtgtaagttagtttcttatgattgagttgatagttgtgttggcattttggacaccatcaatccttacattaatatgatattgtctgctttagacataaatagtcattaatttgtttttggagtctacctaaaaggtcttttactaatactaatggagatattgctcatatttgtatagccatgaccttttccatttctaactaatccccgtttgtaaccatttgtggaacttgttttctgcagatactgcatgcgtgctaagcgaatgttaagtgaactagatcaagaaccttttattgttgagcttgatcttcgaggtatgtattcgctaatcaaacctctcattcttgtagctgcctatactatgcttatgtaaaactgtttttatgatggctatgaatcgtgggcttttgtagaggatggtggtcgaattcagaatgttcttatagatttagttggccgaaacactgttccacagatattcgtgaatggaaaacatattggtggctccgatggttagcatttagtcatatgatttcatctctccctgtacccaatgattggcattttataatgtttatggctgcttatgttttcagatctcagagcttccatttcgagtggtcaactacaaaaacttcttagtaccggttgagatattgggacattgagagactgcttttaagaactctacatgggtttatagttcataatggttctatgtcattgtgccaatgctaatgtctatgtggagaatttacttaaaaatatttataatagtttaaagaacataaatcaaattcttatgacatgcaaataatgaaattgtaatttctttgcttgagtgtgtatgaacgaattgcttatctctatctggttgtaatcaatttgagttgtctttttacttcccctcctgtcatcagtttatctggtatgtttacttgaattttattaactttatactcttcacagctacttttttatacttttgaagcaatagttttttctttagctccctctatagggatattgggaggcacatttcttgtgctttatttatgtcgagattcattttctcgtttgtattagaaatctgttcaaaggaataataataggccagaaaggggaaaaacaatatgtctcaactctttaaatgttcatatttaagttaacatttacttatccatacaaaaatctcccttcaaggacaatgtcctttatcaaaagcagtagagaaacatacattataatggtataataactttcattagctctattttcaagaccatgcactttgacttcaatttgattttgtataggcattctttttttctcactgtttgttttctaagaacttaagcactgaacagatacaacaggtacatctatcttgcctaattgcagcaaattctatagctattaaaaaacagataacaagctgcaaatgggtagcccaaatgtcaggtggccgacgaatcagtcgccctgcagcagatgataagaagaaaacacccttttgtccaggaaatcaggaagacatagcatatgtctttggtcgccaatcccctttctgtgcactaagaattccttcctgattcttggaaaaggttaaacgaacctcccaatgcagagatttcaacaagttctcaacttctcctattgcacgggactcatcccggacaatcaatttgcctcccggtctaacaatcctatcaacctctgccagcaccggaccaagtttgcacctgcatcaaaaatccaggcaacatttaatgtatatataaatatctatatacctttgtgaaagattagtatcattatgttcttaatacctctttgttaactttgagaaaagatgatctgcgtgaagaagatcatatgttctagggtatgtactgaaggattcacaccaatcatggtatattccgaaaagacctcgttcatagattattggaagtgtatctggagaatccacattcaccacattcatcacccaaattttaacgtccttcatagctgctgcaaacctgaatttttgaccagcagttatcctaactagcttaccatatagaaatatattatgaagagaagaacatgaatagattgcatcaaatcatatcatattattagttattcgtaccctccataaacagccctcatgtccatcacattcctcacattagaccaactgatgcctaatctgctcatataagaattattcacgacacgtttccaatgctcgtaatcagcagcaaaatcttgagacgatggcttcccatagatccccatttgggagtcattaagccaatatggtggtgtctgcagtcggcgtggccagttctcaggccattgagttcctctctcggccacatcaactgggactctgtgcatgcatgtctgtaaaggtacgtacctaaaaaagatgaacaatatacacaaataattagcctacatattgtcattagattggctctgaatgaataatacaaattacttagttaccaggcagcatttgcatcatcgtcatccttacacatcgaaggctgcttatgctttcttctatcataacattcattggatgtgggcttgcggtagatggcagcaccgatcgaattcagcttgtccttcttgatggtcacaagctcccaacacatagaggccgtcagtgaagacattgctatattaacataagtgcatcaaaactgttataaagtttaaaccactctgctatgaattatagtcagctaataatatagcatgtttacctttccagatttctacatcttcttcaagcttctgatacactggtgtggctgaccagacaaagtatcccccgggtctcaaaacacggttcaattccaaaagaagcgtacctcctataatatagcagttaaacatgtagtggattaatatgttggtaattttgttgcaaaaacaaatgaatctggaaagtgatcaccttcagcgtgccaggggactctgcaacgagcgcagtgaacaagatcgaaaaccctgctggggaatgggagcctctgagaacccatgacagccgaaattgcaggtattcctctttcgagggcgaactgaacttgagcttcgtgttcatcttttggagcaaaagacatggcgagaacatctctgtcaaatagaaaccccccaaagctggctactccacaacctacgtccaataccaccctagtgcgctttccccatgcaatatcttttactgcctgcattttcattaatattaaaccatcaacacaccaacaaaatagtaacaacaccacaacacaactaagaaaatcaatgtaagaccaattaagtagagggatcaaatcacctgttgaagaaaatcaatgtaatgtagggctccatgtatgaactgggtgccaccaccaggaaaggtcaagaattctcctgtcaccttcacccaattttggtgccctttcacttctgccagcaacgtgtgtggtacgttatggtaccatatctgcatgcatgcatgctcacattatataactcaacacaaattcaaatatgtatataaaggtttcaaatttagtagtaattgaagaataatcgtttcctcttttatacttgtgttatattattattgttgtatgtttaaaacatgaaagtgtggtagagaaagcagagaataggttgtcagcaatgagatgagtagttcatgtatcttatacatatatggtaagatgatatgagtattaccttgtctctgcttgttggccattcgatgggtctcttgtaaccctccgggacaggaacgagacacatcggaccttcctcagggcaatgcctctcacggtgctcgaaatgcctggtcgaacgcagtttcttaaccgctttctcgttatccaaacaaggtatataatcagctcctgcagttacgttacaaagttgccacgtgtaaccatacatctcatcaggaccgtccgattcatccttcctcctctccttctcattctccgactgagccgcctgagtagaccacgacttcttcgactccttagattccttaggaatccctgaactgtccccacccggaaaagactccacagttccagaattcgacccaccattatcatcatgcttctgagtttgttgttgttgttgttgtngttgttgttgttgttgttgtactactacatcttggttggtcacgtcactaaattcttgctctgttgatggatcgtcgtttttctcagtatttgtcgttttggggtcgttttgtgttgttgtagtagcagtattattattctcaatctgaggctctgtttcaatgttctctacattgctctgttgctcttgttgttgttgggtttgttgtcgtttttcttcttcaacattattgttattgtcgttggactcgtcctcttgtcgttgctctctattcttttcttgatctaattcttctactttcgaattagtaacattgttgttgggttcagtcaaagtcaaatgtgttatttctgcagataccttagttgtcgtttgctgatctggtttaggtagatcgtcgtttttaatagcctcataaggaagatcaccaggattatcttcaaacgacgtcgtagtagcagtagtagtaatagtttctggcttgttcactgattgaacttcttctgtattaagattcgattcgggtttagattgaacttcttcggaatcagagttggaattcgattcggaatcagtggtggcggtgcgagtggtggcttgtggtggaataacagaattagaagtgagaatccaaacgcctagaaaacagagtcctacgaagaccaccattgttatggtggaggcgtaagaggacgatgatgatgacctcttgttactacgtgatttgctctgtaatggcattgttgttattagtaatttcaatgcatgtaatgaaaaaaacagagttttggtgatgatgattgtgattatgtgaaattgattggaaaatataaagagaagattatgggaaatgtttgtggatgaagatgaatggggacaaattcaaggtggaatgttacatgatccaatggagtcggattagggaatttgttccaaaattattatacacacacgagacgagaccatatttctctttcttttcttttggtttaaaaattgacagatatttacgtatgtaatataaaacgataagattatatacctaattaacaactaaaattattaaatttataattgttttttttacgtaagttataataatgtattgttgattacagttagggttattaattagttagttttttttttttttttttttggatccgtgcattatttacataatcttgagttttagggaaattttatggtgcacctgtaaaaataagtgtactgatacactattttttaatatttttttttgaaaaatttataataatttaacaaacaagaaccaggtttacaccgtttgttatacaatgtgtctttttatataattatacgcatatgaaatagattgtttaaaccatattttttctattgtaaataatattataccgattttttaaaatctactttgaaaataattataatatatgctatcatataaacaaaaaattaaaattataactcttcaaatataaaaaatatacatttatttttgagtacattgaacaccttttattatatgagcattgctattagacacgttaaggtgtttaatattaattatactaatgtggtacgttgtaattagttaattgttttctataatcaaaatatataggacttaataattgtactaataacagtataacacctcttgttaggttctactttaacatctctcttttatcattcataatatatcatgaacttccttga

SEQ ID NO: 99326 - DNA, 5754 bp, Cannabis sativa
ggtaaaataaatttccaacaagttgatgatatatttttttttttttcgtgggctggtaaggtctaatttgctgcttgacttgctatccatagatgaaagttgtgcaccaaaaacctgccaggcaaaagctgggcgcccatgcacctgccagggtgcatgctggctggccacacaatacttggaagttggtcgacctgtgttggccatagggttggccagctcctttgaggtgcctggttcgtcatttcatcgtctctcctaagtacccggacccttcgttggttgaagtgcatagtagatggcttgactttcttgttggtgagttgtactctcacgtggcattgatgttggccatatagacatgccgcatcaagtgtgcaaaaatgaggataatagtaaactaagaaaaaaaaaaaatagaagtcaatgaaaaaaaatacaaagacatataagaaaagaaaaaaaaaactttatagaaatttttataccaaaataaaaataaaaataaaagtgtaaaaaaaatataaatgtataaattctattgtaaatgtaaattttttctaaaaaaaattaaattaaatatcctttaaaaaatgtacggacgatccaaaataatatgcaaattgtaaatcctaaactggtgtatatataaagaatccatttggcattggccagtggagctatttaattatttaattattacccaaattttatctctattaattaatgcgagttatatgatatgttttgtccaaaaaaaaaagttgggttgggttgggtacttgaaaatacaaataagctttctgcaaaaaaaataaaataaataaatatacaaagaaactagtccataaataaatacatttcccctaatatttatattttataaaaatacatatatagaagtagttttagatagaaaaataaaagaccaatattaattggacttcttcttcttcttcgtttctttgtagaataacaacgaatcaatcagtgttgccctcagactcggagacaagaagagatggtgggtacgcccagaccacagttcgttctatttggatcctccattgtccagttgagctacagtaatggcggttggggagccattctctctgatatatatgctcgcaaagtaatgctatactcaactttctctctctttatttttataatagtggatatataatggaacaatgtttattattgatattgatgtctatgatattcttcgagcttttctatgcataatgaagtattataaaaattcatcttgaaattcccttaaatctttcataatattttaaattggtctgattgttttctttttttgagagaaaaaaaattcttttcttctaagtgaaaaatgggtttctcttaaaacatttctcaaagagttcttcaggaagatttggttggttatggtattattattatttaattaatattaaaaaattattaattagtgctagattgggttttcgtgtttctttgtggggcgcaaacacacggtcatttctaataaactggcaaaaggaacaataggttgtcaagggtcattggttgaagattgattctatattatatgtgctgtggttttgactttccatgaagatattactcttaatcttgatttgggatccttttatactattttgaaatttttgctgatgcatctgtggaattgggtattgaacttttgtaggcagacatcttgttaagagggtattatggttggaactcacgtcgtgctgtacaggttctggatcaagtttttccgaaggtactaacacctactgtagctacaaaagatattcatctcttttacttattattattactattatcatctgtctctccttgctttaaaacgtctactctagccgcaaaaacatcattttctttctctcccaagctcttaccttttatcaaattcacagtgcttgcaaactcatatatagcttttatataactagttaacaactaatattacatgtttctatatcagtttgttgagttaatcttctgatcataggatttttggagataatggtctttgttgattgacagtcaacaaagggcattactttgacgagcattaattttgttgcctctgttatttggttttaggatgcttctgtacagccatctttggtggtagtttattttggtggtaatgattcaatggggcctcactcgtccggtctaggacctcatgtaccacttcctgaatacaaggagaatatgagaaagattgcaaaacatctccaggtacttccttcacccgaataacaatttatcgttgtgtttaaggactgaagaaataaagcctagttaggggtgtgtgtgtgacgaagaaacaggcttgttatgacttagtgaagactttggtttaagttttagccatgacatgtctatttggacatgaattcttcaatttgtctttcactaatgggcatcttggtttttacttcttgggatcaatatcatatatttaattgttaaaattagtttgtatcaactgtctatagaacgacaattgactcagaacaaggagagagtttatattaaaaagcttaattctgatttatattattgtatatcctgtcttttattttacatggtttgaaagttccaacatttaatttaaaccatttgctttgctttctaacttgaatcattttctcacaccttaataattttgtaaccagagcctttcagattcaatacgcattatttttcttagttctcctcctgtgaatgaggagaaaattcgtggaaatgcaaggtatgcaatatctacattatttttcttaccagagtaatacgacagagttctaaaacaggtgttttatacagtgggttcttcagtgagctagtaagaactaatgagttgtgccgacaatattcagaaggttgcattgaggtgggcaaggaaacaggtgtaaaggttattgatctctttaccgcgtttcagaacagagatgattggatgaatgcttgttttacgtaagtccccctgtcgttcttttttttttttctttatgattttgacagtgaattatgttgacctgaatcgtccattcgtgttttagtgctttgttttttatcctgctattatcttgagttctctagtagcgttgattagtgtggattaatgattgttcgaattagccaaccatacctggtagggtggtcgtcaatggcagtagtttgtgtaaatgcacgctcacaagttatcaacactgctttctccatttgtcagctaatgatccctgaatggatgacttagtgagacaatgatcatagctaatggaggttgtcacttttcgcaatcctggtgacaaacactcctttaaaagcttgtttaactgaatataaatcagtggtcttactcttacatgacagaagattacaaaatgttgcggattaagttttgcattccctttgaagaggaaatttagcttctttcggatttttatttttcagggacggggttcatttatctgaagaaggaagcaaggtagtggtggaggagatattgaaggtactcaagaatgctgagtggaagccatgtctacactggaaatccatgccaacagaattttcagaggactcaccatatgatcttgttgcagccgacgggaaaacgacattaaacccatccgagtggacttttcacagggaaattcagtgggactagttggctgtattctttctgcctgcttttgtaattcagaggcattgcacttattaagttgtaattgaataatgaagattcttattgcatatcacaaccctcgaaatttggaaaaagaagggtaagagtgtgaaacaagattaaggagtttgtatactcttgctgaaaattctagttgtatagtgcaaaagactattatttatatgcgcactcggctctaataaacaacagagtctagagaccgagtcttacgtgagccattttaaaaaccgcccatgtagggtagctacgggctattgtcgtattagatttggagcttggaaaaatgctttgcttttttttttggtaagcaggaaaaatcctttgcttgttatcaacattttcttcatgaataacatttagaatgaatcaatggagaaattaaaaaaaaaaatcataaattgttacaaatatatattgatagatttaatcacatacattattataaaaaaataattcataaaccataaaaaaatttaataacattaaaaaaatccataaaattaaaataaaatataattcagaagggtaaaaatttgtaccaaggggaccaaatcgaaatattggaagctgcaactataaatatgcaaccaaaataacataatttctttaattaaatttggtaactaaataagtgtgctatcaaaatttagtaactaactatactaactgctaccaacaatatttggtaacttaataagtgtgctatcaaactttagtaactaactatactaactgctaccaagaatatttggtaactaaaactctctcttctaacggaatatttaagaaaaagccaaaaatagttataaatatatttctaaacgactagaatcatataaactaatcaaataatcaacgattagcaaactaaatctaatatgtattaaatgaaagaatttagttaaggtactgatcaagcaattgttgatattggtttgaaatagccaagtatgcagcttgagttgggtgcatggaatcccagaagatgtatttggaggcatcaagacatgttggcatacccacaacacatagtggacctatttcaaacaaccctgttccacaacatccttcaagggtttcttggaatccttcattaattaatgtataataattattagatcataaacataataattaagttgtaaatacatattaggtaataagtatacgtaccatatttgaaggggtttgtgatcatgtccatcatggtgtcatagattccaaaataaaccattttagagtggggcaaagagttttgaagggtagagaggagattttgaagtttgaagttgtaagcttgggagtcaatgttttgttggtcaacgcataaacgttgtaacatgtgtgaacttggcataaagctgcctattgacatttgcaatggtaagcaccccactggtgggagacctgccaccccaaactttcttgcacctctatcatataaactctatacatgcatcaacaacaaaaacaaattaaacatatagttacatcacttttcgttctacctgaaaaacttaaagagtcaaaactagtactgttcaaatagtttcaagaccatgaacttgcgattaatatgatgtattgtactggtttagtataaaatagtatattaggctgaataaaaaattaattaattatttgctaaatataaattataaatttcttcaaatattgcatatggagagactaaactataaattattgtcacgcaaaataaggtgataattataatctagttgttaggttttttttctttctcacttccctatcttactgaaaagaccgaccgcttgtacaaaggaatctgtgaaaggtttgataataactttaaaaaataaaaagaataattaagatttttgctcccaaactttaacatgtatcaaattatcaaattatgcctttaaactaaaatatctctgaactattgaaattgttgaatttaaggatttttgtccaattttagtaaaaaaagtgtaacatgatgaaagttgagggggcatgatttagtacat

SEQ ID NO: 99327 - DNA, 2002 bp, Cannabis sativa
tttgtttttttttttttaaattaaaaaaaaaaaatccatttatttaccaaagccttcacatagtttccttctacaccacactacttcttcttcttggtgccattcccatacaattcccctgcatcttcttcaaccaaagggtaattacatcatcaatttctctttattgctttccgttgatcgtttttcgatgtggattgggttttccttcattttcgctttttctctcccttggctttctttttttttttttttgctaaatttgcaaatttacgcgctttgttttgtcagcttggttcttctttgaatcttctttctggtttatcgaactattcaatagggttttttgaactactcatttggggtagtaaattatgttatttagtgggtttttcttgcttgtttatttttgttataaatatttggcatgattattgattttaccaaagaaacaagaaaaccaaaagaaccctttgaaaggctaagagttagtatgtctttttgtttcgtttgtttattacaatatgttatggcatgtagtgttgtttttggattttatatgatttcgtaacctgtcttaggctgtatttggatactatggtatggtggtgccggtatttttgaggctgatcttatcagttaaattacatacaatttcatgcttagtttttatatgtttaaagattattttttatatagatttttaataatatttatttttgggttctatctggggtttcatagaatgaagtttcttacaatgttattgtggacagtgagtggtagcgtacagctcatattggatagcaatttttgatgatgtgtaagactttgggttgttgactttgtatcattgataaagccaaagacttagatagttttcttgattatatattaatgattttgctccgaagaaataagtacttttcatatcttaatgagaggttttgagtctcggttttggaatttggtataaagtattgttttgtttaggtcgtgctcattccgtttctccccactttgtgtgcttcttatccttttgttacgtttcactattggctgtaagtcttcgtctttctcaaggttgtgtgtattaggagaaaaaaactatgtaacctgttacaatctgttttgtttagttatctatgctcttgtttttgaaaaacgtttttggttgctgatgattagattctgttttggttattagttttcttgaaacttttgttttgattctatctctttctgtgttctgcttacttgagagtttcaatctttgtctttgtatctcttagacactttgatgaggatctcgtagattgcttctgttttctctaataaaagttaattacaaagaattgattgtctgtaatctctattccagttctagagaggagagaagatgggtaatttgttctgttgtgtacaagttgaccaatctacagtagctataaaggagagatttggcaagtttgatgatgtacttgagccaggatgccattgtctcccatggtttcttggaagtcagctagccggacatctcactcttcgtttgcagcaattggacgtgcgatgtgagaccaaaactaaggtttgtttcttgtaactgggaataattcggatgattgcatctctttagttgctaccaaacaaaattttatggattttcaattggctgtcctaaacagtttctaacaagaaaattaccaccattctgttgtgtggcggtgctatagtcatgatgctctcattagtgttttttcttcttattttgtgacatgtaccttcttaaaaagtctcatcaaatatggatgatcaaagctaaattatattatttttgtctatattacttaatagcattttagaattgcaaaggcctttgtgtggtgggagaaaggaagtaccttcttgggtcattgtttttagttattttacttctgttaattatgcagttacatcttaactgattttctcaagtgcactttaggacaatgtctttgtcaat

SEQ ID NO: 99328 - DNA, 2387 bp, Cannabis sativa
tatttttaatataaataaaaaagtcacccatgaatttttcataaactaagaattctattatataggcacactttatatagaatagatacttccaaatgaatattatggttactaaacaaatttaattatatattaaatattcaaaatagtaaatcattagattttgaattaatatcgaataataaaataaaaatttaaatttttatacttaatttaactacttaataaaaaaaaatcaaaaaattatcttttttttacactaagtgaaactcaatcattttatttgccgaaaatatatatatatattttaattttttttcagtcaatagaacttgcagtccatgtaatgtaaaaattagtgcatacataattataataaactcaccatttaattataattatattctagtaaacactactttgaaagttgaatataagaataatctttctaattaattaatttagttatcttacaatacaaatgaaataataagttgatttggttttggtatatacatcatatacaggtggggtggggataggaaagagatgagtggttaagataatggtgatatcgaaatatatataactcctatgacagatgacatccaagccatgaagtgaagttatgtatagcgtaataagccaactcacaccaatttggatagtagaaaagaaactgtcctactcattttatttatatgtgtatattatcatggagaaggtatgatatgattttttttaatgcacaaattaaagagatttatataatatatcatatatggccaacaaaccatatattctgtagtaagcattctcaaatgaacttacgaatgagtctagcatatatatatatatataaatatatgttcactgaaaaagctcaattcaacagaagtgtgtgttttgtattttttgaaggaattattattattggttggcggtggtatagctagctggcctggcatggcatacgatcaaaataagagaaagtagtttaatgttaaaagaacaaataaggctgcttttaaataataactgatcaaaacaaaaagaaatagggataaaattaatacttatgatagatatagtactacaacttcgtcactcttattaattgaaggtataaataatttaggggaaggtaaataaaaggtacgtactgtataaataaatagtgtataagtttctgaactaacacatttattatattttaattactggaatcaacaacttgagttgcctttaatttggggtttgtttgacaatatttggccattgttatacctatgtctatggtcttttcaagtggcttaaataagaaaatgctaaatgcaaatgaaggtttccaatggtaagtaggtgttatatattattattataagttgtcccatatattttaatttaataaggatataaaattgctaacactagaaaagtgttacctttaatagtattgcataccccaaagtgtataataatattactattgttgcaattaagtatcggatctcatataatttaatttaataattttaagaaatatcgctaactaatcgtgagacgacactattagtgcctaataacaatactcaatgaaaaatatatttgtatgtaattgttaacaaattgagctttttaggccactaaatactttgcctcgccctacttcaaattgagtattttttttttttgaaaagttttaaattaaatatttatattgctaaaaatttacaaaacaccacaaattttaaaaaatacataagacatataaaatcttaaaaaaaatagcaacattgcaaatagctagtaaaagtgaaaaattctattttttttaaacatctattacatgtacacatgtattcagataaacaaaaaactattacacatttgtaaaaaaattcttacaattttgtaagctgcatttacaaattaatccgaaacaaagaaaatctcattttgtaacaaaactttatagaactaactccacaagtagaaagatatatattcgtaaaataatttataaattttacaaactaattttatatttttgtaccaaatatctaataaattacttacaaatgaagaacaaagaataaaggttatttgattctatatatacccgcatataaatgtaattcatcactaataatatgtattacatttgacacaatttaattagtacaatagtaaaaaaatatatatcttttaaaaaaagctaaaatatgacattccataacaactttggtacttttgacaacttttagcacaatattattttttattttttttacgaaaaaggctaaaatatgtcattgcatcataaagttggcactttattggagattctatatgtgttgtagtattgtaaatacgggatgaatttt

SEQ ID NO: 99329 - DNA, 3593 bp, Cannabis sativa
acaaaccatgtcagaggacaagacgtctttgatttagaaaattaatgtttttattaactttaaaattttagtgtcacatgtatataaatatacaatggtaatctcacttgacatttaatagtgaaatttaactgataattagataataaattatttttataattttagaatattatgatgaattttcttgttatcttattactttgtatttcccaatcgggttggggttcattttgatgtagtcttaaaaagaagtgtggtccatctaactcataattataaatgatatcataatctcatgatttcaaccctcataatatacctttcaagaaatccatttttctctgattaaaaactaaaaaataaaagtataccttttaaaaaatattgtaattactatctttatttaatacatacaaattatctagataagtggatgatcaatgatcatgaccatgtgaaataaatagatatataggttgaagataacattttttttcctaattaaattattgattgatagaatataaaataagaaaggaatcccttttcaaaaataattaaataaataaataaaatgaaaacaatttttataaaattaaaacagtataatctcaaaatgaaaaagccccaataatataattttaaaattaaaacaacttttataaaaataaaaataaaatataaaaaaaaaacgtaaaagtaaataaaaataaaaaatacaatatacatgctaatttctctattaaaaatcgtatttacttcaacagttttaagtcttttaattattaaatttgaactccattatttctttttttttttatatataaatcagaaaatatatattaattattatataatttagggagttctatagtgcacaatccatttttttttttttggttttcaacaccagtcaattgagttgttttaagatattctgtaattttcttacaattttaaaattattttcgagacgaaaaattcaaacagcctattatgtatacaaaaacgcatgcgttacaatttattttgaattatattttcggtactacatgttataaaattttttaaattaataaaactttaaataactataatatatatcattatcgtataaaaacttgagacaactataaatatttgttatggtattttatatataatgtacaccctagtagaatcaatataaaatgtttttaaggttttttttaatggaattaaaagttattgtgactactttcaattaatgaaataaattacatgatatatcataatatgttatgttcttattataatttatttcattaattaaaaaattagttcttcttaaaaaaaatgtctagaaattttattcgaatattatttttatgtctcccagttgttcatgtgtcaccatttcatcatatttgtgcctcaaaagatatcccatttgtgggttgttttgcgttatttagttttgttgtgtattcctcagttaaatttattttaagtataaacgttttcttactattgaagttaaaggctttcgtgacggtattttaatgagttgatagtcaaatcgacatatttattttggacatatattggatggatcactttcttagatttagttttgaggtttgttcatatatgggtattcatcttttacatatatgttgtgttaattctatttacaacatcaaaattttgaaatgtataagtaaaataatacgaataaggaccaatttttcaatatatgcaaagtttaaggactaagattattgattaccaatatacgcaaagtttagagatcatgaaaaagctaattaaatattgcgttggtaaaaaaatatttttatcaacacattaccttaacgcaaagtgttttgaatatttgccaaagccaaaaaaaaaaacgacttttgttggaagaaaagcgctaacaaaagtttcgatatttaagtgtaccgaaaaaaaaaaaaaaattaacattcgcaaagtttcaacattgcttttaagtactttcccttctaagttttcttgttcatatttatgtgttaaataaaatcctactgcctttatttgatataagttgatgtatctatttagctacttatgaagaatatatatcataaacatcttaaataaacatcattataggtttgaaataaggcataatcccatgattaataagaattttgataggttgataactcaaaataaataaaaatatatacatgatgcaaataatattaagaaatattaaatattgttaggaaagatatatgatttctttaaatttgtgtttgtatttttatttttatttttgacataaaattgtgtttgtattttctgaattaaagaagaagaaaagcttcttaaaaagggaaagtgtatatgattaaaaaagaaaaaggtaagttgatatgggaatgggaagtgtgtatactaattaggtaagtgagatatgattttgtgaggtgttttaagtaaatataaaaacattagagattaaattatattattaaacttttttaatatgagaaatgctaaaaggtatagtggtgtttagcatcctcctacttgtcaatactattattagtctaattaagtatcgggtcccacatagtttaatgtgatagtttttaaggagtgtcgctaaccaattgcaagatgacacatctagaagaaggtgctaagcactactaatgtccaataacaatacttaatatagtgttgacatggcatgcatagtgtgtgtgagatttttgtgtgagtgtatcattactctatatatttagggataatgctttagtacaagtattaaaaataactttacataaaatcatttttttaaatgtgttattatttcattttatgtctatatatcttatttctttatttttttttaagatataatttttttttatcaaaaacactatcatatccaaaaacacttctctcctctcaaatagagatgtacaaaagttttttttgtgcattgttttttgattttgtcattagagaatttttgagtctcaacttttatttttaaaaaaagaataatatcaaagtccttagttttggttacacttttagtttttttgaggagcaatttttaagaacttctaaagagagacagagaagaagaaaaagagagaagtgatgagaagaatgatagtatttttaataaataattataaaaattaagtgtgatacaaattatatactattatgaagtgtgatacaaaattaagtgaccaattatgttatgtgtatcaaaagggtattaaattgttatggaaataatgtgtagatactataagttaatttataatttgttgaagggtcaaattataaatacctaaaactcattatatatataatgagcatataaataggtagtggtccccatattagggtttctgtattctctcattccccatcaaataaaatactttagagaaatagtgtattcttggaagatcataaccttctctgcaatcccaacaataacttcaagttagggcccgtttggcacaacttttggaaaagctaaaagctgcttttcaaaaaagctgtgacaaaaaggtgtttggtaaacagttaaa

SEQ ID NO: 99330 - DNA, 3045 bp, Cannabis sativa
tgaaaagtgaaaaccctggtgagaaagccttcaatatcaattttgctttctaaaattcgtactccttgattgcttccaattaagagtttatgagttttttgagctctcaaaacgtcttcaaaacactaataatcatgtgtttatataggctaatagagttacctaaaagatactaaaaagatttaaaatttaaatctaaaaaaaaaaaaattgcaactctacttaaaagctatcttttttctcgctatctttttatcttttttttttagaaatttcctactgcgacgactgatagccataactctctcgatattactcggaattagacgattcaagatgtttcgaaaagttaaaagagagatctagaacttttatattttgacttttctaaaatctgatcaaaacatagttgaatttagatttaaaatttcaattttattttcttgcacaattttctactcattttcgaccacttatttccattattctctactgttctaaattatataaggggtacaaaagtgattacattaaagagacattacaaaatattcaaaatcaaatcaaataatagaactgtaacagtgattctattacgaacagaagagtccataaaactcaaaactgtctagctcaactaactgtagggtgagtgaggaggaaccactaccaaacaattctgcaaaatgacaaaagtcgagggccacataagagagaaagggaatcatattgactattgagtgttgaatgaagcctctaaagattagaaatgttgtgtttaacatgaagtggacaacagtatgttgtacgttcattaaagttaaccacccatgtgattggaagggtaagaaacagttggtggtagttagaaggacaactctacagcaatggctctatcaatgaccttaactagttcaaactaaaccacaacatatcaacaacaacaaaagttagcttaaaggcagtccattgtattaaaaagaagaaacaaaaaaacagtataaattgtaacccaaaatttcttcagaagatgcaggcagatgtgagtttggaagaagcctttgctttcaaggtttacattagttaatttttacaagcagagaagctcttgtagttgtagtggagaactgtatcagaatcaggatggacaagctcaaaacaaggaaagttagtccttctcaagtttttttcttcttttaaatatatcattttccataaactttcttttaatctttccgacattctgtgccatcatcacgattgcttccttcgaacaggcagtttcattagtttatatcctagtttagagtgttcggtattcaccgagagcctgatgaagcccgaggtttccccttcccggagttgaggtgctgggtaacaaatatgacacccattacaagtataagacaaccaaccagtgtgctgaagaagagagcgcctggttgcctggtctggacaaaaccataaactccggtggaggtcactagaataaggtcggtcagcccatcatttgagaagtcgtcgcagacaattgcatgtgtagggggtgccgggaggtctatcgatgctaaaatacttcctccaggagaaatgactacagcctcttgttctcctcctgcaaggatcacttgtctattatcatgaacacgcaaggaaaatgctttaagcgttgggatgactgtaccagcttccatcatcccggagggagatggaagatttgaccaagtagcagctgttgaaaggtgccactgccaatcagcaccatgtccgtgcaaacctggggcgtatgatgttacctgagaaaaggcacaacaattactaaacaagccatccaaacaaaaaagtgacctctatacacacggcgaaccataactaactaggaagctcatatgtaaggtaacgaaagacaagcacatacctctccccgatttgtcaaaaatacaacatcaccatgacttcccttgcgatgcctatggccatcatctcttggtatgagaatgggtgttgctacctccaaagaggctaaatcttgatttcgaccaatgtgcctactaaattctgcatgctggaataagttaaaaggagaatgatgacatatagaggcattgaaaagctgttctcgcactggcacaccagaggttgcaacagcccaacaaggccgaagcacttccatagatccactaacaactgtctgctctgccccatttcctcccacagcctgtgaagtcaaataaaaataaatattaataataacatggctcagcaaatatcttttactctcatggggcgtaaaagttttgtcactctcccttgtgagtcgtaactcaaaaatttattgctactcaccaaaagactactttcataaaagattaccttcctatttatatcacagtaaatgtcccgtgagttagaactaataacccaactcaaactagaaatatattcagcagacgggacaaaatcataaataaacttggactctaaatataaagaataatttcacaatttgagaatcttaagaagagttaagacaccaccaatacatagcaagataagggccaagagaggggaataaagagttgaggaccagaaagacatctaaaattgaattgacaatctaatcttatccacgttttatgttttctcatctacacaactttatgatatgctaaataattgttctttatgccaaatcaatcgtgcaataatgagacatccaataactttgtaacttttgcgattagtgtgtaacctttcctagcaaaataatatccacccacacacatgaattggttggattcagaaaaccaatcgaagcagtgattcaatgtgtcaatggttgtaagacatattgaagtccaaaaaaaaagagcagagaaagaagagtttgcacctgtacatgatctaggactccgtcaccattaatatcagcatgtaggccaccttcttgaagatgaagctggcgttatcaatgaatttttttgttaacatatggagaaattatatacaaattatcaatacgaggatgtgtgtgtgtgtgtgtgt

SEQ ID NO: 99331 - DNA, 2598 bp, Cannabis sativa
acacataacacatgcaatgtatgcatttctgatgactttactggtttagtggtaactgggaagtcctttttttgtaataccaatcccatatttgcttaacctttgattgagagtatatttcactagagatttgagtctgtttaactttttgtcttgcagcgaattcctcgcaaatttataaggaaatattggaaaactttatccgaatcggtgcttgtcaggcttccatgcggttcaaaatggaatatgaagctgaaagaaaaggagggaagtatttggttagagaagggttggccagaatttgcaaagcattactccataaaaagaggcagcatgttaatttttaaatatgtggggtattctgagttttatgttgtcatatgtgatactagtactgctgagatagattatccttatgataacattgacttacaattccaagttcctaagaaggaagctgttgaagatgattgtgtcgaaatctcgtatcatttttcgccttcctccggtgccaaaacaagggagaaatcttcatatttaccttgttctcggcctcagaacaagagaaaaagaacaacaagtcctactggtaattacctaatattgctctatttttttttcatgacttacatgttttctcatacactttattttcatctgttgctagaattcaaaggtagaaatagcccttacatatctttggctgaaaaaaatataattcttgcaagagtttcctttgaatctgaaagaccttttttcaaggctgttatgcaaccatcatatgttaaagctgagttttttgtaagtactcactatatgatctacattacttttcacaatacttgtaagttgtagagtagttgattataaatatctaattatatctcctctgtcattttttgagcagaatgtaccacaaaaatttgcttatagataccttaaggatcaaggcgatgctgttctttgtgttccaaatggtaaaaattggtctgtgcaacttagaacaagcattctaagacatgagtattctatttctagactctgttgtggttggcacaaatttgtgaatgacaataaaatagaagttggcgatgtctgcattttcgagcttcttgatggaactgaaattgcatttcaagttcacattgtccgccgcgttgtatgtgaaggtcttcaatggtgtaaaggttagttgtgaatgtgaacaactatagtagtattgaactcagttcatgtgactaataatattgtaattttcttggctaccatattaattaacatgagtcaagttctcattgtttagcaggtgattatgttgctagctctagtaagccaaacaaagatgtgagagttaagattgaaatggactgaagaactagcacttattatagtggacatggttgtagatcatgtaaaaaaaagttttttttttttttttttgaggagaagaactaagtaaagttgcttatttgtttgtaatgagaatgttattatctagtagtaactttatcagatgagagggttagtggtgcttagcactcttttaggtatcatattgttaaccactttcgtttgtccattaattacactatactttggagttgttccttacaactgaaataattccttccaaactgagaaatgtcttgtctctatccaagatgatcaactgagaaatgccatggagcttcgcaatctcttctacaaacactgctactactgtaggtgctgtaaaaggggtggcaaaaggggataaaatgaccatatttggtgaggcgattcacaactaacaagatggagtcataactattggaaagaggaagtcgttcgatgaaatccgtggatatgttctcttctacgatctgtatcaaccccgtaagccgagatcacatgaccgagatactccacttggggttggacaaaaatacatttctttcggttagagaagaaggcttttttaggcgctccaaaaccataccaagatgagtcacatggtcttctaaagagggactgtagacgagaatgtcatcaaaaaatactaacacaaagcgcttcaaaaaatcgtgaaataccttattcatgagagcttgaaatgttgctcgtgcatttgtcaaactgaaaggcatgactaagaacacatggtgtcattgataattatttgagaagagaaaaataacaaataaataatttaaaaaaaaaagatgaaaaaagtaataaacaatattaagaaaataaaataaaatttcaaaattaattaaaataataaattttcagaatttttctagattttttttgtcctaaaaaatgacatgtcgtatgaggtcttcatcttctttagcagctgggtcatttgacccgtttctttggtacacgggttgtgcggatccaactccaacctggacggaaaaaccatttccaacaaccaaaatgcatgatttcaattctaaaagaatataaatgcaaaaattaagagatttatatatatttcatgcattgaaaacatgtaaaatatggactttaaattcacaaaacatatcaagtgtgaaacttggttatctaaaaaaaaaaaaaaaattcaatctccatgatttttcaaat

SEQ ID NO: 99332 - DNA, 6071 bp, Cannabis sativa
atctcttaactaggtgaagatgagcctgaattgtcctatggtgaagcaggcataaggcatagagctatggaattgtggcaccagttagttgaagaggccttcatggggtggcctcccaacttgttagaaccttggggttcgaccaaagataggtttgagacctcttccttgtgctagggcaattaggtcaatgttggtttgcaataagcctataccttattaaatttcatctcgactccaatgagttatgggtgggaaaagcagccccccgaataataatttttagtttcctaaaagaaaattatatttttaagtgaacaagttattagaagcatcatgaaggataagaacttaagtaaaaggcatctccaattgccttttctcaaagcttggtttacttttatttttatctaagtcaaagcttggtttagcaaaagcacatcacaaaccctgctagattagaatatttgtggatattgtgtcatattttgtgacctttctcattttaaaggctatattacagcaactccaacatgtcaaaagagcttttcaccaattttgtaagcattcaaatccaagttcccaaaatgggaaaaacagggctctttcaattcaaaagcagtctatgtctctccaattaacaattgctttaagataacttcacccattccatcagcattcggaaaaaggtgtcctgcacctgctaactcatggtagttaatccatggaagtttatcagcaatatagcgttgaagggtaactggaacaagcctatcttcatccccttgccatagatgtaccgacccatcattgttagggaaagggttcttcagatccactggatcaaactcccaattcccaaatccaatcatcatggaccgatgaagcgattcgaattccccttgttgcttggcataatgctgcatggacaaatttcaaacatggaatggatagtacactcagttcagttatgaaatcctagttagtgacaattatgttgtcatactcatatttcagatggtaaaataccacaacaaaattgtttttccgctccagcataataagttcaattctgtgaagtttggacatgtcacatgtggataatgttttgtcacaatcaagttatgtagcaatggtcaatttactaacttgctataaatgaatttaataacatttggtaacaacggaacaagaattaaattagcaacgtgttaaatgtagtgctactactcatctatttaataaattttttttgaaggaagtaccttagatttttctttctctggatcagttgaaagcttattcttcataatttctagatcttgagcagaaaaaatatcaggatttctagctataacgctggatgagggaaaaaatttctgagtattccaccaataggttagccacggcgcataatgagcaacacgtagagcccattgatcgcccactggttgttggtaataggcttctctagacaaattggcaggaaatgatggccaccaatagttgattactggagccattaatactgctcctgcaagcctgtcagcaactaagttgaaacaagctctaaaacctgaggatttaaagtgatacggaaaacaaatgcatgtaaacttcaagaactaattggttgactgaaacatttgatcattttgctagtaatagggatgaaaaataacccaagaaagatgatgaaactgactgaccaactacaagcctagtaggccaatgcagttttatctcctatatcatttcaattgtgtcccagaaacatacttgagctaatggcctgatctagtatctctcattcagatatccatattcccaattcaacctgaagattatcaatacatattttttttaaaataaatgccttaatctgattagcgactcaggaggagcttgcatacaatcctcactaagtacattatattagttttttcctctttctctgtaataatgaaacaaagcaagtcaatcttgcaaggaattttctcaaatggaaagttcccttttacttatattactcttcgaaacctgttactatcaattgctaattcctttacccggaatatagatattgaaaacctctatacttccctaatttttttacaccaaatcattaccattttggttattccttacctgcttgggatatacttgagacatccccaaatagcctgcccgcccattgaattaccaattacgtagaattttgatccaagtcccagctgatcaccgagttcttcaatatccaaagccaaactctttactgtccgattaggatgtgggtcactttctccataccccggtttgtcaaaacccactacgtacacccctagttcttgaataaattcctgagaagataaatctacctttaaaggcaacccttataacatttgtagataaaaatgcgtgtattcatatacagcaaattgtaaacatacatacagggtagtttacaatcactacaaaatcttttaatagagcaagcatgatcatccagtttcggcgttctgatcaccattgattaagagttaccaaatacatttttagctttgctttcacttaacttgcatgacttatcaatcatacaactagaagaagattccaagctagaaaaaagaattcaaaaccagatgaacagataatgaattttatatttaagagttcaaactaatgaaaaatattagctaatctttccaaacattagattatgtaagaaaaatattcttcatactaaaagaattatgaataacctaatgaatctcaatttgaagtaccggggagagggtttttgcaaccactgcgtcatgtctggaggaagtaaagccatggacaaagataaccttatgcttggcatcttctcttggcatgccatactccttgtaggccaaatgccttccatctcttagctttattctgggtgcagtgatgggtggtcctccaggtgagccacaaattttaggaggtggagggcttatagtggcgtatgcccttgatagtgattgaatggacaaaactggaacattaattctctttaacattactgctccctgaaataaaatgaaagaaaagaagtgagatattaaattaaatcacatataattcaacattagatcaaacatgatatgtgtatttggttccagcagaattgtttttcttttagaaaaagaaaagacaaaactagagaactaaagacaaattgaagttataaaatcaaatattttttttgcacggtttcaaaacagaaagttaaagagaaaatagttttctgctgaattctcacaaagtccacaagcaaaactatacaaacagtctgttaactaacagatgaactgtccaagtcttgagcagtgtaagaattttggatcaaatttatatgcaaagttttagcaactgttgatatttaatggctattaacttaaataaccttacaaattatcctttttactgtatttccaacaaggaattataatcaatatccaaataatattcaacaaatatcaacatcttcataagagatacatgaccataaataacttagcaattgattgttcatcgtatgtaaaaaaaataccaaaaagccatacttgatcattggcgaatggaatcctaaagaggactggagaaccaccaaaaaatttggaagagttataatgcccttttctgattggcgattgttctaccccaccccagtggcttcgattcaaatcagctgtttcgattataggaaaatctctttagtagtcggagctcattagtaatcagcaaaaaaaaacgacattactaatgaaaccctaagagagatcaactgcggaaatgaaagcttacctctcaggcgctcagtcactgcttcattctgaatcaattactgtgaagaagacgacatgggattgaagagaaaatccaactcaactaacatgaattcgcccgcgtccgtggtagttggtagttggaaatagtattacaccaattttttttagtcataagaattgaaaaaggtaagttatcaaataaaaataaataaaaacctgtttaaataaaataataataaataaaaaaaaaattgaaaatgtaatgagaaaactaaatggtcagctaaatacacactaatcatttttaacaactatcctaacaataaaattatataaatatacagatatttttaatataattaagcattatttacaagtatcgttattagcatataaagataactatataattaatattgcatgatattactatcagattataatagaatggacataatactaacatgctcgaagttcatagacatgctctaaaacgtctttgactagcttattcggttaagataactaattttctcaaattagacatctagactcaactggtcataatctccaataataagaatttatgtcttttatttgatcatggatattaataattagcattgattgtgtttattattgttgttcatgtatgctcattgaaaatagaaaattaacaaaatagtgatggtgatgagtgttgaattttacctctgaaaaatagtatcaaaattaatgtggatactgctttgtttgaaggctattaaagtatagcatttccaaacaacacatatgggtggccacattgataaaagaaaagagaattaatttctttataagattaaggagctacttcctttatcatcatatggttttaaagtggaatattttttacacatgtgaagatgactccctctcttgatgatgggcgtgacccaagtccgtataacatagtatcagaatcaggcccacaactgagaacatgtgctatactccagttaaaatagatctcacatgtgagggggagtgtcgaaaatgcactctggccccattaaaaatcacatgtgagaaaattaaaaagggacctcacatatgagggggagtgttacaacatagccttcccaagcaacacatgtgactctttattattggaacaacttgttgaggccatgggggttcatgaggcgcttagttggatcatagaatgtcaatggcagcaggttgtgcttaaaattgattatttaataatagtgcaagccttgtgcagttttattttaatgatttaatttgattgggcaagttatcactataaacaacttattattaagttggaaaatattttcagtttattttgttaagcgatcagctaatatgatagtttttatgtattatatccttattgtatttttggtttgtagtctgttccaatcaatttggtagttaaatttaatagataaataaaatttttgcattttccattaaaaaaaaagaagcaatcctttccaaagaaaaaaaaaatagcatttacttttatgaaaaaaaaaaaagtgtgaatatcaatgcaattaatagataaaccattttccttttgcccaagaggaatcgctgtgctttcatttatgtaatgagtctaatgactccatttgtcttagatctattactgatttaagctttattgttttgttttgtttctttactttggttttttggtccacatatgaatttcttcttgttgagatttgagagtttgtacttattctattgttttaccttccatctataatgatatagtacttctcaatgattatgactgcgataaacatatgtgccttggtttgtcaatgtattggcattatcactctttgctagcccttatcagaattgatttttacttatgctttgtaatggactttatcccttaagttccctattaaaaacttttcataataataataataataatatccttttctttaatccaaatacttaaaaaacttccataatttattttaaagttttattaactgggccaatgaaaatggaggaccattactgcaaggtaaagacttgtgagttgtcatgataggtgattactcctttcagtctggatatcactgacaattttttatgtaacttcttctgaataactaacaatattctatagaaattattacactaaatcatgagttccaaaatacttaatttgatataacacatgaaatgttgctaaataccattactaccttttac

SEQ ID NO: 99333 - DNA, 3711 bp, Cannabis sativa
aaagttcaaaaatgcacatcatagatgacaaatagaaccctatacatttgcttggcccaacgattttattgattcaaaatggaacccattgttttcattgacccaattgtattgattcaaattatctcaagggtcctgttatattggtattatctgaactaaatatatccaatattattttattttattttattagtaaataagaatagatttggcaaggtagatgaaagttgcggctattgcataccttctgctctttcacgtcagtgatggcaccagtgtttccatcaatgccaatccatgcattttcaccatttgcatgctaaaataataatttagacaagttgaagaaattcagcattatatccttagaatgcaagaatagcataacaaaagcttatgaattgcttcctacctttccttgcagtgtagtcatggttctaatcacattgacaccacaattttgtgccaaagttcgtggtatagcctcaaaagctaaggcagcagcttcatatggccactgttgcacaaccatatggtatgttagtcaatattaaaagcatcatagataagttagaaatatatatatatagcattgagaaaacaagtcgcttcactaaatcctatgagaacataaaatgtgttatcacaaaagaacttagattaaatcattgaaaagaatgccacctttgtcctctaaaaaataagctcttttttttttctctttttctgtgtaggcgtgtgggtgcacctcgaaagttcaaagattccactacaaagtgtattagtagggaaccaccataccttttcgatgccttcaatggatgaactcttttgctttaaggttgcagatacagttaactctgtagcaccacctcccggcacaagctttgggttttttattatattccttgctacagacatggcatcctgcaatcggaataaccatcagaacatagtattgcccacaaccagaaaacataaagtgataccgcaaattcataacatatacctgtaggtttctttcaacttcatttaagagatccttactggcacctcttaatagaacagtacaagcttttggatctttgcaatcaataatagaggcaaaaaactcatcccctatcttcttaacctcgaacaacccagctcctgtaccaacatcagactcttgtagttcatctactctgttgacaatgacagcaccacaggccttggctattctattattgtctgtcttcctcaacctcctaattgcactgataccagctttgctaagataatgacatgccaagtcactaaggcccttctctgtgattaccaagtctggtttgaacttaattatctgtgcacaaaggttctcaatatattcttcttccattttcaacaggactccccaatcctcttcattgactagttcagcatttgtttggttctctccttttttgtattcaaggggagaatcaagaagtatgatgcgagggttaacaatctttctcctcattttgccaggggcaacaacatctttgttgaacataacccccctaagaactttggaatcttccaactgcccaccaggtatcttctcaaccttaatgtacttcttgatatcgacttccctcagcccttggccaagatcaacacccacagtggtggtagcatcaattgccaaatcctatgacaaataaatagctcaagattaagaatgaaataaaaaaaaaataagaaatgtgtgggtgtccatttgccaaaatacgtatacacccaacctcaaaaaatctccttccctcttcgaacaccaaaatatgagaagagaattaaagtattttcgttaactaaaaaaaagcacataagatacttacagcaatcagatctccaaactggctagtgaattttgtacctatacagctcttaaccagccccaacattgttgcgcctgataaatatttccatgaattatttatgtaaccatacacaatcagataaagatatccccaattaaaaggaaattatcttaagaaatgaagagttcaagaaacatacggtcctgtgtatcaatgggcatagctattttgtcaagcacatcaatagcatcctctagagctttattgtaagctgaaaatcaattaaaacatgtgttctagataattaacataatgaatctcaagcaataatttttagcaaataccttttatatagcattacctctgcagataactgtaggatgaaaatgtttgtcaataaatgcttctgcaacatggagcatttcaccagctacagtaaaattttaaatccagaactcagtgacagaagaaatatgacatatttttgcgtacaatattgaccatacaggcatcaacaaacaacaagagtgggacacatcagtacttcaaaattgtgaccatttttcacattaaccatggttgtagagattacagtattgtgattctcagctaagtttgagcagcaattactgaagtaagatctgaactttcacccactcaagatagaaacattaactcaacctattcccattgtacactcacaacttaccaagaacaataacagatgttgttccatcccctacttcttcgtcttgagtacgacttagctcgatcatagactgccagcaacaaaataaaggcaatgctcatcaggggtagaagaaaaccaaaatgaaaaatagttatgtagtgaaatggggcaaaacatatgttgtataattgtatattgtacctttgcagctgggtgggcaaggtccaattcacgaagaatggcatttccatcgttagtcaccacgatacctgtaaccaatgcggatacatagagctcactatataaggctactgaaacaaattacaatcaagcttcccagacaagtaaaaaaactcaaataatacataattaataaatatatatcaaacaagtactgaatatataaatcatcatccatgaaaatgattttacctccagcagcatctagcagcattttcaacatggatctgggacccaaagttgtacgtataatgtcagcaacagcctaacaagatttgaaatgggtttatattggtaccattaaaaattagagagaaaacaagcacgcaaactatacaataccttggaagcttggatgttggcatgttgcactttgcttccagattctctcttgagagaatcctctgctcatcaaaattgagaatgtatgaggctaatcaatttcatttcactataaacaaaatcatctcatttaagaaaaaaaaaatcaagagcatagagaaacttacttagaacaagaactggtgcgtgcatttttttaggtctgagatttggcctcaaatgcaaatgaaagcgagagagactgataagaaatttagaccataaaggagaacagttagctattgggttcactcagagagtaaaagatcagagagtgagaatgagaataccctgtataactgtaccttttgacgcgagaatgggatttgaggagttgtgcagagttgagagaacaaagatattagggttcgtatttttggaggggagggggtttaacattctccaattgaaaactcgtactgataagaagaccattttacccttcctagctttttccagattattcaaaattaaaataaataaataaataatcttatatgctaaaaaaaacattcaagcataggaaataaggtattaataagaatgctctttcct

SEQ ID NO: 99334 - DNA, 1713 bp, Cannabis sativa
taatatggctagagcattttctaaggtgtttatttataaacctttttggttcgaattggacacctctcacccgtatcaagaaattcgattttactttagtaactttgctatttcaacaaattttaggaataacaacattctacagggagtattattccatccaggatagtgtttatgctagtttagtaacctcaatgacaataggatacgaagattactcattccacactcagcaagggcgaatctttgcaacgatatggattattccaaactgttttgtcttctcaagtttcctgtcgatgatctatgattactttcaaaggcgaaacaatttgaagaatttgaagaatcagctgaccactatggatcttccaaaaggcaggactcgagcagattatatgacgtaattaattaaagtcatattacattaattaataattaattgttaatttcaaattaattatttatatgtctaatataattttgttttaattatttgtagtaaagccgaatttgtggtattttatctgcggaagttagaattggtagatactcaatacatcgatgttgttgaagaataatatcacgagaataccagagaatatggtaatacagttatatttggtcaagtcattgatgactacatggagtagggattgctttaaaatccaagactagaagcaaatgttgtagcagcacatgatccttgaggtattaaaagcatttgtctgctataacatttgcctctagtcttagatttggaagcaatccctactccatgtagtcatcaatgactttatcaactgtaactacattaccatgttctctggcatactcgtgatatttttcttcaatatcatcgatgtattgagtatccacaaattccaactttcgcaaataaaataccacaaatttagttttgctacaaataattaaaacaaaattatattagataaacaaataagtaatttaaaattaaccattaattattaattaatgtaatatgactttaattaattatcacataaaatctgctcgagtcctgccttttgcaagatccacagtggttagctcattcttcaaattgtttctcccttaaaagtaatcataaatcattgacaaaaaacttgaaaagacaaaacagtttggaataatccatactgttgcaaagattcgccattgcttagtgtagaatgagtaatctctgtatcctatcgtcattgatgttactaaattagtataaacactatcctatatggaataaccctcccagtagaatgctactattttcaaatctgtagaaacagcaaagctactaaagtaataccaaatttcctggtacaggtgagaggtgtccattttgaaccaaaaaggttcataaataaacaccttagaaaatgctctagccatattaggcaaaatataacgttgaaaatgagaaaataacagaacaataacactggttttatatctccatatccaactgtcgatacactcactgtaatgaggtaggcaatgtctattttgttggttgattctttagttttcgaactaagcatcattgtacaaacgaacatcacaaatgaaagtacccaataaagttttctccaatgtgctaatattattcgatgtaggtgctcttttttcaatgaaaagacaggtagaaggtccgaaggatgttctatgcctaggacaaaaaggattcaatccttt

SEQ ID NO: 99335 - DNA, 6826 bp, Cannabis sativa
tcccaaacttgagatttactcgccctcgggtaattttaccaaacactaaccccattacaacactaaaaaaatgacacagacataaaagtcaagttaatcacataaaacaaaatttgagcttcaacatttccaacaagctagataacacaattattagataatcccaactgttaatcaaatctcacaattcaattaatcttttttagatatgcccacagaaccataaccagtaaataataagtatctgaaacaatttatacatgctaaatcatattaacaatccatcaaaccctttattctatatgtaaacttgaatcaattagtgcaagaatctgggtccattattgggagttcagaagaggggaataggctctccaactattgttggaggaagtacgaacctctataattttgttgtgttatttcttaattttattttctttgattggttcgagttgtgtattgttttgttcttgtgtttgtgttgcactttcttgtttattgtgtttgtgtgtgcaggggatttgaggttggtgttggattaaatatccaacagtaagctatttgatgagcacccgttataattgtctggttataaagttaaccatatagacttgtcaagtaaacaattaaaatgtgatgttagatggtatacaatttcattggttagttatacttgttaaataagaaacaaattgaatttcttaaagatttggggaatattaagtctgtttaatgctctaaacttggtgtgaaaccaattagtctatgtgtatttaatacacactcaattcgatttaaataaaacattaatcacatgcatcatattacactcttgctcatttaatggtagttaacctgttcatgttattaaagtcaagtattgggctacaaaaaatgagagatgcacaactaatgagaagtcccttttgtttatttatattttcctattaacgtggtatagaaaattagaaatcttgataatcagattacattgtcaaaacacaaaccaatatttcattatagtgatacatgacacaacagaatttcagatcagaattgaacccctttggatctaattctctgggctacattcctattattgcttcatctgttttacttgaagaaaatagtgctgccatttttactctgatgaagtttaattttcaggcaaagctggtggttgtttctaccatcttgattcttcttctcttgggccattttccagcaactttttcactatatcatactggtaacatacatacatataaataattctatatgctttgcatatctatgtttgtacgtattaacataatgctttggttttatgaagctgcagcctccaatagcagatcacatggctccaaatccaagagcttggtttggagaaaaagaggtagttataggtgttgggctagaagtgtgttaagcaatattaataccgaagagtccccaatccggcgatcaatacagctttcaccacctccgccgcctgttgatggccgacagagagccatgaatgtgcctccagctccagcctcagctgcctcatttcattaatttttatcttttgttatttatatttgtggacctgattaataactaataggatcttggtatagacatacatatataatgtttcatagtgtcaatggcttcctcaattggaagtttgtgttaccgattattaaaacctcattgcatacacaagtttttgtttcctttattgttattttcttgatctgtaccttgtagccaatgtcaatgtctctttttcattttgcttgttattagtgtaagggaaattttgtatagaaagtacaaatcatattatatgtaacaagatgtaatggaaaacaacacacacagcaatgtggacttatcttaaacaaaagcaaaaacagaagaagtttcataaggaaaacttgaaaaaacagcagctgcagcatgatacatgaagtgagttaagctgggattagctctctcattaatgatgttgattcatcattctctctttgaaaagttcttgtatcatagatgtagtcatgtatgttacaatcggtatgtgtttgatctttataattttcttgtcctccatctggtttcaaccttacttcatgatcatcaagcaaaggcatcaactgcaaacgctgcagcgtggtgacaaactgtaagccttcgggaagagtcctcagccgtctgcagctatgaaagaggaggtattttaagctcggtaatgctccctcttcaagttctgtccattcctctagaaattcagaagccattgttagattttcaagttttggaaagccaccagccttgcaaaactctttccccatttgtaatccatcataagcatgccaaagacttaagactttcaagtttggtaggaactgaagtaccaaagccggattctccaaaagatgagagtaacctaatcttatgtttgtaagcctttccaatgagccaagccaacttggtatcttctccaaatacccttcaagcttaagcttttgtagagataaaggtggcgaaaatgattccacaagaacaagtttttcagttagcctagatttttttgattctagtgacaagcttaaaaggccctgcatcttcataatagaagaagatagctcattgataacctcctcagttacatccattactccaagccttctgagctctgtcaaattacctatatctcttgcaatttcaccactagggtctataccagtaagtgtcaagagttttgtaaggcttcctatcccttgtggtaacttcaccccacaaacaccatagtttttcatcatttttaggtgcctcaggtttgaaagacttagtacaaattttggtatttctgctatgtatccacaccatctaatatccaaagtttgaagttcttttaaattgataaggccctctggaagctcagttatctcagtgtctttcaaacaaagatatctaaggtgtatcaagtcactcactacatctggaaggcttttaattttggtaccttctaaatctaaaactcttaagaactttgcaacttccaacttcaaccactcatttctctcttctaaaggtgtttgtttcccaataagaaacagagaacaaagttgggaattgtcaactttcaacatgtctaaattagtcaccacacaccttgccttatggggaacactagttgaaaatttgaacttcccttcctctatttggcgaatacagaattcgcggtaaatagaagtaactttgagtttagtagcattacctgagagttcataatctatttcaagcatgcctctgttgacaagttcagctatatgctcttctgctatatcctccattagtcttccttctttttctttgatcagaccttcggctactagtagtcggacaagtttccctttatgaatcaagaaattctcagggaagatgcaacaatacatcaaacaatcctgaagacactcagataatttcgaataatcagattcgagtgatgaaagaatcgaagaagaagaagctgatgtttgtccttcttttagatcatgagagctcatattagaatcaagttgagtcactctttgaatggtttctgaaaggagaacttcaatcttcagcatatcatctctaaagcattcaatcagtgtagtttgatcagctccatgcttctctttttggctaagaaacttgtctatatgattttccatgtcgtttatgacatctctaacttcatttatccaactttctttgtcatcaaaagaatctctaatctccttgagtttgttcacaaccttttctatttgatcttcaacttcagaaaaagctaccctttcttggactaacatagaatctaatctctgcaagtaggactctaataaggtttttgccatatctttcagcaatgttagaaactgaaaaattgagacaaagttggccttaagattgatttcactagatgagaagaagttggtattatcaaaccacaaatctttgaacacttatactatattagcttaggaaacaagtaaataaagccaattagcttactgccaaatcgactcttttttattaggagattacaaggtataatggttggactcttgttcatggtctttttttgtgctgtgttattgtcaagcaatttgtagcaagaaaaaaaaatttgaaagcatccttttagtaacttggtcaagaaatttttttccttatacagacaaaatggattacatatataaaaaacagattattaagttgagacaacattactagtggtgtttcctacagtgtttttgtctggcttgctaaggacatgtatgaaaaacgacataaaaacatgaaaacgacaataattcaaatcactttaaacagctagaaaaacaggagggatgataacataaatggctgtttgtttagagaatatcgaaaatgagaagacaacaccaaaattacaaaggaatagaaaatgtggaactaatcaaactaataaacatcgttagctcaagtggcaataatggttattggagtgcgtgtgtaagggtattgggttcgaattctaacttaatgtaactcaaacaaatatatatgtatctttatatattaaaagtgcctatctaacggtaattcttggtttaacagaatattcttttcttattctgttaaatttaactggcttttaactctaacgttagttttaaaaaatatacattaaaccctacaatataaattaaacgcttaaaatcctaacactttcgccatgaactacgcaagacgactactctcccaagccgttaagtaggattatttgctttgactccccagtctctcccagtctcctcccattactttgctccatggagatgctatttctccagaaatcatcccgattgctaaaattatttttaaccttactgcatctttccatggtcaatatgatctctttttctcttttaaattctatttagtacattcgtattttcacgaaagtgtcaaaagtctcaaccttttctctttgttgattatttggaaatattatgtttatttctaaatactttttttctttcatcatggatttatttgagatcattggcgtacatttgtattttttaaaaaaattatcaaaagttttcctccattgccatctctctcttcatttaatcttaggagtcttcttatttctctcatctaatttctcaaattttcaattaattttctaaagttaatggctactgtagtcgcaattttatctcacacaatagatcaacgacgcttctctgcaaattcgattgttctccaatgtatggacgagacattctcaacgactttggttaaatttaggtgcgatatttgattttaaagttttgattaattgttttcctctagattctgtattttttacatcctctgatgtattttctcctaacgtaagatgcttgtattagttaaaattcggagttttcatactcagatgttgaatctttgtgtattattaatgtttatagttattcggatcaattatatatactattatattataccccggtggcatgaaggcccaatcaagctattttgtgtaagaaaactcatttatttctactatcttaatccaattttccttatctctaacgagtgttatcatcttatacattattaaactatttacatagaacagaacaattcttattttttttttttgtagtgtaacatatcttttaattttatgtatttacagtgtgcaagtaaactatttgataaaatgtttaatagagatatattaaattggagatacagaaacaattcattatatgacaagaagaagcataaagtggttttaagctttgtgtatgcacttgaatatagtatagtagtttttttttttaggtattcattatcttacttgtactataattgtcttacactctgcaatcatagagccttgttgtggagccagccaaagtggaggggaattcatgtataaatggactctatattgccaagttggttcattagctttccaagttaataggcctttatgaggtgagtttcttaattggcacatgattttctaagttcgatgataagcatatgcatccaaattcaagccaagccatgttttggttctatgaaataatgttaatggtttaagcttgatcatcttgaatggccccttaaccattaaatccactcaaaagatatttatgttagtttatgcagttcaatttttttgtgaaagtttcttatttcacctcacattcaaagaaggattgtgagttagtctaaacattcatttatattcacatttagcatacctttcactttatctataattttctatgtttttctttgttcttttcttttctttttctttcaatatattaatttattataagtttgatgtttgataattaatatgtaatatccaggtaatctgtggtctggttcaaaatatggtgttattttgatgtggccatggagatccatagaaaaatctctttcactgaaactagaggaaagatgcatgactcatttgttggtcgagaggttattcgtggaccttagaagttaggtcatagtcaatggtgtttgtagcttatctttccaagacgtcaagtatagtacttattatacgataacactagagttaaagtgtggtgtgttggatctctctcattctcaatatgcactataacaattggtttgttatgtttacaaccactatctttattttattttttcacaattttgaccaataaaaacttgttgcaaagctcattaattcattgattgtgtgcaccaagtactattttttttatatatcttataaaga

SEQ ID NO: 99336 - DNA, 3797 bp, Cannabis sativa
tacaaaccgtaaagttcaggtggtttagccgctaatatctccaaaaataaagctcgtccagaagggtctatcgctaaattatatgttgtggatgatgttttgacatttttttccatgtacttcaaaggcatacaaataagattatttaattatcttgatcgtaatgtggatacaccttttttccctaatcacctaaccgtgttggaatcccaatgtcatccacttggaaagcaaatcataatttcatttgatgataaatatcgaaagaaagttgagtggttcatattgcataattgttctcaaatcgatccttatatggagtaagttaataaatgtctactacgttaatgcttagtatatttaattaacacatcgatttgtaacaatttgttttctacattagggaacacttcaatgagattcgacagagggatggagtttctaaccataatcttttacatgagaaagaatttcccaaatggtttcatgcaaaggtaattattgccttacagttgtagactttgaactaaattgttctaaattctcaaatttatgttagaatattttactatctgcaaatgcacgaactaaatcatctcggatctttagagcatggtgatgaactgctagctctggcatctgggtatgatattgtggtttactcttatccagtgtgtacaatgaatggggttcgatttgttacactcaaaagagataaaaaaaaatacttaactcaaaatagtggtgcgtctattaaggggacaaatttttttgactattacggtaaacttttagaaattttgcatctgtcttttggtgtaaatggttcaacaaagatcctagaaggaaaaagaataattaccaaaaataacatcactagcataaatgtgagtagtgtatggtatgaagatgagctatacattctggccaatcaagcgaaacaagttttcttagtggatgatttggttaaaagtcgaaattggagggttgtccaagatgtgagtcatcaccaactttgggacaaaattgtagatggcaccgatgacaacgatgatgttgacattgatattgtacatgaaacaaactcatcaaatttttcactattccttgaatgtgcaacaaactaatcatccaccaacaataattattgatgtccctaaaagtttatcgatagttgtagatgacgatgatattgaagataaagatgaagatgaaaaaatcttagatgcagaggatgacatacttgttgatgatgcttttgatgatgattcaaattatgtgtcaccatccccacaaatagactcaaattcgattagtgatgatgatagtgactattgtatttagttatattattctcaaaattaaattatattttgaacttttgttatagtaatggatggtgtgtttttttaatataatatttattatatttatggtgacaatttaataaggtggtatattttttagtataatatcgacagatgttgctagatactatgaggtaatggtaggggtgagggcccactagatcctactaggattcccaccgattgtgagtttgcttctgaagcttctgaagatgaaaatgagatttctaattttttgacaaagaggaaacgtgattgtaatgtccttaataaattagacgaccaaaagaaaaatatttcagtgctgctacttcttttgtgtgacgttcgtgctattaaaatagttggagtgagagtggcgcttttttctcgtttgattgggagagagattagaatttaacgtctcaggatattatggtagctggaaaaaagtcttaaggatgaatcatgatgcagtcttcaacaaacttcggataaaaaaaattatattgaattttttcttactcgcgattattatgttgctaatttagtttttaaaccagtattatttcaatatcaacaaaaatgaatattttgagataattacaaatattgcatggactgaaatagcatatagatataagaaatgcaagttgttaagacatgcacattttaaaaaatactacaaaaaaattgttgattttgataatgttgttgcccacctgcctagtgattttactccagaggatattggcttcctctttgtaagtttttaccaatctagagtttattgctcgttctaaaataaacgttgaaaaaaaaaaaaaaaaaaaaaaaaagatgtggtaacctacaacacagggatcgaaatctatggcttagagttattaattaagttattaaattttacaatttttaatttttttaatttctcttagaagagtaagagttacattgagacttggaaggatgttcatacctcaaaaagaacaaatatatttgttaatttattggttgcacaaagatatgtaagtaattattcatatgttataaataaaatactcttttacatatgtttataatgctttctgacttgtattcttaaaatagggtgggctactttccacttataaaaaatgagccaatactcctgacattgaacctgttgaggagattgaaatgagcgtacccattgaagtacttggtgaatggcgtggtgatcaccgaggagtggggataaaattaaaggaacaatcttcatcacagcgcacacaacctattcatactcaagatatgcttatggatcccagagtgtagcgtcaatttgaaaaattgacaagaaaaatattatggatttctcaaaggttgggacctgatgttcgtctacctagtaaagaggagttattcgggatgccaatgcctccaacacagacgtttcaacctcaaatgtctggaggtgggtctgctttatcttcagagcccgggacttcccaatatcaccaaacgcagcagagtactattctatttatgtatcctttatcatcacctcagcaaatgtccctttttccttggttgtcatcactgatgtcgcagctgtaggtaaattatatacaacaaacaatcaccacagatttagcaacaacctttgatgcaacaaacaccacatatacagatgtagcagacaccatagatacagatgcagcagcagccttttatgcaacacacactacagatgcaacagttgccttccatgcaacacacaccatagatgtagcaacaaagaccacagatgcagcaccaccagatgcatttgatgcagcaaatggcgcatatttaacatgtgacatttgcaatagatgctttttatgcagcagacaccgcatatgcaacagatgccttcgatgctatcgatgtaacatatgacactatagtctcagatgcaacagtcgtcactgatgatattaatgcagcagatgccacacatacaacagtcgtactactcgcaaatgccataagtgtctcatactctacaacaatagacttttagtgacacgcacaaaagtgcgggttactaaagagttaggagtaatttttagtgagatgcacaattagactctaaatatttggggttagtcttatgtattgtgcgtcactaaaaagtaaaacccaaaattatttgatttttgtcaatttaaaaaatattggtctatagtgacacgccaggcgtgactgggtatatatgtcccgacccacttgtcgcgtcactatatcataatcttaattttttttaatataaagtacgactatttttttttttaaaaaaaatacaactattatcaataagtaaataaaaaataatttataaaaaataaaaagggagtctatttctttaagaaaacagtaaaataaaaaataaaataaaataacagtactgcctctctctctctctct

SEQ ID NO: 99337 - DNA, 1773 bp, Cannabis sativa
atgaaagttatgggaacccacaacaattataatgttgttgttgctgcactatctcttgttggattgggaattggagttgatgttgaagccactgattcaactattgaaaagctaaggccacctcttcaccgaatgcaaattggtaagctaaaatagattaaatttcataaccaataaattagtctccgaatatactatgaaaagttcagatgaagtcactataagtgttgatggatttgattggttaaacaagataaagggtatcacaaaatgttcaatctaacccaattctcatttagtattattattgaacttattgtctcattgctaaccatatagtttttctgttgaaagatagcagagatactttcagattcgtaactttgtaaattactaactgtttcttgctcattatgatagttacaacgggaatttctttccctacatggaggatttttcatggtacatgacctggatgattagctatgccccgaagttctccctgactcactcattgcagtatttgattcagacccttgcgaggtacctcatgcaggccttcgtctttgaaacatgtttgccacacaatctctaaagtgtacatgttgtctctttcatttttctaaattcctccgggtggttaaggaggacgagtcgatcgagtagttggttgttcatatgggtttcccatattcttatgaaaagctgccaaaatattttgtcatgtttgtctagaagttatagcacttgagttttggggattctccctgtcgacatgaacttccctggatcggcctggttgttgttcatgtggatgagaagggttattttgattgttctctttgacatggggatcttgtgctctcaacaacgaggcctccctcacaattgtctaaatggaggttcatcttgtgtaggaggtgtattatttgggtctgtccttgcagcagcagcctcacattgtaattcaccgttccttcagtttgactctacaagtctctgtcaaatttgatgattttccaattctacaattggtatctagtggggttatataagcatcagagtttctttattctagtatttcttccccataatttacatttctcccaaaatcccattcgataagatttcctctttcattatggcctttttagggcagagttccctgtggctctttcccttggcgatgtactgcctcctcatgtccgacattgttattctgtgaattatttttcatgttgggaaaatattcaggttttttcttgtggggagatgtattttttttttttttttcagagtcttaatttgcaaaaaaggaatgcgagtactaaactgttaactcagattttcattaacaataattttacgtaatcttgtagttaaaatttgcatagtccatggatttatcttatttattaagttttttggttacagagtacaagatacaagattgaaagaaggattctctctttaaatgatcactcttctcaattggtcatcccccgcattatttataggagttttagaatgttagttattccctttactcttatcttggtaaccactcatgtggacaaacctcaggtttcattaatttacaagatgtaggtttcatataaataatcgcttaggcataatttagactttgaataactacatctatgatcttatcttgagcaattattttaccgacttattattctatttatcacatgtgtgcctcgtcaggggcggtcctgaattgaaatgggtcataagcaaaaaaaaaaaaaa

SEQ ID NO: 99338 - DNA, 1179 bp, Cannabis sativa
  modified_base (54)..(66): a, c, t, g, unknown or other
aaataatttttagagtatcgctagccaattgcaagttgacacatttagaaggtnnnnnnnnnnnnnggtgcccaatagcaatgctcttatcgatatgtatgagttactttaagatatttttttatcatttgatgatccatatatgatttttaaatttgatgactattattgtaagtgaaactaaaaacaaccaaacttgacattaatttaaaaataaggaaaataataatgaaaaatcaaggcacacgtgtcttactttttcttttgcttattcatcttatcatgctttcaactttttctttttgtagttaagcaaacaatacttttcctatttgtaactttttgttattttattagcatcaatgaatagtagcaaagaaacacaatacaatttggtaaaaacactcccaatccaataaacaaacaatgtaccattagtgtaaacttatatcttctaattttacatttaagtttaattcagactctaggattagaaaaataaaaataacaaataaattacatttaaacgttactaaagagcaatacaaatagagagagtaatctttatattgtactgccaagctatttgcttcctgaaaaagctatttgaaatccaccaaaagatttggaataaaaagaaaaattgctaagagatctactgttgtttaaggaaaaacattttagtatataacatattcaaaaagaaaacctcagcaaaaccccatgctacagttgaactcattactcatcagtttgaaagaaagacaagtcagattttttacgtacataccattctctaaacttgttttctacaacaaataaatgacctctctcagtctcaccattcaccacattctcattccccatacatttacattctcacgtgaccatcctttgtttgttctttcttggatttggtatgtgaccatcatcttcattctatgttcataagcttcttgcaatcttttcacacaagtcccgaggccaattcctactcgaattagtcgcaataaaagacgcaatctgcaaaacacaaatcaatcaaagtgcttaattacagtcacttctcacattttattcatttttgcataacaagaaatattagtactgcaaaaaacacaaacctttgccctcaaggcccagagtgatccatcggaatctgtgacattatccagacaa

SEQ ID NO: 99339 - DNA, 11039 bp, Cannabis sativa
aacttaaattagaaaaaaaccataaattaagtaaaatcataatttctccatatttatcaaacttgaagaaaaaaatccatattctacataatttcctctaaaatataatttcctcaaaaaattcaacgaaataggccgatcttactgggcctaagcccattgggttgctgagctttaatgggccatgtaataacccaattaagacaacgaaacgaaccccctttaaactcagcagccactccctaacactctcactctcactcctctctctctcctcactcacgccggaaccaccgcgacgacgccgccgccgacggccaataccgccaccaccaccacctactcctctcagtccgttatctctatgtaagtttcatatttgcctttttctcttctttcatttcttcaatttcgatctgatttatacttgaatctgagtaatatatatataaatgtttataacttgttatttatatgtattatatatatttataggaacatgtgatgtgatgtgtgtggtgttagggtttaacaacctgttctgtgattttttttttctcgcagagtattttactagggtttaacctcagaaagaaagaagagtttgaaaatgtcttacggtatacaatctatgcttaaggagggacacaagcatctctctggtcttgatgaagctgtgctcaagaacatcgatgcttgcaagcaactctctactatcacccgaacttctcttggacctaatggtaatatggtttattcactatctttatctatcttcaataatggcttattatgttaatctttgtactgttgttcttggaaccttggaatgagatctatgctatggtgttaaaaacaactctaggcagtgtttgtaaaaaaatatgagaaatttggagaaaagctaattgggtcttcatattttgtatcattttttgtttttcttaatttaaagaaaaaactgaatcaggcatgaataagatgagatggtgatcaatcatttggacaagatttatataacaaacgatgttggcatttttcttttttatagtagcttaattgggagatcagtatgataataatgttgagtttcacttagtgtttttctgattcttttattagaccctttgaatgatatctatggttttagtaaatagtgataacttaaatgctaggttatggtgttattctttgtaaaacttgagaaatgtgcagaaaagccaattgggtcttcatagtttgtatgatttttattattattattattaattttaatttttaataatgttgggtttcacttgagtttactgatcgttgtactgctgttcttggacccttgatatgatatctatgttggctaattgttttaaacatgtgattgggatttatattaccgctaccaagccttaactcaatgatagggtttgggtaattagataaatgctatgtgtgtgtgcgattgaaatctatttaaaaatagaaacttttgtatgtattgtccgactttgctcatgtgtaagggctttgggggatttatattacccttgtagctaccaagcctttatcctatgatagagttttggtaattaaataaatgttatgtgcgtgattgaaatctatcaaaaaagaaaatatgttttgaacttgttagtaaagctgcttattaaatagtgataaacgtctggttgtggtgttaaatcaattttgccagtgttattatttgttaaaacttgagaaatgtaataaaatgcaaattgggtcatatattttttattttttttgaatcaggcatgaataagatggtgatcaatcatttggacaagctttttgtcacaaacgatgctgccactattgtgaatgaacttgaggttcaacatcctgctgccaagctcttggttctagcaggtaaagctcaacaagaggaaattggagatggtgctaatttgacgatttcttttgctggtgagcttctccaaaatgctgaggagcttataaggatgggtctgcaccctagtgagattatcagtggatacaacaaagctattactaaggtttacttacttgcgcatgctgtcaactgttattgattgcgaatataatatttttgcaattttaatttctttgttttttgtgaaacttcagacagttgaaatcttagatgaactagtagaggaaggttctgaaaacatggatgttcgcaacaaggatgaagtgattattagaatgaaggctgctgttgccagcaaacaatttggacaagaagatgttttgtcttcacttgttgctgatgtaattttaatctcatcgacctatgttttacgttatcacttttctttgttgaaatttttgttaatgagcattttctattgcgtgccacaggcatgtattcaagtatgtcccaagaatccagcaaactttaatgtggataatgtacgtgttgcgaagctcttgggaggaggtttacaaaacagttccgtggtaagagggatggtcttgaaaagtgatgctgttggaagcataaaacatgcagaaaaggcgaaggttagtgcttactttcataaccttttaaaaatagaagctcattgttctcaatgttattcaacacgtggccttcttattcagtcaactttttgtttaattgatttcattttagttgctctttaggattctgttattttgtttatttgaaaattgaaaatattgcattaagaaacggtgggaagtttattttcatggtggatgatgctaagatggatatttcgtcctattctcttgctattttagttttcttcattgtttatccttctatagtgtaggtttttagtcctactttataattataataataatactcaaaaagcataaatcgcttaaaatatcttctagaagctggcagttttctcgtgttaagaatggatgcttcttggtttttgctggcattccaacttagggtaattaacaccggccgtcttaagcaaaatgaacttgccccttttaaatccgagaatgatttcagtcttcttttctcccttctgtcagttcctcatcactcagtcgactcccgtccctcaaaaattgtctcaatatgcaaaaatatctgaagagtttttctgattttcggtactccattctgaagtagggccttatgtactgcttttttagctacacattttttcacaagatacatattggtagctacttactattaatgcatttcttgtactttttttatgtgaagtgttctacctttttaagcttgtatgttcttttttacctacttcattcaggttgctgtatttgttggtggtgtggatacctctgcaactgagacaaaaggaacagttctaattcatagtgccgaccaggtaaattttgaactggatattttacctacctttcattcaggttgctgtatttgtttgctattatatgaacgtttctatcttcttgccaaattatttagctgttatattctgttttatttcttgcttttatttgcatgctcttgcggttacttgtctgtaaatgcatgtgttgttgtggctaatattgatcatctactcaactaacgtatcatgcaaaattttcctccatctcatgttaatgttcagtggcatccatttttctggtttcttttggttgtttggttcatattttctccttaatgaataatggaataaaaacatgaaaatgtattctcggtggaatgtttttcggcttgcaatttagtttttctttcccattatattgttgtcatttggtattcttggctcagtaatccgaaatcacaccataccaagaatactgttctgcttcttatgttattttttcttgacatttaatgtatcatgtgtctttaagtagttctcatagttttttcttttactatattgtagctagaaaattatgcaaaaactgaagaagctaaagttgaggagcttataaaggcggtcgctgattcaggtgctaaagtaattgttagtggagcagcagttggggagatggcactccatttctgtgaacgctacaagtatataacctctataaagttcttcttttcgattgatttactaatctgcaaaacatacttgtgattgttatacttattagattgcttatgatctttcttgaaattttctaatgagatttttctaagcaaatcttataatttaatttgggacatctttccttgcaggctaatggtcttgaaaattagttcaaaattcgaattaagacgattttgccgcaccactggtgctgttgctatggtaagtcagctagcatttaatagtactcaatttttgtttttatcaaaaatttccaaaattctttaacaatattcttatttttgttacagttgaagcttagcaagccaaacccagatgacctaggacatgttgattcagttttagtacaagaaattggtggtgctagggtatgtaaatactttggtattttattcccgtgttcttattatatatttttctactcgttaacatttctcgtaatgtaaataatgtgtaggtcactgttgtgaagaatgaagaaggtggaaactctgtaaccactgttttattgcgaggaagcacagatagcatcttagatgacctcgaaagagcagttgatgatggagtaaatacttacaaggtaattaattatggctagtttttattttgtgtatggatcttttttaaacttatctacccccactaaccgttcttactgggtacttttgcttctaggctatgtgcagggatagccgtatggttcctggtgcagctgctaccgaaattgaattagctaagagagtgaaagagtactcgtttaaagaaacagggtatgttttgtttgttctcgagaatcacttgtgttctgtttggcctaataaggttttaggacttgaattgagaatttcagtgcacctcatttatgatcaatacacttaagaccacagcagtagccttttttacggggtttccaataatattaatgttttaatgtttttgggtatatcatggtgtgaatattagggaagtaaccgttgctttcttctttgcagattggaccagtatgctatagcaaaatttgctgagagctttgaaatggtgcctaaaaccttatctgagaatgctggtcttaatgctatggaaattatttcctcattatatgccgaacatgcatctggaaacaccaaagtcggtattagcttggacgaaggtgtttgtaaggatatcaccaccatgaatatctgggaccttcacgttaccaagtaagcaatctcttattgaactattaaagatagtgaaaatgagccttgaaactcttctacttttttgttcgtggtgggataattatcatcgcgttacagatgattctggttcatttatttcgattggtgttttcgtctcaggttctttgcccttaagtatgctgctgatgctgcctgcactgtactacgagtggaccaggtaattaattagcatcgttaataactttagcctcggctaagctgaaagaatatgcattattttcttgagtaaaagattgtgattttcgttttgactgaaaattatgttgcagattataatggcgaaaccagcgggtggcccgggtaaaagggatcaacctgcgatggacgaggactagttctctattttgcttagaatctttgggttaggaaatttaccaaacttgactaggctaaaattgtgtggaaattttgtttgtgtttttaagagggattattgtttaaattataatggttattgtatattgccatttgtaagcttttgcttttgagagggttttttcttttcttttcttggttcgtctctctagctcttcttcttcttcttccttttttgtttttttttttttattttaacttatttgagttttattctgaatccatatttcttttgcccattggattgttttggtaaaagttttgggtaacttaggcattcacttggcaatacattttttttaatgaggcatttaataattaagatcacaaatatgttgaaaattaagttgtatagtttaataatgattttaaatgggaaatttaaaatactatactttaaaaatcttaatattttattcttaaatcaatacatttcaaattaaaaaatatatgacacttttatcaaaaacttaaaattaatcctcacataactcaatcctatttttttccaaccctcccacggaccaatcggaccccagcttcaagcatcggtccccatcggacttgctacaattttttttcccaacttgcaagcattggacccccatcttctccaaactgcaactagttcgacgggcgaggtggattcggtcgagatgggcgtgggtttgagatggtgcggctgtgggtctcctcctctgtgcgtcggtgagtaggaagctcagtctcctccgtgcggcgttgatgacggtgggtgtggggtttcgggttgggtcggaggggttggggtcggactagggttgctccgatggggtttcgggtggtggtgggatgtgggtgtggtgatttcgtggtcggcagagagagagagtttgagtttgagagggaatgagagataaatggttagaaattatgaggagagtattttaggagtttttgtaaaagtgtcatgtatttaaaattacctttcttattaattttcctaaccaattttcccttataaaatgcataaaaattcaaattttcccttcaatttggccaaccaaataatattgagctaaaagtacaagatatacttttggaaatttctttagtggtggatgtcataataaatttgtagtctaattatttataaagatcccatacattagtatataccatttacttattaagcatttttcattctacctctaataaaatatttaaattttaattttgaaattatattttatttaaatttttttagaaatttatagatagtttacttttaagaaactatgacgtacatagttgtaaagaaagaaaattagactaaaactcctctgtctatatcgaatagaattagttctccttaacatcatattgctattataattaagtattgaatcttatataacttaaaaaaataatttaagtactattgttaagtaatcataaagtgttatttatgaaaagtgctagaaattattagtgtttaatagtaatactctttattaaaacaaataaatgatgtaagattaaaacaagtatataaaaaaaaacaatcgtgtgtgcaagaaggtgtgccgaaatatctctttaaggatgtattaagcctacctatacttttaatttgttaaaaaaaaaaaaaaaaaacttcggtgtaaaaattcttattattgatttttagatttgccattttctaattaaaagtcaattagcttaatcatattttattgacattgacaaggaaagactcatcatttatagtacttatctaaacaaatactaagacaaatataattaaagaccaaaaagttcagatcaaatcacaagtatattaaatagtcttttttcttatattaatgcaaggtttgttgtttgaatagaatgaacagagtctggttctaatcattcttctatagctcaaagcttatagaacagaaatgtctatgatttgggtttttagcttgattgttcttacttcaatcagccatggaattgaagcttcaaatcttagacataaaaatcatgagtggctcgttaaaaggaaccaaccttatagaactggctatcattttcaacccccaaagaattggatgaacggtttgtttttgttctcatatttttttttttacattatataatatgctcttttagtttattgatctttttgtgtttttttttttcataacttgaaatgtggctggctcattcataatcaataaattcagatcctaatggtatgttttctcaactctcatctctgtatttgacttctttgtatgccctttagattttcatttgaatttgagattgaagcatttaattactgaaaatacaaaaacccatttgaatttttctgggaaagttgagttctttaatgtaaagttttgatttttcatgtgagtttgaaagaaaaagaaaacccatgaataattttttctgagaaagttgagttcttttttctattattcatgaaaataggaccaatgtacttcgagacagtatgcatttaatgactcaaaaaggaaatcccataagaattttttctgggaaagttgagttctttgacctaaagttgagaaatttcattaacataggaccaatgtatgctatttgttctgtcattaattttcatgtgaaattgaactagaaacttgtaatgactgtaaaatcgaaaacccatctgggaaagttcaattctttgttataaagtttaaggaatttcattaacataggtggaccattgtatgctatttgctctgccaatacaatcttagattttcattagtagagaactttcataaaatacaggaccaatgtactttaatggagtataccatctattctatcagtacaatccctacagtccattatggggaaacataacttggggacattcaatttcatacgatctcatcgattggattcacctcgacatagccttgactcccactgattcaaactcggacatcaatggttgctggtccggttcaatcaccttcctacaaggcaacaagcccacaattttatacaccggaaaagactttcaaaaccatgaagttcaaaacttggctttgcccgaaaacctctcggacccttttctaagggaatggacaaaatctcctctcaaccctttgatgactccaatcaatgggattgaaccattgttgtttagagaccccacaacagcttggagaggtcttgacaacatttggagagtcataattggagctgagattgatggaaatggcttagctattatgtataaaagtggtgactttatgcattggacaaggtcaaaagcaccacttcactcttctaataagactattatgtgggaatgtcctgattttttccctgtgggaatcaaaggctcagatggtgataattcttactcgaatgaagatcagtatgagaagaaacatgctcttaaagttagctttcatagtcatgattactatgtattaggacagtattctattgaaacagatgagtttaaggttgagactgattttatggatgaaggtttcgatttgagattggattatggaaagttttatgcttcgaaatcgttttatgattctgaaaagaagaggagagtagtttggggttgggtgaatgagtctgatagtgatgctgatgctttcattaaaggctggtctggtcttcaggtaatgatatgtaattatgagtcaaaatatccttaatctctctttattatatagaaaacttatattgattgtgtgtaattatgtatcagtcatttcctagaacaattgttcttagtgaatctgggaagcaattattacaatggccgatagaagagattaaaaaattaagaagtgacgagaaagttagtcttgaaaacaaaatgcttcgtggtgactcaatcatcgaaatttttggtatcacagcttcacaggtaattgaatacttaaattttagagtatattatcgagtcatacttcttttgatgatctgatcttttcaaatattttgatccaatattaggcggatgtggaagtttcatttgaagtatctgagttagaagaagccgagttaatggactcgagttgggttgatcctcaactactttgtgatgggaaaaatttaagtgtaagaggcaaagttggagcttttggtttattggttttagcctcagataacttgacagaacaaactgcaatcttctttcgcatattcaaaaccgataagagtgagaagaagaagtatgttgttctaatgtgtagcgatcaaagcaagtcttcattaagaaatgatcttgacaaaacaacgtatggagcattcgtagacttggatcctcttcacgagaaaataacattaagaactttggtatgtaacatgttcgtaatttaaactaattagggtacgattttgaccattctgaacgaaacaataatacttcaccgatagaggtattgataaccgaaatttgtgttttttttttttgtgcagattgatcattcaattgtggaaagttttggtggagaaggaagaagtgttatcacaactagggtttatccattattagcaattaacaaaggagctcatttatatgtattcaacaatggaacaaagagtgttaaaatctcaaagcttaatgcttggagtatgaacaatgctaaatttgtgtcatggaaaggagaagaaaatcagtaattggttatctttagatgatttaaacattgttaattcatacaaaaaaatcaaattaaatttctaaatgagattaattctttgaatttattagtcttcttccctcctcgtcaatttatgtatttgtaataaatgatttttttttatgaatatattaaaattcatttgttaacaactccattttccttcctaaaaaacaataaattgatagaatatttttctccataaaaagaccaaaagcttttagtacaatttaatcactatagtaacatttttcttttagaagaaaaagtaaagggaaatttgaatttccatacttaaaataccctataatttttcctttaaatgcatagttattaaatttggtcatatatgatcactttactaatttcccaaaattacccctcacatttcaaatcccatctcagcctctctcttcctctctcaacttacctacactcacggcaaccaacccactaaatctccaacccgcagcaaacgtcatcgctcaacccacggccgtccacggtgaacccaggaccgtcgacgctcaaccccgaccgtcaacgcttaaccggcgaccactccaaggagacccgaagcgaaaatgggattcggatccgtccgtgaatggagaagaggcgtttcggatctggggaagaagatggtgaaggtccgatggtccgactta

SEQ ID NO: 99340 - DNA, 2149 bp, Cannabis sativa
aaaaaaaaaaaaaaaaatacacacgcaatttctgtcactatcttcttatcctttaactctaactatttagttttttttttttattatttggccaaacaagcttgagattcattgtaatagtatattctagatcgatgctgtccccaacatcaccacccttcacacatttatattacttttcaatcttactacttagctatacccattctcaaacttattgaaacactaaaaaactttctaagcccacaaaacaatcaaattatatattcatatggattatgttacagataaagatcaaattcaaagcaataaaaaaaatagtgtaagccctccttccattacatgattcctctctctcttataacactgatttttttttttggtaagaatttactgtgaaactcttttatattttaatttttatacatataatccctttttttttttttggtagcaaaacctccttaagattacttttctttgtaaatttaaggtgtcagttatacttatacattaccgttaaattctaattggattactactgtatcgattttgaggttttactgttacatatacacaggtatatatagtagtcatccagttgacatttaacggtaatatttaattgtcatgtcaaatttacaaagaaaaataaacttactcctaaaaaaaggggttaagtgtataaaaattaaagcataagagaatttcgctgcaaattactctaatatatatatataaatttatatacaacaaaagtatctttctcatgaacaccaacactaaaaaaacaaaaaaggttaaaaaaatcatcaattaactaaccctcaatcgactataaatactacaaaaccaactatccaccttagctattaaaaaaaagaataatacaaaaaaaataataaagagacacgcaccttagagcacctcaaaatcagaacacaacccaaaatggaatgggttgccgtcaatgacctcagaacagtgtcgacgtcgggcaagaagaagaaaaagaagatgagggaggcgtatataaaagaggaatgcagagaaaaaaaacaagagataaaaaaaaaccctaaaatggggatgcaaacattatacttaaagttatatcaactaagagaacaataaaattaaaaatggtgaaagagaaatagaagtactcattataggcagaatataaaaagacaactcctattttacttttaaaaagtatttaaaaaaaacataagaatcagattgaaaaaaagatttaaaattactaagttacattttaaagattgggctgaccctttggactgaatacacaaacttaaaatatgggatttgaaaattaaataaacaaaaaggtggtaaatgaaatactataaacaactttaaatttgaacaaatgccatataagggtggtaaagttaagaatgccatatttatgaaacttttttgataaaatctcatatttggtgttattttcactagataaccaacacaaacaatccggtaccttacatagaactagtgttgtaaataccaatcagtttttttgacacaacacgaaattggtacaagcttggaaagcacaagtacgactaggcaaaaaaaataccggtttgaacacgatacgatgcttcaaattgacacgacacgacatacaagcttggaaggcacaagtatgattaggcaaaaaaaaaaaatacaggcttgaacacgataagatgctacaaattgatacgatacgacacgaaaatatgtctttaaacacaatacgacacaagaagcatgaaagacacgacacttaagcacgaatagactaatctgaaaagcacgacacacgacaagtctaaaaagtacaacacgacatattaaaaaaatcttatatttattaataataataataataagatatgaatttatcaattataaataaattaaaataataataaaatttaaatataatactgaatattataatctatttataaaatgtgatatgaaaatttgagtatttatatattcaaattgtaacaatgctaataatttttttatatgattatttgtaaaataatgaagatgggttgagttgtaaagaagcatgaaataagaagtttatttccgaacaaactagagatggtttttttttttttttttt

SEQ ID NO: 99341 - DNA, 2141 bp, Cannabis sativa
ttagggaataaatccaaccaatcctcattcataaaagcatggtcaattctagaataaattctatcatgacctccttgattactggaccaagtataataacagcccaccctcttcattgtatccacttgacccaaacttaaccacacattaaagtcttcaatcttagccttagtaaccgatttacccccaactctttcaccatagttaagaagagcattgaaatcacttagaataatccaaggtttgacagggaatcttagattagctaggcccttccataacaacttgcgctcctccagaccattcaacccatacacaaacgtagcataaaaagccttagtgtggctagctaatttcacatagcagtgcacatattggttggtttcttcaatcacaatcaccctagcataaactttcttccaaataatcaacattctcccttcaatagcagagctggaataactatcccaggcacatcatttattagtcatcatattctgcaatttttctcctttcagtttagtctccaccaaagcttcaactcctacctcctttatacgacaaacattcatcaccgcctcttacttttctctttattaaggctcctaacattccaacacaaaatgttacagcgattcattgagaagatatcactgctaataagtctccctttttagtccctatctccttactttgtaacacttcaaaaggattcttgaggtcctgattcgcccctgttcaatattacccttcttaattttaagcagtaaagcttttttttggtgtttcccacttctcttcttgagctttctccctacttttaggattttcaacaatcccattaattcccatgttaatactattatcaacctccttgcagtaagatttaacaactttccccaattccttcccatcttcttgcataacctcaatacccatatatttcttaactacttccttatatattctttaaacctgccttcccttccttacttttacctagccctcctcctttccctctttttcgacccattgtttattttccccatttctacaatcagccacaatatggccaaaaccccccacaactcttacatttaatcggcaaccattcataatccacaccatgttcaactagtctccctttctcattaatgaagtgaataactctcagaggtgtgtccataatatccatctccaccaaaactctaacaaatttgaccatagatctttccttagtaaatttatccaccataatagggttcccaatagtactgactaaagcactcaagcaattatttccccaattaatactgcaatcccaggtcatgtaatcgtatcatcaaaggcacaaatttaacaagttttgcatcatctaaatgagtagtccaaagtctcgtaattactggtttttgatcaaattgaatcacacaatgttccaaaaaatgatctctggtagcctcatcattgaacttgacaattgcaaagcctccattaattcgaacaatttgagaaattctcaggtttctctacatccttcgtatgaatccttcaaaaacgacaaaaggagaattagctcccaaaacagtacaaatcaggcagagctccaatttgtagcctgcaatttgactttctcaacatctatttgagcgatcttgataccttccctgaacaaaggctcctcaaacttcaatcgagctctacccatttttttgttttactgaaaaattacaattttatatgtgaaaaaattgggaagtcttgcttatgtgtggggtggttttacttcatggaaagtttgtttatagtttcattgtttttttactttcttgtatcactcaataatttttttaaaaaagaaaacaagaaagtattttttttacagatcgtgagtggtattattagtttccctttttctttcattaacatgtcttcaatttttttatttgcaataaatagaaagggaataatctctattttgtcatggaatcttttttgggaagttattttctttaaggactcatttggtacgtcgtataaggttcgtattttattaaataataataatactagggttaatcatcaaaccattcaacctgcccccatcgcaaaaaaaatacagtttgaaattctttgcagtg

SEQ ID NO: 99342 - DNA, 3795 bp, Cannabis sativa
  modified_base (1564)..(1566): a, c, t, g, unknown or other
  modified_base (3473)..(3477): a, c, t, g, unknown or other
  modified_base (3708)..(3713): a, c, t, g, unknown or other
aaaaaaaaaaaaaacaaacaagaatgtcgtagctacagtaccacagcatatatgccgtgcactgtagccacacggcatatatgatgtatcatttgctgttacgttggagggattacacacaccaaatccaaagtttagtacctccttgcacttgctctaacatattaagcccaagcacccaacctacgatcagtttggacctaccaactaatcaaaaccacctagctgttacaagttttttctattgaaaaatgttatatacatacatatatatgggcttatttagtccgtataaaaatagttaacgaaattactttttaattttttgacctctagcaataggttttgtaaccgatttctacagtttatatgttcaaaaaattaatttatatttatttgttgtaattttttatataatattaatatttaagggatacttttgtaactttactagttttatttttttagtatgtatctctttttctttattattattttttttatttaagcatttatatattacaaccatacataatttggcactcgaacccaatacctccaacacacactctctatgttcacttgagctagcctcaagtgtttttagtatgtatctcaaatagaagagaatgtatctaaagtgaaaaagaatgtacccaataatttttttttctttgagaattattaaactgtttagttaattaaattcactacttattcttttgttaggagtgaaaattactaattgatagttcatttatataattattttaaaaaaataatttttacttcttataaattaattaattatttataaaaatgacaaaaataaacacgttataaactaacatttaatttatattcttattttttgaagtactacctttttttctttctttatttgattaacaaacaataatttgtctatgagtcaaaaatgacattattgtttatgatattatcaaaaaataataaataattctttatagaatattagagattgggaatttattgtcactctcctcttttgtttcctatactttttatatatgattagttttattatttgcattattttaagctgacataaatactatcatcacatttattaagcaataaaatacattcataaaaaatataatttaataaaaaaatcaattttaaataatgtatacttattaatttactctgagttaaataatataatcattgtgtcattaagcttttattcacacaaaatatattattattatttgtttttttttttttttctaaaagaagaatgattctaaaaactaatggtatgtttacttattattattatttgtttttttactaataaataatgcgaattaatagtaagataatcattttttttacatttgtttacttacattattaaaattagaaaatggaaaacttgattaaataagggagaaaagaaagggagaacttctcccaccaattttgtaaggaatgccaatagattttaatgatttttattttattttttaacattaaagatacaatgacaattttgtcctttaaaatatatcttacaaannnactaccatataatatagtttaactcaaaagggcaatttagtcactttaaccattccgattacgtttcctaataaagtaaacaagataaatcattactattccattttcaaatttttttagtaaataacatattacaaatattgattccgattatttttcatttatttcgttatatttctctattaatttattccgattttgaatactgtatacactttaattagattttggtgagaaaacaaaaatgtagaaaaaatataagaaaaaaggggaaaataaaaaatacaaattattattttaccctcaaagattatttaacgaaattaattcttttttaaaataatcaatcatcatattaaacaattctctgaataatgtgatatagagatgatctgaacaccatgaacttatattttaaatctccaataaatttaaaattactattgtcgcatcaacaaaataatcaattttattattatttaactataaataaattgcactctttaacaatataaaataatatttacagaaatatttcttgtaaattattgatataattaatacaagtagttcatctcttaatttattagttcataattagagtaagtcaaaattatctcaaataatcttgagactatgggcctacaaaatcaagttctcaatactagatttgaaatttactgagtaaatttttcaactaattaattcctcttgattccactgtaaatttggaattatactcttaattatattgaacgctctatatactaattatagatacgttataattatctattgtttcaatctaaataactaatgattctctacatatagtttgcatatatttattattttactcttcgatgtattttacccttaaaacacttagctccttgtaaataatatttcagtaaactattataattactgaaataagtgctccaccattaactcgtttagccatgctctaagaaaactattattttactagtatttataaaatttatagattccatatctttgattaaaattcaaactcaattgcacccccgagttctctagtccgacgggtaaacgagtaacgaataagtcaaagaactcgaataatacaattaggctaaattaaagcttaaccatctcaagattgagatcaattgatctaagattaactaagtgatattgacttaaaaaggatataacggtaagtttatgatatcttttctattgtcaatatcagtctagtattataaaaaattacaataaaccctttgattagtaaaggtgtgcacaatagtaaaaattatgataacacgcttaatctagtagggtgttacacaaacccgaaccatggatcctagccctagtctcaggccaggaccccagcctcgaccttgacctaaacccagacttggaccccgaacccagaccctggcttaggaccccaaacctcggacccaaacttgacccctgtttaggctctggtcctcagccctgacctggaccctaaacccaatgcttgacccagaccaggacctcgaacctataccttggactcgacccctaccctgtcctcaaccaagaccctggaccctaaccttgacctcgaccccaaccctgaccccgaaccttagacccaaatttggcactggactcaacccggatgtggacccatccccaatcccgacctcaacctgaaccccagaccccgaccccgacccagactcagaccttggacccaaagcctagaccccgaccctgacccgaatcccaaacctagcccctgaccctggactcggcatcaacgctggactcggatcctagatccagccttagctctggcccagacaaacaaaatcaacaaatgaaatgaaaataaaaataaaatttacagaacacacttttatttnnnnnttttaaaattaaaaaacaaaaatgattataaaacacatttttatttttcaaaaatacaaatttaaaaataaaaatttcaattttattgttgtgattaaaaaatattactaaataccatcaatttttattttttttttaaaaaaaattacttttatttttgtgtttaatatttttttttaggaaaaagagtgttacaaaagctatcttatttagggaaaaaaacagaaaaannnnnnaaaggaaaaaaaattacaaaaatactatgggccggcccattaaacatttatacagtccacatacaaatatttacaaaaatac

SEQ ID NO: 99343 - DNA, 2452 bp, Cannabis sativa
atctaacaagcacaaatgtaaataagggagggcactccatagcaacaaaaaaataggagaatgaactaaaaatatacatctagttagatcaatacaaaatgatagcattcatataacctttcatactaggcaacgaaataggatattcatatccgtgagagttgatattattatgatatactcatttatgcaagcattgtattaaataaaatattgaatgctggatttttttttctgccccattaatgaaaatctcgcatttggttactattccataaaataaaataataaaaaatgaacaaatattttcaatacgaaatcgtagacagaaaaattaatagattgtgaaggcaaacagatgctactaatcataggtggaaaatacctcgacttcagccctccataagttggcatgttctgtaggagacattagtacggccatctctggattccagcagcctagtgcactaggatccccagtaacataaagaagttgaccagcttttagatcagtttctatggtcaaaacaaccttgcatgttccctttaaagtagcagttaacatgtctgagaaattaagaaattagatatagcatcgccaatttagaccatgaaatatgctagataatgaagcaaacattgaattcctacaaaaaatgaaaatgttttggtacctttgtccattgacattacagggcatcttcgaaaagaatctcgactccctatacagagagcaaatctgaaaacattaactacaggagtattgtggtagatgtacctgctatggggatagaaacatacacgcataagtaaagagacgggtggaaaatgctgtagctaagatataatcaaaatatgttgattctttttccatttaagcctgagagaagcactaatattcacaattgtgtactaaatatatagaagtaaatgatgtagaatatgacatacaacaagggaacattagttaaattacccaaccacaaagcacttgtatctgaagttagtcacttcttcagataatatacatagcataacaattttgtacaataaatcgttggagcactcccatcacaataaatcgttggagctaagaccacaattcactaatactggaaatttgggtaagtcaaaatctatcaagaacaatgtttgagagagaaaaagaaaaataacatccttcattttaaaatctacttcttcttttaagcttttgattgttcatcctgatttgggtttaagtcaaaatactcaatacatgtatgaatttcatatacatgagctaaggcccacactgttaataagtttcccaataagaacgataagtgataaaccatctttaccgaaatgaaaaaacaatacaatgaaaaagcacccaaaaataaacattgaccaataaaacacaatgtcacagcaattcaaacatagcaaaataccacacgaaacaaattaacccaattctatcatgtgtgtagctatttgtattgtataaaaacccaattcagttcatactattttaagctcagtagaaataagaaaactgataccatgttcatatttaagtgcgcaaagagtatttatgtatacttacggagacaaaaacctcaaagagctgagaaaccaagcagaagaagaataagtagtagttcgatggttgagtagatggctatggtggcgaaaaagacaatgaggttcgaggatatccatgggcatggtcgaaaacgacttcagtggtgtatggagagtgaagcatgaagagttggatgggtgggagcgtaaattgagagtagcagaactgaaatttttgacatcaaagttaaggaagaagaagaagaagaagaagggtcggcctttgtgttagtgttagccttatagccttagcgtgggttcagattgttgtcggaaagatagaatagagagaatggaaaaagttgagggaagaagacgacacacaaacatgaaagatagaatactggattacatttcagctttaggatttggcgcttcgtcttggcacgtgactttttcttgcacgtgatacgagggcttttcgtggcagcacggtttcgacgagccacacaaatacgaacacgacacgaattttatgaattaaaagatgaaatatatcaagtgaagatgatttcgttatttggtattgttatttctgaatgtaaggtgttaattcaagagttgaaaaatgtctcaactgatctgctaccttatttggtagctgaatttgctggctaataaaagtttctttgccttcaaaaaaaaaaaaagactaaacatgacacgatcagtttatcacaaatttgacaggtttgacacaatttttaaaataaaataaaaaatattattaaggttaaatattattttagactctgtgttttgcaaaagtcacctattagtaaagatgaaaatttatactgcggtgacccgcccctaatggggt

SEQ ID NO: 99344 - DNA, 6325 bp, Cannabis sativa
caataaaaatataaccattggaacctcttaccttttatatatattgatgattgatgattataatttaactaaatagaggaaatcactaataatttttaaaatactgaaccaaattatatatttactctattagcgccaaatgttgattaaatgaagggttacaagcttacaatgatagtattttttagggggactatcgatcttttccaacatctttttatgctctatacaaattttccgtatgtgtatatcatacctacaactacaatcattcttatataatgcattttcattgtcgaaaacactagacaaaaaatgtttagttatgttacaaaaaagaataataaaattaaaaattattttgacttgataatgtctagtctacggataaatatctttagatcccttgatcaaattgatttaagatataatttttggttagtaatgtatgtttctttcaagggatttaagatatacgttattatgtttagaggacagaaattctttttctttaaaaaaaaaaaaagaaatatttggttttaaagttgggttacattggttttggttgtagttgagagaggcttaatacgagagttgagagtcttccccgtatgtgcctctttttttcttctgtactaaaacactttgttagacaaaaagacactattttctctcctcattcacccctctctccacgctaaaattccaagaacagagtgattttcttattccttcttcgttatcctactccttcaactccattaattcattcttatctacccatgaaacctcaactctgctaaacaaaaggtacccttttcctctctcttcatatatatctttatatgctatatctgtctttgtttctgcttatttctttcgatgtgtttggtatcatactaaagtttggtagtagatgtgaatcagagtctaacatgaaaacccatttgcgcaggctttgtttttcacgtgactttttcacattctcaagctctcctatggaggttagtcaatattaaatcttcctcttgctttttcacttcttggcatacttgttttaacgtttcagaaggatgtaagtgcttatgcattgtacttagatgtttattaatccattgggtctcaaatgtgaattgttgtttttttttttttctggggtttgaaacttttacatgataaaaatcttttggctgtaaactttgggttctcaatgtgttcgattttgaatatgtactgcttcagttacaatcgtagagttctatgcttttgtttcagtttgctctaatgtttttatttagttgtttctttcgttgattctgattgcattattgttatgttctttgtttttccaacgaggtttaaagctttctctagaacttggatacgaagtggatctgctttttggtttcttgtttctggttggtggtcttgaattttatataaactgtgttttccatggttcttagcttgggttgttctctttgtcttggacatctgttgtctcaatttcgttctcaccatctttgtcttggtttcttgtttctggttggtggtcttgaattttatcagtgttactaacttggcttatgaggtaggacatggatttttttctcttccaaaagaaataaaaattaaaatctcattctgaacaggaatcattaatgggttttgttaacattctgttgtgatcaagatattaagatattttacttttgcagtactgggtaattgcagattggatcagtgttaattagctaggaaagagatcacatccaattgtctctcttttaatttgaatgtcttttggttggtgggatctttctatttgttgctttttctttattggtttagccattaaagagttagatttgaaatgtttgttttcttctgtgaaagaaaacatgcggtgaatagaaatgtcaggattatgtgttaactggccttgcatcttctaccctttggtgagtgccattatctaattgttggtatttgagtgaatcaataatttctggatttgattagtttttctgagttataccatgaagtttaaaagccatatgtcatctatggggaaggttggattatgtttccctttccgaaacttgttaagcatttttgtggtatattatctcctgtttggctttgagcaatttcttgaaatcagttcagcatgcgaaaaagttcttcacaattgtatcttattccccctaaaatgcttattatcctttggcaggtggagtcagttgagctggatcacaatggtaattgcattagggaaacatccattgagagtttaatttctccatgctctcatgatacaagcaatgtatttggagatccagtactgagtcctcgagttggtgaagattaccaagtcaatgttcctcacatgataacaaaatctgagtgtcttaagctgttggctaaccctattgatttagaaacttccaatatttcttattcatttctagtgggtttacctgtcccacttacatggttccataatgaaggtgaagggttaggatctataacaaactctgataacacagttgatgcaaacaagcctcttgaaactaaaaatggcaaaaatgaccgggcttgtgctaggaagaaaagttcagaactcaatattgaatcctcgggaaatggattggaacatagagaagcaaaaccagaaaaattggaccctgtggtgaatggaaacaacagctgctatccaattccaagtttaccaactgactcttggagtaattctgaagtggatagttttatcctcggtttatatatatttggaaagaatttttttcagattaaaagattcatgggcaacaaagacatgggggaaattctttcattttactatgggaagttttataggtctgatgcatatcggagatggtcagatagccggaagattaaaagaaaaaaatgtgtaactggacgaaaaatatttactggatggaggcaacaggagttgttatctcgattgtctccgcatgtcccaggggattctcaaaattccttacttgaggtacttcataattcgtttccttttctgtttttatttctagaatgcagatttttgttttggtaatgaaaccaagtgtgtatgtagtgatagacatttgtttccacaactgatttatgcatgcattataatattttctcatgtttgtttcttttatggcctaagtttgatcacataatcgcttttatgcgttgtaaattattgttatttttctgatatatttggcagaaatttgctgtatctggcttcttattcttacgatctgtttgtagggctacaagtcatttgctgaggggagaatttcattagaagaatatgtctcctctttaaagtctagtgtcagcattcctgtacttgtggaagcagtgagaattggtaaaggtaaagaagatctcactggctttgcaatggatcctggaaagagcaatcatgatgttttagtttgtcccctcttaccaactggtcaggcttgttcatctctcacatccgatgacatagtgaattttttgactggaggttttcggctgagcaaagctcgttgcaatgatatcttctgggaagctgtttggcctcgtttgctagcaaaaggatggcactctgagcaaccaaaaaatcagggctatcttagctctaaacactatctggtgtttcttatgccaggcatacagaaattctcaagaaggagacttgtgaaaggagaacactactttgactctgttagtgatgtcctgaataaagtagcatctgaaccaaaacttcttgagctagaagctgaagaatctcctgttggaggccaaaacgaccaagatgcatcagaccaggatgacccttctgattctcaacgacattgctaccttaaacccagagtctctgcttgtacctcaatccaaatgaagtttactgttgtggataccagcttgatttatggaggaaagtcatcaaatataagagaacttagacatttacctgtcgaatttgaaagagccgcaaaagagactcattattcaatggaaaatgaaagggattctgagggcgatttggatgaatttgagactgttgaaaaggtctcccatagtgaaaacgtcaaacagaacaagggtagatctgacagtgatggtccaaattgtatgaagttcactgttgttgatacgagtctcctacatggggggaaatcatcaaaagtaagagaactgagatactctccaatgttagttaaaagtacttctgagttgactgatcttttgagaaaatctgcaaccgttgaggattcatcaggcaaacaagaaaaagatgtatctgacaactcttcaaaaggtaaaacgaaaatacaaaaaaccaatctccaaaagaacttacatggtagcaaaaatcaagtgtcaaccaaaaatcactcagatactacaaataaaacggggacacaagtggatcagaactctagcatatctggtgagaagcatctgaagaagactgttttgcatcaatttaaacggagatcaaaatctggtcattcagattatgcagttcctctcatcaaaagacgaagattgactgcctgtgcaaaggcaaaggcacccgaccactctcaaaatggctccctaggcttaatgtcaaaacaaattgaactccaaaggacaacaaagtcacctgaaactatcaagaatatcacttttcatgtccgccctcctcgagaaaaggaatcctctgttacctatcttgctgaaagtaatccacttgaagatgttaagtcaaaagttctgagagagaactgttttgacaagcacagctctgaaggaataagcaagaaacatctagctgaagaatcaatgaacatacacccacctcatggtggtgcgctggactccagaaaccacagtatgttaaatgaggagaatgacgaaaccaagagagtgaatacgaatggtaatttctttccttctaaagtaaaggagcttgttcctgagacagtgaaaattactaatgttagtacatctgaggagaaccctgccatgaacagaaggcagagcaagaggaatcggccattgactgctagagcattggaggctcttgccaacgggttcttaaatgttcagaggaggccaaaaagtacagacattctctcaggagaaaatcctttttcaagtccttgccgcaaggcacgtagcaaagtcaaagctacttcaagtcatggtgatcctcttgctgggattgtggtgtcaggaaatgacaaaaaagtggatggagcttgtgatgagaagaaacataaacttatgattagcaaaccacttgttcaagttgaagaagaagagaagcggctccttacccattgaggattgtttgcagagaatttttcgatcatcttgaagttttgtttttgacagaattatctagtgaagtgctgaagtttcctccttgtgcctgaaattttgaatatgctgaggcaaacttgtcaaaggcatttagcgtcaagtcctttaattatgcttgatttttgacacttggaagttggagcaaagagctagttcccaaaatgggaacagaagcaggctgtttatattaagagaatagggggatttagttatccagaaaggctaatcaatgaaaagcatagctatggaagcactgaagaatccattttttctaaggtacgggagatttgtttcaaaagtttatgctctgatcaggtttcaactgtataattatcagtggctttctgtaattaaagtgttcttatatgatgaaagtctttcctgttctcatcattccttttgtattgagtcacatttttaaagtttgtgtgatattctaatagcttttggagtaactaaaaacactatcaaagactcccatttcatgttccatacaacataatttagcttctatttcttggctattcagccatattaaatgtttttttttttgttattattatttactttgaatttgatattttgtggagtaagttcattcaatttatttttctctttccagagtttggcaagagaaaaaagaaatctagtttctacttttagaaaaatatcaattttttaattcttttttcatatacgtgtgctatagtaatggcaagttaacttctatttacagctagtacaaactgaagaggaaaatcactgttttttctagtttctaaaaatgttatctttaaaatacttaaaaaacttcatgtgttgcataacttaccaaaacaagaatgccattatatacttaaaaaacttcatgaattaaattattttgacattgtcaaaaaatttgactaaattttgttgaagaaccagaaga

SEQ ID NO: 99345 - DNA, 3597 bp, Cannabis sativa
tgtaagctcaatcctccaacaagtacttattttatatgatactgcatagtaactccagcacacagcattttaaaattatgtactacagatttgtgatacatggcattattacggctatttttcagtggatgacttggccaagtgtaacaagatagtgggtaagggtgatgagaagcttgtcatgactggaaaatctaccaatagttcaaggcggtcatcaattgttcaagatggatctaaatcaaggaaatacttcccttttaagcaaggttatccatttgttgccacacttagagtgggatcggaaggaatccaaatgaccgttgatgggaagcacataacatcttttgctcagcgtgaagtaattactaatcactttcatctcatgtttattttggcttttaaagtgaaatagactcactccttaatttattattagctcactgagttctcatctctcaggcattagaaccatggctcgtcagtgaagtaagaatttctggagacttgaaattggtttctgtcctagccagtggtctacctacatcagaagattcagagcatataatggatttggaaacactcaaatcaccttctctctccaaaaaagctgcactcgatcttttcattggcgtgttttctactgcaaacaattttaaacgcagaatggctgtccgaagaacgtggatgcagtatccagcagtacggtctggggcagttgcagttcgttttcttgttggtctggtgagcttcacgttttttatatttatccatatttcttctcttcttctcaacatgcttttgattggataaaaaatgacaaactagtaagctctatggaaacttttgcagcacatacaacatagttcaaggacattggatgaattttttacaattgtataaagaaattcacaaaaggaaaatgagagcgaacaaaggaaaaattagatgatgatgataacatgatttttatttgtattttatgagtttcttgtttatgcaaattgttctgttcaaagaacataagtagcctatcgttggattggatgagcataattcttctgtcaagttaactacaagttcattatattgcagcataaaaacaaaatagtaaatgaggaactgtggaatgaggcgcaaacatatggagacattcaactgatgccctttgtcgattactatagcctcatcacatggaaaactttaggaatttgcatctttggggtaaaattttcttccttgttcatcctttctcttaagatgttccatactctttcttattaaccttctatttttaaacagacagaggttgtttctgcaaaatttgtcatgaagactgatgatgatgcatttgttcgcgtggatgaatttctatcatcattaaaaagaattagcgctagtcgtgggttgctttatggactcataaattcagattctcggcctcatcgaaatactgatagtaaatggtttatcagtcctgaggtaattatccatactttatctaattgaagttggaattgatcatgaatctacactcagactctccattcttgattgagctactgcaaataacaaactagtctttttgttctttctagtatgctaccatgttagtgacaacgttgacatatatgcacgatacatttatattttgttatgtacatactttaatgtgcaagaaaccagtttttttcatatcaaatttttagaatagcccaaaagaatgttggtaaatgaccttagtgtccattagttcagttatttttgtttaattcctagttctttcttcaattcgtagttaggcttctgtgcactgctttcattccaaggttgaccagatgaactttttggcttatacgttgatcatttcagatgtagggcaaccaagctaaatgccttgatatgaaaaatctaatgctgcagtgtcttactttagtgtctatcttaatgtaggaatggcgggaagatacttacccaccttgggcacatggtcctggttatgtggtctcaagagacatagcaaatgctgtcgtcaaattgaacaaaaaaggccgtttgaaggtaatatggaagcttttagcaggcataatttatagcaacttcattctttgcatacatggaattttgtagtaaaaacaaggtctattctaatgtcctattggttaaaagttacaatagtagtttctgaatctgaaagaaaacattttgttttttaatgttttctcagatgtttaagctagaggatgtagcaatgggcatctggattgcggagatgaagaaagatggtctaaaggttcgttatgaaaatgatgatagaatctataacgaaggatgcaaagatgattatgtggttgcccattaccagggcccaagagaaatgctttgcctctggcaaaaacttcaagaaggaaaaggagccagatgctgcggtgaaagataggatattaatacatttcacttttaactggagcttttttgaggaagctccaccactgagaaatcttggtaaactaatctttgagtagtgattatctgaccaaggttgaccaaagacaggagagatgaccactctaactagaaggtgaggaatcgattgttgtaatgggaagggtttacactattgttacatattagtaatagcacggtgccatttcattttcttatagaaagcatagaaagcatgtccaaaaattttgcaaattttgtaggttagagattctttggccttgtataaatcttaacagtagttggatattccaaagtatatagtgtcaatatcataaaattgactaccatagtgtatttacacaactctttatcctctgtagttttgttctgttgtatgcttttgtttaccaagattttaaaaaaacggagattcaaaaaagatttaagctaaagaaaagattgaatgtaactaaatattagacttttttcatggttggatattaatgagtcatagtctacaagtcagtgtattggtcaaatggtgtttttcttagattatttgcgtagagtttttgctacactatatcgaatcctttgaaaaatttacatggtttattaactttttccattttatttcaaaaatactgctacacgcatattttacttttatattgtgtattaatttattgttttatacgatagtatactgccattggtacaaaattcattaacactttgtggcttacacgtgtcttcaccgagttttgccacttcattttttgattttttttttctagaaaagctttgatttaacgtggggtgtcactatttgtgacagtgtgtttctttttggggttttaatttatttttaaatatttcaaaaagcttagatttgacatggggtgtcactatttctgacagtatgtttctttttggggttttaatttattttaaaattatttttaaatatttttaaatgttaaataatcattactaaaatcttactctcccatgtttcctatttatcttcttctaatatccatttttttttcaagcgtttatacagtttgtgggtattttattttttatttcaaattttttcaattattccatcttcatatcatttccctattcattcccccccccccc

SEQ ID NO: 99346 - DNA, 2393 bp, Cannabis sativa
ccttccaagctgcctatctcggttgcgcgctcagcgccaataggaggctgcaaccaacaaatatatgactaagaaatttgactctatgttaaaccaaattaagcacacaacacaagtacttcttttcattttggaatttttacctggagcctaatgccaaggtgtttattccaagtttcttcagcattttcggtctttcccatgtgcaaagacacatttggtgatgcccaaatggttacataaattgtttgtacattggcttcaacaaggtcaagtctcattaaaccaccaacatgtatggtttgccctgcctgaacatacaaaaacatgtttgaatttaaaaacactctaatctctttacaatataatcaccattactataaccattccattacaccaaaccaaatgcgaccttagtgtccgaaatttgatgagatagaacatgtttgttattgaaaggagtttcaggtaacaaactatgttaacaaactattcatgaaatgattaaaaagcaaagagggtattgaacaacttgccttcattctgtaagttcgagcttttagctccttccgaatctcaaccattttctgctcctccctattcaatctcatggacaccaaataaggatgtagaagtcccggagtatcaaacaatttcgccttggcaggcaaaatccctcctattcttatgatcccgagagttgtcccgggaacaggagcttctgttagctttttaacttttgcactttctttctttgcaagcgcgtttattaaagtagatttgccagcattctgagccccaataacccatacattccctcgaggaccggctaactctttgatgaaggaaagcaaattcctcactcccaaatccttacgagagctaaccaaataaaccccgcttagtttaggcgcccctgcagcccgagcacgatgcctaacccatctatctaacctagtaggcgaaatttgtgatggtaaaagatcaacctttgtagcaacaagaacaagctttggtaacctttttttaagctttggatcatctttgttcccttctaaagccttaaacagcgatttagccgctcgttttgggaatgaaccatcaaaatcaacacaatcaacaaccataacaacaactgtggaattagaattcccagatggtttcaccaacctggtagaaatcaacctatcgaaatcaaaatcgggtattaagttctcaactgcttgattcttcacctgcccataatttctcaaagaatgacatctagcacaaactgtaacctcctctttctccttaatagcttcttccctaactttcctcttcttctccgatttcgatatcttctccttcttcaacttcttcaaaaaatcctcagttatgttaccataaccaaccccaggtggagtaaatccatccaaatccaatgaattatcttcttcctcctcacccaataacttagcttcccattcatcagaatcccaatcaagctcatcatccccactacccaattcactttcttcaacatcacttccctcaatttcatccaaaaactcttcttcttcatcatcataatcttcttcaatttcatcaaacacctcaagttcaccctcaacatcctcaatttctgatttaactacctcctttttttgaaaaaaaccaggaagatttgagtccttatcttgcataaaaaccccacaaccaggacaaataggagcatagctctcatcctcatctctaccctcactcaaaaccctactcccaccacctttccttggtctaattttcccatcaattttctcactttcttggattttaacaccacaactaacaactaatgacttcttattattaagcttgtttttgccaaaactaattcctgagaaaataaataacaaataacaacaactactgtaaagttcaaaactttaaaaggaaaatggaaaatgaatagtggaattaattagttacctgttgaagaaggggaaattgatggtgggttttctcttttgccgccattgttggaaaatttgaagctcaatttggtggctgttgcagataagaaaactgccattgattctattttgggatttttacagtgaactattttggggttttcttattgtgcttggttttgcaaggattatcatctcactgaagtatttagtgatggaattgaagaacttttcagaaagaacatatctttatgaatattttttgaatcagacattaatgggagaaagatggaaatggattaatgaaaatggagacgaaagagcgtggaagagagttgggcttcgacttgggcttgggcttgggctttgtgttatatttattttcataaatacctaaacatttaagttgattttttttaatattgagatgcatatgtaaat

SEQ ID NO: 99347 - DNA, 1626 bp, Cannabis sativa
cctgatcccccaccccgagccaccactctgtacacgattccactcctgctctttcccaccacgtaagccgatgctctcaacaaatcctccaattctaaactgaacccttcgtccatcactacgaatttacctttttgcccctcttcttctactactacttccgtctcctccttttctttccccattttgccctcgttaccgaaacccgccgttgatttccgccggaaaagccagaccgacacgaagacggccccgatcaccaacgaaatgcctgatacgatcggtacggtgaccgagattcctccctcttttcctctcccttcgccggagggcaaatcggggttttcgttcagaggcttctctggattctgatccccatcccgatcaccgtccgacgtgctcttagagagattagggttttgagcttcagggcattgagtctccaatggaaatccgcagaggcttggatttccagagaaagcggtgggtccctggttcagtagagaaccgacctgagggattttaccggtgaggttattgtgccgaagatctatgctaaccgggaccggaattcttccgtacgagggagggatcccgccgctgaagctgttataggagaggtttagggttccagcgagggattggagttggccaagggattcagggagggagccattgagttgattggaggagaaatcaaggtgcctgaggtatttcaatgcggagatttgagacggaattggaccggagagggagttgtgagagaggtcaaggatgacgaggctggtggcgttgaagaggtgaagcgaaatgggtcgagagaagttgtttcgagcgagactgagtcgcttgagcgagtcgaggtgaccgagttcagaaggaatgtagccagtgaagcccttgttaggaagataaagatcaataactcggccgcgcgtgcatgccacgccccgccagctacaaggatttggatcggattcggaccatgacccgagaattccagttgggtcagtgtcgatagcggctttgagtgcgaggagtgagagtccatcggagttgagtccgtaggaaattgaaacaaagaagatgaagaagaaggaaaggaattgaagtggagaaaccatttttttgagttggattatttgaaaatgggagttaggattgaggcatttgagctcaatttctcacttctctttctgcaacgagaagttgcttagagaaaaatacagactagttctgctgaagaagaagaagtagaagtagcttttgtgttgagtttgaacagcaacaactctcgaggtggcatagcaacacgtgtcttttctaatttgaattcttttgaccctattattttaattaaggtaaatttctatttatttttgtattaattagatcacctaaatggtagaatctttttagattcaatattaacatgagtaatagcttcaaatttattatactattaataagaatatgagctaacaaaaaattaattcaatcctactgaaactgaaattgtggtcctatatgatatcgatttccacttaatataattttggcttttactattgtgtattaaatagtcacactttatttcaacataaatatttgaaatgtgcataaagt

SEQ ID NO: 99348 - DNA, 1836 bp, Cannabis sativa
agtagtctcatatattctattaacttctaaattagtaatgtcttctctcgaagttccgccattactcaaaccacaaacttgcttcggtttctctcaagctcggcgctttaccacttctgccactgttttctctcttccatttcgccatttcagaacccttgcttctcctcttctctcaactcctgctcttaaacttcaaacctctagatcaactcacattccggccattttggactcagactccggcgccatcaccacctccgaccacttatctgaacctccggtcagaattgtcgccttagtaggccatggaaccctcagtcctctaaaatccgcaccttggcaggaggtcatgctccacactgtaagtactgtgttgaattctttgttttatggtaatatttgggttttacatatttgctgataattgggtaattaaattttaggcaaagagattgaaatgggttgatgaagggtatgaaatgatagtgtttactgatgatttgactcaattagatactgaaaattgtgtgaatttgaaaagggaattgagctgtgctgatattttggtgattgtgggtgtgaaaaaccaagagtcagtgaattggattcaaagcaatagtgggaatattggaaacataatttgctttgagtcttctcccaatttggtgaataaattgggaggttcatatgtagagagtcaaaataaagggaagccattttggggccaaacaaagataagtaatgaaactgtagaagtggtcaagactgtgtctgaggcttgggaaaggcataattctgatgatataagattttgtatattagttataatcaatgcttttataaggccagtctcaattctaaagaatctgagatcaaaggggttctctactctcagttgcatggtgaagaattgtgggagtcagatactaaattgtctattggatcctgactgtagaaaagcattgcagtgcttgaataattgtagtcctgtggatcaagtgtgtaactatcggtgcattgcttcatatgaaagtcctacattggaagcattttccttgtgtgtattgcagaagcacaattgccttggattagatgctaagattcctgaaaggccttatgtgcctcccatgtcgaaatttcgaggggaagaattgtgccatgaagttgctgaggatgtttttgttggctggttggggggtttggattggagttggcgtgtagtggcgggacagaacccagcttatgatcaattcccctgtcaataccagctattttaccggggaaaggcaaaagggtcgttttggtatgagccagtgtttcaggtcaaaactcttgagggcaaaatggtttggaggaggagaaagtatagagttaaaaggggaaaagttgttgggacattttacttcagtgtgttggacaatggggttgtgtctaatgagttttggaccatagtggatgcaccagatgatcttagttggggtttgtttcattacagtggagctgctcgagttgcaggacaatcttatactggggcagtgcttgtgagtccagatggagcatacccaaatgagatggagaggaagagattggtttctgctttagagaaatgtggaattgaggaatgggagctttatacagttgataattgttcatgtgcagatcctccattaggaattccagagggttcaaatttgcattctgtgattcaagttaaagaaatgacccaattgggtgttcaaattgggctaccgaatgtctgaaaaaaataaataaataattaagtagcatttacagtataataatttgactttttctttttctttttttgttaaa

SEQ ID NO: 99349 - DNA, 8458 bp, Cannabis sativa
  modified_base (3604)..(3608): a, c, t, g, unknown or other
gtttaacagaaatatgtgtatgtttgagaataaatatattagcttgattgtttagataaaatgagtaaaatgtgtattaaaattagactatgctcagtgaatagaagaggtctaagaaagatttagttttttttttttgaaattaagatttagtttttcttaatttgatagattagatgtattttgagccgtgagtttttttgcttttacctctcgctataaaaaattttatttttagtcacaataaaacttgtgactaaaagtaaaaaattgtgattagttataaataataattctcatattgtgattaaaaagcacgtggctgaaggtattagtcataaaaattataattcgttgtgattaaaactaaattagtagtaacttgtatttaaatattatattttagtcacatataaatttttttagtcacaaaaaatcatgttatgactaaaaaattgtcactaaatatagttgaaataagaatgacctctcaatcaaagtagcactaaagtattagaggcagtgccaccactgctattaaaaaaggcaagcataatgattaaaccctctaaaggacaaagtttcaaaaaaataaaaataaaaaaaaatactttgctttcttttgaaaattacctaaatatagttgttgaattcaagtggatcacttactgagcttaaaactctattagcacactattttatcatatgtgttgataatcaaagtagtactttatttgtggctaatccagtattccatacttgatcgaaatatattgaaatcgaaaaacatcaaattttggctaagtagttgtttattcattatgttcctgccattgatcaagtagcggttgctctcactaagcctttgcctaccgattgtttcaactattttaaatctaaacttcaaatgattgctacctctttttgagagaatatttaattaattagttagttaaccaattgtcagttagttgttaagatagttaattcattttcttgattcagttatgtaaatgtaatcttgatattgtttgctctctctctctctctctaataagtgaattaagtttttgctaagatgatccattattggcttttctctcaaatcatgcaaagcatgatttagtcatttacagaacacaagtgtcatttattaatttgagaaagtaaaaaaatgtattactatttcttttttctttatataatattatcttttctattttatttttcaaaatatcttaccaaaacatcattttttttttattttatcttatatatttatattacatcacatatcaatttctctataacttctctattttatttataaattattcaattaatatattttatttattttaaaaattaaataaatataataatatcatatacatacatatagtacaaaaatgtttaaaatattaatataataatatttatagtttaataaatagtactttttacatgttagtcactatttatgaactaaattttttagctaaaatagctatggaacaattatttaattattaactattttagctactctattttgactgcttttaagtttaaaattcgaatggcctcccctaacgcccaatatatataattaaacttattattcacaataattttggctatacatagtcccatatatataccataattttcataatcgtgttcttgaatttttaataaataataaaccaattaaaatttggtatgtcgaacatttttttcagggatgattgtattattattattttttttttgaataattaataattgtttctattttctttaatttttttataagaaataattgctccttttcccttttgtgaacaagaacaagagcactaattagactaattgttttaaaaattgcatattgttatatcaaactgaatttatctcagaacaccctacaaaatataatttttttttttgtccatatcacacttttcttttttgataatatatatgaatacattcaaacttatcttaactgttataacttatagggaacatctttcagagcaatccttcaacccacatggatggaaatcattgacaataatattagctagctcccaaatatatatatgtatatatttatatatatatgatcaaatttggccatggaagatttggagggaagacaaaataatggaagattaagacccttttatatattttattataataaagttttatttgttcttcagctttcaaatatggtattattgttctagatagtttttcttatattcttgaaagttattaataataatttgtcttgtaaagttcactattcttttacttttcttttcttaatttcttttgtgtttctaatttttcaaacatatgggctagactttgtttgaactttaaagtcaatgatgttgttgtgaccttatgtagaatgtttaagtagttgggtgggccacatttgaaaaaaggaagaaaagaaagaaaagagaagaagaaataaacttcaaattctatcaatttggttttgaatttttgtgagaaaaccatatctactctcattgagaaagtgaaccaagatacctaataaaggttggtttatttcatatatataaataaattttttttgttatgtatatattataattcttgagagcaatcaagtagggtaagaggcaatgaataaaggcattttgcattgtgatcaatctcattcaacaatcaacatagaattagatttgaatatgaatcaaaacaatccaaagttccaaagcccaaaccaactcagtttgtctttatagatttgctaggcctagctaggcctataatcaaattacaatagtgttaagtcacttaatcttttatatacagatagattttcctccaacccatgaatattaaaaaaaaaaagtttttaattcataatttactggaaaagtaaacattttgagtaaaagtattcaagcacatatcataaagaaataatacagcaatgaatgaaagaaacatttctatgaacaatataactatccaaaaaaaatgagatggctaatagcctaatattgatttgttatgagattttcaaccactctttactatttcaaaatattgatttaaatattattttagaacatttgttttgcaaaaattaacaatagaaactctatgttttgttaaataataatttaaactatgtattttttaaaattgtacaaaataatattttgaactcaatatttttttttaaaattaaaacctaataataatttgaaccgaaagtgtgatgactagattggttacattttctttttgcatctatttgtgttgtaaactggtttctattggttataataataaaaaaaattaacaaaaataaagctcagggtatgatttgtaccatgttgaaaaaaaaggcccaatttatcatttaacaaagggattatttcacaaatacacaaaaacaataaataaaattacaaaaatacgatttcatggaattttaaatatttttacgatttttaattttatttacagaaaatacggtttttttatgttgtactcttgttaatttgtcgttgattttttgttatctatatgttattttttgttgttnnnnngatgttattttcatgttactttttctgtagttttcttgttgttttcgtgttatttctatggaaaaccgtaaaaatatatataataaaaaaaaatctttaaacttaaaaatgtaattttaataacaaaaaaatagtaccatatataattatccctttaacaaaataaaagctccaatcgatcttttacaaaatacagaatccaccataatattattatatatttttttattattattaataatataacttggggtagctaatatcactttgtcaagttcaaattcatctctacttctctaatagagagcaataatatatataacaaaataaactagatttagttaagaaaaaatctgacaaaaacctccaattagtaatgccttcaatatgtaacaaataagattttattaacaaatatttacaaatcctaaaaaaaaatattgttttttcttcctcttctttcaccacaagtagtttacttttgaggttttaataacctgtttttgttctttactttcaccttctttttccaacatttgagtagaattaggaggatgagaaacaacaaaagcaacatttacaacattgtcatcaccactaacataaactactctaaaaatgtcatacttaagctcaagcgaaaatcgttcgaggtatggtaacatcgagcttctttgatctgttaaaatccatgaatagcaaaattgaaggtctttccacacatagaaagaggctgcagctgacttattttgggatttcaagcaaaccccagatgttacaccatccattcttagaaaatttgacttgaaaagtgctaagcaagcataagagagatcatttatgtcatttttggaactaagggatgatgctacacacattgagattgtgtcacctctgcagaattttgcagcaccaacactgctgtctctcgattcaccagcatacgaatcgaagaagctatgttcggttaagattgccatggttgagatgttgttgagcattgagagctagagagaaaagactttctaagtgttaaaatatttggtgtaaaaaaagtgtcactagaataaataagcaacattttgttgtacaatttctctccttaatacaaaatggttaaaatgcctatattttgtttgacattacaaaatctatggagaaacataagatcttcattgctttattttagttattactttgggtaaatatcattttaattagaccctgtattttgcaaaaattataaattggactctttgttttgttaaatgagttaaatgacaaaataatgacaaaataaactaataaactatgtattttttctaaaatagtacaaataagatcctgaactaattttggttaaaataaaacttaataataatgtaatctagaggtgttatgataaaactggtaaaattttctgcatctatttgtgttagaaattgtcttcaagttggttatattaaaaaaatattgaaaattaagctcaaggtcctatatttatactattttaaaaaatacaggatcatttttgtcatttaacaaaatagattgtcaaatttgtaacttttacaaaacacagaattcaaaataatatttaccctattattttttaacaaaaatacaaatgaatgaatatgtgtctgaatcaaatatatatgaaatatgtgtctttttatgaaatttactacaatgtaccataatgcacatctagttgttattggaactaaataaagaacttacaagggttgcaattagtgattctttgttctcacaagacttcttcaaccatgcaccataccatagaatctgaaatagtcataacagataaattctttcatatataaaacattataaataaacattacactaatttgttttaccatatatgatcatgtaaagctaacccaaaatgaatatatataaataaataaaaaaatatattaccatatttccatggatgctctgaagtaaagaactttgaacacaaccaagagtctcagtagacaaagagaaatgctttagtgcttcaataagatcaccaaccaaaaccacagttggcctaaaagcaaagatgcttatatccaaattcctattattgaatggaataaagcaagcacctaccattatcaatttgatcactactttggatattattatgcttctattaatttctggtttctcaatcttcttctacaacaatgatttgaaagagagctttatatatatagagataataactagaaacatctatgaagatataaattaagttaatattttttatgtagtggttgatgtgttcttagagaaataataagctagcctagcttggtcatggtggtgtggtcttttttggcttcttcttaatttgtattatgaaaaattattaaagttagtttggaaaaataccaaagaaacttttttaattataatttctttttaatgatcaggaaaaccaaatgcatggttttgaccgcttctagatgttttgacttttgtaacatttttttctctttattttaatatggaagagtgctaactataactttcaactataattttttagtcaatttctatatttgaaattacatattgaaatattttttttaagtttatttttattgtgatatttgttatatttacaatatcaataagtttttaaaatttttaaataatttatagtatagaaaacaaagatcttattattccaatttattatacctgttaaaaaaattttaaatttttttcgatattatagattatttaaaaattgtaaaaaattacagaaataatattattagtataacaaacattgctataaaaaaatttgaaaaataaaatattttaatgtatatttttgaatacaaaaattcactaaaaaattataataaaagattaaaaataacactcctatttaataagaattgaaaatttggactgaaaattgtgtggtgacatgtgtattgggtagcatcatggactggaaattgtgtggtgacatgtgtattgggtaacatcatattatatattatataaatctaattatatctatggaacacaactcattacttttctatttatctaaatatctacatgtgataagacaacttcttgttctagatattcaacaattcagtattgtatcaaattattatattgtaaaaaatcaggtctaaattacttgatcaccaaattctccacaactagatcttctgtctatacattttaatacatatatattaagagtaatgagcattaaaataaatgtaagctaaactttattttccttttctagaaaagactgttgagtgttgagtgagacacttgaatttgtttctcaagaatttctaggaaagtagacatatatgtacaaatattgattgttgctaaactttgtcaaaaattaaattagtttgttttatattgacaggacaggtataacatcattgttttactgtactaataaaaataaattaagtttcacttgtacttatttgtaataaaaatgaaaataaagagtcaagaatctctcaatcctctaaagaaaaaaatgtcaaaattttaaaagttagattttaatgaagaaataaaaaaaaaagaagaaatatagccaaaaaaaaaagtgtaaaaactaataataataataaaaaaactaatttataaaactatgggcattatgaaaaattgaatttttccattttccacccattttctctcaaaaactaatggattttaatattaaaaaaaagaacattgccataagcaccagtaatgcctataattgactagcactcactattatattaaattatatgaaacccaatacttaatataacgatattaacagaaatactaaacactacttataccctttagcatttctattaaaaagaaaattaaatttctctattttctacacttgattttaaaattaatttttgagactgaattataaataaggatcagatggttcaaatgagtgcccatgtcgtaacaggctttggggcagacactcatcttgcatacatagcaagattagaccactcatcatatcccgtttctgcctgaaggatcatgcttcttccatttcatcctatccttattttatcttctcactttttacactaattctctcaattttccatgtgggactaaatcccactctttaatccatatatagcccttctcatctcactgccaagcgcacagtttttattgttaatgaagaaaaaaaaaaacaaaactgaaagtttttggtttctatcattgattcagtaaataatgattgccgttttttttcttttttttttgttcgtataatgattgccattattaatggtctgatattggttgtttgatgataatgttatctattcaatataaatacgttatttgacacatactttatacttatagaacgaatcacatttttttctaatgaagttaaaccaccagaccaatgataaatattgcaaagcataacaccagagatcaaaaaatgatcaataattcctgaataagagtgccaatgctcatttggctatattacttcgaacaagtgactaatcaaactacttatagagcataccatcatcgatcaaagaaatgatcaatgattcttgagactcatcttaaatgaattggtgtataatttaatttatttaagttcagttatctaaatagatatgcttcaacttttagacaattagtatggcaataattagataagtgaaaataaatattttacaatttacaatatactttgataccgaaaaacaatgctcttcatttaaatctcataagttgttctaattaatattataaaattttgcttgtacaaaaatagatta

SEQ ID NO: 99350 - DNA, 2777 bp, Cannabis sativa
tttattttatgaacaatgtgtaatagtttgattcttattgtgtataaatgataatattcgattaataaactatatgattattattattatttttcttactaatatttacttgtaaactatccttcaaacacatacaatgtcacaattgttaatgattttaaaaatgaagaacaatataaattaataaatataggcatattctacaaataatataattaattttgatttatttagatcattatgcttgctagttttaatttgtaaatattatctcttacatattctttttttatataatatcttttatatatttaattctaaatatgtaaatgaaacatattttttaataaaataattttattatcattataatttttttttattttaaattctaaaaaaacttaaaatgaaataacgaaccaattttaaaaatatccattttttagtgtaaaatattcaaaaaaaaattatccaagttttggtcaaaaatactgaaatattagtaaatgtatatgatcttatttatttataaaaacttttttaattattattattattatatttttttttggcttaaatgttaaagttgataaaaaaaaatagagtaatttgtgatataaatatttaagtttaactaatgtatatttgaatttaattctcgttgtaaataaatacttaagtttatttctattgtaaataaataattaagtttaattcatgttgtaaatagcttaatttttaataataattctaaaatttctaaatagtaaatgttaagtaaattgtcatatgacaatttttgattggtctaggtccttaaatttttaattttttaattaaattaggttaaatataccaatgagaaaattaaacatgtataatgatttaatatttaacaactaatagttcaaaaaatataacttaaatattattatcgttaaaaattaaatttgagtaatgtaatttaaattttttaaaaaataatcattaaattaagatttatttatttattttttgattgaaatcttttttatttatgaaaaccaagaattgaaaaaagaaaaagaaataaaaaaaggtcaagccgcgaaaagttgaaactacgttaggagcggcgctttgggggtttgggtagaatataagcgaacgccgaaaaggaagagagagattccaaatccaaacttttaacatcaaattcagccaaactcctcacactcacacgtgcccccaattctttttttacaacaacttaaataaaactaatacccaatgtttgtcctaatacaactaggagtagtcaacatccaccagggctattttcgtcatttaaccctaaatagattcctatatataccacttaaattacttatccaaaattacttaatcgaaaaagttattattcccaaagaaaaaatccctctcacttaaaacatatccaattagaatcattattctaattagttgttttggttttaaattaacgtaaattttcccgagaaagcgcgagaaaattaggaaagaaaataattgataaaaagaggatgagaatagatttacagggccaggcagggtgtagaaaattatagcatttcattctcgtgttctttactttttctgtccgagaaaacagctcattccaaaacacttgctcccctaatttaatttttaatccatcttttttttttttttctcgtccaaattttctcttttttatcttcaaatctgtagaaaaaaaaaagcatgcatgtgacaagtgtgtaatttcttattgacccatcgaataaaaatccgatcggcgattttatctgtttgggggagaaggagagagaaagaacaaacttcttcctcatctgagtgactgatctgtggtggtgatggggaaggtggcggtgggggcagcggtggtgggtgcggcgacagtttgcgctgcggcggcgctggtggtgcgccacaggatgataagctctggtaagtgggctcgggctttggctatagtgaaggagttcgatgacaattgttcgactccaattgggaagctcagacaggtggccgatgctatgaccgttgagatgcacgccggtctggcatctgaaggtggcagtaagcttaagatgcttatcagctatgtcgataacctccccactgggtatgcatctctttctccctctcttccttttcctattagtttagttttctcattaaaagaccaaaatgtcaaaatctatgaatttgcggatttcggagcttactttctcagtgtttgattttttttttctttcaatatgttttctttaaaagctttcattttctctgttttttttttatttaactgagaagcaaataattggatatggtgacgaattatttgacttcaatatcaataaatacggtctttcagtttgtaacatattggtatttggcaaaatcagaagtccaacaagtattttagctaagtatcctggcgttctgttccatccaaaaaatatggaaacatgggctagtattaattgattggttgaagtattgaatgaattaaacttatgtgaaaataaatgtttttgcatcactgagagaacttttgtgaagactctattatctgctaagcttttgtgccgttattaattttatttgattgagatactgggacttttttttatgctttctttcgctcgtgttttggtgaggtctccttttgtttttctcgtatagtttttgtttttgtttttgttttctatgttatctagtcttgctggccgttatagctttctaactgtttt

SEQ ID NO: 99351 - DNA, 7130 bp, Cannabis sativa
tttttttattttgccaaacactttttaagcaatagctttttcaaaaagcacttttaacttttctaaaagctaccccaaacggggccttaatcccaattttgtggactcactatatatagttcaaacaacaacaaaaatgagttttagcgccaacaacgtacaaatgctaacattaatagcattagtagtgttgctaacgttaaaatcgtcattaatcgtaatactgatgttaaaactaatgatacatttggatcttattttaacatcaataatgcatgctaagtaggtatatatatttttttaaattgaactcaaaaaatacctaacttaaacatcttacaataccattacaaagctacatcaaagtatcaaaccaataaacaatttaaaatttaccaatatacactaacaaacataaatatatagaaaggcaaaaccacacgagttgccaatactaagccctgacctcgagtgtccacaaatccgctaccaccaccacacaccaattgcctcctccactacaaaccaaccaccactgcgtgcaacagtaaagcaaaaaccaagatctcactagaaaaatactgcaagagagaggcttacctagttcgttgatcgtcgcatgcccatcaaacccatatcatataaaacagaaagaaagaataatgagaatgggtgtgaaaaataaagttagagaaaaataattattggctggaaatttagccaacaacgctaagtctaaataaacgataataataaatgagaaagagtttagaaattgataaatgacatcataatttatagaggtttaagcccaagtcttgggatataacctaatccttttgagcttgaatggaaagagaataaaagtaaaatgacagagtctctacttacaaattgtgtgtgacttttttagaggtaaaagtctggtatttaatagaatttacatgggccttgacctaccaatcctacacgtgtaaaacaaccatatgttaggttaacatttcaaatactcaaacacctaacaaaaattcaaatgttaagctatgttcatgggctcggttgaggactggatcaaatacaagtgttcacgcagtgtacaaagagttgacctatttcctaggactacttgtgccgaccaactaacactcgctcgatgcccctgctccaagccgaccatttctaagtttcaataaacagccaatcaatcatatcgactgaaatattccatacgctttatcgactaggctcttgatgttgctccttatttaccttttcaacacttggagatcaaccgatcataggattttgatcaacctctaaagaaggttgacctatcatgccacttgtaaattttagtgtccacatcatcaatgttaaaaattgggataaacaacaataaagagcccttacgtagccccatgcatcatgtgtcatagctcagttagttgtcgatggagatgaggtgactaaatgagagatagtagcgatcatgtttggggcatattggtgttggatttggctcaaaagtcaaactatctcgaagttgcaaatatatggttcaacttttaagagatttgagacttgttatttgccacatttgtcaatgaagcaatgcaataacttctgatttatgctctctcatttattacacatagttggaagatgagctacctctcattaattagatatggttgggaggtgagcacctcattgattacatatggttggaggattaactacctctcattattacatttggttgtgagttgaggtttttttttctataaatatggagctcttagaagagcatttgtaattcagtacataacaaattcagtacatagcaattcggtgtgtacgaagttggggtgaataatttaggtacaactttgtacaattaggttcactgagaaatctgtgagagagagaatctgtatagtcaaacttgggaaatactttggtgagtttgggaaacacttgagagatattactactagaaaatttgtatatgcattatgtatattttctactcgaattaataatatcagttgcttcccgcagagtaggcaaattgctaaaccacgtaattttgcatgttttttttatttaccaatttgatatatatatatatatatttatcgctttcttttgctatttattgcttttgcacacaacaaattgctatcagagcaaaatataatgacattatatatctaattaaagctcttgatgagacaaatctaaccccgcaagaatggtttcaatcggaggtccgacgcactggttagtgtgttgcagccaacaaccaagttaacttagtgaaatagtgtttcttttagactgagtcaggccatttttcacccgtttttaaccgagtcggacctattcctagttatttagacagttccgaattcaaccgcgacatgcatatttcaaaataaggtagtattaaaattttggaaaactttgttataagttagaagctaaaaagttctgttaatagtttacacttatggctgacaactgagattttgaaaaagatgtacaagttgacgtaaaaagttctggcgagtcaagaggttctatgaggagaaccatgttatcaagtgcaaagtttgaggtggagaaatttaacgataccaataactttggcatgtggcaatgtgaagtattaaatttattattttgagaagatctaatattaccttggagtccaggccaaaagattattctgacgaagaatgaaattttgtcaatcgtcaagcttgtggcacaatctgactgtgtctggaaaaagatcaaaagtactttgtgatgaaacaaagcgtagctacagttcgttgaaaaaagctagaggacaggtacataacaaaaagtgtagagaatcgaatctacttgaagaataaacttttccatttccagttcaagaaaggtacccatacaattgaatatttagataattttaacaaaagtttagcaaatttgcaaaatttagatgttgaaattagtgatgaagataaagttttgtttttgctaaatttattacctgaaagctatgaatatttaaccaaaattctgttatatggtaaagttgcggttaagtttatagatgtttctaatgctttgttaaacaatgtgtatcataagaagaattaacttgatcatagagacccaacgccataagtattggttgcaacaaaaggtagattgaacaaaaagaaaataggtggatcaaataataggaataatccagatcaaagtctacaagggaatcatcaagaagaaatcttatgaaagatgagtgtgtctattttcatcagaaagggcactggaagaaagattgtctaaacaaggacaagtcaaatgcaaatgttgcaccaaaagccgacatcgaagaagattcaaccttttctatttcatcagatatgtatttagatagatggatccttgattctggatgttcctattacatgtgtccaaacatacattagttctcaaattttgaaaaacttgatggaggagttgtccttatgggaaacgacaatgcctgtcagacaaaagggattggaataatattattgaagatgcacgatggtataatcaaaagacttacgaatgtgaggtacattcctgatctaaataaaaatattatttctctaggtgttcttgattttgatggttataagataacactggaagatggaaacttgaaagttgtacgaggtacatttgttgcaatgaaaggtgctcagaaggcaaatttatacttcctagatgggagtactgttacaggaagagcaactgtctctagcggttctgaagaaaagacatctaattcttcctgcctttggcacatgcacttagggcatgccgaagagaaggctttgcaaggcttagtgaagcaaggtccacttaaaggtgccaagacccaaaagtttgatttttgcgaccattgtgtattgggaaagcagacaagggtcaagttcaacactgttgttcatcgcaccaagggaactctagattatatccacataaacgttttgggaccttccaagaatgcttcacttggaagtaaaagatggtttatgataattattgatgatttttctagatatgtttgggtatacaccatgcaataaaaagatgaagttctggatgtcttccttaaatggaagaaaatgattgagactcaaactgacaggaagatcaaaaggctcagatctgacaatggtggtgaagacaaattaagtcctctcttagaagtgtgttaagaagaagggataattagacatttttcattactcggtacgctgcaacaaaatggcgtggcagaacgaatgaaccatactttggttgagaaagttcgatgtatgctatctcaatccaaattgaacaaagaattttgggctgaggctttgtcatatgcaacccatatcgtcaacataatctgtacgattgcactagatggaaaaatacctaaagaggtatggtttgaaaaacctatttgtgattttgattccttacatatatttggatgtcctgcatatttccatgtcaaagattccaaactagatcctagagaaaagaaagctaatttcttgggctctaatgaaggagtcaaggtttttgactttggtttggtgaatcgaagaaatttttttatgagatggcacacttgacgagtctgttatgctaagacagactaccttagtgaaagagaatgaaagcccaaatactccttttaaggtggagcttgagatacgagaagatccagaaaatattattgacgatcatggtgaagatgaaagtgatgatcaagaagagatctcagttgaggtggaggttccctcagcttcaccaccagtcaatcagcaatcataatctattaccgctactcgaccaagaaggaagattaaaaggcatgctagatacacatatttggtagcattcacttccagtaattgatgatgacgtcccatgcacttacagagaagctgtgcagagtgttgacgtcaagaaatgcaagttggcaatggatgaagagatgaagtctctacaccagaattagacatgggtgttagtttgacctcctaaagaaaagatggttattggcttcaaatgggtttgtgccaagaaggaaggagttcttggtaaagacaacattcgataaaaagccagactggtagcaaaaggttatgcccaaaaagaaggagtagattacaatgaggtattctcaccttttatcaagcattcttctattcaaattttgtcaactttggtagcacatttcgatctcaagttagctcaggtcgatgtcaaaacaacttttttccatgttactttagatgaagagatttacatgtctcaactggatggttacaaagttctaggatgtgagaattggatttgcaagctaagtaagtcactgtatggtttgaagtagtcactgcgatagtggtacacgcattttgacaactttatcagagagtagaagtatacccacagccaatacgaccacaatgtatacttctaaaaactccaagatggtgctttcatttatttgctcttatatgttgatgatatgtaattgcatgtaagagcaaggtggagattgccaggttaaagactcagttaagtttaaaatttgaaatgaaagatcttggagaagctaagaagattcttaggatggagatcacatgaaatagagttgcaagcacagtctgtttgacacagactcagtatctgaagaaagtactggaacagtgatacatacgataaaactaaacctgttagtacaccacttgcatctcattttaagttaagtgcaaagatgtcacctagcaccaccgatgagaagaagaaaatggagcgtattctatatgaaaatattgtgggtgctctgatgtatgtaatggtatgcaccaaatttgatattttgcatgctgttagtatggtgagtcattacatgcacaattccggtaaaggtcactggcaagcagtaaagtggattctacgatatatctatggtactgtgaatattggtttgaagtttgagagagacaagattgatggtaaacatctagtcagctatgttaatctgactgcgctggtgatttggataagtgtcgatcaactactggttatatgttcacaatggcaaggggaccaatttgccagagatcgacagtgtagtcaactgtagctttgtctactacaaaggcagaatatatggttgtaacagaagcattcaaagaagctatctgacttcttgggttgaccaggatttgggtattgttcagaagaacgtggaggttttatgcaatagtcagagtgccatttgtttagcaaagaaccaagtccatcatggtcgcactaagcacatctatattgatttcattttgttcgtgacatcattgatgagggaatgttatattctccaaaaagtcagactgtagacaagtctacagatatgcttacaaaagtagttacagggatcaagtttcaacactatttgatcttgatcaacatctttcaaacttagagctcctagggcacatgtggaggcagcgcttttggtttttggtttttttgccaaagtagagattgctggatttgactcaaaagtcaaattgtcttaaagttgtaaatatatatttcaactttcaagagatttgagacttattatttgccacatttgtcaatgaagctatgcaatagcttttgacttatgctatctcatttattatatatagttagaagatgagcaaccactacaacaaaagggacttttcatcccactttttacacatgaaaaaaataaaaagtgagataaaaacttttgatcccactttcacatttggagccttaaaaaaatttgaacaagggcattgtttggcaaacggataaaaaacggtgttgaaagggctatttttatgcatttgccaaacgctactttagtttttaagtgggactttttatcccggtttttatataaaaatcgggataaaaagtcacataatattagggccttttaatgttgttgggcctttacacatataaaaggaacattaggttttagggtttcatttacacatatcagtccctcccagccgcctctctctcctatccct

SEQ ID NO: 99352 - DNA, 1968 bp, Cannabis sativa
  modified_base (1007)..(1009): a, c, t, g, unknown or other
ttttttttttttgaacaagggatatatattcttgtgtgttcttaaattacacatatcaatttaatttttaattacactattgatacgatattcagacaattttcactttttttaaaaaaaaaacattcatttaaattttaatagtttgattgttttttttgttttttgagaaaaaatagtttgattaatgattttttttttatgtttaaatttattaatttaatttctcaaaaaatactgaaaatgtactaattattaattttatgaaagttgaataagagcactgaccccttggatgattaagagccattattttttgtagcaaaaactttaatttattttaacaattgcatgccattccatgtgaaagcatgcataaataaacctagtcatattaattaattaattaattcaaattaagcaaccactccaccattataacaataatagtgattttatacttgcatgttcttcattgttttatttattatatatatatatgggaaatcaaatcagtaaggtaataattccaattctatgaagagagaaataaaaattaattaattcttggagtttataactttatgtcattgactcttgtatttattaaataataatttagagtttatatttttcaaaagagaaatattttaggaaactaatagtgtttagtactcttgtaaggtataagagcatttctaatgatatactttttattttattttagctaaaatagctaagaagtttaaatagaaagccatttttattaagctaattaggattttgtttctcgaattttgacatgtaccaaattatgccctctaaacttttaagatcattaaaaattcctcatatattattgagattgttagatttaaagatttttgtccaattttagtaaataaagtctaacatgaattaattaaagtttagggagcatgatttggtagatatcaaagtttgaatagcataattgaatgaaattggacaaaaatccttaaatccannnatctcaatagttcaagaaaaatttttaacagatagaataatttaggggcatgatttggtacatgtcaaaatttaagggataaacattctaatttgcctttttattattgttgttctaaccatacattctactatagttagtatttgattattttaataatattttataatttaaatttgtcaatataatttaatcttataaaataatgaaaaagtaatattattttttattaaaatattattaaaaaaaagtttagcaaaaaagtaggaagtttcctacatttagagagttctctatccattttgtattatagagtcatttttttgcatggttggagctattttttcaagtttcactccctattttaactaaggagtgtgtttagagagcatggttggagactctaatattgttattagtgcaattcaatatcgggtcccacttatttcatcttaataacgattatatataaaatcgctaaccatttattggacaagacacgatactgatttgcaaattgacatgtcacgtatgatacaaaaaatctgggtttaaacatgacactacaagtctaaaggtacgacacataagcacaaatagaataacctaaaagtataatggaacacaaaagaactcacaagcgcgataagtaaacacgaataaactaactccaaagcatgacaatatattaaaaaagctcgataataataacaatgataataataataataataaatttctcaattatatataaattaaaatgatagtaaatattacttatataattttttaatatgactgtataattattgttgaaaaactacataaaaattattaaaactatatagaaaaaaaacacatatagtatagtaattagctcgttgattgtaataaacatatgaagcacggattattaagttcatataagaaaattaactgattcatttaaaattgaatca

SEQ ID NO: 99353 - DNA, 1700 bp, Cannabis sativa
acctcgacatagacccgatcgaacacgaactgaagacctgtacctggaccccgacttggcctcgacctcgaacccgactctagaccggacctaaatggaatcagagttgtggtcaaatttatagtacataatataatttcacacaaactattaatataaactaataccaaacatattatattaaataatattaatataaaacaacacaatagaagcattgtttattgtaaatatcaaagaccataattaaagcaagctaacgtgatggcaaaaccagagacgaatttaaaagcatttcatccgcactaataatgtttacatgggcagccataaccattgtggcaagcagcactaaaattattaatcatgacaatatattaattagtctgtctatgatatacactattaaatatataaaatattatgacacgtttaattagtttaccttagtttctaagattcctattggattagtataacatgcatgcatatatagagatgcatatatacatatataaaattaattgcatatgcatgtgattagatacatattacttggtggttgtccaagtttttggattcaagtttcaaacttgtagtctctataattgtgtactattctctattgttctcttcatcctaactcattcaccaaacacaattatttgggtccacaaaaattttggtacatatataataatatctgtcatctgataccttcataataaaatcttcatctcataatactgtatagaaaacaaaaaattgtgctccacaaattaaatagttattttcttacacttataatttgtaaaacattatcttctttaattacattatttcagacatctaacacattattttgcctgaactagaaacaatgctatttttcaaaaatagatatatttatagacacatcctatatcaatttattctttcaatttatatatcaattattttcaccaaatacttaaaacaaaacctatattattatgatgtgaaaggtaggcgagataaagttgttggtgaatttgttagttccatctcaaatggatacacatggtctatatttttcagcttatatataataatattattcaataagagttccattaagggtatgaagatgtaatactttatgcatactattttgatcaaacacttatgattcacgtaaaaacactagtgaaacatcaagctaacaacttaggtggtccatatatatgagatatatatttcactgcaaatttaaaacatcaatattacttctaactgaatttaatgataaccttagataggaagaaataattcataataagcccttaccttatctacactacactacactacgcttatctaatgagacatggcatgtgacaatactaatttggcaactagtgtttttcaacgcctttggcttgatatataagtagtaagtagtgttatacctttttttagacgtatatatttttatttttacattttaaagtaattttttttttttcatttttacgaaatttcacacaaaatattttcaacctaaatcacaaccaaaattcgtatagcaactcactaaaaaatcacaagaaaaattaccgtggcaacccaaaccataaatttaaaaaaaataaataaataaaaaatagtatatggtcgtgatttttctttttcataaacagcaaatgaaacgaggccaatta

SEQ ID NO: 99354 - DNA, 3605 bp, Cannabis sativa
taaaaattttcaaatttagaatattttattttattgagagagagactccattgtagagtgctttgagaaagaaagaaaactctataacttgtaagaaagagttgttgttcacactgagtatagcattgtaatgagactgtattttgtaatctctaccaagccaagcagaatgtaggagactcatgaacctggataaaaagctgtgaatatgctctttacgatttctgcatatttttcatttctctatttgttttaacttgatctgttattcatggtgcttggatatcttgctggtttttctgtgtgaatctctattttgttgcatagcatttacactttgaaaactatcatacacttcagctaatgatggatcaaaatactacacattacaggcattgcttaacgatactgtgtctggttacttaagccaataagcagtaaacattacataaattttgagtaattcctcatcatccatttccctttatccgaaactcaccagaatctagagtgctcagatgctaaatgaaagctttatcgttcatcctaacaggccccgggcaagataagtatggaaaacaaagtaaatgcataatacatcattaacatcatacacaacattcaactaaatttacaacaaaacaaaatccacctgcttttattaatgatcaataaaaccaaacaagtaaaacttcacgttcacaccttacaggggctctcatagtaacaacaaacaatgtcagtacacaaaacctcccaaattagaggctaaccagtttaagagagttggccttctcttgcagtgtatcaagcagactgtcaaaacttttcttgaaagagtccactccttcaacttcaagttgattaccaacatagctccaatcaattccaagcttctcgagtgcactgtatataccctcggcctcagagacatttgagtcaatcgtccttgatacggcaccatgatcaataaaagcttgaagagcctgatcaggcatggttgatacctacaaacgaaagaataaagttttgacaaatcaagcctacctaccaggaatttcacgtattccgaaaagctaaactatttctcagcctgtcttgaaatcatgaaaatatcatttgaatatatattttatgcaaaagacatcaagtttgactaactatatttattggtgcaagacatcaaatttgaattgtaaagtgactcaccgtatcaggaccaatgagaggtgaaacatacaaagtgtcggggtatgcagggttcttgacactagttgaggcccaaagcaatctctgcttcttagcacccttctttaccaaagcctcccaccttgggccagaaaatttcttctggtagagtttgtaagctaaggcggcttgagctaccgcagcctaaaatcgttatttagaattacatgagcaaattcttctacctactcaattctacacacaagactgaatgacaagtaattaaaataattcacctttccgcgaagatcaagggcctcaggtgttccaatcttctcaagcaacttgtcaataagagtgtcaaccctactaacaaagaacgaagcaacactggttactcttgagagatcatttagcccagaagcctcaagcccatccaaataagcatcgataactgcttcgtatctagcaatggaaaatataagctgcacaaccaaggaaacaatgtcaatatgctttcaaatgatacttgcaacattaccaaaaaaaaagagaagacaatgaaagaagcctagattttgggtgatagcacagtagcatagatgcttattatacgattagaataacatcctggtgcaaagaatggtccaaatactataactaccaagtgataagaccttagccaagagtacttacagtcacattgacactaataccattagaaataacactcttaattgaagggatgcagggagctgtggcaggaattttaatgtagacattgggacggtcaaccactttatgtaaccattttgctgcctctacggtcccctcagtgtcatcagcgagccttggtgaaacttcaacagaaacatagccatcagctccatctgtttcgtcataaattggctcaaaaagtttgcaggcatcttgaatgtccttcaccacaagctcccaatatgcagcttcgatatctttcccagcctgtacaagctccctgtacattgattccattgaaacgagcttccttaagtttaacaatcttaagaacatgaaagtactatgaagcaaaattaaagcaatgtatataacaagtgcaagctaacttatattatataagaacactttatacctgaattggtcattgtaggcgttagaagatgaaattgctttctggaaaatctggtattttcatagattataaagaacaagttaggtggggttgcttgaaacaaatagatgaaaatgaaagattagggataactaatcagacaacattcaataaagaatataaaacaattggcgttgacccttttgttttatttacagattgcaaataaagaagtgagatttgtgcatgcatgttcgtaatcctaagtgagaacagtaatgaaagagaaaatgaaatgaggaaaataataaataccgctgggttgctagtgacacccctgacacccatttcaataagaggaagcagatcggtgactggtcggcagaggttatcgtaccagggactctgtcctccctttagatacagatcatggagaactgttttctttgttggagttccattaccaacggattgagaacatctgatgctacagtaccaaacaatcacaaaatatttaatcaaaataaaaagattaaaaacaagaagaaataaagcgtgaatcaatcagagacagagggacggggagtaagagatgaaaacatacacaaaggaagcgttgagtggggaattggtcgaaagagagagcttagaagaaagggtggcgtcgaagttggtgaggggtcgtctgaaagcgatcaaatagctgggttggaaagatctgggcttgaaggaagatgacaaagaggcagcaggagatgggtttgaaagcttggaaatcgtagccatggctgaagggcagagaaagaagagatgagaacagggtttgagaggggtttggtgaggtctcgctcagttgctctaatggtttgtgagaggaaacgaagttatattataataaaaggagccagctttttgaggttgttggtttttttttttttttttttttggtttgaaatgacaaattttcttttttaaaaaaataaataaagcaaactaaacatagtatataggtaatccaattaccatgaaatctaatccaattatacaaaaatgaaattaaaatttttgtttttaaaaattaaaaatatgttttataattattttatttttgaattttaaaaataaaaaataaaagtgtgttcaataaagttcactttattttattttatttaagtatggtctaggtccgagatcggatttgagttcgggttagaggtcgggttcagtaccaggaccgtggttggggggttggtcgggtctggtcggaatctaaaatattgattaagaaaaaaaaaactgtttaaaa

SEQ ID NO: 99355 - DNA, 5080 bp, Cannabis sativa
  modified_base (26)..(47): a, c, t, g, unknown or other
  modified_base (2963)..(2963): a, c, t, g, unknown or other
ttttctaactttatatgtgtttattnnnnnnnnnnnnnnnnnnnnnntaggttgttaatccaacatacttagtaaatctagatcctggtaaaataatttccaacaaaactttcactatcaaacatgtcattatgctaaaaaaaaaaagcttctatttattttagataataacatgactgctaacacatttgatctcattcacatggacatttagggtccattccccattaaatccattgaaggatatagatatttttttttatcattttttataacaattcaaggtacacttggacttatatgcccaaagccaattagatgcaccttcactcattcaacaatttttttctctcatcaatacacaatacaacaccagcattaaagctgttagatttgacaatgcaaaacaactaacactaaccagttattttgcaacaaaaggtgttgttcattatcatatatgtgttagtctcccccaacgaaattcaattgttgagcgcaaacaccaacacatcctctacattgctcgtgctttagcattctagtctaatattcctcttgtctactggagctatatggtatgtactgcaacctatctcatcgatagaatactttccatactccttaaagacatgacatcatatgaattgttacataaaaaacctcccatgtatgattatcttcaaaattttggttgcctaacatatgcatccaacataactcattaacataagttctcacaaaagcatgcatcttcattggatatcctaataatatgaaggcttatactctagcatcttcattgatgtcgggaagggttattgaacttcagagggattggtagagctttgattcgattaaagtgtggtgagcatcgttctttatagagttcgaactctaacaactttggggccatgatttccttcactagggttgctaggtttttttaactctgccctgttgacaccatggatggtggtttgcgtcccagttggaacttctattaccagatcagggtctcctctagaagcacctacttctatcaattttttttggttagagtgtcacacatgtctcttgtttatcgaatctaatcatgaactcgagtcgacttgggtcttattgttgtattctaaccacgggtttcgtgaaggcaacactagtgatgtttctagaatgaattccaaatcgtcttaggatgatgcactgcgagaatggtcatctagagcattgtagtggctacttcccttaaagtattcttcaactggatgacaagtgtggagagaatcgaactggttactgaagctcaactcttcatcattgatttcctccattgtcttaagtagtaggtccattttccctttgcagggtcttgtggcctgatgtcatgacagcgttgagaaggagttggttgaggagtcctgctggctctcactatattttagggttgctcaacatcaggtggagggctcattggttggcacccattagtttgagtcctttcgaactcttgctcgaagtttgcttccctccaaggagccttaacacctagtgtttgcttagtgcttgcacggttactaggcatggtagttgtgttctgtgcattaagggtttccccttgagcactagttcacacgtggctagttggccaaaagagaatctctcttaccgactcgaaaagatccctacaaggggtagtttcatgactagagtgataggcttttctgattcattgagacatgttagctttttgttgttcaagctcaactcattggctcttgatgttctgccacttctccacgaacaagtgctgaaattactcatgttgcttgttgagatagtctcacaactgttgttatcgatcagccatagtttaactaagttgttcaacccgaggatcagcctcctcagggacttctaactccacgtgtgactttttgagtggaatctgcttgtcagttctagtaccaagagcattttgtggccttggaggacgagctattgagcttttttagaggcctccacctggcacctaaaggagtagtcccagttccagctttagtaactatcatgcccccaatttgctggccaattattcgggctcctctttcaacacttgaggaacgtgttgcaaccattttgtaagtaactttcttgagttgtcgctctcaatgaaagcacaaaaatgttgactaaaaaatttggacatggacttccaagccacacctacttgctagattggtgacaatgaaatatatgttaagtataaatagagagacacaataatttataatagttcactccctatgtcccgatagtaatggaactacgtctactttaattttttattctcaaaagatggattatagaaaaatggctaagtttggatgctataatttcaagagagatgaaactagagagagaggccgaccttatggatacttttctaaacttaaaatatgagctagttaagctatccttttataggtgaaggaagtcctattaaatgaaaataaaataatccaaaaaatatagaaaaatacatttaggctagttttgatcataggtgatgatctaatggtgaaaattaacttttgaggttgatcgacaaatttcagagttcgagtcgtgacggcgggacctgctcttaggaagttgcagcttaaatttgtaactcccttaggggagaaatttggtgtcgatagcttctgaattgcaattgatttgtaagacatgacttgataaatcattcaaataactttaaaattcaagttgaagcgtcaattggatctatattgagtgagttatggccattttaataaaggttgttttgggcctagtgctaagtttacatcccagcaaccaggttgacatccaacacccacgttgacatgtgatatcaacctggacactgggtaagtggaaaaaagtgctagggatatattttttgatgcctaagtganattttgacatcacttagtctatttgtgtgttctaacaaagctgatcaacagtcctcagagatgttgttattctacgaaaatgacagacttaaaactacctagtttctaagtaaattaccttgttagaaaagtgaaaatatgaagtcatgaatttgactcttttgacttcatggcgcttagttattgtgaaaaaactagataaaaggttgagacagaatcaaaattggataagcagaacctagcgtaccaggccatttgtcattttgggcgtaaggtgctcatttcagagcttctagggtatcattttgattcttccaaggctttacaacccaaggacgaggtctccaaccctatttttgaccatttcagagagaatgcttggagaagaatttgcatttgagtgatcgaaaccagtgcaccaagttgattggcaacctgggcgcttggcctagcaccaagtcaacctgggtgttgggctcagtatccaggccctcaagattgtggttttcttcttgagtttgcttgtatctttgttattttttatgaaaaaaaaattcttggagcacttgtttgagaaattgattggaagtggcaaaggttgacaatatgtcaacctgggcgctcgacccagtgctaggtgtcaacctgggcgctaggtctagttttaggccgcctagaaattttgtttagtccctggatgtagttgaatcttaatctttgctgaaaacagagaatatgcccggaagactttttgaaaaaactcctcaaatgtcaacctaggcactgggcctttgttctggcactcattctgggttgtttcttccttgaaagaacttggagttggattttcgatccgatgcttggaagtggcccagattaacagattgtcaacctgggcgctggggtgcctgggcaccgggtggggtgctcaaaaatgaaagttctttgaatctaattttaatgcctcaaatatgttcgtggtatgtctcattcatgtcctaatgaaaagtttgatccatttgcactaagatagtcctggaagctgaaatcctagttaatgttgttaacttgagcgctcggtgaaaccctaggtgcccagattgacttttgaggtgttgttttgtttatttttagattctgggccttgacttggttgctccatgtatttatggtacaaaatattgaaagatagtgagttagaaacaacttattagaatttgaacattcattccggagttcttagagtaaacctaggcgtagggctaaggacccctcctaggtcgactgttatgactcggcactactcaacttctggaaatctactttcttgccacatgtcaagctttaatgtccatgtcaccaagacaagtttacggattaacattacctttagtctcaatttttcctttagtgtcggtctactaattgaaaccattgagtactctttggtgttggttataaactaacactcaaaaattcggccgattttaagtgttagattttgtaattaactgatactacaaccaaaaccaaaagtgacttttgtagtagtggttctttataaatcatatatggagagtcaaacgatgatgaatataatgagtgaagagtattaaatattatgacttttataatatttttctttaaatttgggcaaatattaattcatattttatttaattttattttattatgtgtgactttgtcagttttgtgttatctgatagataagtaatgagtttcgtgatttcctatttatttgatttttttaagattttaatgtgtatttgatttgtttattataattgttttatatttatttataaattaaaataaatgatagtcataatttttttattaaaaaataaaaaaaaaaataaaagacaaaaaataaaaatttatattttttatttttaaaagttaaaaataaaaatggttactaacacacttttttttttatttttaaaattaaaaaataaaaatagttatagaaggtatttttattttcttaaaacaaaattttgaaaaaaaaaattacttttattattatgatgataaaaaataaaaaaaacaaaaatattattaaaggcaaccataaaatttcaaaaaaaaaaaaa

SEQ ID NO: 99356 - DNA, 4053 bp, Cannabis sativa
tataaaagaaaaatataattattattgatcaatatttaatattttaatgaaaatatacaaatattatttttttattacttaaataatggtactatagaaaataaagaagataaagttatgtaaagtcaatgagtcataataattagtggcactatactaaataaaaaatgtaaaatttattgtgggccaaatttagcgcaatgttatatcttgtgccaaattttacacaatttttagcatgtgtcaaaattggcacactttttagatcattggagtagtatttttctgaagtgttttaaaatatatcaatacacctactcttttagcactctattggagattctccaaaggtggtaagctatagttggttaattatattctataatagttattaaattagattgtgtgggagctaatacttttttttttaataaatcatgcaattttattaatagcaaaccgctaaaataatagtttgcaactcaatcgagacatctccccattgaaaacacgaccaggattagaattagaaaaacgaatcaaccaaccggccgcctgattcctagatcatttgacaaaagaaactaaaataatattagatgaaaatgattgtagcatcacagttaaccttaagaacacttatatttaatttcctccaccgctcagaagatacaacagtataaactgttgcaataagttcattcaacccattaacttgagcactcaactattgtgcaaggtacgtaactgcaccattaacagccccttcagcagctgagaacttgttatttcgaaccattaacagtgatttgatggcgagccattaaagaacaaagaaaatgaatgaattaacaacgaaataaaacaaaataaagtcatgtcacaaagacaagactaattgcagcaacctaaacaaaaaaacactcaaaatcatgtcacaaagacaagactaatcgcaatagtaaaaacttaatcgcattagcaaaaccacaagaccaagccacactctcaataagttgatctgaaatttactcccgtaaatttcctaacttgttaattcatcgtgactctactatattgtaatgtcctaacaattagacacgctatgacaactaataatataaactaatcccgttaaaccgagattactagaaaaaaaagggcggaaaaactttaaactttgatttaatattaaaaagtaaccaatctaaaataatatatcaaatccgcactttttcaaattggatcagattagatttgagctattggcggattagattggattcaaaatataaaatccgcacttagtgcagcttagatgtactatgagtaaaataatacaaattggattggatgaaaacccctaagagcgagtatgggaggcataaatggatagtgtggatggaggcagaaaatgcgttccccacatattatctgccccagttccatccttaacacacactactacaaaaataagaattcctatcggtcaggaaataagattttttctaagtgtacaccatttgatacaaatgtaaacttgtaaagaatgatgctcgaatggtggcccaattagagtattctagtgcaattggaaaccttatatttcttgctcattgtacaaaaagagatatagcatatgcagtgcgtaagcttagaaggtttacaagcaatttaactatccaacattggaaggctatagagtgttctaaggttccttaaaaggactaagaactttagttttcattactcaagatttccaaagcaacttgaaagatatttcaatcctagtttgatatcaagtgaaagagataatctctacggatatcaagtgcaagagataatctctttattattggttggatgtttaccaaaaaaaaaggtggtgtagtttcttggaattttaaaaaacaaacatgcattgcacactaaagttcagagtttatacaattttcaaaattcaattaagttgtcatgcttagtcacatttagaaatagtcatgattagccgaaatgttataatcatgtcttaaacatatatcttaagataaattaaaattaagtagaaaagacatcctaagaagttaacttctacactactttaatagaggtagtacaaaaatttgttaggaaaagcattttacccagcctagattgtgaagtacaaaaatttgttgacttaacaagcttccacaaaacatgtcacaataattacttccccttgtctaaataagacatttgtttttcattttatttgaaatcattttgtataacatcataaaatcatattttccacacttattaattttgaaacaaatgttcaaataataaaaagtttgagtaaaaaaaaattatagatgaatgtatatatacaaatgataaaaaattttaccttctcagtcttgtggggacccaattaatccattaaaattgaagatttaaatagaatatttctctttttgttttttgttttcttacttttagaaaagcctataaaattgttggataaagaattagtgagctttcattcttgattggcctagttgtactttcatttacttttcgaataaacaaataaattagccaaatctatctttctgaatacaaaattagcttaattatcagtcgtactaatacaagtgatatacttaactctttattttccattagtatcgattgtaacccttcggattgaatagcagtcgttttggattctaaagtcaattagccaagaacattatcaacttgttgattaactacatgtatatatataaaagttaaaacttgcaaaaacaggatcaaataatcaaacacaaaatctattgttcataaaagtataagtaacagtttccacgttacataaatccccaacccatagcgagatttcatcgaacacaaaacgaacattcttaaattacaagtataataacatgaatccaaactatattttgtatatatctatatatagttttataccagaacgaccacaaggacgtgtacttgtttcgatgaaataatgaaaacccatttcacgaaatccacagtacatgtccaggaaaaaaaatcccaaaagaaaaaaaaatacaaaatcaatctgactaacccatatctgaagctgatgaaaacagatcaagtggtgaagtaaaagacagggtggagcatgagatgaaggagcttgatgcaagcacaggagaaggaaaggaacaccacaccgtagacaattctgagagccattgagatgagttattggtctcagatcagagatctcaaatgaaagtgagagagagagaaatgaatggaatggagtcaagtcataatataatgggcacaaccaaagggtagttattaagaattgtattggataagatccttcctttattttttgaattcaaatctttcttgccacgtgtcactaaagtaaaggttttgagttgccacgtggcaaggcgtgggagctgggattagtgcacctgtatttatgagtgtttggttacgctaacttctttaataagcaaaactgtatctatatgatatgataagatagcacatgagagccactttaagatcattaaagattaaatcttgtttctttttttttttttttttttttgacggtaacttgaaattgaatggctcggttttaaaaatcaaagcttttattataaaaggttttctcactatacacatataaatataatataaaatattataaggttggtcttttccgaaaaagcttcaacttcaagttagtggcctatcatttttatgcatttcagatatttttgggttccacacaattagtttattgtagatatttatattaaaaagaattaatgttaaataagtaaaatgtatacgaatgaattaacacaacagggtctatagctcagtggtagagcatttgactgcagatcaagaggtcaccggttcgaacccggttgggccctttttaaaagtttattatttatttttataataaaagagaagaacagctaccaatgacattttttttactccgagattctcattctcgtttctgtaataaacaatttg

SEQ ID NO: 99357 - DNA, 2092 bp, Cannabis sativa
tttaatattttttatggtaattcaaagtggcatataccatatatgttaagtttttattttaaatatcatatttttttctattaagtttccttaccatatttttgtaaattagttttattttttttatatttatgtaaatacccaaaaaaataatgaatactcttatactattgaaatgaaataaaaaatctaaagaagaacatacgctaaatttaattagtaagaagtaaattatttgcatacaaaaaatctcgctatttgaagggataagcctaattgaaaacctaagacgacccttgattataattattattgtaatttttttaataattaaattaactataaataaataaataagtaaactaaaaaggaatttctcaattttttttttcttcaaggcgtatattatagggcttttacaaaaatattaaattttaagtaaaagtttacaattttactgtcacacgaatttttttacaaaaatactgtctttttataaaacatctgtaaaacaacaaaataaaataattaaaataacagtagaacaactaaaaaataactgtggaacaaccgtaaaaacttaacacagtatactgtataacaaatacagtatttttgaaaaaaaatctatcctacactagaaaaaaaagtaaaaagtattaaaaatttagtacatggtgtaaaaactcctaatatagtaaattagtgatcacttaaaaaaggtttaaaaggacccaaatccttaagaaagcaagacaagacatgatcccttatttctgcctaatttcacttacatatgtttgaaaaagtccaaaatccgaaatacactttttcaaaggaaaaatcaacacaaaagacaaaaacaaaagcttttttttttttttttacttttttatgtttatgaaagcaaaaacaaaaagggcattcattaatttaaattatatttgcagaaaacaagagtcctctatttctcaaacaatttcaaacattatttgactctaattctaaagtgcatatgatgagatatgtcattggttcccttttcattactagctctaactcatcatcatcatccaccaaaaggtttatcttcattttaaagtaaatatatatctaatctttggatcaactcaactattgattggttagtgataaaatgaaagaaaaatagagcaagtgaataaaaattgagtctttaaatctataaaaagagggagtgagtttcataaagacaagaacaactccacaacaaaaattattgtataaaaataagtgctaaaataaccactaaagtgagagagagatagaaaaagagtttcatataaggaataagaacaatcccattacaaatattctcctaagatatcaaaactaataagtaataagtgctcaaagaattactcattacaaaagaagtaacttgttatatattagccctctaatgaaaataactactattactagttactaaaactactattatactaattatatgaatattgaacaaaattattactaacactcttcagaaatactttgaagcataacttttttaggagaagaagaagaagaacaagtagtagggtttggagaaagatcaaccgaaacccgatcgaccggaatcctaacaagctctagggcaacatccttgaaatcaagctttcctccttctttacattttgataaaagcctagctgcatcttgttttgtcatagtaactttcactctcatcacttttttctcttcaatttcttcacaacaaaattgccttgttgtggtaatagtagttgaacttgaagtagtaatattttcttctttgctcttaaccaaagaataatatggtgatgagttttccttctttgattttttgtgatgattcttcttattcttcttattgttattactcaactcatctctatatattatatctttactattggttgttcttaacatttcatctactgaaattttgttcaagaaactaaccaaagtgttcaacattttttccttttttgaagagaagaaattaagaagagttaagaagaagaagaagatggttttggtttgtgaataaggatatttaattagatgg

SEQ ID NO: 99358 - DNA, 4258 bp, Cannabis sativa
catatatagctcagattctaacatagtaacatcttgtataaaaagattcacaagagaattcgaatattacatttttctgtatcctcatatattgatggttattctagaagttttctttcttgcaataaatataaatcagcacaagttcaagttattactagttctgtatgttgaaactactcctctgatagcatggtcacataactatgatataagctctttgaactagcttcaatatacactcactaataaaccctattttgtgttattttggtttaggaaaaagataatggggtatttgtgttggagagtagtgaagtagtgtatatcgtggtagtagtagctagtaagatgcgctagtgatgatgagttgatgttgttggtgtaatggatgataatagttcggctgagaagagctttatgtattagatcagtatggtatagtagtaagtaataagctttattgatggtttgtagtttttggtgttacacattgtgaaacacatgatagaatatttatgctagctagcctcccaacactcgcggctaaaatatttggtctggatcatttatccgtacaaatctatagttttctgtgtacaactagaagattcaagactaaagtattctagaagtttttatgctgttctagagcatagtattctttacatgtttacgaacctctagagtaaagtagtccccttagagttcgcttggtacatcgtattaaattgcattatattatattgtattaaaatttaacatattgtatatttatacgcccataaaaagtaatacctcttataattttacataaaaatataacttaaaatacaattccatataatattacacaatacactacagttaatacgacgtaccaaacaatcccttaaattattctaaaatatcatattagttttagagtaagtatgctagaaatgtgtagcatcttctaaagcatcttatcaaaaaattaaaaatgtaataataatcttattcttccaaatcttcaactagataaaatcaaaagagtggaaggctaaaaattagatagctcgttgttctatggaaattgctactaattcatgtatcttcagaaacagaagagaactatcaactcactcacagctcactggaagagatataaactccatagggatgtaattaacacagctcatttacttgagcagaagcagatatcctcagaaaatattacataattcaattttgatcgacaatattaaaattgagcaaggtggtgttggtttgaatgaatgtcaaaaataccattatttctatttggtagttttagatgcatgtatggtgataacaatcccaatgcaattactactgctgcaactaaaactatccacttgcctttctctctcctccatttctcatttttacgttctctctcatccctttcggtaacattgtttacattcactattcttacctacatatctagttacccaattgtatagtttcctaaaatagattcttaattgtgcatatatgcatcacttgtcaatgaagactgagagaatataaatcttttcacctcacgtaaaaattatcttaaaatatacaattataaaccccaccctctaggccttcacacccacctccatatttaattccaaggcaggtattttgtgaaaatccaaataaaattatctctatcatagttaatcttaagttttcaaccagataatttagtcaatcctttattcaagctacactcctattccatcaccatcgttattccttgccttttcattctatcaagggtcatctacaaatcccaccataatcagcttctaatttccaacttattattatcattattattttaagaaatagttagcccttagtcccaagtggactacaaaccccagactccttacacactcatctaactactttttttttattcgaaactaggatcccgcctaagcctacaatatttggagaccatgaaactatagcaatttctatgtaggtaccaggaaaaactcctccaaccttgtgggagcaaaccacactcatctaactacttgagctagattcatgcggcacacgtcatgaaattgtcaaaaaattaaatttctataaataaagactaatgggaaaaaaaaaatcgccaatgcttgccaacgcaaaacagtctactgactgatataatgagaggcaaaacaaagcaatttttaagatacacatgcagtgagcatttacccagcaaaccttatagcagtaaatacactatgtatttcacttgaatacccatatttatcctcacatggctagttacttatttctcaattgtgctagaattttctaaaagattagcgttactttttcaatcttttctacttgatactcttgtaaggaaatcgtacttgtaatttctacagctattagttaacctctttacaaacttcctatggatttgatgaatgacaatgataaaaagtagagaaagcttagatgtgaaataaaatcctctcattccacaatagaaaattattaacttcagagaataatacccaacaaaaaattcacaaagagtttgactgatgaaatcaacccaactggtgggtgtgtgcccatgggattctacctatgatggttacagtccattttgctccacattcttgtaatttttctctcaaaacaaatgccccttgacttattcaaattgtcagaacaaacgaactctccttattaatctctacatcggccacgcactaaccccaaaaactataaacatttagcaagcaagaatttccagctgtcatcaactcagctacatctgtgctttactagacactaatacattatgaactgcaattagtatttcaactttataaactttcttcaactattgaatttatcacattaagaaaattctaatgcagaacacatgttctgttttcttaagctaataatagacagttgatatctcatcttaattgataagtacactttatataggacattaggatgctcgaataaaagaataaaatatgtaatcatcaacatctgcattcatcagcacctcaaggcaagaaaatactactctaataattttggtcatgtaaattcatgtagtaaacagcccagactacaagtaaggttaacaatttaaacaaggatgaagacagatattttgttcagaggagggtaaaacgataaacttaacattattgagtttctcttgaagacttgtaaggcttatgcatttgctttaggagttataaatatggttatgataaagttttttaaaagattaaactgaatacggaatccatctctgaccctagaatccactgtaactaaactaaacccatctctgaccctagctattaattgatttgagattataaagttaaaaatatggtttaattatatggataagaaagtttataaagtttctatcaaaataagcattgtagtatgtagaccgtagtacgtgaagaattaaagggtttgttgagtaaaggaaaattacatatgaagcaacattacttgtaagttgttctagggttccaatgtataaaatgaatacacaaaacagaaaaacaaattcacaaaagaacttaccaggaaacaacttatggttaaacccgtacaaaatcgcaacgggaaccatccacataaacattgacgcaatgaagaacttctgtattactcctcccataattctccgatctctatgaaaagtgatatatcagaacaatcacacaataaattgataataaaagggattcgagaaaagattgagaaattgaagtgatgagtagaagctgtttcaactacagattaatgaattggagagtagtgagtagaattctctgattgaggaaaagaatgacgttggcggagtaaaagagagaaatgaataaaacacttatgtggaaatctcaatgaagcatttcctcaaacacaatgtgaacaaaaagtaatgaatataatagattattgggtgaagatttcgtagatttacagtcaggggtggggaggagatctgggcgggttgaggacaacgagcaccgaagacagaggttgggttgggaggatctagaatagattgcatattaacaagggaaatttgataaattatgcttaaacattagaggtggtgtttaattatactaccctttaaaaaaatttataactattctcatcttttaatagtgaccccaaaatacccctctcctctaacccaaaaaatttgcctcttctccctctcatc

SEQ ID NO: 99359 - DNA, 2299 bp, Cannabis sativa
  modified_base (1966)..(1979): a, c, t, g, unknown or other
ttttttttttttttttattattgtatttttacagaatttctacatagaaattcctattgtaactagtgcaaccactttagaaacctaaaccgtaaatttgaaaaaaaaaaagttaaaaaaaatagtatatggagtaattctcttttttttttgtttaaaaaaaaattccattttaattttgctcttataaagatattttttatttttatatctatattctcataatttttttattttttatttttattctaatatttttttagccctacaaaaatttatattttttctctaacagaaatatttttttattaattccctttttgtcaaaaaaaaaaaaaagaatttacaccctcatgctaaatttgttacacaattaatacaaattgtttatttatatttttagtttaatacacatttttatttacaatatcggcattatttttattcaattataaaatatgatatttactttttatgcaatttgaatttattctttttttttcatctgaaattgcacctgaatttattattatgcaatttgcatttatctttatctgaagttgtatctaaatttattattatgcaacaaaaaaaaaaaagaattatttccaaaatatacaaaaatgacaaaaaatttatatttgtacaaatttgctatttttttaacagtttttttttttacaaaaatacagaatgttattttagcgttacttctaccgaaatcaaatttgtttttatagttatacactgttatttttttgttatttcaaaacaatattattttaaagttgagaaaagcaacttaaaaataatatttttttttgaaaaaacaagtgaacacctaaaaaaaaaattcctaaaaatatatataaaaaatagattatgtaaatttttctaaaaacaatgtgttaaatatagcattactaacttcttatgtgaaatttagcaccatttttaaagatgtgatgttatgtaactatttttatgttggcatctctctttatatcaatgtgttttgtttatgtatattagtgttaactatttgttttggtttgttaatatctttatctctctattacaaattaactattaatatatatcttttcgttgttaataataatggatgaaataaatgttggttggttgcaggaaatagacaaggcattcacgtgttgtgaaaattgcatgcctagaatatttcaacttcgtcggacaaagtcatctcatatctgaatcttatattttaatttcagcattactattagctagtactttttataagtcaagtcttgcttttttaattataccaataataatatgatacggaagagagtagtaggcactagtactaccttttagcaattttctactttatgtccaagaaacacaatttagaactaaaatcaatcacaaaatcaaaacttgaacttaattgaaataagacaaagaaaacttaactcaataatgaatgaatggtaaatctttattaaataggaatagtcaatagtacacaatagaatgagcccaagattacaactcaacgcaataagtaattacaaagaaatgtcttcaagagtgatactcctttttacatcctccacacacactcactatgatcttggactcttgagaaatctaaagtatgagctgtggagattagagatcagaactctcctcaactcagaacctccttttagaatagatgaatagttgttggtgggttccttttaagttggtattaaagccaactgttataacttgcaacaactttcttcagattcatctgatgagcaaatagatggacatactgacttgagaggttaagtaagtttaattccaacaattccacctaattagactcacttaatctctgatccaaaagaaataggtgaggacattaaatatcatgaatgcttaacaagtttagacagtgtctaaaaatgtctctagttacacttttagtgannnnnnnnnnnnnnttatcatgtgtgcttattttcttcacttgcaccttcttggatgacacaatatctcttatgaagtgtaacttgatatcaatgtagtttgacctctcataaaatattagatttttcatgagatataaagcattttgattctcacaattaactacgacatcctcagatttgaaacctaactcatctgtcaaccccttaagccatataacctccttgatgtcttctgtagcagccatgtattcagcttctgtagatgacaagactactactttctgttaggggtgttcgcggtgcgggttgtgcggtttttaaccattttttca

SEQ ID NO: 99360 - DNA, 2442 bp, Cannabis sativa
  modified_base (27)..(32): a, c, t, g, unknown or other
attgaataatagagattacattgaaannnnnnttttatttagggcataaaatctaacaaaatattccaccacacgactacttgaagccatccttaatcagaatcaagacatcactcataaaataaactcaaaaataaatgactactcacaccatggcaaaagtcaagactaaacggaacttacatatgcaatttgattatctaaaggatttgaaatttatttaaaaaaaattctaacgatggacccttttcattctaatgacccttttcattctaattgatcattagacagaaaattctatacatgagaaatcttaaaagtcattagtggtgcatggtgttatatcactattagtgtaattaggtctcaggtttcatataatttaatttaataactattacaaaatatgggtgccttaacaattctcatttatatatagcattcattcaaaaaattgggatactctctaaccatcaccctctctttgatctcttaagtatcacaattcatctcatttgattgagttttgaggtcagtgttattcggtcttcttcagtctatgtatcactgggagctcaaatgtgatgtccattgaaattttgtcgtgaaaatttaattcatcgaaagtttgaagcctccttattcccttggactatagttcattttccttttattttttggccattgtgattggaaatcgtagtttatttgaattattctttgtgattaagagcaataatagcttaatatatacatatatctatatttcatccatctctttgcaaaaataaacaatgaaaaacttaaatacccagcaataaagtgaaatccatacaaattttgggttgagcatagatgaagaaccaaataaatttgtgtttgtgtaaactattttactgctagattgaatgatggttaatacaaatttatggtgatgggtatctaaaatttgtttgtgtaattttcccttgattcatattcatttatatatttttgttcatgcatcttagtcaaaactaaccaatactaaaattataaggattattttgattagttttggtattggcataacaaatttttttaaggatcaaggacagattgcaaataatattagaattattaatggctcagtttgattagttattgagctttaggatgttaaacaatgttattcctttaaaagttctgtacattaaaaaaggctagactgttactaaggctatacaaatcttgacaaaggaaaataaggaaaactacttttgtgtataataagatgatttcagaacacttgcagcaaatagagatgcaatactaatactttatgtaacattttctttctaactctctattatttatttttataatatggatatttttgtggggtagtttagtatgagggattaaactcttcttttaatttaagcttttgtattggaactaattaaactgtgttttgtgctttgtgacagtaatgtactatacacttttggagaatcgatatgctcttcacttgaattttttgtcaattttatttacctattttatgttctaatattcatactggagtgtcagaccgaaattaaaaataatgaaactggaatgaattaccgatagaaaattctggctgagtcgcggacaatgtcactttcttgaagacgtttcgcagctctgcccgaagtgtgcatgacagtctagcaaccacgacatccccaagataaaacaatctctgtatacgtacgatatgtcctacaccaaactatatcactctattacaccctaaactttgctttgataaaaattgtaaggaagacagaaaaatttttgatgttgaaaaagatatgttcttccgttggtctgatacgacttatatagagaagttgatcgaagaataaacggtaagaaaatggtaatattatcgtggaggaggacttggatcatggcagtaaaaagcggatcattgattgatcgcgttttactacttttgataacgtgaaaattaactaataaataaataaaatataaatcttggggcccatacccatgcgtgtgtgcgtgatggtctagtgtgtaagtccttacccatgcgtgcaaaactaggtaccccttggagaatcgatatgctcttcacttggattttttgtcaattttattaacctattttatgttctaatattcatactggagtgtcagaccgaaattaaaaataataaaactggaacgaattaccgatagaaaattctggctgagtcgcgcacaatgtcactttctttaagacgtttcgcggctctgcccgaagtgtgcacggcagtctagcaaccatggcatccccaagataaaacagtgtctgtatacgtacgatatgttctacaccgaactatatcactctattacaccctaaattttgctttgataaaaatcgtaaggaagacagaaaaatttttg

SEQ ID NO: 99361 - DNA, 2054 bp, Cannabis sativa
ataatatatttttttattttttaattgtatcactttttaataacgtagaaaaaaactagcataaaatttaatatacgtgcctcgcacgtaattttttactagtataaataaatgtatctatatcctaatgaactgtagtaaaggattaagattaaatcaaaaaacatgagggtgtgtcaacctaatcctaatgagcatttaattataagattggatatggttttattttaattcaaggaaaggtccattaacgttacaaaatgtcaaatccacatcgtatgactaattattattattaatatagatatataatagacacaaaagataaggaagcttatttctaaatctaatgacatggaagtagaaggctgtctatttcggtcttcttatccattaataagaaaggaaaataaaataaaccaccaattctgttaaaggaaaaggaacacatcataagtatatatgactatctatgagtgtgtgttatgtttaacttatcctataatatataacggctgcaatttgcatcataaaagggaaagaatgacaacttctctggtccctttgacttcaactatattaataattttttatataatttaagaaaataaattttaaaaaatattattacttaattatagtgtgcctcttataaaaaaatactagttacccgtgctcactaataatactcttttcatttaaaatgaaccacctaattattttacattttattttagtaaatatgtttcttgggaaattattatacgtgtataccactttcaattcgctgtgaaaaatagaatcttacaaaatataaatttatttaaacaaatatacatataaaaattaaatatacatagaatcttacaaaatataaattttgtttaaacaaatataaattttatttttggtatattatataggattaattatctcaaatgtttcgattgagtacattatcttagctaagtaaacacatatatatcttatctttaatattgtgatcataaaaatatgttagtaatactgatcagacctagttcttgagttgtgcctagaatcataaaaagagaccgttaaattcggaaaaatgtcacattcttacatgcgcaaaagccccaaaaatttgaaaattatcattttatgtacacaaatttaaaaatagtatattttgcataaggtcttaccactcaaactcagggccatactgggtggtattacacctttttcataagtattagttaccaaattccaatctccttttcataaacataatagaaaaaaaaaacagaataattattttttgtaaaatatttatatttttaatacgaaaacaacataaaattaacaagaaaactacataaaggtaacatgaaaataataacaaaaaataacacacaaataacaaaaaatcaacaacaaattaacaagattacaacataaaaagaccgtattttctgtaaataaatcaaaaaaatcgtaaaaatatttaaaattccgtaaaaccgtatttttataatttttttttattgtttttatttttttgtaaaataatccaaaaaaaaaaatcaatttaattctctcttttttttttcttagaaaaatttataaattcggttcaaattttctcatactttccaaacgttatctaattaataaaagggattcttttataaatacccaaaatgataaattttttatatttttagggatttacaattttttatacatatatatttttttatggatgtttcttttttacaaaattatagagtattatttttctgttattttcacattgttgctacataaaattatggtgaaaatgaaattttttaagaaaaaaaaaaaactgtcgtatcctctgatacgtttggctgtcgctctgtgttgagtgctgtggtctgagtcttgttcgtgtggtggctatcatggcgtctagcagtaaagaaggaaggataatgggagatgttgttattctagaggaagaagatgatgaagtgttacgagtgccagtaggtagggctgaagaggttgcgattgacacaagatgg

SEQ ID NO: 99362 - DNA, 2699 bp, Cannabis sativa
  modified_base (654)..(677): a, c, t, g, unknown or other
gtaatattgcgacagagactcaaaaatatatgttcttgactttccatgctattaattaagaatacaatatattcaagaaaaatgtcatttatattaaattaattaggttaatctttctcattaattaattagatatacaatattatgtatttggatacacaaagtaattgactgcatcaactctcatatacatactattatacacatgcatcttatgagtggagatcaatatatttagcatttatatattaatacattaattatttaattaaacactaattaattaacagctaacagagaaatcgttataattgaagacaattttaattaattcgacatgatttaattaatatgttacatcaaatagaagcacgagctagctattaggcttaaaatatatatattctaattgtgaacagaatggccaacgccagggctgtgaccaggagtggttggcctgaagtctgtggagtcatggccagcaggtggcggttgcgatggcggcggagacgatgagaaaccaataattactacctcaccactcaccggggcgacgggatcagtcctggtggcactgttagctagtgatgacgtcaccactttgctggctctgtcgtcagctttcattgattcaccattattattattattatnnnnnnnnnnnnnnnnnnnnnnnntattattattattattataagaaagcttttttgtggtttctgtactcttattgtcagctaagttcatcaaagaccttccatcaatattggaaattccgtgactgaaaatagtaagaaataacaaaacgaaacatggcaaacagatcgatgaagccatatatattaataaaagatatatatatatattgagagagagacttattataatttataaatattgtataattaataatagtttaagtgtataggaagctctatatgtaggtatagctagatttttctataaaggagatcaaatatacatgagcttgcaaattgccttgttatgaatttaacttcatcatggcagctatttatataggcgccatgcatgttatcgatctgacagcccaaatataaataagcgcaagtggatactctctctctctctctctctctgtaccgtggccaataggttgcatgggccatgcaaagtaccgtttatttagttttcttctttattatttcattctaaaacatgaatttattatatatataattcatacacaagtgagagaaagatattagtgcaacccatgttcgaaaactagttctgcggctcatttgacagccattcaaaatttcaaacttggaatcattaaagcatatatatataaatatatattcttcttttttttttctttccctaattaagcaatataataaagtactagatgatatttcaggtatagctatatgtgaagatgtttgttgataatatatatttggagaaacaatagaatgtggaagacaattgttgttgatgagcttctgagcccccaccatatcaagtttcccataaccattttgtcctcatcctcatatctctggtcaaattagaatgtgtccacgaatttaggccagacaatatcaactactttccaaccccaaccatctgataatccctgagatgaaccgcaccattcatccacctcctttttcagagggaaattattataaaataagaaataataaaaaagtacctttttattattatgttttcattaatttctgacctttattcagtagtttttaaccatacatcgacaacaaagggttaaaaaagtaaacataataagtagtaaaagaaaaaaaggtaattatcgtactattactagaatctagctttagaatattctatgtaggtataggcacatatatcacaaatatataaaatagagaagttagactgtctaccactctgtgtaatatcagcaatagtataattcagtataagtctcacatatatattttactttaataatagttatagaaaattatatagaacgcgtcaccaaagtgcacctatatagtaatgctgatcagctcaatatatatatgatctgagatatggggtaccatttgtaaggcaatgttgattgttgctatatttgagaattttagtgataatatacccacagaagataagtgaggaggaatattggactttaaaaaatagtattgcactgcagccattggaaaatatatttggacaatagttgagaataagaaagacaatttgtggataaaataagtatacgatgtatatatcaagcatgcaggaagattaattattggtgggattattatacaaccctcatgcatagcaaattgatattggaagaagagtgtaaaagttaaaagaagtttaaaagcttgattaattcgctgcaacatttcaagaatatatcataaaaagatactcatttattcatacaagtggaattaatggagtcaagaagtagggtgaagattgaatattcttaaacataattttatatcatggttggttgttcatgataagataaagactaaagacagaggtaaaagaaataggactcatttggcataattttttgaaaagttaaaaattatgacaaaaaggtgtttagtaaacaattaaaacaacttattgaaaaattaatggtgaagctcaattaaaatctaaagttagtacgatccaactttaaaaaaaaaaaaaaa

SEQ ID NO: 99363 - DNA, 7849 bp, Cannabis sativa
tattcaagtggtgtgttgtattattttcgacaactactgctttgatatcgaacacttgaaataaccaaaaaaaaaaaaagaggtgagggggacaaatgaaaatgatgaggctaaatggggtagtgaacaaaaaaggtaaaaagaatttctgtacaaagtgatgatgcttaaccaatatctcacaaatttcccttagccccgcagtttcagttcaacaatttgtactgaaccaagggatgtgctcaagttggcaaaaagggctcacaggaacagggtaagttgctggctgcgtccaagtttctccttcgttctcaccaaggacgacgaatagctctcatgttagatgcttgtggcgaagtcctactgacaatgacgaaaagtctcaccattgttgacgaagtaaaacctggctttcttttccagtgagaaaacaatgcctatgacgaatttacacatattaggaagtctcccaagctgcagaacagcatgttagtgaaattgggaaattctctctccaatacttcggtactacccatcgtcgtctgagttctcagaacattcttccatcgcttcagcagtcataagagcagccacagccttgtgaattgctacatctgctctgtaaaccattctctgagctctttctctcttaagcttcgcaatgttaatagcatgttcagcagcgcaagaagcatcacgcaacctgaactcatcaagatctggaccatcaaatttctcaatgatatgcctctgagatctctctaggtggaaatgctgtggactctgccactcagaagaaccaatattccactgatgatgctcatgtcttttttctaacattctacgatcatataaagccatcgcctggctgtcgttaggcgaaactatattcctgaacttctttgaccttctcttgtgaaatctatgaaaatgatttctgtcaagcccaatgttactcattgacatgctaactgcatcccgtggcaaaaaaatcctaggagatgacatctgaggcaatggggaatcatctaaagagtcataattatggcctggatatacaaacttctcatccccaaaagaaaattcattcaatctccttcctgcagaagcatagaatgtaagagtaatgcaatgcaagcaaaccgagaataaatttgaatagtaatgtgatacacagaggataaggggcttaccaaaggcatggtaaccatcctgatcaaatgtggcattgctttgcccggcaactgagagcttcttgtgtgacctttgttttgatcccttatctggaacttccaaaccccgtggtttcatacagaaagcaaacatgggtggcttctcaattagttcaaatctctcctggcatccatttggatagctgctatgaagtttggtcattgctaattcccattctctcacttcttgttggtacctttcccacaagggcggctgaataacaagacaagtacattaacaaaggaaaagcatccataaacagagtcaacagtaagtttaaataagagttggaactacaagctatagaactgatcattgttgagaactttatactttttactttacttcttaattgccagtactcactgtttaaagtactccaatccaacagccaaccacataaaccatcaatgttttttcatcaaaataaaccattcaattataaatacgcatacttttcaagcttcagagaatattcatgcacatttattagtttatgactccttgaaagtgatgacagtatagatgaaaaagtacctgaagatgcctaattaaaggcattccattcttcttccttttcagctgccaatgctcgtaaatgactttaattacatccatgggcccaactccagcagtgagctcttctatttcatctgatgtcaacaggtcccgctgttgagaatatgcagccttctcaaacatgtccataattttctcaaacatctcttcagatatctttcctgaactgtcgtcatcaaattctgaagaattttttcgtgtgttcagaatccactgctcatcatcactatccatgtcatataaaacacgagatggattcaaagccatctcaacatctgtttcaacctgtctaaagtatttagaattgcgaggaaatgctatttctgttccattttcgtctccttcctcaatcaaatgaacaccaggaataggaatgtttttcatcgaagcagctcgaatgttccgattgtaacattcttcgtgcatctctttgaaaagagcccattggcttctatcctgaaactccaaagtccagtcctttcctcccttccacatcatagcatgtgtgtaacggtttgttgacccaggctgcaaaaactgatgtgccttgtaggagtactttgttatacctgacaccttaacagcaagcttccactcattatgatttaaaagctccagcacaaccagtgccccagattccctccaacctctgtcaccaacagtaattaaaatatttacatcacaagataacaactccaaatttctctgtgatcctttggaaacatctgttgacctcttatcattagctttcctaattcgtttagagggaagatttttttgtatacttttttgctttggactgaattcagaacctccaaacggcaatgaatatgacacctgggttcgtggcttcctaggtccattgctaaaaccattatagactgcgcctgccttcccgtcagaccagccatgtgagggatatccaaatgatgcattgtgcttatttcgatgccacgtgcttctaggagcagtggggttagggctgggaaagatgctaccatttgcactccaaggaagctctgaagactgctgagcaccatgtaactccccaatatgagacttctccaaccggttaaatggtgggatttcaacactgagaccattcaaaaaagaatgacacccaatctcagacgtatctttgccaactgtagtccttgaagatagagcacactggtctggcactggatggcggttttgccatgcatgtggctgaatggttgccacagtcccagccacactatcatcgtcattgtggtaaagctgggaggattttaacctacctccattactacaaactgaaggaccggtgcttaactcctgcctagcagaggagaagcaaccatcagaagcagcctccgtcgaaagattattcatattatcctcaagagtgaattctgaacctttatttgagcattcctccatactagagctgtcatccatcaacatgcttccagaattttctagatgttctactgaatcatgctcctggaagctcaaccaagccagagaatgctcaataagcagcgtgcgatgcaaactaagaaagaaggtaggggcagcggtaaaagaaagagcaagaggaggaagctttttgtacatctcatcagaattaggacggatgttcataaaagcagactccctggagggacccatgaaacttattccctgcctacacctcttctgtgtgccctaatcagttacaaaatttacaaaagtcaatgtcacttacatatataatttacaataacaaactacaagaccacatcaaataaatgttaacttccttgtataaaaaaatgattgtagtactatccaactgcaaatatgttaatcagataaaggtaaaacaactacagaagagacttgaaaatacaaaaccctattaccacctcctaagtttatattaagattgaaacctatcagaagataccttaccttggttaaagtaggctgcctccatacttgagaatgagaagaatggtttgctctactctgaagcatctgaatattagtgtaagtgcattcggaccgaggtagttgcttattgagtaaacaatgcctcttgagtttccagtccagaaacgtccactttgaattttccaactcaacatagttgtaaaatgcgaacacaagctgcttttgaagacgctgacaacatgttagcttgaacctgattgttgttactggcaattgcaactcagcaaatttctcgtgttcggtaggttggcgaaatgtacccaataccagaaaaacaaaggccaaagcttgctttaaacagcctttaaacaatagataccttaatccaactacattgtctacaaaaagcatctccaaatgaacctgtggccatgtgatcaccactgcaccataatgaagcagcattgtagcattaaacaaccaaaagttatccactcctaaggagtgatacaaaatatgtaccaatggaaagtctatatcgaacttgaacttccctaactcaatctctggaagcaataatttaagcacaccagcctcgtcagcagaccacaatggcccaccttggtccaatcttccaacaaatacatcctgcttttcaaaatccccaatttcatcaacaaagggagcagagggactaacaggaacaaatgcacttctacagaaatgattcttctcacatctgcgggacagttctacaccagtcttgcgaaaccgcctcctaaaataaacaataggcattttgctgtctttggggcaagtaatgctttctgaggcagaatcccccactgcatcaccagcatatccattggttaactttgaacatctaggcaaatttcttttatcccttctcatattaccacttcctacagaaccatgaatagagacagaatctttagacaatcgagccagcagtggcttcatagttgatgaatcagatgtcttctgtttcttaaaagcacgaaaaggagatttcacccgccgtgtggatcgagccagccaagaaataatgggctccgagtccatataactactgcctatacagctatcatcttgcgtgggtaaatccctcttccccttatcttttttgggcttcaagcttctttttttctgatcagaacttttatctttgcccgatgattttcctcgctgaaccttaccaggaacttcactaggaagtagcaagagtttgaatctctcgttttgaaggttaatccattcctcatcacggtcatcatatttaacatgatgaagtttcctttcttcgtcgtagtcatttacaagaccgtaataccaactctggtccaaaggccaaaaaaccttgattctccggttcaatacccaataagcatccaagtccctgaaaaaaaattcataaaaatgtcgtctttttcttgaatttcctttctctttgtgctgtttccttggcctcaatactctgccagcagtatcatttgatggagattcagagccagacagagacttagatctacttctaacataatcatgatcggaagataacagaaatgacaactcatccacagatgccagtgcagttgccttgttgcttgatgaaaacccagtgcagtttggatcaaaccgtgaagaaagcatcattgctgcattttcttcaagattctcctcatcttctcgggtagtattgtgtgtcgtagaaggtttgtcactcaagggttctgcttttttcacaacatcttcactgtctggtacaaattttttatttccacgtcgtttcctctgtgattgttttagagacaaatcgccattatttacaacagaatgactcacacgctcatctacttcctctacatgcctagttgagttcgactcgctacttcggttttccttgaactcatcaaaaccaattttccgtttgaccttcttccaggactcagcctgacttccagaatcctccccacttgaattactcttctgaacaacaaggtccactttactagcagactggccttctcgcttcgactcctgaccaccttcaaatttcttccgccccacaaaaccccgtttgcgcctagggacttgaatgccattaccaagagatgaaatgctattaaagccaatactaccgttcaagttctgacctctctccaacttcaagttcttcgaatcatgcaagtcagagctcaacctgctatgaataacactatctaacctcttgccattactgctaatactcttcaaactactgagagacacctcttttttactatttttcttcttcttgtccctattctcatcaacctcatttccagctacctttctcttcaatttcttgttttcaacttctttcgaagctctagctctatacaaactcttaagatccaaagatctcgattttttggggacatcggtgccatgtgaggtttctattctactttccatcaacaacccctcaatccaaaaccccgaatcaaagcccagaaattttcacattccatcgtacaagcctctgcacattttcagatctgtaccaccaaattcatactataaaattaaaaatcaccaaaaataaataaacaaataaatccaaggaaaaaaaaaacaacgaagctgtggatcacgccctttacccccactcattcagatcattcccgcacaaattcaataaacaaaaataaattctttaaaagcatagactaatcaaactcgtacctcagcaaaaatgacagagcccatcgactcctcaagcgaatcgtaaagatcacgtatagtgggcatgaattaggatatgaatctggacctcctgatttgaaaccctaattcgattattcgaatttcaaaattgattttcgttaatttctattcccaatttttttaccgtgagagacccggacaagacctagggtttcgtttgattgcacgagtggagggtttagatcgaaaataactaaaaaaaaaaaaaaacgtaactacaaaaatatttcaaaatacacgtgtcgcatttttctccgtaggatttgataattgaggtggaggttgtattctggtggttcgatcactttaaaaggtagttagaaaggaaacagcttcatggcaaatgaagcatacgtggacggtcaagattaactattagacacgtggcggaattggattataaggttactttgggcaatacgtgctagctaattaacgtgatatggatttaatacattttggaatttatgaagacaaaaaaaatagttttactttacttgacccgccaaaaaaaataaaggtataaaatgagaagactagacctactctctctactgtggaatgaagatcttttattaaaaattgaggtggcatattctattaaatttattaaaatttgacacatcaatttaatttatattaaatatgttaactatttttgttaactttattagaagtttaattttttttataaataaaaaattaattgaaatatcaaactttgataggtttaacacaatataaataccaatttttaacaagagatcttgattctccactatgtgagaatacacatcgctttcttgaatgaccacgtggcacttttgaatttggtagcgtatacaacaaaactatcaaaagagaaaggagaatcactctttttcagttttatagtggactgggaactaagcgtacgttaagatttttgcccttgaattttgacatgtaacgaattatgttcttaaatattttttagctttcaatactaattataaaaaacgacatctaaaaattaggtagtcgcacctgataactatcataatatcagggctcaaattcaattcactttctgtacagattttaagtcatttacatataggtgagtgcacacctgatctacctatgatgacatagagactagctcgtgaaacaataatatgcacaaatcatgatcaatatggttcttatcagtataattaaaagcagacatataataaaaataacaaaagaacacattctcttttattttaaaaaaaaatcgacagcataacgactgtattttgaataaactcaaaaatcataacctgtataaatatttgtacaaaaatttatt

SEQ ID NO: 99364 - DNA, 3110 bp, Cannabis sativa
atattccataaaatgaaatagttataactaaagttatttgacacaataattattatttaatattatcaaattcataataaatcacaaacaacataacaccttgttgttgaaatcaaaatgtttttagctacatttttattaagttataatattttcagaaaactaaaattaatttgatttacaagtatttatgaatacatgatacattattagctaagaagccttattgctattgctataaatttccacaacatgatcatatggtctaaacacaactctttttttttccctttccaaaacttagtacctaaaaagtgcaaatcaaaagggtaaaaagaatagcaagaaaccaggtcaaacaaagatataattgtgtatgacaatttgagaatgagaaagaagtgatgagacaaagatgatgattatgtaattttaaggtacaaattcagtcatgaatgaatatgtgaaaaaatataagaaaatcaagttcgaaagaaaagtgttaaggaagaaggtcattaagggaagagaaagcagtcgagatattggcacggctcaatcaaataaagatgaccccaatttttaggggagatttgatttgattgaaccattccaatatcccaccatttttatccaaacacaaaaatatgaaatttagtaaccaaaacttgggaaccaaacaaatttacctctttgcttggtatttctattctgtctcagcacttagtatttcccattctttcctttgatgtgtgcctaaatagtatagcaagttgaattgaagcatgtatgaacaagaagaataaaggaatcattgaaaataagggccttgtgtgtgtatatatatatttatatagttggtgtgagaaggggagaggggtgtttggcatataagaaaatgaaggtgaaaagttggaataatggaggaaatggttgagatgtcaatgtcttcatttcacttgtaagacccaaaaaattatataatagaaaggaaaaaaaatgattggcctttttctcaatgcataatgggttcatcacattgttaagaaatgcataagaaggttcctcatggatttggagttgcctttttccattttcaactatggttgtttttattatctttgacatcttctttcattacttaaaacccaatcgaagtatctgttaaaactcaagtttatctctcttaagtgggtagtttttggatcaatataagttacaccaaacacatgatgaaatgggtaatttgttttcattatatgattggtgcttttgtcaaaataatacataaaacaatacccttatgttattaacctatatatatctaaggtcatcacatcacattaccaaaaaagtttgttcaaaaggcttttgaatgaaccataatatacttatctagaattgtgttttgcaagaaatccaacaacaaattacaccaaaaataataaattatgcctcaattatgtgtagattttccaagtggtgcaacctcccctctttaagtggctcctcaatatctccactaaaaacacaaagaaaccaaagattcggtagctagagaataaagaatacctaacttcttgtccttcttgcttgacaatatagtgcacattgtattaccaaattagatatatttatatgtattggacttggttttgcccattatgatattaaaaactatgtattgcccttaaagatttcctatagatgttaatatgaattgcaagtaagattttctcactaacatatattgtggaactaccaccaagtagtttgtattaacatgtattactacaaataattctgaggctttttgggcaaaacaactcctccaatagcacaataaggattttttcatagaagtaggtaaggggcaagcaaagactagagatatcaaaaatctagtgggtggaattattattattattattacattttcaccaactttaagaatctatgatctcagtccaaccatgtacatggtcagagtccaacaacaacgatacaagacaccattgttagagaatatgcttttattatagtaatcacaatttacttatggataatatatatcagctgttttggggttggcaatatagaatcttatctgccatctcagccatttatggaacaaagaaaataacccacataggctactcaaatcaagtttctcaatcataccatgcaataaaaaggggaaaaaacaccaatgatcttttttatgtaaagcaaattttttatgcatgaaccccaattatgagcttgtcaagaaaattccacataggtgataggtgcctttctcagtaacaagtgtatcattcgaaataaatctttcaatggcctgaagaaaaacaatcaaatacaaagagagaactctcaaaaagctttgctctatgtcttggagctgcttatttccttacaaggaacacctcccaactaaaagatacatgtaaaaatgacaattaaatataaagacttttatcaaatagtgatgcccaatgacttcttaaacttttcaacctccaaatatgctgtggagtaaggaaggaactccatgaaatgttctttgctcagatcattgattgctacagcaagtttcgggatctctaaggtctcttcatgggaaagagttcggacaaaccttgcaggatttccagcccaaagttcgccagttggaattcgtctccctgggggaaccacggatccagcctccaagatagagtgagtctccaccaacgaaccttccatgagaatagagtgctgcccaataatgcactccggttcaattgtgcaagaacgcaagagactgtatgcaccgattgtcacaaacctctcaataaatgtctctgctggaaggcctagaattggaaagttgcataaactgaaaattattagccaaacaaagaaggcgccaaacatggccctaatccaggaatatgttagccaaactttgctggtgaaaagcaaatacaaaatctaaaaacttttgtttaataaaaactaaaacacaagtataagatacaaaagatgtgcatgtggcagagtaatcaaaggctgtctccagaaaagtaaaccatcaaaattaccggcaaaataaaatataattttgg

SEQ ID NO: 99365 - DNA, 4515 bp, Cannabis sativa
aagaatggaggaaaagtcagagatagtcgaaaatatcaagctaccaaaactaataaatttctttttaaataatatcaacggtttaaattcaaaattaggatattaaaaaagtggggaaagttcccaaaaatttaaaatggttacttcattaaatggattacggcctattatgacacttatgaataattttgagtaaccgattccacaacatctgacctcaaactaaagaagtcacaagctcaaaaattgtagaaccgatggaaaaaataatccataagatataaaagtaattttgttcttataataacaatagaactaataaggtgatgtgactggaaaaaatataaaacacaccgttttattaaaaggaaaagttaagtagcgggttagagctcaaagagcatatcaaagcttggatatcaagaggaaaagagcttaaagagcagaacaaaaaaggaagatagcgaggaaataagaagagtgagctcgcgcgaggaaataagacgagtgagttcgcgcaaatcaaatggaacaaaggaagagagcggttccacatttactccagccttggggaccctatcattcaaaaatgattgtaggttcttgatcataccacaccagtcaaaactctgtaggaatacatctttgacatactcatcagctcgagaacaagggacgcaaagaggaattattcgaaaccttagagaaattgtgtaaactagcagagttaagcataagttctgggattagtcatggtgtatggatttcgaaattgaaatacaaatttattgttgaactaatttttcagcattaacactataatatacacaatcatacaaacaaaattgagattataaatatttaaatataaaaaatatgtaaggtgcatgggtgcacttatatatttgtttatgtaaaatattggtgcacttatatatttatgtaaataataaattacactggccaaacggcactactagtttgcttgcaagattagttagttagttagttaaatcttttgttaaaaaaaagagagagagagagaaatagatttttatttgaataaagattgtatttttagtttgtaaaggaataaagattgtattaaaccactaaaaagaaaaagaaaaggacaatagattagttaaagtttttgtgttaaaacatatagttagctgaagtcgaagatgccaacctgaccagagtccacaccagaccaaaaccctttattgttttatgtaaaatttctagggcaactgcaatcgcagatcgttgatcattgagattattgattgaatggctcgggccggaggaataaccaatgccgtaaatgtagggatagcagttcaagccgattgggagaatcgcgagttcatctctcatatttccctcaacgttcgccgcctcttcgatttccttgttcaattcggtatataatctaatttcccctttttattttcaatctaaaggtttttctctctgtaatacaattgccccaaatcaatatatatatttatatatatttatgtttatgtctttatgtgttttttcttttgggggctgtcagaggctacgactaagagcaaattggctacattgaatgaaaagcttgatactttggaacgtagactcgaacttcttgaagtccaagtgggtacagcctcagctaacccttctcttttttcaaattaatccacttttcctcttgttgtctcatttctattgatatttgtaaacccagtttggaagtattgttgtatttttttttcttcttttttgtttgtttgttaaatcattggatttgtaatgtcttagctactgtcttgtctgcatatatttaataataaataagctggcgttcgtttcatggtatttgctgatccattttatgttctttcatttacgattatttcttttcacaaactgcccactttgacttttttcctttccattgttttacaatagttactgatcatgtcttacccaactttcacaaatcacaattacattcctgcctaattatgagcaagtaagaaaaaggacccatgatttgctttatgagatatgggattcgaaatctcttaagagttttcagttgttggttcgattccacgggggaacatatccaataatctgacctctaataatgtgttagtgtgttatgattttatttctcatgggaaccttaatgtagcatgctacagtttcttgattagtgtaaatgaagtaattaaaaaagactgttacattctgaagtgaattttcattgttttttggttgatcgtggaattggcttcatagttctagagctaaacgcaatcttctccgtttagattagtcacatttttctccggataatacacaattcagaggctttagctttaattatagacacttcacacttgtattggttttggattctggtataatagtgcaaaaccaaaccccattcatcatgattcagaatgtaaattgctcgagtgaataatggaataatataaataagaagaaaaatcaacaatggagagaagttttacaaaaagatcctcatttcattgtcaattcaaggctcattacagcagttattacaatttttatcatcttggctctggaggaggcaaggcttgtaaagtaggtgaagcttctgttggagtggatggtggtattacaattctcttgtccaagactatggaagccgagctctcaattgacctcatatattctgatgcattgttttctatgatcaaagcatcctcaagttcacgaacgatgtcagccatgcaaggtcgataagtagagtagggctcagtgcataacaatgccacctctaccactctccacatagcttccgcatggtaacctccctttatgcttggatccacaatttcatcgacgtttgattcccttgcatgttgtttagcctgcaaacataggtgttgttttcagtcttagtatttgtatttattattcagtcaagttgactcaaataacaagtctagctttttaaacactgatgatttcttcttgttaacaggtgaaatggcaagaacctcacaaatgaaagaactttacaatatggtgagtttcagaaatttatgaagttgattattcatacccattcaaccagactccactcactccgcggcctgcgtatgttgagtggctccctaccacttatgatttcaagtagcacaacaccgaagctaaagacatcgcttttgtcagataaatgatgggttgtatagtacctgaaagcattagagtatcaatttgagcaatttttggccatgttgtcaagttttcatgtatgacaacaaaaggttgcagtttttttcaaagaacaaaggttgcagttttttcctttttataaaataaggcagcaatattttttatgagaggaaatgaaaaggtttcagaaactttcttcctggagttagattaacaaaagggaaggaaaactacatagcgaaaaatgagctgaagaaaaatcatactctgggtccaaatatccggcagttcctctaacttccaaggaaacgacactgtcaccttcttgaggagcatattttgagaaaccaaaatcagcaactttggcgttcatgctttgatctaaaagtatgttacttgatttcacatccctatgtataacgcagccggcatatgtgtgaagataagttaatcctgcagattcatatgaaagaattcttcaaacctcaataccccatttcatcagccattttaatggaaaattgttaaatgggacaagccaatatcaaagatagaaatcttgcctcgtgcagcaccaagagcgattgaaagtcttattggccagtccagcttttttcttcttgctgatgcttctcctgttaagaaagcaagtcttttctgtcaaaaacagatgtccatgcacagaggaagagataagaatggtgggtgtggaatgtaccatagagacgatcttggagggagccattagacatgaatggataaacaagaatttgttgatcattttcactacaatagccaagtagaggcaccagattgtcatggaatatagttgaaagaagatttagctgttgaaagaatcagaaggaaatgtttcaaaaatggttgagtgacaattggtgataacaattaaatgctttacataaaactcatggaaacttgtcacagaaagatgtgatacctcattctcgaattctcgagttccttgagttgaagtcgctgatcggactttaactgccacattctgcccatcaggaagggtgccacgataaacagaaccaaagccaccttctccaatggaagttctgtaattttgggtggcagcttctatgttggccagactaaatgtttgtatggatattgactttgccttggtctcgtctatgataggtaacgagaatatcaggcctttagtttctgcaggttcaagaatttttcactaatcaatttaaatatgctagaaactgatctgaacaaacacaaacttatagatttagcagcattatcaag

SEQ ID NO: 99366 - DNA, 5266 bp, Cannabis sativa
cgtgcgcggaatgactttgtttggtaaaagaagagttggcttgtttcaaatattgtaacatcagctagaatcatgcttgatcaatacaaatttactaaagatctttcgttgtctcctttgaatatcagcagatttttgttcattttgatttaatactgttcttttcctttccaatattaaattaaaatgaacggagaaaagaaagtaaggactgagaaaccaaagttagaatgcaaaaggcaggtggagaagtacagtctttattcaactccaactgccatctgccacccccaattacatcaaaataataataaaaagaacaaataaaaacctgttctctcactcactaactctctcagccaccttagaccaatttcaatggcgaccacctccaattctcgtctctcactgaccccttcccactcactcaaccgacccacaacgctcttccattctccactttctgtttcactccccagatccccttttcacctttccaaatccaaaatcgccatctcttgttctctgaatggacctgatagcacggccgaaggcattcccattgaaaagagtaagtctttttctcttttttcctaaatgttcgattccatttctcaatcaaagagcaaaacgattttaaatatcatttttttttatgcgcaggatatccagcgtttcctacggttatggatattaatcaaatacgtgacattttgccccatcggtaacattctaatcgaatgtgtttttgatttgaatgtgcgtttttttcttctttaattgtttaattttgtatgataggtttccgtttctgttagtggatagagtgattgagcataatcctggggtttcagttgttgctattaagaatgtgactatcaatgataatttctttcctgggcatttcccggagagacctattatgcctggtgttctgatggttgaggtacaactttgtcattggttttatatttatttatttaattattttgcaattgtattaaccatggcatttaacaaatttacaaatactaccgttcacatcactactcatctactgtttaatcatctcatatctgataagttcctttttctcaaagtagacttattatatttatatgtggcctttttaaaagcttacaacgtcgtagatagaatgaggcttttgtgttttgcttattttggctcttaaatcagtggaaatgggatctttatgaggactttctttttgagatgttaaatattcttttgtttcatattagaaaaaaaaaaaaaccaaaatatcacaaaatcgggaatcatggactttaaattcaatgttgttatcttgaatgagttcagtgatagtgggttaaggtaaaattgccttcagtagttggagcaagtatattttaaacttaagtggtaggttttagtggcaagtgggagatgaatccttaccagaagcaggatcacatgaggataaggccctaataattgcttacctccgggaaggggagaaaagaagaaaacaacaccctattttgaagattttgcttcaaatttaattccatcgtgcactaacttctaatataattaagcaaatgcttgcaatgtttctttttctatgcatggctggagcttttgatagttagttagtagcattaaagatgttgacattatctccctaattagaataacttcatggaggctctttgcaaaaatgtattttccatctaatttattagaaatttgtattaacaaatataggttggtctctatataccacacacataaatttttgaaaattttaaagacaacaaagcagcaagaatttttgatttattgtcattttactggagctttaggtcaatgaggcatattatcgtgcaatcagctcaatttggagctttgctaatgcaccttagattacatgttcttttcatatcattaaaaggctctggactttctgcggatatcccttagatacactcattttcatgctttacatatttaggactttgttctgtaatctactatggaccataataagcaaggttgctttggtgtgtggtatcattgttcatggttcttggcaattgcagaagccctatacttaacatcgtgctgttttgggacaattacgtattacaccaatctctacatcaccatccttcatctactgccgaaggaagaagagtctgtggtttttagctgaaatcacctgtgttcatgtgtttatttccatagttttgaaacaagttttggggaaccttgtatgatttacggaaaaagactattgagggggattcaaacttaagatttgttctttgaggagagaagtagtaccattaggctatttctatgactacaattaacataactagttaaatggagaagagataactaatttttttttacctatgttcctttccaaaatctaacctcatacacttcttttcattttggatatgtttatcattaccaatttataaacattggatgttagtcgaagtgatttcaatgtttaagggtctcctgaatttttgtgtcgtgcttcatatattaaataccattagtaagatttagtattttgtttttaatgaaatattaagtatgatcttctgtattctcaaattaaaaacaagagagcaattaaaaaagtttaaattctcaagtagagttgctcaaaattcaaatgttcaagcatgtggcttgtctactgaagatctgaggtttaactccttcctggataaataggaattgctataattctattgtttctcaaatcttattgcattaggcgaggagtccagtttatttatttattttttctattgtcagtttaattttttgtttagccattgatgatacgatttctggattcaggcaatggcacaggttggaggcttagttatgctgcaaccagaagtgggaggctctcgtcagaatttcttctttgcaggaattgacaaagtgaggtttcgaaaacctgtgattgcaggagacactttggtaatgagaatgacacttaccaagttacagaagcggtttggaatagccaagatggaaggaaaagcatatgttggtggtgaggtagtttgtgaaggtgagtttttgatggctactggaagtggaagtgaatgatgagttaattatgtaatctttgtattggccttttgttccttactctttcttaatgagaggatgaaaaaattactaatttgaagagggtggatttttgtattgagtagacatgatggagttagaaagtataagaaataagtattgaaattcagattaatggctgaacccttttgttaacattatagtgattctcatctctgatttttgatcttgaaataacaatataaaagataaggcattagtttacatttaaagtccataaaaacggtgttaagcaatcaacatcgatgcagtgatctacaatctgtttcatttaactggtgtgaaattctttgttgacataataactaatataagtctggtcccaactagttggagttggctatcatctattatcaatgtccaaatgtagagaatttcacataaaaatgtacataattgcttgaattttcttgtggagaaaatgatgtgatgttttggactttggaataatcaataatttctaaccacttgcaaaataaggagtaatattaaaatgagttggacaaagttgtacaaatcatgacatgaggtatgaaagggagatgattgcacctttcaaattcatttgtactaaggtgttggaattgatgtcacaccctagtttgtttttttatatattttaacaataactaagaccatcatgaaactaagatatgtttttaattctacttgatgctctttattttttaatcaaagctgactcataaggcttacatccacctcattctccaatcttaaggggattctaatgaccatcttctccttgatgctaccctcacatctgctttgaaaattgtcatctaactcccacttgatttagtattaaaaacacctgaatctcaaactttcaattcctctaagcaaaagatacacttagaccaactctaacattatgctttctttggttgctataatttacttgagttagtcctcaacctaatccttttgcttgcaccgttttatgtattgtttttttattgtttgagaattgaaccatttacatactttaatcagcattctttggccatatttcagtgacctctataatgacatcacctcatgaattatacccaacttccaaactgcaccataatgacatcaccccaggttaatattcacaaataaccaaacagcaacatgagctgctttaacttgtgatgcaaaagtttgctgagagcattgagtttttcgctcaaaccctttctttattacttttcccattaactttatgagcaaagcaataagttattggaagctattaataatgggtatatggtgacatggggtttgtggtccggtcttgtcgtgtcctcttctttttatcgccaatgatgcggttgatgagtggacgtagctttagtttgcacacacacttaaaatatattatgcagttgtggaatgatggtaataagagaaaatggtgtcctttatgtagccatcataggagtctttgtttatctctgcttttaagttggtaggaaacattaattattactcactctccataaaacaaaatggaatatcttctcccgcaaaccacacatttctaattctaagcattaattttcttttgtgttctctcactttgttgtttctcatttcttgtaaaatgttttgaatttgatcactcatcaaattaagttaatgaattaataagactcgtgtcattacactagattaccgtgtactgatatgcaaacacactcttcacatatttgggcattttctcatgatagagggcataatttactcgaaagagtaattatttgggatgacacgtttaatactcatgatttggaagtgagactacttctatatttatatgtatgatgtctgtgctctttgcggttagtatcactcttataaaaattttaaatgccggtactaaaagattcaacaaaattgaaaaaaattctatagtgcactcttttaaaatgggtggatttgatgcaacctttattattttggcattaaaagaattttttaatctaatttttccataaacgtgtaagtttgagttatttaatacatcttgtaaaattttgagaaattcaaaaaaaaataaataaataacacgctgaattaaatagggttcaat

SEQ ID NO: 99367 - DNA, 4113 bp, Cannabis sativa
  modified_base (2961)..(2969): a, c, t, g, unknown or other
aagaagttgcccatgtatcatatggaagcggtgctgcggccactaatagccttgtcgcggcacctgtacaaatacgaaaaaacatcatttctgtactccctcgctgcgaccaccattagcctcactgtagcgataacacgttttttttattttgacctctctcagtaaagtatgcataacttttacatacatactccaaatgagctaattaaggatgcgttgaaaagctgagaaagagatctaaagcttctatattttgactttttccaaaatttgatcaaaacatagccaaattttggtttgaagttttaggtttattttcttgtaaatttttttctattttatagattatcatattttcaatatttgaccaatttatacattctaactgtcaaaacttgaaaccaaaaaaaaaaaaaataagcataattttgctccaaaaagtaacaatgaagaaaaaaaattaactctaaaaatgacccgaacaataggctaaaaatagtctaataaattcttccaatctaaatccttacttgctcgagtaagactaacactaagacacaaactaagctaacaaacaatgaattaagcctccatgtaataatattctctgtcacttgtggaacttcaatcaattaatcaactacaatttggattcaaatattctaacaattaattaagatggcttctttgaaatttgtgcatagatgcaaattcaaattctttatatatggataacatcataaaatttttactattttcaacttttcacaactcaatgatcaatatgcttgcatgacttacctctctccactaatatcaacaatctttgcttggaatcaaaatgatttacatgcatggttgtaatgtaatgacttaggtaaaaggtagataaaaagtccatttaggttacattagagcatctccaatgagagtaatatatatagttgccaaaatacacatatcatcttaatttttttttttttattttctctctcatccacataaaatttatcacattttcttaaaaaaaatacttcaatggttggttatactaaaagctgccaatcatcgttccacatcacattaaattaatgactttttaggtaaaaaaaaattctaataatttttttttttaaaaaaaaaatatattatgtgaccattgtctatattggaaaacacttcaaataaaattggtccacattgcatatgtggcaagaccactctaatgagcaatctctattggagatgttcttataccataagcacactacataaacccctagcacccaaaataatccaatatcccaaagtttgcccattttttaaatgattgagaaggttgctaactatgtatccaacatcacttttattcacaataattattacttcttttttctttcttttcttttttttagataaaaaaaatatatatttttagagatgctgaaaaacactatacattttactatctcttctcaatcaccaacttttttaaaaatttcactcacaaatctttcactcccctaaacttattcctaagcttatggcataatttaaagtgcaacgagaagaaaagtaatgaataaatactttcaggttttattaagtggctaaagattttaaaacaggctcaagtccaaacactccaaatggaataagtctcacaattcacgaacacgatagcaagcatttgacacaaggggcacgatttgttcccttcttataattgtcagacgagttttccatgttaaatagaataaacatggatcatggttctactgctctggcattttctttctcacagtcccaagtgatcaaggtaaattataacggtttgtcttaacaagaaaagtgacaagattgacctttaacttagccattggactagcccaatggacaagagatcaatattaggataagttgagaaatatatctttttttatccattactaaaaaatactttcatattatattttattaaaatatacccacttttaagtagattgtcttaagtgtagcacacgatttacattaacttaaagaggtataatgaggacatcatctataaaaatagatgtatcttaaataatatggaaatgaaagtaaaaattaaaacaaataaagtaaagtgagtaaataatgcaattttctccctcttatgtagttgcctataaataagatcattaccttattgtataagagtatgatcttggttttccggccattatgctgcaaaaatcctaagaacctccattgttgtaagttcacaaaacaaatctaatacaatgacttgagaactaaagcttatttttataatcttatctcaaacactattaatccattccaaaattttcataatcttataattaatatttagtcaattgtcacaaatatagagtcatatactaaaatataggtactaaaataatataattcttactatagctaatagtaatttaattatatttaaaaatatttgaccttatggtcctaattttaatctttcagaaaatatagagtttaaaataatttttttaaaaaatataaggtctaaaccattaaaatgtaaaatctaaaataatataaattctatttaattattcatttaaaaaaaggtgagatgcttccaatctaacctaaaaatctctttatatatttgaacatcatccttttcttattagtaatatgattgagagtgttcaaaaacatgcttacatacatttcatattacgagtaaaatcatattttataaatcaatttgatataaaagatataaaagagtgtgctaaaatattttaggggcttttttattttaacacttcaaaacaattttgtatgtatttttacgaaattttacatagaaacttctattacaactggcgctgcaatttaaattgcaacaaaaaatcgtatagaaatccctattacaaaatcactttagaaacccaaaccgtaaannnnnnnnnaaaaaattaaaaaaataatatatgtagtaattcccccatattttattacataaatatagattattttggtttttttttttacatttgggatagagattctaatttgtgacccttttttttaaaactactaaactatactatgactacaaatatagattattttgtgaaaaaaaaatgagaagtcttttttatttacttatgatgtatttattgacattttcttttctgatgatatttaatatcttaaaacatatcccaaaatcaatatgtaaaatatatgataaaggagcctaataaataagataatgaattctcaaagctcatcagatcagactgctccactcattcaaaagctaaaaactttacttcctttttttctggtgtcatatggctgccgctgaatatgaacataacaactgctgactaggcttatgaaaagctttatttaaaaaacaaaattaataaaataaagaaacaaaaaatataaacctttattttttcttccttggaaaatactagtataaggtggtggtatatatgtctctttttacatgcatgtgcttatgctatggtaatgccacttgttttggctgctttatatcttgagacttgagtaaattttctctctttgggaaagtgaaagaagcccaaaagcaagagtggattctttctatattctctatactgttttgggacaggaaggcttccattccactctctatccttcatcacaaagcaatgtcttttcttttctttaattttattttatttttgtcaattttctaatatttctttaccttttttccccctcccccaccttttatctccaacactttttctctctctccctctcttttataccccattacaagaagaaatattcttcaatcctctgcccttacatgaatgaatcaccttaaaatatcagttggggtctcttcctaaatcccagaaaaataactctctctctatgcttatcatggcctctaaaagagtttcgaacacactggttttactattcttttctctactcattagttcttcttctggtaagtaaagtaaccccatttgttttggtttcagtaacaattctcaatcagtactaatcatacattttttttactctatttttcaggaattcatg

SEQ ID NO: 99368 - DNA, 2927 bp, Cannabis sativa
aagggatgaaattgcatgaaaaatttaattgtaacatattttgcataataggatagcatagtttaaagtttaagtgcctaaatccaattaaagcatggattgtcaaatttcccaagaataatggtgtacaatacaaatcctcataccctctgatatggcatcattcggtatgcataaaattttgtattttcttaaagtgaaactatcctatgtagatgaacaggtgcactggcattagtaataaaaacctcaagcttggatggtaggtagaacaatatctatatttcactccaaaatacaaccgatcagcaatagcatcttcaagcttattgtaccgaaattgtataaatagatcgccaaaattagtgggtatcattttgttaaacctcactcctaaaaaatttatatataaagataaaaaaaaatccctacagaacatgataacttagaagctacagcaaccccaaaagccgaacacatgatttaaaagttaaaattaaatgataatgttgagctcataatgaaatattattttagcaaagtgcattccagtggacttgactattcccaacctgcagttctacaaaaaacacacaacctccatggatctgaaacaacttgaaacgaatcacgagttgaattccacagcaagaaattggaggaaaataaaataattagtgtggcgtgatttcagaccagaagatttcattttcgctgtatttagtgtctacctcttcaccaagaaatatgtatcagtactcgccccctgtatagagtcctattgcttcttaagtgcgttcattttgtccctgagatagtataacttggctctcctgactttctttttctccaacacctttatctcctttatattaggtgaatacctattcatgaatatggtcaatatgaatagattgtcaacttgaaatgcactcaaacaggtacaatgatcagatattttatttaaacaaatttcataatttgaataatcaaaccctctgtaaaactcagcaggcaaacattttaaagaataatcacttttgatgacagtgtcctcaaccttgcaaaccatatgttaaggtgctgaaccatctatgacgttgagttcaacatctctgcattactctccctcaacttaactcagcatgtaaccaacaaaactccaaaagggtgaataaatttgaattcataaggtaggaaaagacaaattcttactttcagataaaatattttttttttgccagattccaggcaagtgtataactgagtagcaaaacaatctcagaatctcggtatgtggaaaaacataaattaaaatatacgaaccaatacatcggtctagtgagaaagctttaccaaaactagaggctcatggtccaacaacatataactacacagaatttactgggtaaaactgacaaggggagaaaattatcatgctaattatctacaaagttagatggcctccagctttctggactaatatacaggcaacataagcttcctctccaatttatgtaggaagtcaagtaaacaaaacacatgaagatggaaagttttgttaaaagtaagtctagtctacaagccacttacagtggaaataaggattctatcccaaccccagccaccagcctccttattctgaatgtagtatttaaaccagcatttcgccttgctatgacaatgcctttcaagattgaaacacgtctcttgttctcaggtacttcctgttcacgtgtaaagaacaacaaaatttcagataaacattaaacaaagttaaggacattcttccttcagcaaaaacttaataccactttgagttgcacgatgtaaccgggctttatttctggtatttctctctgtgtcctcacgtcctgtacagcttccctatctaaaatctacaatgtaaaatatcaaaataagataaaaccgacagaagatgtatctatctccaaacaaatagttagaataaataaaaacctgcattatgttcctggcagttttatcgagcctcttaaatttgattcgtggaggtacatcagacacagatgcagataaattcactgatgatgaatcaactgaatttcccattgttgaaaaggacctggcggagaaaggaggtaacacttctgcagactggaacaagcgcggctgaggacatctgaaagccaacggggccgacgataacccattgcttgttaaagtctcagttttgaagccaattttcgtctggtagaataaattacaagcatcattcaaaatgtctatatttcaaataaaacaaagcctaaaaaaacaagatgtaagaaaattaaaggttttaacaaatgaaaagagtcaatgaaactgctcaatgagctacataatattgttaggctgactataagatttttaaactaaatatctggcagtttatgttgtccaagaattttagtttcttttgtcttgttgtttggctgacatgaagtataggttcaattacatcagactgtttgtaatcacttcttagaaatctatacataaaaaagtacccatccaagaaaaaatacaaagatagagttgtatatgtcaaagataatgttgatgcttttaggatggtatacatgctccttgaatgatcaatagcacatacatagatagaataatgaataaaacgaaaaagggcacagcattaaactgcataatgaaaaagtactaataatatgtcaatgaccagccttcaaacaattatttctatttttcatcaattttgtagtggtttttttgagttaaatgttacaccacctacagaattgagtatacaaaacctcaacagggtaaaacatacagagacgaaagcctgaatagtgaatactgaaaaacaaccacctcttctaaaggcaagcctcaaaaagggcattaatcattgccacctagttttgtatatc

SEQ ID NO: 99369 - DNA, 5806 bp, Cannabis sativa
  modified_base (122)..(130): a, c, t, g, unknown or other
  modified_base (4656)..(4656): a, c, t, g, unknown or other
gaatttataaatcaaataaacaactaaatgataacatgaaccaaatgacacacaaataagtgatgaaaatacttctgcttctttattgatatttaacgataaagattacattgaaatggagnnnnnnnnngggcataaaacccaacacataagagagcggtcaaagtgtcagggttacccctcaaaaactcttattcgatcaccttcacagcctaagtgaacaagaaggagcccaaaatgatactcaaagaaggtaaaagggaaatagacagtccaagcatctttcatggcattacctacccagtcacgcttacgagatttggaagtaagaactttcatcactagacaaaaggattcggtctggggttcagggttaagagagacatgatcaaaatcatggataagagcttcctcatcagtgagatggatactaggactggagttttgggaatagatattcatggctaacaacatgcaaggagaaagcagtatacgaagaggaggtttcaaataagaacgaagataatacctagagagtaaatagatccttaaatagaaaaatcaagaaaagaaatacatgttatagagcatagctgagaggtgcaaagatgtcgaatcagtcgtagcttctcctagccgatatcttccccagttaggaacaatgatgaccaaaatcttcctaaagatgaaaatggcagttgttaaatgcttgaggaggtgttggggaggagaagagctaagagaaggaaaaaaaaaaagaatgaattaaaattgagattagacatcacaaaggatgaagggataagagataagatgaaccatcgaaaaagggagaaattcttagagagttccagaactttttaatatttgtataatatattttgtttgattaaattggtatttttgttggttaattttatttattattatttatttttaccgctttaaagattcaacattattaattttaagacctaatattattgactaaaaataaaattaaataagaattaagtatacttaattataagtagatcaccacttggtggtgctattactcctgccttctcaaatgggaaagatccacaattgatggagttcgtgatattgattgtccgctgtacgtttaagtaatgtcttatccatctaggatgtttcctcttcctacccaaaaaacattaacataaaaacaggaaaagaaaaacactatttaataacattatatttgtcgttttgctaaaaaggcaaagggtatatttggtacttcacttggtgaataacacgaacctaggattctttttactaaacctgctaaagtagccctaatacaaaatatggcgcgtgataatattattaataataaaagtgatgggaatgctgaaaagctaaaaatagtgaaattggaaccttttcgtaatttaaggttacctaatttggaaattggtgcgtgcatctgagtttttttttaaaagagaaattatataactatcctctacgtgacttcagttcacacttcaatattttggaatagagtatatatctgatcctcttttttatgttaattaaacaactaaataacaaatatatataataaattttcccatcttagttcttacaactttgtcgactctcacttcttccatacaagttccaaaagtggttacgagggagagagaaattttgtaatggttggcacaataattttcacaccatttattatgcatgatagattaccaaaaataatcaattttcaaggtgagattatataagtattaatagtactgttgtttaaagaaatgttatagctgttttagtgttaaaggaaaatatatgctttttatataactccatatcccatatcttggtgaaggtgatgaaaaagaaagattaataatgtagaataatagtgtgtgtgtgtgtgtgtgtttaaaaggagtttgaaatcgtacgatatagtttttaagatattattgttttattgggttaaggtagatcttttcgatattcaaaggtgatatagttgtagttttttctttctttttttatacatcaaattaattaattaaaggaataagattaaggaattttgattatcaaattttcatgtagcgacaaaatgagtcaccggtgagctgtttcaatccactcaccagctcatcagaagatttattaaaaaattatttaaacttatgattattgttttatttttcaaaaagaaatattagctttagaaatccttattattactacaaagagaaatatataatccccatatataaatataatagaaaaggtaaacatggattaatgatgacccaaatctaataagatgatacggaggaagaattatgtaattaaggatatgtcaaaaggtaaatcaataatcaagctcttttttccctttttctgttcaaaaaataattaagcaactttccttatatatatatatatatataatctataattaagctaccgctcctctcaacatcatacctcgtatttagttggaatcgatttttcttatgacaatttttatacgagtaccaggtttgtttattacgaaaacaaacaattaaattcaaataacgttagggacgttatttggaaagttattattttataatttagagtatataattcaaaatatttattaggtttgatatgtttgtttaacttaataaagtagttacacatattaatggtgtatatgtgttaaatgttaaatgttgttttggtgtttattaatcctagtttagtgatttataaccgatgcaatctatcaggattcaaagacttggatgattgatatatcgttgttttactttttcttataacttttgtttaattattagaattgttatctccattaattattctttggaagatcattaatggctagtagccatcggtaggattggtctgttctaattgaataaaagaacatatagtttacttcccatttgttggaaggaaagcttaattgcatgtatacctaaaatgtttaataaatatttcatttgtatttgagaacaaaaaaatagagctaataaactcaataactccttatacataattaattgggcactctaaattaattaatcattatacgttttgagaggaaaagtaatacaaaattaattacttcctcgaaatgaccaaaagttaatagaaaaacaccaaaataatcatgaatttacatattataattaacttcttattaaattagaataagtagaagagatatgttaaaaggtattagtagtgcttatagtattttttttatgtgttattatcgttattagtcgaattaagtatcgaatttcatatagtttaatgtaataatttttagagagtattactagccaatcgcaagaagacatatctaaagatgctagacaccactaatattcaatatcaatacactaattaaatagaggatcatacatttttattcaacgcacatgtatatgagtattagacaacgaaagttgtgctgtcttacatttcatttaacactttaaaattaaattaaataaaaaaaatattgttgatatcatgagttatagatcgagtgtagtcaatattttatatattaaagaaaaaatcaagatcgaagtatttatacttttctaatcaacaaattagtacttatcgtgaacaatataaaagggtgcaatgtaattaatgttcattataatttgttttcttccataattagtctgttaaaatattaattaataattaagcttataatcaattaggtcaccactctaaccaccatacctttctctcacgcacacaaacacaataaaaaatataataataattgaaaaataaaaacctcactatatatactaagtcctaattaattagggatgcatatgatggggcgggaattggcggggagtgttcccccattaaggattttaattcatatccccgtttattctctattggaaatggggcagaaaatcccctaatggaggtggggacgggacagaaaatctcctaataaaaaaataaaatttataataaaaattttaatatacaaatatatattaaactatataaaattaaaatattacacattaattattattcaataaactaattattattcaaaatacaacttaaaattcataaaaaaaaaatactaatatactaaaaaatacaaacataaattagaaattataaaatattactagaaagataaaataaaatactaaacgggtccccgtcgggacggggagtgtgatccccgttcctgcctcgtttaacattcgggacataaagtaatcaccgtctccgtcccgttccccatttagacaggaaaattctcgccccattagggacgaatccccgtagggcccattcccgtagggaaaatatgtatccctattcctaatgctcaatattgttgagaatcatgaggttccatctcaaaactaattggcaatgagtggagtagcccatgttcttctatatggcacaattctctaccatttattctatgtgagacaatgtccacaatattctccctcaagatgatggctattttttgctcatcaatcttgaaccgtatcagagtggacatggtcgctatctgtataggtgcggatcggataagattacttgcccacaagggatatggctctnataacatgttgagaatcatggggttccatctcaaaaccaattggtaatgagtggagtacgctatattcttatatatgactcaattctctactatttattctatatggaacaatgtccataaacattaatactattactagtgcaaataaatatcaattttcatatattccaatttaagttaaaatataatagactcacaattaaattgtaattatatcaatcatattctagggtgttagtggtgcgacgttataagaattctttaaattaagagtaatatgaagtataaatacttaaatttaagttttcgttgcaaataaatatttaaatttaatttttaacggtaataatactaagttataactttgaaatatttgtaagtatctcgctgttaagtgttaagtaaattgctacgtggcaattcttaattggttcaagtcattaaatttttatttaaaaaaactgtttaaataaaccaataaaaaataacacataaataattacttaatattcaacaggcaggttagaatttcaaaaatataatttacttattaatacgatcataaaataaatttaagtatttatttataattaaaaattaagcttatatatttatgccacaaattactcttaaattaataggaaacttgatagattatgcatatagatacctttattttcctcttctttttttttcaatcaagaatgcccttagatataggagcattatattcatgatcacacgacaaactttataagtaaggcccatttttttaatatactgaaaattgttacatatatatccttatataaatgactaaaatatacatttttaaagtttcaaaaatcttttgggaatttgtttcagtattgaagttgatcctcactagtccattaagaggattccaagtatttcacattttcatctcaaagattagaaagaggtagagctctatattttttatgataggattgttcttttgcactatttggatcgtttctctacattcaacttttattctctctttatgatattttggctttctttattggaattatggatctataatagtttgtaatctctaattttcattgtattgcttatagtatttcactgtttttagtgcacgatctctacttttagggttta

SEQ ID NO: 99370 - DNA, 4845 bp, Cannabis sativa
  modified_base (613)..(615): a, c, t, g, unknown or other
aaactaaaaaaattagagtattgtatcaaatatcatacaatttaagaacaaaaactttcttagttaaataaataatataaaataatttttttaaaaatttgctcaaaatatatgtgctactagtatagtaatgagttatattaagaaacttgtattactttatgaatgtgtgtatacaatacataaatacatcaaattataataaaataaagcaatgatgcagatatatgtgctgttagaatcactcatgaatttacgatgcagatatccgcaaaccgcgcaggaacctccttgaaccaagatagctcatagtctaaccgaaggacatgcttgtcaaatcatgaactgctaaagtaagcgagcaacatgagacaaattgcccccaaaaatttagacaataaagctataacgtcctcaaacaacacaccaaaatagctagagcatcaacttataacattgaaaactacacaccaactcatttacatatcaaaatgctccacaaactatctacaaaataaaaaagacaaagaaaagtagattaacccctaacgatgatattaaaaactaataaaagaaaatctcaatagtaaaaagatgacaactctcaaataannnatatttaaaaacttatcagcaaagtctttataacagtaggccctccacaaaattgacctacaaaataacaataaaactctattatcacacaatataatgaaaaaatatgtaatgtgaataaagattgtaaaacaattcatataataatatcaaaacttaaaacacttatctgtcaaatctcaaaagtcatttgcaaaagccatgaataccaaatatgaaacctttctcttatccattgatcacactacaaatctaccctaaacaattaggggcaagccataaagatggcacaaaagtcataaaagacatccaaaccataaaaaatggtacaaaaacaaagctaattaagtactaacaaaggtataaaaataaaataaatatttgaagtaaatataaataatctctaaatataactatcatttaaaaacaataaattaaaaaatgaagatatttcacaaattaacctaaataatttaacttttgtcacataaaaaccaaattaaatacaaaataatactaataatcatgcaattaaaaatgcacaactaactgtacttatgctataaataagaaaaaatatccaatattaaatatgctataattataattaaatattaatatatattaaaacatatatatgcatgtatagagaaaattataaattagaaatggattataaaagccataaaatatgaatggtaattataaattaatataaaattaatgaattattataattaaaatatatcaaaattaaattactaattaaggaaaaaagttttaaaagcttatataaaaataaataacataataaatatgaagaagtgagactttgaatgaaaaagataaaaagtaagactaatttaataaaattttatattaaatatgtaaaaaataattatattatatatgtacagtgtgtgacatatatgtctggtcggttctcagtttgccattgacactaaaactgaccgtgcaaaggcagtttaaactggaggtagtttttcggttttttcggtgttagtttttttggtgttcggacagtcaatatactcaatttttttggttttttagattttttgctcagtcctatgtggaattattacaccaatcgtgtgttctttgaagaatttagttgaatctttatctgtatggtataaaatttagtttttttagggttcctcgaatctttcaattcaagtcgatcttctcttcattttgacgaagccccttccttgattcatattttcctctagtcggggatatatagattgttttgtaaaaatttgtctctataactttgttcggtatttacctccccttccctcttttgtagatgaatctgaatgacttttcaagaggtaaaaaatgaattgacaacgacttgctgcaattactttttgaagaacagccatgacttcaagccttgcctccatctcccaccaactcttcatccagctttgaggagtgggacataccaagcaaagaggaagtcgctccgaccgtccagagtcattgcaatctggaccgaattggaggtgacgtgtacagcaggtacattagagagtataattttggttgaaaggaatacttgccttccatctagacctacgtggtctaaccagacgtccccacaaccttgccagaagccggccctaaaccttcactcctcccaaaggtcgaagcaaagattgtcgttactgtaatggaccaccctgagcaaagttatccattccgctcacggaatctggctcagacaaagtagactttttgtaagattggatcgggcaatctagaatttgctcgactaatggctagacaatgtgagttgtttgggtcagactccgagggagaagatcccatgttaaataaagatccaaaagtctaggaagtcgatgaacaagtcgacagccgaaggtatgcaatcatgccttttcacgaggctggctggtggttgaaggataagaagccttacgatttttgttgttgtcctttatttttaggcatcaattataccgaccaagaatttgatgaggtcgagccatttgaattccagtttcctgatagcccaatgtgggtatccccaccatccaaacttactaagaggcaccttcgaaacttggacaaagaaagttgccttggaaacgttgatgtattcctccctctcaagaggtaacttgcaaatgactcaggggattgtttatgtgcgtggtccggcccgcatgccaagcacgaggctctcctgccgttacatccttacttcgtgaagatagtcaattatttcaaaattttcccagcacagttcacactacctgaccaccatgttcatattatacacacaacatggatggggtgagccgtctgcgcacgacattatttggttctttgagttaaagtcttttatgcactgtgaccgctcggggtatttctacttctcacaactagagtgctcatgtctgatcgacacaaatgggagttcggttaagaagattggtggtttcttgcgcaattactatattgtaacggagatgccaatcaactttactgcctttcaatgggccaagatttacatccacccaacttttacacttggtctccgagatagggcccaagctatcctgtgcttgttggagttcgctcggcatattatcctcttgacattgcccaaaaactttatcaagtacgggttatatccaaagcatggaagtcctttttctaaggaaactaatcagaagaaaaagaagaaaactaaggttggcagggtcaaacctacccgagtcgaggttcttatctgaattaatgacgccgaagatgctcttgttcgtcgactcgtgcaacatgttgaaggaaaagggaaagttgttgtcgaagatgttgaggagtcatcttctgacgaggatgcaccttctatcattgtctcagaggatgctcctcctcacgcctagggtacttttagctattatacttgtgtttttattaatttgattgccaactctaactttctttactcttgtgcagaaacgtcgaccaggttgatgtctactttcaagaggaaagcgggcgagtcgacaggtagggaaaacccgagtaaagtatagaagaccgattccaaagtctctgttccagaaggcactgctattaatgctgactcggtggtggccgggacaaaaactaagtcggccaagaactcaaaggttctacttcctccagccccaaccactcaggagcctaaggataaggcaggctttgcccccttggttgagccaaagcgtgtcaaggaagtctgcaatcattatcaggagaggctccaagcagatgtcgaggagttgttggtttgttcggatatccttccgcctgacttcctgatggggaatcttctcaggaactgtactaaggtaagtttgtgtcttgttgttattttatctaaccatctttaattttaactttcctgactttgcctctttcttttagctaaacttgcaagtcgggtatatttatttttggaccaaggtagtgacgaagcaatttgtcactaacatgtaaaataaaaaaaaataaaaaaaaaaaaatttagtgaaatatttataaatgataaagtgaaaaagttgattggagtgctctcatatgctaaccaatttatactttgtcccacccacctctatggaggagagttagagacatttatttatttatttatttttgttgtattaaaatttaaaattgtaatattaaaagaaataaattatgtgaaaaaaaaatattacacaatgttatcattcaaaatataaaacattgtccctatatgatataaatgtatattttgaaagtattcctaatgtgttttcataacctttaaaatgctactatactaaaagaaaaacaaataaaaatatagaatacaaaatatacatataaaataaataaatttaaatgaggccccatctagatgaggagtgccatgacattaaaaaaataaagagaaaaaaaaattacaaaaacactgaaatttaaattaatttttataaaaatgctaccacaaattttttttttcaaatatattatctttttataaaataacggtagaacataaaacagaacaataacaataacagtaaaacaattaaaaaataatagtggaataacagaaaaaacgtaatgcaatacacattataaaaaatacataatatttttgaacaaaatttcatcccataatataaaaaaaaaaaaaaa

SEQ ID NO: 99371 - DNA, 1712 bp, Cannabis sativa
ctaattcttttacacctaatatacagctaatactctaacattaagcaacaatgctgatttattatctgctagagtgtccctgtttattcgttgctgacatgagattgaaattgtattagataaagggtcacaatcttaaatatggtgcaagctccttctagagatatggaatttggaaatgtcaagttgattgttcttttctttatttttccacacaagaaacttcccatccacagcctgataagattaaggattttaattataacttgaaactctgtagtttgtgcgaactggtgaagtaccattttgaaattgttttatcacagaagtgctatgtgataaatgaaaaacagtaattaggaagtggttctcttccatacgaacatttggattgatatgcttactgtgtaattcaagtcgatgatgctcttccatgcaaaataatgtaactctttccaccatcttctcaccattgtcattgatccaagcatggatgagttacaaactaacctccttgtgttgaggatctccattccatttgaaaaacacaaactaatccctcaaaaccctgcagcacttgcaggattgttctttgcatataaattttccaatgctaattcctctgcgattcttttgtagtgaatctgtgccttgacatggtcacccaactctaacacttgtttggtgtaccttggttgcttgctctcgcagtgatgcctacctttttgttcaagatcgaaatatgcccataaaaatgtaatagactggactggacgtgtagaagaatgtgatcaaagaactggtgacaggtaaatgtccaccatagctttgagtcagatgtatatagcaatattttcttaatgatgagattgagttctgtgtggctagctaataataagttagagagtctgcttcctttagcttactaactgaaaacttcaaatgaatcatatattatcaagtgactaagtttgttgatactgccttggcttatacattattattatactttaaaaacctgcatgtgggacccaattaacacctagttgccacggacagatgaggattttttcgtgtttcttgtttatgacacgatccctgaaccaagcttacattccaggatgtcattatagtgcatacttgcctatatcagcgcttgggatattgtttgttcttattttattaatttatttcgttaattggatgtgtttttaagactgactgataatatatttgcaactgggtattggagctgttggaccatattgatattggaccaaagattaggacaacaaaaatacagttagtagcgtagtcggttgttcgggattatagaagactgaagggtatttctgtccatgtgagagaatgtcttcactgttctatttcctttaaattaagtaagaaaagattcgtgaggaaagagaaagctcttcagttttattatattaaaaaggaaagggttaataaataatttaaaagattgctaagacgtagtagctagctggcattaggagagggttggtatgaggaagaacgcgcaaacaccgccttagcgatctgggatgggcccacgatctgacgtgctgcgcttactctcactaccttttgacgccgtctataaaataaatgacagggtaaaaaaatgacaattttatagccgttgttgtgcatttcaaattatttagtaaagaaactcatggtacatttat

SEQ ID NO: 99372 - DNA, 1740 bp, Cannabis sativa
aatttgccttccagcattcaaatcagaacttttacagtggctactccaactcacatgactgggtggttcatgatgacatccaacatagttttattgggtcacacaacacacataaagactagcttgtaaataagaaaataattttgagtaaaaagttttgtggaaagttttctatccaacgtatcatgaaacttttaaagagcatcgtaagtaaaaagaaattatttatttatttatattatttgaaaaccaatttactgagtagtcagttaaaggcataaaatctctctacttcgctagtacacataaaaaatctagaaaagcaccttgatttccatgtatgggctggtgcaacttttttcatagatgtgtcatcagcattggcaacaacagactttgaaatttcctctgcctcagatgtagggtaattcaatataagagatgataagagtggatcggtggctgcattagaaacactagaattgtttgaccgatatccaccaccaccccctaaaagcacctgcaaatgagcttcccgaagatcccgaccaagaagagacagagcttgactgttaggaatggcaactctgcgtagccttcgtcgtcgttgaatgtgaatttcagttaagggaaacgtagaagaatataattatatacatactatacatatacacctgtattcttttataaaaatatatttatatacaagagcacaactatgtatataatctaaccaatgattttcaatatctctacccataaaaaaaagagcgattggatcaatacttcaaacttaaaaggatatcttgaacaagtgtgcatgttgcaaggtgatatgacttagcatgtcccttgaaactctaacagagcatactggacaaacctgcaacaaagagaaaagtaacatatgaagatatgagacccttttgtcatgaaggatgttacagttggataccagctcactttctcatcctccgtcacccaagaaaagagaccaatatgaaaggaaatggaaaacaagatgtgcatagttcaatgccctaaagttagaaacactagagcaatgcatgcagaggatgaaaacaaatacagatgaatttcaaagaaacattcttcaacaaatccatctccaggtgaaccatctgtaaggattcatgcagaaactatgaaatatcaatcttaatcacaacatcccaaccaaaaacttaaacagccaaacaagatgcagcactctcagcctaaaaaaataatcataccagaatctgtttatcgactcaagtaccacgaacatctctttgccttgctacttaatcagatagaatgaacgggagaggaaagactattcctaaagaataatggaagccttgttatatgcactcttcaacataaatttataaacagtcaggatgatcctaatctatcacagcaagtgataaaatacatgacctattggatctctcataataaaatttatatgtattaagaaagaaaaaaaacacaatcgttagctcttttcaaactgtattgcaagcaaaccccaccccaccaacaaatatatgtacatgtatatactgtacacataccaaaaaaacaaagcttctacataccatcctaagagttcttttaaaaaagagcttaaaaactagtttacctgaaccccaaaaagaaaaccaaaaaaattatctacaaaacaatgtaacggaagtgaaccccttacgatcaccccgagccaccgtttca

SEQ ID NO: 99373 - DNA, 6014 bp, Cannabis sativa
  modified_base (440)..(441): a, c, t, g, unknown or other
  modified_base (1255)..(1266): a, c, t, g, unknown or other
  modified_base (2387)..(2401): a, c, t, g, unknown or other
aaagaatcaattgacactcctgaacaaacaaaccaaaaactgatggaagagcaaccgagctattaatagcttgaacaacagcaatacaatctgtctcaaatagcacattagacaaattcttcgacttcaaccaactaaggacctccttaacgctcaatacttcagccacagccggctgacaagccccagaatgcaaagaggaactagcttcgattaacttcccatgacaatctctaatgaccatgcccgtaccatattgagttgttgcctcaaaaatcgccccatcagtgttgatcttcagcttcccagtaggcggcttcacccaacaaacattgcaaccaacaacagtagcctcaaacaacagctgttcaaacctgttctcttgagccaacagccaactagaatgacacgaccttgccactcgaaccacatctgcagcnngagaagaacgatcctgccaaagaaactcatttcgagctttccaaataccccatgctaccatcaagagctcatccaccaaagccactctacctcctgccagaaacgccttaaaccaatcggcgaaggtaatttctgcagaaaaatgcaaccccacacacaacctatgcctacatgtgaaagattataataaatataatggtgtatattttaaatagacatattctcgtatctattttcaattagacatgttaatgaaccgtttaataaacataaacctcaaaagaagtcaaaatcatttaagataaatccaaacacttttgttttttggtgcgagtttagacttagaaaagaattaaccgtctataagctaagttaaaaaattagcgcctgtggccctgtttggctaattaaacgatccattttagctaagtcaaagagctctatggttatctttcttgaattatcttgccggaaccattttgccaccggcggtaatcaatcatattcatattacaaggtaaataagaatcttcccaatatcctttttgcctctctctcaccacatcacaaatggcaagaaaatagaacccactttgtagagtcaacaaaggatgaaaacgcctatatttactctcattaaggataaattgcggcataaatactcaatgttttcgattttatacacttaaatacctaatgtttatttttggtggcaaaaatacttaatgttacaattctcttacaccgttactactacttcggttattaactcataaatatggacacgtggagggcccaaatgcattacatttannnnnnnnnnnntaaaatttaatattcttaatataataaactaaatattacttattttttttttttaaaaaaaaagagaaatgtaatactaaattactatagctgagcgaaccagtataacatatggaacataattatcgaattgaagtcctaatatcatgtgaaaaatgttaatgagaacaagtgtttttttttaaaagcagcatttagtttctaatattaagaatattaagttttaaaataaaataaaaataaatgtaatacatctaaaccctgtccgtatttatgagttaacgaaagtggtagtacactgtgataattgtaatattacgtatttttgtcttaaaaataaagtatttaagtttataaataaataaataaataaaaaacaatagtgacgtgacgtagcaaaacgaaccaaagccacgtgtccctctgaaactcttccctacggatcacctgggaatctagtggtattgagaactcgcctgggttacgactcagacccgaagctgcggccggacggatcacattcatggctagggttctccagtggagccactccaagactgttgtcctactctggttcctcactgccataatcttctactctctcttccaaatggctcttcgaaattccatttccaattccacatcttcaggtcacattacactcactttcatttttttaaaaaattctcgttttagttttcgagatgatttttgttgaagatctgaaattggtgatgataatgaacgatggtgtgcagtctcgatggctttaaatgaggatcggaggtcgaaattgtacgatggtatggctcgggatttggatgagaagggaccggcttttctgaagcatggtgagacttctcagtccttgtcactctcggatatttttattctcaaggatggagctgtggagcctgctcttaaggtaattaaattctatttaatgttcaatagagttaaacaattgtacatttggtttccttatttgaaatgtcattaatgattggggtatatgatcttgtttgtaggcagctaatccacctgttcgtgctaatgttttgtatctcagcacagagtactcagtgcctatctcgtaagccttaaaatatatatatatatannnnnnnnnnnnnnnatatttatatatatatatgtgtatatatgttataagaattcatgtagtgaatgctgttgcttctgtgcatttgcttatatgaataaatccactttcaaaaacgacagaattttatgtataaaatgatgtcatatcatagaatatgaccatgtgaagtgtgaaccatattgtttattgactacaattgtgtttgttgagacttgtgctgtttcccctgataagattcttgaaaaaaaaagggctctttttactattatgggattgctttcgctagtagtatgcacatttatttaatgatggattcacgtttcttttgatgcagagagactataaaacgaataataaatccctactttgacaaatgtaagcttttgtaccaagctttgtcatggcataagtttttcaaacaaatttttttccttttggtgagaagttgtgtgggaaggattgataatttgatcataatacacataatgaggataatttattccttttaagttactacatcagtttttgcatgcttacacaaattctggttagctatctggtttcagaacacaagtttgtaccatttcagtatgtttcatgcctcgcatcatattgcgccagttcctgctactgagaatgaggtttattttccttcagaaccttttcattcattgtttaaaaagaaaatgcaagaactatggtgaattattgtcttgtttgttttattagattgaaactgaggcaactgctgttaaagatgttgcaaagactctatgctctttaaacattgttttggatagagtggtcttaacatcaacaggtgtgcttctagggtgctggcaggttatttcctataccttatgcactcatttcttatatctgtcatttttttcaatagaaacagtatagggtgatcttcctatgcaaattgtataatataaatgtttacataattttctcattttaatgaattcccatgtctaatttggtattctcactctgcatcatcaataaataaaaattgtcgatttatttaaagttttgtgcgctgcttttatcttgtaaggattattgagaacgatttgtgacgaagctctttttgagtgaattgtcaaaattccatgcattatgcaagctctaaatcaatattttgtttgtgtaggtagtttctgggacagatccagtaacgattcgtaccaaactaagaactgcacttccccgtgcaccagaaaagcaacttgtaaggagcatattaacatcctaattatttttgttagattctatcttttttttttattaaactcattcagaaaccaaaaaagagaagagagtacaaacctgtgaatagcttgtgaaatacacacagaaaccaatgaattaagatttctttcaacaggttatgatcaatcatgcttatagattatctttgacattgattgtgacatttgtctctgtctctctctccacagtttcagagtatttgttttcttgttgttatcagtctttgttggctaacagattctcattttctctcttcgtacttcagctgtggtttggggccactgtaatttgaaatgtttttcccaaggctgtataacatagcgcagtattctaaataatagtgcatactcaggctcatatataatatacttactaagattattgttatggccctctaaactgaactccttaatttggaaatcctcacgataacctttagtttttattgaatttatgtagagactttttttttttttttttttctaatatgctatcttctgccatttatattttttatggatgtgattttattgatacacatatcgttatcttccatagtatgatgctgcaattcttcacacatcatttgcaaggcttcttggtccacccaaagcttcagccacggtaaatgcggtctttaagtttttattatttgtatagttttaattacagccacttagaatccagctcaagtgggtgtcaaggtctgggggttcaacttccagcggtttaatttaacaactgggtagttattaactgtttcttatcaaataaataatgttcattactctgtgatgtgtttatgtgacaaattaaagagtaaatcactataaagtcaaccataacactagatttaggtagacaaagttttgttctacagtagtgtatgtgttcttctgttcttcatacactcttgtgatttgtactatgttcaggagatgcataatgcagatcttgtcaagttcttccatgagctagttgctcacctaaacaaggaactccgtggatttaaggtgagttgttattatccttgtaatccgattatattgtgttagggttgctcaattaggctgtccaatttagcataagaaagagtaagtcaatagtagtatagttataagcttgtgttgtaggaggatttaatttatttcattagtcctttaatttacttttacggtttatttttgtttgttaattcaacttttatttaaggagacttgaaaataagatatttaaataaactaaatagaatagtcttggagttctcttctgtctaattggggtttacttgtactgtatcattgtgttattaagattcttaaaagatacgttggaccctttacacaaataaaaaaggatactttgaacttgggcatgcccatggtctaatatttaattcaaggacaactcattaggcatctgagatttacatttatatgtaaaaaagaaaaagaagaatttctatatttctcttaactgattgtaatacacgtatgtgcaatgtgataaaggctgcaatttctgagctctggtacgtggaggaatatgatgtgttagcccttgctttgaatgggagaatgaatgttcgtaaatttcagcttggctgcaccagaaactgatgtttcaaagtcgagagatttagtccattgtatattctcaaggttcactacatgatctataagcatgatacacgaacttcctttttaattgctatattatattaccttctttactgacaattttacagagagtcttagatgtatgatgtatctataacaatgatatctacgaatattaaacatttaataatattagttacaatttcttacttttatttttgaaaagtaacatcatgacttgttgtgtagttgtgggctaatgccttcaatgatgatcttcacatatttaaatgaaacaagaacgaggaactgaagaaggttcatggatggaactgacttgttaaaatgaaaagaatatgtatgtgttagagtctaaaattgatacgtattgtttgagtcaatacaaaactcccaacaaaagctcaaaaaagcttaagaacaatcaacatgcctctgtttgttccaatacaacagtaaatatactcagaaagagagataagaaatgacaattaacaacttaatttctatttccaaccattctgttagccgatccttcttagctcctctccagcctaacaaattcttggagccagcgaggtctcacgcgcttccttatcccacgtgtcaccacttctttgccatggtcgattggtaccgagtcggcttcatcgttggcttcgtctttgctttctacaacttcctgggtctgttcgtgcggctgttta

SEQ ID NO: 99374 - DNA, 5428 bp, Cannabis sativa
gcaggcagcacccatcaactcatttttcgccagaagtatcctgctaatctgagctatttggggaacccctagatctcagtatatgcttgcatgtcctgaaaacatcagagtaacaagattaaactcttcgcatgaaagtgatacagccaacggaaaaggggctaacgtttagagaaacagagaactaaacaattttcgtttattctagtaataataattttcgtttatactcagcgatttagaagtattgctccaagtgacactaacagaatcaagagaagaaaaaaattaattaactagaatgtgatatcattttctacataattgtttttcctcatctaaccaaataataccaaatatgagattgctttcggcaaccacaataaaccacttatggcagattggtttcccattaaaataattgagctattaagattaaccagataaagtatatcaaagcatttactatattggaaatcttgaaaaatggtgggagtaaaaagtattacgagttcagttcatcagtcttgcttttgatatcactcgaccaaaatactggattgatattctgtggcatggaatcttgttgttgggttttctctctgatccactgttctgctttagtgcactcactaataagctgaaatttttacaacgaattgattgttaaaaacaatataaaacaatattagatagtcttatgcaagtaaaagaaataccaattctttatccttgggagaaagcgaatccgcagccatacgataatcctcgatgcactttaaaagatctcttgtagcttgtaccctagcatcctcatctttatatcgactatcaattggatccaccagctataaaacaaatgaaaacataacaactaaaaatatataataaaagttatgatgtataaagaaattcaattaacaataccaaaagttatgaacttcaaagagttcgaaatgtgacaataaccttcttaagatcatccagcttggaaacataagcattttccgtttcgtcatctccttcatcataaagccaatcctctgtctgttgtaggctcctggaaatgtcctccctctcttgatcactagcaaagctccgatatgtgttgaagagctttcatgagcacaagtttaattaataccaggcaaaagaagacaacataatatgaacaaaaggcctatatgactagctaaataaacatgggattaataggaatgttccagtttgtggagggtgtataaaaagagaacgaaaggatagtagtgggcatggaattattctgcaactttgggaattctttagaactcattgggaagcttaaaggatcctccaatttccctctttcatttttatttgtattttctaagattgtatttcaatggattagactcaatagccattttatatatgagttcctattaagtggtatcaaagcaatctcaacccaccatgtgagcagaattggtcattgaacgggtacattacaagctcgagatcgtgaaccgaatgttgccgcagttcgttcaacataagggaatggactccctgtcttgagtgatggcacaagaagaagaggaaggagtcgatcatgtagcaatttgagattcaggtaaaacttttcaatatttatatcctgctgcatcttgtgtggggatgagacttgcagacttcaactcagggtagccgccaacaaaacaggtggtgattgacaccgtgagggtggccgggggaagcagacacgaccgaatttgtggtatgaggaggtggggaatacaactacttgttggatttttgtgagaaggagaagaatcgcctttctggggtttcttacctagcgtagcttccgaaaaccgatttgggccactagcttgaatattaatttcaaactgccagagttttgttgattgcacttaactataaagttattattctcaatgtagtgcatggaatatctgttgagtctaatcttgttccacatctgtccttcatttttcttgtattttctgggattgtatttcaatggagaaggctcaatagccatttatatctgagttcctatcatataccatgagaaggtacaagggataaattcttatttactgaatgcagaaattaagctcgctagcttaggcttaatgtagatcaagaaattccacaatttggagactgcgatattcattacatgcactaagtctaaatctttctacaattatgataaaagaaatttgtcacacaagagatttctgcagcatatagactcataccttaaagataattatatctatctatagtgaagttggtgatttcaagtccaaaatgggtttcagcaagttaggaaatcatatcaataatctaagtaatgttgaaattgtaccttgttacgcatctcatagacataggactctaaagcattcttcttatttttagtctcttccatgatttggtcctgttgggccaactgaagttctttatctagagcttctgaaatctctccctccgtcattccaccatttataatctcactaatggggagttctagcctcctggtggctttttcatttgttgctgcattggcctgaaaaagaggaatttattataaacgatcttacacccaatcaaataattgtaaggttttagttagttttggatcttggcaaaattttcagagatacaagatacatcaatttcaacgaaagtaactaatagccattgttatattgagaaacttacagatgcatgtgcaaattcagactgtgcagtaccatcttctaccccatttgaaattctctcagaagaaccagaaacagatacatcatcaatgtccatttgatccacaaatgatttaccgacataatcttctaccaactgaccttgtaataaacccattaattagatagctacaatgactaaaggttgtatggtctttaaaaaaaaaaagaaaaattgaaaaaatcatacttaccgtggctgattcaaccctgacaatgccatggaggtttaaatgaattttaaccttaatccttgtcttttcactttgggaaccttggaatggcccaatctgtataatggcatttcatcaacaaagtagaatctaccaatggattttaaagacaagaaactgtagaatgtacataggtgctatgtaaacgagcaagtaaattagcaaagtgaaaaaattaaataaaaaggggtattaccttgaaacaactaatgttaagagatgtgcccggaggcagctcatcaaggtaagcataaatagcttccaatataaatgaattgcttcgatgaaatgtcaaaactttaatacttgggataggttggccttttgggaacaggattccatttgccccagtgctaataggactaccatccactaataaccttattgaaaaagagagtgaatcttgaacctgaacatagaggcatacaacgaagttacattaactcgacacaattatacgatttatacaaataatcaggatataggtgattgcctaaagtttttagaacagtaacaatatgatcaatgtttggagctgagtatatacagaatactgtaaagttaaattgaaaagaagaacagaaaaacagccaacaaattggtcgcgaagtatatacagaatactaatttgttccaacatacacacctcatattctctgacacgaaaagcaggacttaacattgcaccctgaagagcacatccacgtgctacacactcacttgcattcaattttcggctgggctctcttttgaagagagaagctaatgacctggtaatagctgggattctagaacctgacccaacaagttccacagaatgaatcttgtccacagtcaacctagcatcagctaaagccttgttgcaaggaacaacaatcctctctaacaatccccaagttagcttctcaaattcttcccttttaatgaatcccctaacatctttctcatccattaaacattcgatattcaatggtgcctctgcatttgcacttaaaactttcttcagcttctcacaggcagctcgcagcctgatacatgccctgacattagagtacacatcaatgtggtactgatccttaaacagtgcagcaaaatgatgaaacaaaacctcatcaaagtccctccctcccacacttctatcaaatgtatgagaaaggatcttcatgtgaccagcttcaaacgatgcaatagagacttgagtatcacattgaccaatgtcaacaaatgccacaatggtctgtccactactggagaaatccgtcttgtaaatcccataactaagtgcagttgcagtacaatcatgcatcaatctaaaaggcttcaaccccgaaatagctgcagcatccaaataagcacgtctctgcaattcagtaaagtatgaagggatcccaataacacaatccgaaaccggcatctccaaactcttctctgctaaatctttcaaatgggcgaaaagcatagccataatctgaactggggtaaagctatgagtgccacctaagtaccttaggtgaatcaaaatgccaccatctgaggcctcagaagtttcaacggggaacattttgagctccctttgaatctcaggttcactaaacttcctaccaatgagtctcttcacctgagagactgttgacttggggttcatgaccgccgaagcagcaccagcagaacccagaaaccgctgtttctccccgaaacaaactatagcaggggtttcgcgtttcgattcatcgttcaacaaaacatcaatacctctttgcttcaccacagcaattacgcaattctcgttcccaatatcaaatcccaccacgctcatctctctatctctctctttacaaagcaaaatcacaactgaacgcgatctttttaaatccgaattcctctctgtcgaaggacaaggcaataagaaaaaaattctatcagactaagcttaatttttgaagaaaacagaaaaagtgatcaacagaaacctgaaatttgattagggttagtttgattattagagagaaaacctcaacgtgaattgaaaaaaaataatacataaagtggcaagagacattacctgaggaagatgaagaagacaatggctgagaaaactttggtcgctgcaatgagcgaacacaaaactgtattatattttaatttattatatattttttatttatttttatttgtaattgtataattattttcttatgttattcaactaactttccaacgttactttaaatcaatatatatgttcatcggatcacattcaaaatttaatccaatttaattatttattgaatattagatattgttatccgatccaatccaatcatctatatataaagttgaagtataaaggattaacgctctaagattactttaaactcatattaccttaatttctttaatttcttcttttttataattagtaaa

SEQ ID NO: 99375 - DNA, 1572 bp, Cannabis sativa
tactttagggttctcttcatattattatcaatttatgatggtgaatatctttaatctttcacacacactaaaatataattttcttggaaaagtttttcaagaaaaagacagataaaaaaggtcacatcgccatatacatacgcgcacaatgatcttatggattagaaatgaagctatctatctatctaaaatgtatatatttttttattttatattattttaaaatttataaatatatatattatattaccgttgcgtttttcctaagaaagacattaattttatggactatatggtgtctttttttttctttaaaaggataaaagatatatagctatgttaaaggaaacaagaacaaacagcatgtaacacgaatgcactaataaagaaacacaatatatcctttcaaattaaacccaaaaataataatcactaaataaaaacttttgtcccaatcttggttacagctaaacttcaagacttattgtatactaataaaattaacacaacaagatgtaccccaccacatctatatacgcgtgaagtggggccctttctcaagtaatttttctttttttctttcatattaatttatagattactactattaattatttatatatgtattatgtatatgtataggtaattagtcgagtaggggtagtagtggggttttttattatatatggggaggcttatgacatggtctacttcacgtcaaagaaactcacatgcaaaacataaattcattgaacaaataacaaaacgtcagaaatttggtagatgtggatactagcaacataacatgcaaatttctctatcatatatatatatatatatattaattaaacattgcgtttggtatatctttttctatgttgctacttcgattcttagcttgcattttcattccatctttctattttttttatttaaaaaaaatgggagtgaagagagcaataattttcatatatatttagttgctttcatattattattaatttttatttattttctctttggtaagcatataataatgtgatgttgttaccctttcctttttgtttttatatatagaaaaagaaaagaaaaaaagtgatgagataaaggtttgtcttgcattgcataccctctttcttaaaataatagatttttattattaattttgttatgtatatacttagaaagcattattcaatcataatattaaggaaaattgaatagtattatggtgagcttatttattaaattattatcatgtattaattaatttgtttgccttaattattacgtgagttttaatatatttgtgcacaataaaataatatgtatatcaatatggttaaaggttctttcttacttgaccttcttcaataccaaacaatattttttgtaatggccattaaacttcatttatataattacgctttttttttcatacttaacaaactatacatctaattttaattaatacatataattttagttaatattcatcaactctatcaacttttataaatattttaaccaaatatatattatgtttgttatatatatatcatatttgtcgta

SEQ ID NO: 99376 - DNA, 2526 bp, Cannabis sativa
aattgttctctctttttaattctagttgttcttgtaaggtttgttggatttctcgtgtgaagaatggcactgctcgcaagcttgctgccaaggctgcgtcccaatacttttgtggttttttgattttttgttaattcctatgtttgaatgttctatagtgtgatatttttctctttaagctttttggctggttctaatgaagtgttgttttctatgaaaaaaaagaatatgaaacttgaaacctcaaatacgacacagttaaatttgtcgttcaacaccataagaaagaataagaatcaacaaatctatgtctgaaagagaaatattaaaacatatttgtggtgtttagcatctttacgaggtgaggtgtgatatcactattaataaaatttattatcaagttctatttattttgctttaataaatattataaaaaattagttatagtagtattaaataccatgaatacatagtaatgctcatgactgaaaatgtaagaactgaatttcacctcctctaagctacaaagatatctattagtacaatagaaaaaagaaggttctgaaatctaccatttttgtttcaaaaccaaactacaaagttcaaaaatttctgagttaatgttacaaaaaaataatattacgataataatcataattgacgagagaggacaatgaactcgaagaaaagaaaaagtcaactaacaaatatgaacatcagtcaacggtgccgcctaggaggtttatagtcatgttcaatggtgttaggcatagttcgagtgacagaagcagtcggagctctgatatgtcccaccattgaaacctgaagagcttcttcttcataagctcttctttccaattcttccattctcgtcctcttcttccctctcacaaacatcgctactagaagtaaacccagtagaaaagctcctaaagcagctccgatcgagcttcccactgccactttccacttactctctttctttccaccattactactattaccgtccaacatagccggcgaaggtttctctgtcaccaatccgaaatgaccgttcttcttagccaaacacacgaacggcgaagcttgctttgttaaactcaccttcccttcactttcgaaaatggcgcataacggcgttacacccgattcgtttttgagcttcgtgatgcttgagaagtttacggaaatgggttttcctccggcgatgattccgacctcgaaagggtcgctggtattcacgtcggaaccgccgttataagctagaagacctaaaacaggggagactagttggtacccagataaatcatagttttcgtagtaaatatttgaccaattatatcccaaattttgattcactagaacgaccctttcaacacatggatgaatcgtaacgccaatacccagatgaaattccttaacctgcgcaccatatcgccggagactaccgcatctgtaccttgctatgttgactccgatgccggagaaatttttcggtaacgaaacagagtgaagtagtccagtccctacgttggtgtctaaagacttaaacgtaaagtctctaatgagaagatcgagaagacgagctgatctgatcccctgagcttcactaaataaaatccatgaaagaattataacagtagtgagagaaaccagagtacccatatgagaaaaaataaacagagaatttggttcaagatttaattttcttttcttctttcgttttctatgagaggagtgatctaaaattagatcaacttttttcttttttggtgtagatgtgtgaaaagggaaaaagtttgaaaggggaaagttcgatatagatgattgaaaaggtttggtggattaaagataaagcaattaaaaggaataacaaagttgttactttctttctcatcatatttggttttggtcttataagatagaaaattgagatagacaattagacataatagactattgttggttaactttgacataaagttgccttataagttgttttctttatggtgttttggatcatcactaatgcctatactataatatgttgttgtcaatacaatttattatctagaatatcaaaatgaaaaatattaattacattgtgtacataattaagcatagaaaaatcaataattattccaaagacaacacgggataacggtgttgaaaatcacatgtagttaataataataacagccaattataatagttgtattgtattgtatagtaatttaattaatagccaattattaataatgtagagtacataacaaaatttatttggtttgtgacaaaatctaaaacccaacaaatatattagtagttgtaatagtcattgtggctcagttaataattaatcagacgattattaatcactgaaatttaatgtaaaatttgtctagtaagagagagagaatgcttgactgtgttggcgaacaaattagtgagaatgtcaaacaagaaagggtttttttattaaaaaggagaaaaagtaaagtaaaaaagttgatatggcaaggctgg

SEQ ID NO: 99377 - DNA, 3547 bp, Cannabis sativa
agcataaaggacaaaagtaaaaaataaaacaaattcaatatggtactatttccaatttcattttttttcttttgtgagtgtgtaacagtgtaagtcaacccacctagccttgcattgacttgcagttacattcgttttcaaaaagggtagaatttgtccaacccagttgttgtcttctaaattgacctaggttggacttcaattacatccaaattcttcactaatttaaaaacaaaaaggggtttagtaacttaaaaattatattatgttgaatattttttacttgaaagataagacaaacctgaaatattgcactatctttctgtactatttgcatatccatggaccatgggcgcagagaacataacctgaatcttcttgtattaaaattagagataatattctcaattatacaaagctgaatctttatctacaattttatgatattcctttttgtcttttcttccaaagagcaagcctaccaccaccacctacatcttctatctttttaattttatatattaattccaaatgtgctataagattcttacacttgagatacaaccaatatacatagtacttgcctagctgttaccatattgaatcacctaaattgaaggatgaggttatacaagtcacaaatgcctttcctcacttctaataggttggcattttgtctttctagcttcttctttattctttccagcacaacatacacattacaccctgttttttcttaccttattatatacacaccaaacattccacaacacataatttggtatccaatattttaaatgaaaagacttttttttttcccttatcttagattatttatcttatcaaaattacttatcaccatctacctctaattgatctacttatcacccatttaagtttgactgaaattgaccccattatgtaaatatcacttgtttttgttcatgttaaatggacaatgacattattttaattgttcaaaatagttggaaaagttaaaaagaaaaagaaacaagatctaatctcttaggctgtaaaaaatgacaattattgatcaatataaccactaaagaagaaaaagaattccattcaattacaatgaaaactgaaaagttttcacaatgtatttccatatttccatttccatcaattcttctaggattgaatctgagaagaaggaagatgggtgggatgcacataatacaaaactatgaagcctttgaacatgaattaaatgatgttcattttcttctacttttttcactaactgttttctcttttttacctttcttgttagtagtagaaaatgtcttcttatcctgcttgagcctagaagcctctttactatggtgtgatttaacattgttgttgtaatgatgtgtatgaccagaagaagcatcagaagccattgaatcatcactgcgaacgccatcttcatcctcagcatcggtgtggcggtatttagtaagaaacttcttcttctcaccttcattattattataactagtgctgcaatcaccttcatcttcctgcattggagagtctatgtacattgtccacccggattcactgctgctacagccttctgaactcattctcttatgtatatatctatatatatttatatatgtgtgtgttttgtataggtgaagtgaagagaaagaagagaggaagtaaaagaatgatgtatatatatgtgaatgaactaataatatggcctataaagactggatttttattttctttttttatgctggacagaatggaaatgcaatttaaagaagggagaaataaaaatcaacataagaaaacaaaagggttgttaagcaaattcataaaaagaatatataaaaagtcattttcactttttgtcattgtcaacacttaattgaacaaacggctttttgtgctgaatacagatgagctgatcactactatacaactggagaaaactaaaagctccccccatgttctttcatatgttagagagagcataacctctctttttattttttatttttcactaatatcatcaaataattttccttttaacatataattctctgtcttgtgactggcatacatgccagcccattctatataattctatatatttatatcaatacatacaatacccctctttggctttcctttccatctcattttgtgttatcttaactatggttttgggtgtttgttcttcattctaatgagaatcagatgatgaaaaaaatcagaggtcttgaattttcaatgcttttgtcctttcattctatctagtactatgaaagttggctactgtcatttagctatttggaggtagtaattaggacagtacaacctcaataattaaagagaaaagaaaacaagtgactttttttcttcttctgtctctttcttatcattggattcttgtaaaaaaaattgtgagattttcaaaaaagagaattctgattaactgttgtgtgtgcatatgttatgttattatattatatggtaaagtttttgttgttgcatttttcatgtcaatgtacaagattgactgagttgatcattctgggtcttggattgggtagagtgaagaaacaagtagacaagggaataataataaaggacatatgtggtgggttagacttcatctcagaacacaatataatctaggctgttctccacttgaatggtgtttattcaaatgacaatatttgtaaagcattctattcaaccaactccttgtactttatttattttttatcttggtggtaatcatgtcaaatattacaactttaactttaacactatttttcaatgccttttacttaccacattcaaatcttcaggccaaaggaaaacccaaacaaattgtgattgtatttcatttccctaagattcaacaaaaccccaaaaaaaactaatgcttttcttatttttacattaggcttgtgaaggtatagtatgctttagacttgatgtgtattaccttgagattgacaagatatgaagttaagtacatattcatttgcacacgacattaggtgatttgcattgttacttttactcaccccaaatctcttcttcttttcttaaaaaaaatgcctaatccgtttctcaaatcttaaagctattttctaccccaaaaaagaaggaaaaaaaactttaatgttctatatattaatcattgcaaaatctttgacttacatacccaaccgaatctacttgaagaattacatcaccacgtttttagttagggttgggaggatcatttagctggatatgagctgtattagaattgctggtggcatttatatttaagtaacaacacacaacactaatcatgcttttatttggatgtgtttcaccacttttttgttcattttttaattcaatattcatatgcagcctacaaaatgatcgtttttcttctcctaaactattctttatatatgtgcattttagtacattgatatataaaatgatattgctttttaaaaatatatacggacataggatatttagataattaaacttgtagttttatctcaaaattaat

SEQ ID NO: 99378 - DNA, 3813 bp, Cannabis sativa
  modified_base (30)..(33): a, c, t, g, unknown or other
aaaatatataaatttttaaaataatttttnnnngcacattttttgtaattattttgtttttgttgtacatttatgaaaaaagccctaaatatattcctatatatatttaggcaagggcatcactttatttcgatagacatttttttatttttagcacttagagaaattttgaataatttattcaccatagttaataaatacttagttatagtattaatggagaagtggtaattctcagttcgatatattagggaggactgctaccttttgagttagatgcaaagctcaacatctttcttctcctgcatgtcaaccctaatattgtagctttaagttagattttatcgcgaatcgaacttaataggtggtaaaacatgggttatttatgatttgagatatatgttttgggcgtagcccatgtgagctattgggacctacaatttttttgttgctaactcataagtgggtttttgatatatttcgattatcagacttttttaccggatcagactaattttttactattacgctaatattattttgttataattaaatgaatttgtgatgataaaggtataatagtaactacattgaaatataatttaaaagattacacttctcacttaattagaaagaaacataagctcaaaagaatcaccatagcactctataaaataacattaaacaaaatcctataggattaagagttcatttgtcaatgtgtgattatgtactattttagcattttaaatagttatgaacaatacaccaattaaagaattaaaaaaattgtgattagataaatagccaaaacaagaaagtgaaaagtcatttttttaaggttgtaccgaaaagtccaaaaaaaaacaaaaaaaaaaaacttttttaagtaaatgaaataaacttcatataaatactaaaaataaagatagatgacataataaaaatgaagataatattgtattgttataaatattataattcatagcaaaacatggataatttgttaagtatttatttattttagctccaccaacaaaagaataagtgtgcccacgtcaagttattagtttgcaacctatcattcttccatttcttattttattcaaatactcataatcatatacaattatacattatttgtttctaatataattattcttttcaattctttgttatttttatttgacattttcttttataaagataacctatttaactaaaaacctattatccataacataatataaaaataaaatgtttctatcacaaaaaatatattaatttttttaaaagaaaaataaaattatttattaataggttaatctaacaaattttatgatgatccaaaattaacaaagatattgttgaacatctccaactatgctctctaaatacattatttagctaaaatagggagtgacttaaaaaaataagcttcaactatataaaaaacagttctcgaatagagaatgaataaagagctcttcacttttttgctaaattttttaatagtattttaataaaaaatattattactttatcattattttctaaaattaatttatatttgacaaatttaaattataaaatattattaaaataattaaataataactaaagtatggagcataattggagcaacaataataaaaatgattctctattttagttttttaattaaaaaagaataattagtaattttgccttctgaacttttctctacttaattctgcctcctaaaattaaaaattctctttgaatttttatatttacaaaaatttagttattatgttaggttttatctcattatttactttaaatgctgacgtgtctatgtaaattaacaaaattttgtattggttaaagtttaatgatagaagaaacataacttaataaaatgagcataattatgtaaatactatattttaagaaatttttttacaaattatatatttttagtggtaagattagtaatgtcaaaagtttaagaagaaagagtacgaacgattagagatgcttaacaaatcaaatagcatcttattacttttttttttttctttttttcttttctttaattcaatttgaagtctttttcccttttctaataataataaataaataaataaataatttaatttagtaataatagttttttttataagatttataattattaggagtatttatctaatttaatttgcactattttgttttatagtgcatctgatccgtactaagtagggatttatattttagatctaatctaatccgcacaatagctcaaattcaatctaattcaattcgcaaaagtgcagattggatcatttatgttgaattagttactttttaatgttaaattatttaatatttatgaaaaaatattttttttttcttcacataactagtacaaaataaaataaattattttttattttatatatcgaacaacaaattaaaataaataacataataaataacaaattcaaagaaagaaaaaaattgtatgtataaaaaaaatggttaattttattttaaattgtatgtaaaaaaaattatgtataagaatgtaatatacatttaatttattaagttttgaaatatatatgtattatatgtattagatttttaaattactatttttttttacataaaatgtttattatatatataatttttaaatattttttataaatatatgtacattggattggatcagttattttatatgtcaagcaacatctaatctgcacaagtggagattttgaattttccaatttaattcaatccgtataagtacgaatatctacactttgtggattggattgaatcgactattttatgaacacacctaattattccagtattatttatgttatttattatttaaaaaacaaaaatatgtatagaataatttgtggtttaaatacctaaatttaactctctattgtaaataaatacataagtttaatttttaatagtaataatacttaattataattctgaaactttagtaagtacctaacagttaagtattaagtaaattgccatgtgtcaacttttaattagtgcgagtcatcaaatttttattttttaaaaaaaataatttaaataaaccaataaaaaaaataacacaccgataataattagtttgtatataaagggaacatacgataagctctttctcttgtccttttttcctatcttcggtctctctcattttctcgagaatcagacagaaaataccagatttttcttttcaattcctctgattttcgtggtgagctttcattcttcgcttttacaccaaaaaaaaaaaaacccaaaatgttgcagctgtttttcgcggtggcgttctctgcggtgcccttaaccctatacgttcctccaatccgaagcttgaatctgttcgtggaaatcatggaggattttctccgccaaaccacggtctacacgctcagagcttatcctcgcatacgcctcggctgttctcgaatctacaactctttagtcaacctcaacaacaacaggtaaatagttaattttcatcttagtttcgtcatcggcttcctcttcctccgaagacattgaacggttccccatctcttctctcttttgggggtttgtgatgtgtattactttttgttaatgtattgtgaattgttttagtttgggattaaattctgtaactttttagggatttaatcttcgaaatatgttgggttatattgtacatgaatttaacaatttctgcaagaatgggaggaaaattaagtccgtaattcaacttttttgtgttgattttcgtcttaa

SEQ ID NO: 99379 - DNA, 2943 bp, Cannabis sativa
gagttgataatttatcaaggaaattgatggcatatccccttcgttccacaggacttactcgcgtctgcttgggttatatccaccaggaagaattctcctcagtctagttaatgcaaaagctgctagccattccaaagaatgtcatttttcacttataagctaagaaaatgtcattaaaaaagaaaaaagttataacctgcctggaagaaagatgtcatagtcataacaaatgggctagtagtactcacattcttaacttatacctcatcatacatgcaaataatggtttacaaagttaagccattttcactgtccagaagcaaattctcgcaactgatcaaagtcagttaacagaactataactagaatattggcaaaactgatgcaagaaaagctgcttatcgactttcttgctggtgtttgacaaaatctcacaatggattttgcttcaacgaacttgatgtcaaattggttagacagtctatgataaacataaacccatgaaaaaccagaacgagacagtcaaatataaggtgaaattgttaactttgtcccacttttgtcttccaacatttgccactttaaaaatgtgttcatcattttactctgaatcagagagtgggttctcaacctcgcttccactgctcgcgctatcatcattgacagcaggggccctcagaataggtggttcagaagtcggcaatacttcgtacttgagaaactttattttcttcttcttttctgcacttttattttttttcctttttctatcctcattatcagtagatttcattgagtgggcagcagctacaaatgcagcagtgacagcttcatttgaattttcgttgtcattttcatccaactcttctccctccttatctacaaaaaatagatcatcatcatcccttttcttctcttccatcttcaaagctggtacctgcaaatctgtcttgaaagtgtctcgtagtagttcagcacggccttttaagacgctatcatcaaatactacaacgccttgatcctcaaggttcataagacactctggagatgatattgataccagtattagtgaaagggttagaaatagtccatttcaattttaaaaatagaataaaataatcagaagagttgtttactacttactaataagagctttaggcgaagatcctagtaatttactgtcattttcaaccacctggatctgggtttttatccacttattaatctgggaagatagggaggaatcacagaatgcatttatgtaagaaacagatctttttcgatccccttgctccctgcaacaaaccagattatcaaattagaatttcacagaaaaataaaaaaggtttctctttctatttgcttagtcatttgtcatgtcactcaatcttaccggaaaaactcaacagcttcacatgtaacaatcaatctagccaatgcaagacttttcactcggtcagcaggtaggtgaattatcttctcagggttaaggaaagagtaatctgctaatatgacagcatcatacaaaacttgtcttaacaaaacttcatctttagaattctgcatacaaaattcaaaaaaatatgctagtagctcagttttaagatcataatacaaaatataaaaataaaatatgcacttcttgtgactattaaaaagagcacattacatgtacaaacccaataaagcattttcctagtgaattatcaatggtcgaagaattttaacaattttaaaaagtcagacttctgacataaattatacagcaacaattacttaagtattccaagagagggatactgaccgataggattgcaagaggcaaagtcttctccagcagcattctcacaagggtttctacaatattaagaaaaggtcagtcaattaaattgaactaagatgcatttacttctttataaattcaatacccagcaaatacacatgttaagttactgttaccctttcgtacatatctacaaaacatataagaaaataactaaaattatactaaccaaaaaagtaaaagttgctaaacccagttatggaaccaacagcccaggtcttcaattctttctccaagtcctcctttgatttcccaaatttaacattcaagcacaacttcagcaaaaacgcctcggcaataacaattccagccaggtaaccaacctcacttcctccatcaccaagcttcacaaggggtaagaaagactctaatccttcgtttgaattcatccaaatgcgaatcaaatcagcaaaaggcctaaccaaattagaaccattcaaatcaccttcttcaaccaaagccccgttacaacacacattaatatacccaagaatcgcttccaccaaagacttaacctctttcaacattttcttctcagctttagaagtcaagtccttctcaaacaactcagcaaccagtttgtacacctcgtacaccacaggagcgagtaaaacgacgcttttggacgaaccacatgaagaagagcacgctgttatcaacctaaacaagcctttagcggcttcaactctatcaaaacgctcgtcttttttactaaaacgtttgcgaaatgcgacagcagcgtagacccagatcgattccagtggtgggtcgactccagtttgcattaattcgtagaaatcctgaacacgtttacatgattgggtgctttcttctccaagttcagctaaaagcgtctgtattaattgggagatcttgacattgccactttcttcaataagggggctcagattttttgggtttgaagaacctccaggttggagtagatttaacgccatggattatttgagaagaatgaatgaaaatttgataaaagttaagtatcaagaaagggtgaagaagattgtaaaaaccctaatttcaatgtgttgacaaacaaacaaacatacaaaacctcggagtcggagggtttaagccacact

SEQ ID NO: 99380 - DNA, 2821 bp, Cannabis sativa
ttgccgctgtttctttctaatattgaaaactaaattctttctttgtttcttttttctctttcccttttatgaaattctcagcttgctttgggaaacccttacaggaagagaacatctattgttttatggcagactaaagagcctcaaaggttcctccttaaaacgagtaagttatttgtttatttcatgattttgagagaaacctatagatctaggagtattgttttggtagttgttaaataaaacaaactaggagtattgttttggtagtcttaaaatagtcttaagtttgcacatgtagtagaagtatttgggattattctgaagaacgagtataggaaaatagtgtgttcatgctccctgcacttgccaccttgagtgcctaaatgtttttcaatattaaatataatatgcttttttgttggtaagaaagttaaagtaatgttacgatgtataaatttgctgccacaggctgtggaagattctctaaagagtgtcaatctattccatggaggagttgctgacaaaaaagctggaaaatatagtggaggcatgaagaggaggctcagtgttgcaatatctctcataggggatcccaaagtatggctcgatctgtatttctcggatattagtgtacaatactcttttccgtactttgaagatatctaaaaatgtcattttctcataatttttatgcaggttgtttacatggatgagcctagtactggacttgatcccgcttcaagaaacaatctatggaacgttgtgaagcgtgcaaagcaagagcgagcaatcatcctcacaagtactctctctctcctctctgtcttctttatatgtatatgtgttttagttttctgtagtgtcataggaccgtcaaccatgcattctttacattatataataatggcccttttcctgttttaactaacttggaaatcccgttccactgtctgcagcacattctatggaagaggcagaggttttgtgtgataggttaggaatttttgtggatggaagcttgcagtgcataggaaatcccaaagaggtacctgtactcatataattaacaatgcattatcaatagtaaatttaagattccccactcccccaacttagttttataacgtatctccactgtcctcttactggttgtttaaaattactagatgtcagatcacatttcaaattgttcatttttcgttgatttttctaatcctgttcaattcaatctttctctatatctgtttctcatcaacaacaacaataatgtctggcagttgaaaggaagatatggaggatcttatgtgtttacaatgacaacatcttctaaccatgaacaagaggtggaaagcttggtgaggaagctctccccaaatgctaacaagatatatcacttatctgggacacagaaattcgagttgccaaaacacgaggtgagaattgcagacgtcttccaagccgttcagattgccaagagcaagttcacagttttcgcatggggtttagccgacaccacactggaggacgtcttcatcaaggttgctcgtggggctcaggcattcaacgtattttcatagattttttgtatttgtaaattcatttctgttagtatgtttctacaaatatatgtttgttttgtggttttctttagtaattggtataaagtgagtagttttttgttttttgttatttaaagaaaataaatcattgttaatacacattatacaagcttttctctctgtgtatatatccacaacagtaaagactataagtctatatcaaataaattatattatccttatttttcagaattgcgtttaattttgactagcttgatctacaaggatatcccatccattgtattgattttttttccttcaatatcaaagagaaagcagagaaaaagagttttatatgcactaggattgttttttttattatttttggaacagtttccactaggattaagtatgcatcaaactattctgtgagtagtctctaaaaatttattttaagactaactctggacaaaatgtttatgatggcacttaattcatattattgatgtaaagagaattgtaatgatctgaaatggaagttggtttggtacttcataaataaattattgtaatcatctctgggttcagatgatgatatatatagattaatagctcaggtttccttaaataaatgggagaagtattaaataacaatatgtgattatatcaagtagttggcaaatagccttcaaaaaataaataaagtagttggcaataataatgacaatatattccttgcattctaatatagcaatattacctaactatattaactacttcattcactagctataaaatgagacaaaactccaataattttattggttctcggtgaatattgaccggcataaaaatattaaatataatatacataaatatatcagttagttatgtcatagctagtcaaacaagataaaaaccaaaccacaaacttcaccaaacaatcctaactcaaactcaaaaggttggctaaatatgccctttcgcttatttaattgctgcagattctttctctaataatatctgataaacactatctaaatctttgaactcaggttatgattactgatagaaaagaagaatcaagttacttaaacataaaacaaaacaaacaagaaaaagaaataattaataaaagttcatctaagtttaacatccaagtttcaactccaccaaactctcccattaaatttacattgagaaaaaggaatgaatagtaaccaacaagccagacaatacaattaaagattgcccttaac

SEQ ID NO: 99381 - DNA, 1595 bp, Cannabis sativa
gaataatagaggagagtagggattacacaaatgaacatagataaaacaataaagtagactcaaaggggggcaccaggggttctaaggcttggcctaaaatgaacatggcttgaaattgaagatggccatgttaaaagctgatggaaaagcaatttcaatccaccaagaaatgagaaaaacaaaaaattgaacaaggagcaaagagaaatttagggaaaatagtcttcaaaacatacttcaaattataatcccaataaacaaggtttacaaggtagtttcgataatgtatcagactaaactctctcaaaatcaagtccttgcctcactaattaaaacaaaacatacaaggctttattaaagatgccatagaaacttctcacttaaacttcagacacagacacccagcggccaataacatcagcaacaacaatttcagaaatctcagggggaggtgtattagaccagtatatagcttcgcgctcaccagagcctatggaggccatcttgttcgcagccatgttcctgggaacaggcacctgggtgatctttgcatgtcggaaagcctccaagaaattgagacacctgctaatgattttctcaatacctggagatatgacttcaatcttgtaatggagaacttcaaacacaatgccacagtctccctctatctccagatattccacaccttggttcatagcaacttcaaggccatgacacaaagctgtcagctctgctgtaactatgttatcacaattggacaggggctctgcacaaccagctttgaatataccattctcatcacgaagaatgaaacccagaccagcagtcccagactttcggtcagaaatcacaccagcaaagttgagtctccatgagtaatcagtgggtggaatccaagcaacatgatagacaagaacatctttgttagtcgttacaaacattggatgagattcatcgggggaactcattgctaaggctgagactgttttgtaataactaatcggcttttataaacactcgaaaacacaaaacctaatttatagatagagcaacctaaattttccgcatgtatttgtcaattagagcgacaaaattattcctttttgagattatagatgataggccagcgcttccgctaaccgaatttattactttacccattcattttaacagagatgttcaagcatgattcagcaatacaattaaatgtcaaggaatttgttgccaataaattcaattttttgtgattctaccattaaatacaatacactcatactctaaaagttgagattcactattaagtaaccaacccactgcttaaatcctaatttaaaggaaccatgccatttgccaaaactacatatctaactttaaaacttagatattattaagtaatgcttgaggatacaagaattataaatataattcaacttaattcaaatgtcatttacacctctatgttgaaagtggaaatattcatagaaaatttaaattactaataaccacttttcaccatatataatctcaaaaggaatgaaaattacattgaagaataatcatgcccaacttaagtttgctcaatctataaattagat

SEQ ID NO: 99382 - DNA, 3358 bp, Cannabis sativa
aatgcaaatggtgataggatgagtgaaaagatgattgatgtggtggatgggatgcatagcagagatactggacttgtcagttctccaaaaagagaccttgcaatatttggaggggatacagattttgaaccctgcagcggcattgagtttgaatcacatgaggcagcatactcattttatcaagaatatgctaagtctatgggatttaccacttccataaaaaacagtagacgttcgaagaagtcaaaagaatttattgatgccaaatttgcatgttctagatatggtgtgacgccagaatccgatggtggtagtagtcggcgcccaagtgtgaaaaagacagattgcaaagccagtatgcatgtgaagcgaaggtcggatggaaagtggataattcatgaatttataaaggaacataatcatgaacttttacctgctctagcatatcattttcggattcataggaatgttaaattagctgagaagaataatattgacattttgcacgcggttagtgaacgaacaagaaagatgtatgttgagatgtctagaaaatctggtggatatcaaaatgttgggtctgttcgagctgagatgaattttcagtttgataaaggccgttatttgggtcttgatgagggagatgctcaagttatgctagagtatttcaagcgtatccagaaagagaatcccaattttttctttgcgatcgatttaaatgaagaacagcggctaagaaacttgttttgggttgatgcaaaaagtaggactgattatgtcagtttcaatgatgttgtttcattggacacgtcttacatcaaaatcaatgataaattgccatttgctccttttgttggggtgaaccaccactttcagcccatgctacttggttgtgcaatggttgctgatgagactaaatcaacatttgtgtggctactgaagacatggcttagagcaatgcatgggcaagctcccaaagtaattattactgatcaggacaaagctttaaaggcagccattgaagaagttttcccagacacacgtcactgctattctctttggcagatattggaaaagattcccgaaactcttgctcatgtaatcaaacagcatgaaaatttcttgcctaagttcaataagtgcatctttcagtcatccacaagtgaacagtttgacatgagatggtggaaaatggtcactagattcgaacttcaggatgatgaatggattcgaatgctgtatgatgatcgtaaaaaatgggtgcctacatgccttggggatattttttttgctggcatgtgtactactcagcgatctgaaagtatgaatgctttctttgacaaatacattcacaaaaagattactttgaaagagtttgtgaagcaatatggggcaattctacaaaataggtacgaagaggaagaaattgcggattttgatacattgcacaaacaaccggcattgaaatccccttccccatgggagaaacaaatgtcgacaatttatactcacgctgtatttaagaaattccaatttgaggttttgggtgtggttggctgccagccaaaaaaggaaagcgaagatgaaaccactagtacatttagagttcaagactgtgaaaaggatgaatatttttttgtgacatggaatgaaacaaagtcagatgtttcttgttcctgtcatttgtttgaatacaagggtttcctttgtagacatgcactaattgttctccaaatgtgtggactctctagcattccacctcaatacattttaaaaaggtggacaaaagacgctaaaggcaggcaatcaacagctgaaggaacagaacaaatacagactagggtgcaacgctacaatgaattatgtaagtgggctattgaactaagtgaagaaggatcgttatctgaagacatctacaatattgctgttcgtgcactagtggaggctttgaagaactgtgttaatgtgaataattcaatcagttctgctgcagaatctagcggcaattttcttactacttgtgaaatggaagaagagaaccaaggaatccttgcgactaaaacagttaggaagaggaatacaaataggaaaagaaaggttcgtgttaaaattggtacttgttgttggccttttatgtttgtctctatatgttgccaaatcccaaatttatgcatgctataaatataattcaggtacaagcagagcctgatcctacacttgttgtggcacaagacagcttacagcaaatggtttgtcctttctacacaagtttatgttctactttcaactttttgttaatgacatgaaccgataacaataagaatgtttttgcattgtttttatggaaatttaaaaaaggaaaattgttttatcttgacgtgggttttcacacctgtaggataatttaagctcagatggtataactctaaatggatattatggtggtcagcagaatgtgcaaggactggtatgagtgttattatctcacaccataggcttgagatatacaattgttgtaaaaggtactgtttcttactgatattttatatatgttgctgatgctgttcttttggtgcagttaaatttgatggagccacccaatgacagctactacgttaatccaccgagtatgcaggggctggtatgtcatgctagagttagcttcagacccatttggaatttacaataaaattagaatcagagagccaagaactttttgaagtttagaagtcagtgacattcttgcttatctgcttgtagggacatctaaattcaataacacctggtcatgatggttattatggcgctcaacaaagtattcatgggctggtattgcattttttttcattacatggagtaattcatagcaagtggccgtttttattacataagtcccaattgttatctaatttagtttaatatcatataggcacagctagattttcgtcaacaaactagcttcagctacagcttaccgccggtaatttatcaataaatagtttttacagctattcttgatgccaatagttactttaaaattgtttattgtaatagattttgtaaccctgattgcaggatgaccagcgtttaagatcttcacaattgcatggtagtgcttcgaggcctccatgagaggatgatgttgtcattcatggctgttttaccgaagttgctgaaaagtaaccaaccaagcaagagaaggtaaaaaactctttgtttatcataataggaagtgaaccttcattttcagaatttaggtttgactattctgaccctggtcaaagaggtgttagatcaactgttgtggcatccatagtagttaaggtgtagtttctgtaaatcaaaagaatttatttct

SEQ ID NO: 99383 - DNA, 2574 bp, Cannabis sativa
ataatccttcagcctcccatatagtataactaatttatttcccactttaatttttttttttttagagaaattaaaaaaatcataattattttcttttaattttttgaagggaatgaaagctattcccaaatttatggtttccaaaactgttatagttactttattaacaaaaaaaaaactgttatttttacagtaacatttactaggctgttaaaacgttgacacgatttctgaagacggttttcgaaatgtctagaacaagaaaggtattttccccatctctaaatgaggggtattacagtaaatccatatcctaaagcttataaattcacactgctacagagagcccattatcagaatcgcaacacgtggcacataattcatttcagccctctagtaaatttctttttctgaacaacccctctagtaaatttcgagtgaacttcaactctctgccacgtaagcaaatattaggacaagtcagctagggtccacttccactggtcctataaaagccccaacccatcctatatcgcccaccattcacatttcactcactaaaaaactcactctcttcactcttcacccatttcagaagagaaaggaaaaaaaccacagccatataaatatatatatatacacctccatccacaaactcactaccggcgattattggtcaccggagaaatgaatattccggcgactttcatttcgattactgtacgcaatgctcgaatctccgatcatcgccgacacgttttccatgaaaatccttgaccggaagcgatcttgtttcgcttagttacagtacacgttattcgacgcttttccttagccgaaaaaaaaattaaaaagttattaacgatacgatacttctagaggaaggtaccgatttttctctcttcgttcgtacataaattttggtagagttttcctttttgtttccgctgttttctttttcttttgttagattaacctgataatctaacggaaaaacaaaacagcgaatgtagatggaatattgagaaattggattgattttcgtcatttttttgttgttcgtttctgtgtaattcgagtgaatgatttttgagttgtttagatagactaagctctgaaaatggagcagaaaaaaccttttagttgtaattagaagcggaggtagtttgaagaaaagattttttttcgttttctctttctcttcttcggaacgatgccatttccgatgaagatacaacctcttgatattgatcccgaatcggttagggaacctgcggttcgaaccgattcagctaaaccggtgttgaaatcgcggttcaggaggctctttgaccgccagtttccgagcgtcctgaggaattcttcaacagaaaagaccactaatgttaatggcgaaccaactcagtacaaagatggaggagcagccactgtgtttgaaccgagttcggtttgcttggccaagatggttcaaaatttcatcgaggaaaccaacgagaggcaaccacctccacctccacccaaatgcggtcgtaaccgctgcaattgctttaacgcgaacagctacgatagctccgatgatgaattcgacgtcttcggcggtggtttcggagactccactacctccggatcttttggcggcgacgcctccgacatcctcaaggtaaaaagaaaatcttacgattctcagcaaccaagcagaaaactgaaaattaatatgtttcgtttactgatattttcatttttggccaaaaatagagtctaattccttgcgcgagcgtagcagagagaaatctcttggccgatactgctaagatcgttgagaagaacaaaaatcacaaacgaaaagaagatttgataaagattgtaaccgaaggactctcatctatgggctacgattccaccatctgtaaatctaaatgggaaaaatcttcttcattcccagctggtacagtctccaatcctataaaccctaaaaaaaacaaaaaacaaattgaccaagaaaaaagaaagaaatagagaaaatctgaaattgatttatgtttggtttcaggtgaatacgagtacatagatgtggtagtagaaggcgagaggttattgatagacatagatttcagatcagagtttgagatagctcgatcaaccggagcttacaaggctatcctccaatctctgccgtacatattcgtcggaaaatctgatcggcttggccaaatagtctccatcgtttctgaggcggccaaacagagtcttaagaagaaaggaatgcacttccctccatggcggaaggccgattacatgagagccaaatggctctctcctcactccagaaaagaccccatagccatcgctgttccagaatcggaatcggagaaggtcaagtctgacgttgaatctcaggacgacgacgggtttagcgattgcggtgaattggagctgattttcggcgagaagagcctgccgtcggagaacgatcccggcggatctgccgccgagaaagcttttccggcggatgagaaaaattcgtcggagccggtatcggcgtggcagccaccggcgattgagccgaagagtgta

SEQ ID NO: 99384 - DNA, 6033 bp, Cannabis sativa
gtggatctcttctctttttcaaaattgtttaccaaacacttttttatcacaaattttttaaaaagcagcttttagcttttctaacatccatttcattatttcttgttttttgtatagttcagacccctgcataaattaatccttttttttgtgagtatttttcttagtatttttcagtcacaagtaaatgccttagtgaattttatatttgtcatattgggtttgaagaattgaagttgatgtgtgttgtttaccacaacaaatttaataattttttctttaattttgccctttacttcagcataacgacaaatacaggttcagtataacgtcaaatacaggttgatctcacgaagactattattaatttattaatcaagaattagaactgaaaattagaaaatggagtttttaatataaacattaaataacataaactagaaagctaataaagatagataatgatagtgagtaatgtggggggcagtaaaagaagcacgtgtttatggagaacggcagtcttggcagttctatgggtggtttggttagaacgaaataatagaatctttgaaggtttggagagcttagaagcggccctatgggataaaatttaattctggactgcttcttgggtttacaagactaagctctttgaaaatgtttcttttttagacttgattagagaatggagagcattgttgtaaaatttttaatactgccttgtggtctcttccgctgtgtgggatctggtttttaatgcgcgtcctagggggtgggtgggggggatggggattgttgatatcaaatttttgagactttgttttggttctagggtgacttgagttttgtataagtcttggagtttggtgtaatttgtaaccacgattttcctctgccacaagtgagggtttttattatctcggggttgggggcaaaaaaaaaaataaagatagataatacactataaagaaataggtaagaatcaatgtccaccctcaacaatcattcaagatcaataataataagaattatttcaatttcttaattaaactattaacctcgcagaaaatgctgaagcagtcaattttttcaatttccctattacaattaatcaaggtgaaatgctgaataattaaatatttttactaagcaatagatccacgaagcatgcaatttatttaacataagaaaaatattaatttctatggagataaattaatcaaggtaacaaatcaatgaagcatataattcatttaacctaaggtctgttttttatcacaattaataatatttttgacattactattaattgaaaattattactctacttagagtcctaaactattaggtgagaagtaattctaagatacaaaaccttaattattgtgtacctaacaagaattcacaatttttatagcattcaaataggaaaatataaacagtttaaaatgagagaaatcaagaacaacatttattatcactaattaagaattcatgttttagagtttggaaataacccttaactaaaaagaaacttctccatactaatcatcataataaaaatcataattcaaaagtaaagagataggaaaagaaaagaactagaatgataaacaattggtgatgcaatcttcttctccactttctataagtttctctttcaaaaacgcaatctgaaagtgataaaaacgaaccctaaaagtcttatttatttaatcctaaaagcccatttaaatttagcttgaaaattgattttttgcgaattgtacggacgtattttcgcctctggccgccctagcggcgcttaaatgcctccggggaggtggttcctgggaaattgcgtcacgtgctcagatcagtattttggtcgtaaatctttcaatacaactcgaaattgaatgattcaagatgtttcgaaaagttgagaacgagatatacaaatttcatgttgagctctaagtccagttttgcttctaaaatcgtcaaaatctttaattacgttcagtttagtcaaaccgagctctccgacttccactatttttcactaaaatgtactaaaatccctccaaatgactccaaatgcatgattagtcttccaatacccaacaaataaaaatcacactaatcaataatttaaagaatcaatttaggaatattgatacatagattgtctatttataagataaaatatcgacttatcagaaggatagaagttaacttctttaaacaattttgtgaagagaattgaacatgacattcctagatatatatataaatatatatatattcttttttgaaaatgtgacattcctagatatgttgcttactctaaatgcattttttgttaggccttagaaagtatctccttgcccctttgaatataatcatcataagccaaataaaagttatcccactgctgaaaaagaaaattaacagccttgttgaccctccaattgagaacatcaagtcctttaaacatcatcagagaaagaacagtacccatcacaccagcgtggacaatccccattatcatcatataaccagagtgagatagaaaattatcaatagttggccctatcccataaatgtgttgagtcaccatttgagaactaaagaatatgtaacagtgaccaagtccacattcatattctttagtaatttctttgtgccccatttgtctaacagtgcccatgaataaacaaccccctttatcaccaactaatttcccaaatccaataagaaatatgaaattagctgtaagattggttctattccattcaaaatacctggtgacccaaaagttgttgtgcaagcttttgttgttcttcaccttgaggacaaggtgaatttcgggggggcggtattgtatatgggtcattgtaatagggggtattgggagagtatatataggagagtcttagaagggttttggagagagaatgaattagttaatgagcagtagctcttgggagagcactgggtatctcgaatacccaggaacattgtatcctcttcatctaaattaatatacaattcactattttgctatatttgctactattatactaaattgataggaactccctatcatttttgtggtggtatctcactggtgaattagccaatatataattgttcttttaacttctgttccaaaagtgtgtttgtgtgattacctgaaacttgtttcctcaacagtggatgtcatgagatactgtttttctagttaatgtaaatcattaagtttcttccaacttctccacttctttttgtgtttgtaatcgtgtcacaggcgttaaaaatatgtaggtttgcgagccactacgggcacaaataaatggagctcctttggaggacgctcgtcacttgactcaccgttatgataaattgcgtcaagatgtggaagcccaggtaattgctcatcttataattcgttacatacaccacatacaaattgtttaatattcataccgaatagtttattattaggtggctgaagtgttaaggcgccagtcaaagtctaggggcccttccgtatctgaagagagtgtaattaagcttcaaaatgcagaaggtagattggatgagcttaaatattctattatggctcttggtcgggaagcaactgcagctatgtcatcagttgaggagcagcagcaaaagatgacattccatacactttttaccatggtattcttacttgattctctctggtatgtatctataggctggcaatatcttcgttcacagtgtgggttgacttgtaaattatttacatgcttggattctacgacacttagatacatgttgttgtaaactgtttatcctgtgaagccttactttgtatgtgagatgtaaaaagaaaatagaaataaatacttcgtatttgcacttgggactagctcaagttgttggaggagtggttgtaaattttagttcaagacctacacagtgaataatattttgagtaaaatgttcatggtctcattgtacttagatgacagggattctacacctttctgaatgcaattattttacgtcaaatctgaaaaatattcattttccaggttgatgctgagagatcttaccatcagcatgctcttacaattctggaaaagctacatgctgaggtttgttctatcagactagttctgtacttttccctatatgtattgttcctggagatgtcaaaatgttgggatctgccgcaataatgtcaaatttttaatttgtcaacaatatttctgaaataataagcacttaccataatgatttcgtcatcaattataaagaaaagaacataatttttaatctatcctatgggaagtgctgacatttttaatttttcatgaatcatgatgcattgaatttttaatgctaatgcaatcaatattatgccacttacaattgtttctagatataccatgcatgagtgacttatttagaactgttaggattcttacagctgtatgagatttttagctttaaaaatgaatcttacattagaaaatgatgcagatgtgaataacaacactgatgaagtatccttgcactaaataattaggagagacatgaaaatgtatgcaaaaaaaccttaaagaataaggaaaaaaaaaatgcaaactatgtaattccacaattctggaaaatatgatcctgcaccgaggaaagtaaatcagataaacaataaactgtagaattaataaatggaaattaaacagacatcctaaaatttgaaaattaaattctgtcatctgtgtaggccaacacactgcattttattttattttattttttttgaatagaacacactgcattttatttaatagcttaacattacaaattttgaaagcatcttatagcatgccgtgctttgtcttctgaggctatgcagaggccaaaatgaagctgtccaaccaagctatccacattttcatattatctgccagaataaatatttaatatgctatcgcattgtgcttttatttgtatttaattttactatactttcttcatttattcaattttagattgtgagcatttttaattaatgtaaaatatatccaggacaaagtatgcttaacccaaattgcctatatgggattacaatgtgttggttataatttagattgatttaatgtgtgccttgacctctaaaaaaaccatgttgactttcttgatgataacttaatgacccatttatatttaaatgcttgttattagatgacattggagaatcacccacaagaatttttatcatcaccgtcagtgaatgtgcagaaagatgtctacgaatcgcttggacatcaggacgataaatcaaatggatttgatgatcatggccacctaaatcaagaggatattttatttattgctaaagtaaggcttttgaaatcttagaaatcttttgatacacctcagtaaagtaaatacagaaaataaatgaaaaagtgattattattgataattctaggaaattcaagagtcctagtttctttcctgagccaagctcaatacaaattagaataagcctatcccaaaccctcccctctcttatctatttcctaaacataccaaataaagcaggtaacaaaagataattcaaactatcacatttaattccccaacaaataatagggccatacatatttccctctaattcttgtgcctagcttatgcataccggattgggggtctatcatttttgtttatacaggcctagaaaattacatgtaactagtcctgattatacaattacttgacttttattacaagaaagttttttgttgtaactggaagctacttgtttttttacatttctcacgtgataatagaatcatccttcatcttgcaggttatacaccaatttgatgctcaagcagatggggagttgagtctatccattgatgattatgttgtggttcgccaggtactgtttttgctgattcgaaccatggaatttactatcctggatcctggttcactatctcatgctatttgttcattaactgcaaaatgataaaattatttctt

SEQ ID NO: 99385 - DNA, 3563 bp, Cannabis sativa
aatggcaccgcacttggcaaagtaggatgacaaagcttccttagttgcagcaaaatgaacctgtttttccaatcaatgtacagcatatgaaaagagtggtggtgaaatcaaaattcaaaacaatgatgccataaatatcatcagccttgtgatttaaaaacaatatatgaaaactttagatatgcttttcatatttggtgtcgaaccaagtttgcatagaaaaatagacatcattctaaactttgtaacctgttttaaagtcgtttggacacagtttcaagcaaagaaagactaatgaaatgaaagtgtatttggcctcaagaatcattagctaccacagaacatgaaacatcacaagacaaaatgatcaaaaccaaatataaccttttgaacaaacatttcaccaacacaagaaagcattcatgaatgaccaagtctaaaaatgaagtgacatcttggactcgttgcaaccaatttagtagctaaaaggatgtaaagttttgttgagtttacatttgtcacgaatatagttcttgaatcaatatcttccactggatgctttaagtcacctgctaataacacaagtgaataaatttatggcagcaaggaaggtgacatcaaccaaattaatgaataacagaaatttcagcaagtaagatgttttaattaatcttagtttttcccttttaaggggtaaagtaaaacatcttgatagcatttcaagcttaaaattactttcacaaatcaaactcgacttagaagtttaggactatgtactcaactcccagcacaatattctatcctattaactatttagtagtacaaatatattgcacctagctgaaggtttaggtgtgaactaaaccaaattaccaggcatatcaatcccctttctttttctaatttttttcccttcactccaatatcacatatcagcattgaataatgaacaaaattagactgcattgcccaagacaaatcaatctcagagttaataaaattccctcaagagatgggatatgcttactatgatttgacaattgagaaattttcccatccaaccccaactctgcttgctttagccgaagctttgccatctccatctctatttggttcagtttccgtttcacaccaagcattttctgcagaagaatattaatactctaactttaataccaaaccttctgaataaagagagacagaaatcttcttcaggggaaaacgaaaaacacacactatattcctaatggataatacatgcttgagattagcaacaaggacatacagagaccacaattggagtgatagttgaatctttgctgaccacatttgatttcttgaactccactgaaatttcttcaacttttggctctatctggctcttatctttcgaaggaacagaaccgaagctagggccactgctatattcgctaaaaagccttttttgtctgatatcatctaaagtatgtggctcagatgttctcatgacaccatcttctggattctcactctcatcaaggcaattgtaactttcagaccttccatcaatactagaggccctataactaagccgggaagctattgatgcacgctgattgtgcacatcctcatcttggtcgtgatgaccaacagcatcctgatcaatactcttgtcctttgcaggtacatcgtcacatggcctgcctagtctatcccagacactaacccgaggaatttcaaaatgcatggaatatggtattgcagtgcctacggtagtacttctccccaaatcattacagaaaccaggctgtttggaaaaaggacgatctgcataaaagaaaaaaaaaaagatagcataaaacttcaaagggcacaacagcatgagaggccaataagcagcgctccctttatttgggcacatactacagatacattttattctatcaaacaataaagttacctgatccggaagattgtggatatataattgaaataggtacaggctgattatgatcaagaacctacacttgaaggaaaattattttagttggtaaagaaaaatgcacacaacccaaaaagataatttaaaacaacaaaacctgctcaggcttcttcacgtatacaacaccttcatttgtattagctgagacaccattaatcttttcatcttcctcaatttctctcgaaatcatttcatgtctactaatctgcaacgaaacttgttcattaatcaatctcatttgtagaaaaagcaaaacagagacaatagaaaagaaaaagataatcaatattgtggttgatattcccatgttttcattgccattcttcaagataattaaaccacatataatactaagaataattaggacttttttcagaactttgacatgtaccgaattttgctcccaaactttttcaagtcgttaaaaattcttccaagctattaaaattgttggatttaaagatttccatctaatttcgttcaattttactaatagactcctaacgtgttgtttgtccatgtaccaaatcgtgcctcaaactttgacacgtaacaaattagccagatactaatacagagtgagcttaaaacaggaaacaatttaggtaaggccaaataagtagttcaaattaggaaaagaaacacaattaattgataatcatttctaacaaactatgaattgaacaccgaccttgcgaagtttcctgctacttcttgaatctctttctctatcacttctttcaggactggtgaaataaacatcttttgaaacccttaaatgaatatcatcttcacatttacgatggcaattcaagagatgatcccataacctaacccaaacaaaacaaaacaaggtttttgaaacaagaaaccagtttccttaagctaatcaagaaattaaagcaatcataataccagcttacgaattcagcactccgattaccgagaaacggctctaaatcatccctagcttgaaactgatcctttccattacaaatcatcaccgtaatatattcctaaagaaatcaatcaaagaaagtacatcaaacacagcatgaatttctacgaaacattcattttatcgatgaaaatgatgatgacttacagcgagaatttcatcggcgaattcagcgtaaaaatcaagaagcgtggtggaaatggaagatttaagattggagataagtgatgattttctacggagtttgaaagagatgggattggtgaagtaaatttccataccgaacagggttgtgttagggttcttcgtcgtcttcttcttcttcttccctgttcccatggcggaatctctcatagctctctcttctttcttcttcttgcttttaaatttggagtatttatatgaagaggaatggtcttaaattaccattttgtccttttctttttccctcttttttcttttaaataaaattattattttttttatttggagtatttatatgaagaggagtgtgaggaagtggtagtaatggtgttaaattaccattttgtcccttttctttttccctctatttttataaaatggattaataaattttataaaagaaaaggtttaattaggatt

SEQ ID NO: 99386 - DNA, 1734 bp, Cannabis sativa
acactggtttgtcatggctatgaacactgacatcaatgtgattaacagagaagcctagtactttagcctcttcttcgattttccacagaagggcaagtccaccactacgacccactatatcaacaactagcatcccttcaaagcccaaagaaactctaagtctttccatagagtcatgtttacacaaagtctcacacaaaaacacaaacttgggtctcttttggatcacaagatccttaaggaattgtaaggcccgtgggttcccaagcccacggcaattccaactaaggatactcatgaccctaggtgggcctgggaaccaggacccaccaaagacccattttttgacagcccaattgggtcaaggctcatatctgtttccacttcagcattaacttcactattgtccatatttgtccttcttctcttagtatccgtagcaattatagtcatagttggcacttgttcctctcccctggcagattgatcgtgatgatcggaattgccatctataacaccatgatttcctccctcatttatgatacgtatattgccatttttccaacccggattcatatcagcctcatccctgtagttacgggatctttgattgccagcattaatggcttcttcatccttgctggaggtgtcgaattcatctgaaaacttgttgtcagcctcggtgccggtgcttagccagtgagctccgatcctatgtttctttcgttttggttttgccttcatccacaagccataaggcttttctatctgatcactgggggtgtcaaaaagcttttggcaaaattttttcgagtgtccgattatgccacaaatgaagcaaaacgttggtacaaactcgtatttaaaattgcaccacaaccattctccattagttctcttcagcttgattcttctcttcagaggcaagtcgacattgacagtaactcttatccgcaagtaatctctccaaatccccataaaattcttgggatctgattttataaatgatccaatataattaccaacatttctagcattggattctgtcatgaaacctgttctcagattgtgaagttgaacccacatatccaggtggtgtagacgaacactcctgggattttctcctcgcttcagcctttcaaaaattaattggaatctattgaaagtccatggactcccatcaatgactcgctgtatatcaatttcatggtaaaattggaagagaaaaaagttaggatccaattcctttacgaacattcccttacctggttgccatagggaagccaaagtattttgcatagaatcaaaatccactaatctggtagttaagaactttccaacaagacaccaacgatcgtcaacaggctgaccgacatcttctgtaatatcacatagcagttcctcttcattctcttcttcgagttatatattgtcataaagatcttccaaaacagcattttgttggctactggaagccattccacttacagacaaatgatactcccaaaagaaaatcagataaaaacttacactcaaactttcacaacagcctactcatgtcaaaagacaagacctccttggagcattaatcacaccataatgctgttttagtggtttcttggagttgctcttagcatgttatataattttttttttttatgatatataattttattattacgatatattaatttttaatgatatgatatattcaatattgttgtatataattaa

SEQ ID NO: 99387 - DNA, 5594 bp, Cannabis sativa
atggcacggttggtatttaccttctgttttcatttgagtttgtaatcttctagttatattttgcttcattcctagttcgcactagaattgattaactggggatatgttattgccacagcccatacctcctaagtttagataggccacaagaaataaataaaaataaaataaaattaactatcaaatatatggtgggatttagagatttgtaacttgtaaggagtatgtatcataattttaagtgaatggtaaatttttatcagccaagtaatgaatagaaaagataactagtgaaccaattaggatgttttaaaaggcttctctttcatgtattattattattatatacaattttttaaaggaataacgttaagactgaaataatatacaaataggaggagggatgccatccatataaaaagttcattatctagcctaatgctttatgaggaggttaaattgtttatgtaattacggtgcattaaagatgcaacttttagctcatgacagtgctgcatatttatgaagtgtgtgattggaataggggtgttaccatttacttgtttcttgctttagataaggcaaaatatgaactttaaggtaaagatttgcactaagattgtgttcatattatgttttgttaattgtgattatccccttgtggactttaattgtttgcaacaggtgaaaatttgggatgaccgtaagccgttaccacttgccgtgttaaaaccgcatgatggcgttcctgttaattccgtgacatttctaactgctccacaccgtcctgatcatattgtgcttatcactgcggtaaatacttattgccctatcatagagaacatactaacatagcatatggcaggctttttttattagtatacgcacttattttgctggtatatattttccatgctaaaccctcattttgtttttttccccctttttaacagggtccactcaatagggaattgaaaatgtggacctccacaaatgaggagggatggctcttgccttgtgatgctgaatcatggcactgtacccagactttggaaataaagagctctgctgaatccaatgttgaggaagcattttttaatcaagttgttgcattacctcgggcaggtctgtttctactggcaaatgccaaaaagaatgccatatatgctgtccatattgaatatgggcctgatccagctgcaacacgtatggactacattgctgagtttactgtcacaatgccaattctaagtcttactgggacaagtgatagcttaccagatggggatcatgtcgtacaggtgtactgtgtccaaacacaagctattcagcagtatgcattaaacttgtcacaatgcttgccaccacccatagagaatttagaattggagaaaatgaaatcaattggctctcatccttttgatactgctgatagttctgcaatgctggaatcatcccataagagtaaaccatctgatattgctccctcaccaagccatcttgttaaaatggcttcttctgaggttacaagcttgcctatagtttctacttcacgggcggattgcgattcaattgctactccatctcacatcttagttaaacatccatcatcaacctctcttcctttgagtcctagattatcacgaaatttgtcaggttatagtaatttacagaatagcaatgatactagtctgcctctcaaagatcaagttgatgatcagaatgttgtcaaagataatgtttctgaggcatctccctcgacagacaatctcatgaagggtgacaaagatgtcacacaaaatgatgtttctatggctcctaatcatgcagcatttagacacccaacacatctggtaactccatcagagatattatctacagctgcttcatcttctgaacatgctcagcttaatcagggaatgactgccttagaggcaaatgttgaagatgttatcaacaaggatgcagagagcaatgaagtagaggttaaagttgttggagaaacaggagctattaaaagcaatgaggttcttgacgacaaaaagaagaaagccttttactcccaggcctcagatcttggttttcaaatggcacgggattgcattgacacatattgtacagagggaaccgtgaacgctaatgatgttggtgttactgaggcccgagaaaaaaataaagtccaaaatgtgacgaatgatgtcactctcaagggcgttgactcagatactaatgtaacaacccctgtccaagctacaaaagggaaaaagcagaaggggaaaaattcacagatatccggtccatcttcctcttctccaagctcatttaactccactgattcattaaatgaacctgatggcgtgtcaggtacaccacctgttgaagctgcgttacctcagttatcagctatgaaagacatgctgaatcaggtgattcttcaaagttggcactacaatcatgcatgagcaaccttttaaaatgtttttcaagttttacaggacatagtactgctttttaaccttatatgttttttgttactctatagggattaaaaaatcgacagtactctttaagtttttaatatcacgacttactgtggctagaggtttttgatgtctatcaaacatctgtagattgagtgtcattccctgtgatttgtgctggaagggagacctatttcttatctgactttggctgctatttgctaaatgctaaattctgcaatgataattagaaaattgaaattacggtgatatccagaaaatgagtgtttctatttctttaattatgtggctaacatatacattctgcaatgccctatgtattatcacactttttgactaatagtaaatgctattacatgttacagttaattggaacacaaaaggaattacagaaacagatgaatgcgatgattactggcccagttaccaaagagggtaaacggctagagggaatcctaggccggagcatggaaaaagttgttaaggctaattcagatgctttatgggctcgtttccaagaagaaaatgctaaacaagagaagttggaacgagaccgcactcaacaattaacaaacttgttcaccaatgctataaacagggatcttccaaccatgttagagaaaactttcaagaaggaaataggtgccattggaccaggtttagctcgttcaataactcaaattacagagaaatccatatcttcagcaattacggagtctttccaggttcgattatgatctaaggtgtttttaggtgttctggatagcctatttattctgataaattatctgctataagtaaaggttttggagaaaaatttgttgccttataatgcataaatagagagattattgtgtatgaatgatatttttggataatgagggcctgccaaaaggtttaatttttctttttcctgagcccagtctttactcagtttgatagcagacttttctgaatggaaatgttcttttcgtactgcagaaaggagtaggagagaaggcagtgaatcaattagagaaatcagttagttcaaaactagaggccacattggctaggcagatccaagcacagtttcaaactactggaaagcaagctcttcaggtgatttctggttaatataacatcatttttataatctttttgttgtccttaataatagtacatgtgaacaatatttttaaaaaataaataagaaggatgacccagcatatttgtgttttatgtaaaaaattatgatgttccttctttatggctagtgttaaagcatcctaggaaatgtccatttctttcgtatggtaattgttgaaagaggatcttacttgaaaaaattttttacaaccaataattttttatagtaatcacatcttatgtcaacgtgggactacattttaattgcgggtaaaagtcatgcatcagacatgtctttacttttgtgttatcaagtataagatcaattgatttctttctcactcacttcttcaaatggcaagtgtttcaataattcagtttcatgatttttgcgccaaagcgtagatcatatgatgaattttcatcacaagtgtttgattattttaatttcatactcttcagtcctcataagcgtttacttctgaatcctttggaatggtttaattaccttcatactcatttgttaaaattttaattcaattaatctttgacattatcacttcataaaccttagaacatgacttgtttttccttttccaaatatccttttattgatccagccatagtagttgagctctaaggcatttcttatgcatgttacgtgacataaatcatcgactagtattagaacaactttgtagaatgtactctgtttgtttgggtgattatggaatctgtactgcaggatgcattaaggtcgagcttggaatcttccctcattcccacatttgaagggtcatgtaaaaacatgttcgagaatgttgatgcgcatttcagaaagggtttgttaaacatacaagtgctactcagcagcaatttgagtccacacattctccactggctgctgctctgagggtatgtttaatccaaccattacctcacttttccacattttctttaaagctactaattatagtttgggatcccttccaatttggttcaagtgcactatataccgttcttgtttacatttgcagtatactcaatttttgtgtttcacactattctgtgtttcattgtccaggatgcaattaattcagcatcaacgatcactcgaaccttaagtggagaattagctgatggccaacgtaaactgatggcgtttgcagctgcaggtgctagctcaaaaggaccaaattccttgacaacacagttgagcaatggtccgctttctagtgtacatgaaatggtaggctctccaagtgaatctgtttcatctaacaagtgtttcctgaaaatattgcaataatatgatctccacattttaaccattggaaggtctcatttgtttttataggcggaatcacctgttgatcctattaaggaattatcaaggctgatcgctgagcgcaaatttgaggaagcatttacaggagccctccacagaagtgatgtctccatagtttcttggttgtgttctcaggtactgaaagttttaacttgcagtgtggatgctaatgtagatattttctgctggctgtagcaaacttcgatttctgtttgtgatcttgctgttacaatacttatttctccacttatgatgatcactaagtttgatgttttatgataaattaaatctgacaatgtttttgttcgcgtttcaggttgatttaccaggaatcatgtcactggtgccactgcccctaagccaaggagttgtactggctcttctccaacaattggcatgcgacataaacaatgacatgtcgagaaagctggcatggatgacagatgtggctgtggccataaatccaacggatcccttgattgcaatgcatgtccggccaatctttgaacaagtttaccagacacttgaatatcatcgcaatcaatctaccacttcagcttcagatatcaacagcattcgccttcttatgcacgtaatcaactctgtgttaatgagct

SEQ ID NO: 99388 - DNA, 2750 bp, Cannabis sativa
tatgtatgtatggtaaatttgatttgatactaattctgtactcaataaattaggtttgagtgattcaatcgattgaataaggacaggttcatatggataaaggtcctcctgcatgtgattttccgcctctcctttctttattattattaattaattacactcgtaatcattcttagctcttgtttatacgtatattattctaactgtgtggtgtctttgtgggtattatgactcagtattggcatgtgcttaatgagttaatgtggtgtctttgtgggtatatgactccgtaatggcatgtgcttaattaacacaactgactacatatgaattgtaaaaaacaggtgttccacatatatggcttacaaattattattatttcataactaatttctattaatattttcataatttttccatatattttattatatattattaagctcaataatcaagaagtgttaaaaataagataggtaatgatatctgaacttttgaaatcgaagatgaaaaaaaaaaaaaaatactcgatcggtaagcttccaatgtttcacttttaactcaatctgattaaactataactttgtaaacatgagagttaaaatataataaaatacttgtattaaacatagtaacattacacaaacaagccaatttatttgtcttccaaacattacaataacagcagttacaataaaatatttcaaacgacagaaaataattgatagtagttttgcagtgtctagaccttgcaaagggctcgcttcagaagattcacaatagtccagctccatacaacacaatattaacttaataataccataaacaaaaactcaaataatagcatatatatgtataaacactcacacatagcaaacttaagcgattgaaatttgcaaaagtggcgaagctttttcgctggcttgcaacatttgggccttatgaaggcccacttcagaagattcaccatcgcccatgactttaatattcagttcttccattacagcaccaaaattcacaaaatatttcagtagaacaaatgtattatgatctgatcccatgaagccatttacctcaaccacttttaaagtttccttaacacatgtgtaaactttcacaaattgagtccagcgctgattgaaaggaggttcataatcctgaagtaattagattttaattaagaatatatatttacaaaaagtaatattaatgagactatttaaatgaaagttacaagttaagcaaattacaaaccgttagagcttttctgtcagggttgatatcaattgtaagagtttctagacgatgaaaactcttgagcaaaaaaatgaggccaaaaaattcattctcatgcatagcagtctttaggatcaagtgtttgatatccaaataattgctcagactaaggggctcatcaatagaaggaataacctgtaatgaaaacaatgatatatatacactactttcagaatatgtaatagttaaaattggcaacaaaaaagaaatattatgtaataacaaaggaaatatacgtacctgaagtgtgtaactgcacactgtcaaagtcttagcttcagaaagatcacgaagtagactttgaagaatctcaccaagttcagaatattcagattcaacaccaaaatcaagttcagcctcctctatattccatgttctctccatctcaaaagtgcaaatttcacccgagtacttaaaaattttcatattcggtgcacgaatgaatatccacttattgataacatcacatttgtcaatagttaaactttgaagcctcaagtttggtccactgatttcaatagcctcgcagttccaacatctttttagactcaaaatctccaacaactcacatttttgaatcaaggtcttgagagttctcagggacaatctgatccaccccaaagaaagttccttcagaaagttgaaagagttgaactctgaaccaagaaaactgcatgaaaacaacttaagagaaacaacagtcttatgatcgtaaaaagccaaaggcaaattgaaattcgcttcgtgattggtcccatagtcttcatcattccaatttgaatcagaaaaatcaagccaaacaatcttcacttctctttcgatgcaaaaagaaatgcatttagtaacatgatccagataagtgtttggtgtggagattgtaagagaaaacttatctatagaataagcagaatcatcatcagggtggttatggatccaacttggcgccaagttaatgaaactgcctctgatttgaacattgttgtttccttccacgacgaactcgtcattgggattcgcaactagttgcttgtcaaagccaatgagtttagatgatcgccaaatgtggcgccaacgcttggctaaaacacatgttcttgcaccttctttgaaagggaggagagagacaatgcttgtgagaagattatcaggtaagtttccaatgacatccaaatttgtagaagccatgttggaatggttttttttttttgtttcttttttctgggtgaatgatacagttgtagtagtgatagatttgattttgcatggagtatataactgtaacaacggttgtaacgattggaaatgaagggttgcattgtttggacaaaaatggtaaattctgaaaaggtttcttttccatgtcgatgaagatttttttttaactatctatgaagatttcatttatttatttattatttatttaattttaatatcttgaggtagttttttttttt

SEQ ID NO: 99389 - DNA, 3923 bp, Cannabis sativa
tttttttttttttactttacatagttacatacaaattttatctcatctatacatatgagcgagttggctaaatttctgcgtcaacaatatttaaatatgaatttacagtaaataaataaacgacaccaggaatttatagaggttcgaccctaattatacgacaataaactactcccttttcttactatttgtttactggaataccaagataactagaaacagagtcaagtgagttttttaatattcctcaaaggattacgagtgataatttttgaagcgtagtagctctcttgaaagtatgaaatcgaatccctcaaactctgaaatgagccactatttataggattacaaatgaataaatggtattaattaaaattatttcattaatgctgattattcccttggtcctttgattgtaggcaaccataataacctgttcctcaaagatttaagagctaattttgtggatcacaaatcttgaataagtcaaaaaagttggtcgaatgccccgaccagtgcattacctcgcaaaaaattgaccttgctgatttgtgtcggtcgaatgcatttggtcggatgatacatctagtcgagtagagagttagaaagatgagatggacttgcacttagctgactcaataactctagcttagtgcattgtatgtgttagtctcccatgttgtccgtccagtctttgaattgtcacagttcgaccagtccttcaactgaccacctcatgtcactttttctaatgccacgtcacctaagtaatttttagaataacaatgtgttatcaaatggtcataaatatgttaatgagctaataagttaactaaaatttaacataatctttaatataaatgagttacacaagctgaatgaggtcagttcgttgagttttgattttagttttcaacacgattaataaatggcttgaatttgaatttaacatttacttataatacctaagttacgtgtcgctttatctaatgccacatcacccgagtaatttttatgattacaatgtgtaataaaatgataataaatatattattaaatttataagttaactaatttaacatgatacttaatataaatggattgcataaattgggtgaggtcaactcgttgagttttgattttagttttcaacacacttaatcattagtttaaatttgaatttaacaatgcctaaatttgtgaatgatccatgaatataaattgccacttctaacaaaaaaacaacattgatttaaaataaaataaaaaaatcaacaccattgtgttctcagaaacaaatcccatcatttcttccctccgctctccacctatggtctctccacacctctcatctaaacccaaggccccacccaatgaaaacttgagcgaaatgacaaaaatgctcccgcatatacccttgcagctgaaggccccgtaatataatttccccattcgtttacgatattcttgtctgaatcgacgaaagtaccccgggatatttaatagccaccacatattatagagggtacaatagtaatttcaaggagttgtacgtattataaagttacttctatctcctccactcactcctcaggctctctctctctctctcacattctctctcctccgccacttcgccgccgagaaaaaatggctctccgaacctgcactctctctcctcactcgattcgaccgtcttcttcctttccgtgcgccgcgaggcagcagatcgcgctcccgtcttcttgctttggttccaagaagaatgtgggtgtgagcttcagctccactagtagtactggaaagagagattacagagtccgctcaagcttggagacagtcgaacccaccgtcggaaaggttaccgaggttaataaagataccttctggccgatcgttaacgccgccggagataagaccgtcgttcttgacatgtacacccaatggtataaatatttatgtatgcattttcggtctgtttggttactttgaaaattcgaaagattgcttcttctttttcctcgaaaattagtttctttagtgaacagagtatcgaattgtgctatttgttaggtaattatactactttaatttgtttttgtgaatgaaattcactggagtggtgatgatatgtctgacttgattttgtattaagccaatgtcaaatactgaaaaatgggtgcaagtatgtatgtgacattaattacttaaaatcaaagtgtaatgctagaaagtttgaatctttgttataagggtttaatttagagggatgctatagtaggatacatccaaagttaatcaaagtggaaagaaagaaaagaatggatcatataattgggctataatgatatcagtttgtgctatattcaaaaggttcataatcttgagtttttactatagtgagtgactaatcaagtaatttcggcatgcttggatgctcgaacttcatagacactatttagcaaaatccaactttgtttttgtggagaaggtttcaattcagttgaaggtttttgtgcccattaatttgtccatatttttctaggacgactttatcttgatatatgaggctccataaccatgcaggtgtggtccttgcaaagtgatagctccaaagtatcaagcactgtcagagaagtacctagatgttgtctttctaaagcttgattgtaatcaagagaacaaggtatgctatacatatgagtatgactccccacttcttatcactcactcaatctcttagaactttaagataacaaggtatggttgtatatatgtatcggtatatgcttttgcttttttttttttttttgtttgattgtttattattggtaggcattggcaaaagaacttgggataaaggtggttccaactttcaagattttaaaggacagcaaggttgtaaaagaagtaaccggagccaaactagaggatttagttcttgccatagatactgtcaagtcaagctgaatattaggtcctctttcatcgtttctctgtataatgttaaggatatagtgaaaacgttcacttcaaacttattgatgatcgtacttgtatgtatttatgggatgtgtttttttctgttaaaatagttgaaaagtgttggggaatggaaaggaaccagatcatatgcttctatagaatagagaataatagtctgtgacagtggttccttgttttatctgcaatttttttcttcttacacaatgatatagcttagttgggtttcacttttttcttcttcagcaccgtatgaaacgattttatgtaagggtgtttgtctaattgaattcgcaatatattttttattttacgaagcggattttatatcttatcttacctaatatataaaatggctatctaactttttttgttgtgcacttaagagaatattatgtctttccgaatatataccaattaaaaagttaattttaatagacgccatttccattcacaagtaaagtcatacccgctctatttacaaataaattattattcacatatggacacaactattcgcaaggcatggttatcaataacattcaactaaatgaaacaaagagataatcatctcctgcacatttaatttaaaaaaatctcctgaacagtgtatagccacaagaataggtccatttggtaagaatctgaatagtttacaataattctatgagaaaaagtaccagattgtaaatggtaagatttcttctcaaatcactaattctcatctctcagatttcttctcaaatcactaattctcatctctcagatttcttctcaaattgataacctacagtagtaggaaacatagaaaaaatagatatagatttatacgaagaaatagatatagatttatataaatattcacaaactataagaagatgttggttgatttttctcgagtcccttcacgaataattaac

SEQ ID NO: 99390 - DNA, 3661 bp, Cannabis sativa
gagagagagagagaaatgaaggtgaggttttttggttttgatagaagagtattttagggttagaaaagaattagaagtatagttaaaaaatgtacagtgagggggaatattttaaaaccatgtgtaaccttttagcattaaatgtcaaatttcccattggaaaatatggtattattaaaaagaagaataagggttgaaataaagtggcaaaaatctaactagaaagtagttcactttagtgtacgaccataagtggatttttgcccaatataatattttattcatataattcagccctgagccctatttgaaacactataaaaggaacatgatactctcacctatccacttgatgccttcaaccaaatcaaacctatttttctatgtcagacaacaagtagatgagaaagttccttccttagtgatttcacctcctcaattgttcttcacattcgaaactcatagtgaatgagtgccatgcccacgcatagcaagttaagtactcaatcataatgagtaagacggtggtaaccaaatccgaaggagagaaagagatctaggttgagatcatgataatactcttctatagaaagtaaataaatatatatgacaaaatttagatatattatttaatcaaataattcaatatgatttaataattgattttaatttaaataattaattaaatataaaatttattggttttaatttaaatatatcgtatagaccaaaagttgataaagattttttttggtaagtctaaaaggattaatctaatcaatcttttctctatatcatcactacaggatagttcttgctcatgcgttgagaatttaacaacaactttgtacacacttaatctcactagcccacactagtccttgtgtgtggtggaagatctagaagactacggtgtgagtatatcaagatcaactaaggatacaacatacaaaaggactcgaggataccctcgtaggcttcaagagataaattatcaatgtcttcagtgatgaggaacatgtactatggtggatgtgggactcgttcagatcatggattagtcgtcagtttactttcagatatactatatatacatatggcaattctgatgatatggtatgatgataatcaaaaactttgattctgctacgtacctaatttagtactataaaactaataaatagttttagagcgatttcattatttagatatattatatattgtgtaaattttatgcatttatatatgtatgatatatattgtgaatggatggttatgatattgtgaatatgtgtgagatgtgaatcgttaactttttggtaaaaattgggtgtaggtttcattatttattttctaaaaaatattgcaagcctttaaagggcataataatttttatgtaaatttattttacataaaagtgtttatgatgtaatgtttattgcatgtgagcttgattttattttgaaacccgactatgcacaccataaccatcattacatggagctcgagtccattggacttcggccatgcatgaagatgtcaaccaccatccatagtggtctcgagtttcgtgcccacatgtttgtatgttcacatggaggcatgtgagagtgatggaagttggacatctcaaatatcgcgatcatgaacgggttgtttgggctaagaggtgcgatttctaacctggggtcagtaggagctctcgatccttccctagagttttgggtgtcgcagatcctcatggagcacagtaaggaattcaaatccctaaacccattattgtcgaatgaatgaaaaaaagatggtagtcccttgtcgtgataaagagagaaaagacccacttgggttattgggtctttttgacccgcctatttttttcttgtccgcctatgagtgctggtctactcgaactgcttcaccatggccaccgtggccatggtggctcacaaagctgccgaccacagtggtagaccctctatatgcaatatatatgtatttatataaatattacgcatctataatataatgtatataatttatagtatatatatggtgtatatataatatatatatacactataaattataataattattttagtaattatattattttatcggatatttattttttaaattaattttattgttaaataaatattttttaggttttagatttgaaattcaaattcaaatctataaccactttaattgtttaagactattatcatcttaaagtttaatcaaatgataaaagggttttattattcaattataaataattaaaaaaataatagtaataattatattgtcttaaataaaatatttacttaagaacaggttaataaatttttttatttaatttaagggttttaagattgtctataataactgagtttatttaagaataattaattaaaatattttaattaattttgagtcctacagagatcctacgaaattattaaattgcccatagggggttgaacacatgtgctacctcctggaggtgaagacccagatagaagcacaccctccaacactcaagattcaagctcacccaacccccactaaccaaggaagctgattagggtgcatattaatgcaattaatattaattggggtgtagatcatgtatagtgaatgctgatagatttccttttctctataattcttagacttccatcaactaaaaaaaagattagaacctttgtacgtagaaacaattctgaaatatatttataattcactctattctcaagaaactcacctaggctaccttgtgatcttgacttcaatataccaaaaatataactaaaatgggagtaggatattaccactaaaattagaatcgaacacctataacaaacctaatgtcatcattagtgtattctgtttcctatcaacgtttacatactatttgtaactcaatgtaagttgactaaaatcgtacacaacatcaatgtacaagagaaaagtaaaattatataaaacaatatgagaaatataattataaaatatgatttaataatttttttacactaatttaaagaagagatttagtgtaatgaccgctttagtaatttatattagtaaaggcaattagcactaatttctgttatttttataattatttatgaatttaattattagtgggccccaatattataaatgagtattagagttataatttctcaatttcagagattttattaaactctagcttgatcacatgggtaagtttagaaccttatttcttagcagaaaatttattggagaaaataaaataccaagtttagacggggttatagaatttgaccatgttacccccagttttcaaaaatacctaagttgtaggctaaggggcatttttgtaatttgccaagtgggtgacttagtggctgcctagggtgtggacacctggccattttaattcagaaagagatcaaattagtttatcacttttcatttgaagaaaatagagaaaaataaggaaaaagccaaaaattcaagattaatctctttctttcccttctctctcttcgaaccagccaaaaactaggggagttgctgctgacctttggtgttttcagcaagaaattcaagtgggattcaagctaaggtaaccctagaatccatagacttgtgtttttgaagcttt

SEQ ID NO: 99391 - DNA, 4830 bp, Cannabis sativa
ataactaaagatataaattttatattaaattaaaattattaaaatggggtgtctttaaaaaagtttggagtgtaaataaaatttcccttttattaatcatctataaacttaaaaataggatcatttacttacatttctctttattatttgtgtgtatttgtaaaataatctctttattatttcgggtgctttactgaataaagatctaatgccactgtttcgacgtactttatatatatttggaatacaattttaacaaatcatgtaatcaaatctttaattatcaaaatataaagaacctgaataacagcagcagcaggaaaattccgagcgcactgttccatgacatttttgcccaagggagctgccccacagagaatctccttcacagacgacaagtcgtatctccgaacaacaacactctctttggccaaagcaatcatcactggcggaaccacaaagaaatgagtcactctgtacatctccacacccctcaaacaactctctaactcaaacttccccatcgaaaccactccgttccctcgtctcagctgtgagtaaacgatcacagaaagcccaaatatatgaaacatcggcaagaaacacaagcacatgttttgtccctctccgtaccgatcctgatctgaagtcaccattaacgacgtccttatgaagttcttatggctcagaaccacccctttgctcttccctgtcgtccccgacgagtacaggagccccgccacgtcggattgtctgacgtcactgatcgggagttctgagaatcggttcgattttctgatcaaatcggagtagaaccagatttcggcgttgaagcaatgtaagttcaaattcgactgagaaggtagaattatcgccggcagattgaggtttttcgccttttcccataattccgggacggttatgacgagagttggattgcagtccttggcttggttggagagctctgttaaagtgtaggaagggttgcaggtggtggttatggcgccgagagaggcgacggagaagaaacacaccgggaaatgaattgaattgggggcgaagattagaacgacgtcgtttttcttgatgttgagcttgatcaaggagtgggcgaggttggagactagggtcttgagttggagaaaggttagggtttggccggaatcggcgtcgatgagagcggttctgtttgggtaagaggcggtggatcggaagaggaaggaggtcaacgagaggttgggatcagtgggaaagtcaacggcaggtctatgcgatgagtagatttgggtttcggcattgaaacacttcgccatggctaattacttttcaagtttttttttttttttttttaatttttgtttgcttctctggattttttttttgtatggaatttaactacttgaacggttgatggcatttacaaagaatggggtttgactatcaacttaattttgaacatacttgtccacgtggcttttttctgttggagacattttattctacggcatttcgggctgtggatgatatgagatcgtggccaaatcggatgatttatttatttatgagatctatttgttctttaatatatatgtatgactttttaatgtgaataataggttcgtaagagaagactagatttgtttttattattaatttgaatgtaagagaagactattaaaaaaaatggtttaataacaaagtcttctactcacattaaaataagaggccttcaccaagaaatgactcatcttattagcagaacatttaaaaaaacaaaaaatgacaatcatcaaatcacacgaccaaaatagaagttcagtgatgcactactacaaatgtcttacacaacaacaaagcaatctgtttcaaaaattacatcatgccaccaacatctcttgatacagcttaatgcttttttttttcgttaaaatattttatgtaaattaacataatgttaccacacagtgttaatattaacatatgtatgtatgatattatgtatgtaattaggattataatgagataattggctgttttattaattacatttgagacacatggtagcactctaataattataaattagctcattaaattatagtctataccaccactaacatttgagtctaaactataagcatatatgtgtgtagttttagtgggagaagagagacataggggtgataaggtggtaaaagggtcttttacaaagggatgctttccacaagccctctcaacacaaccgccttatttgtgtccaggtagttccattgcacaggacccaatatgaaagggtctaaattttctttaatgctttttggttttttttttttaaataccatttcaatcattttttaaatcaacttgccgttggtaatgataccacctaatttcctaatttataggctagaagtgaagtaacggtacaattctttccatatttatttatgtcattttactatttttttcaaaccttttatattcacttacctatatgactatatataaatatccaatttatatttttcatcaaaattaaaaattaaaattgtttatgagaattgggaggaaaaccattaaatatattttaccatcatctatatttctagttttcttttctttgataaaaaaaatataaaataaaagaattcgagaataatatcattcattggaattttttgaggtaaatttatcaacggttaatagaaagtatgtatttatcaacgattcattggaatttcattgtatctatgttgtttattatttttaaatctgtatttttattatatttgatctactagccatcatcaatcatattcatatctcaatttttatcattgacagtgtagttatgtaatgactacatgttagattgtttatcacactacatgagagagagagagagtgagagtgagagtgagagtgaaggtgagtgtgatcacaagggatttgctgtctgcatggcttagtagtttctaaaggcctcttttttatcgttgtcccctgtggtcatttctttgtctttaggcctgagttgacctttgtttttttagtctctgttcttttgttgtgaggtaaaagtgtgcggttggcgttttgtgctgtgtcctcttgggtgtttggtttgtttatgctgtgtgtttgttgagagttggtgaagtttattaaagttcattagtttctttttgtctgctttctgtcgggtatttatggagtccatgattgtctctaaatctcctcttaaaggcaaatgttattcatgtctagaaacattggtcaagttgtctccgagtgactcatctctcaaggctctttcctcctgctgtctctatgggaaagtcattgctcctatggctgtggaggaggcatctgttttggattttgtggccagagtttggaagaaaaaggttgctgttgtggcaatggtggaaggctcaaaatctcctaacattttcagatttagctttggctcggccgaggacagagactgggctttggctaatggaccttggtgtattcgtgggtacacgcttgttcttcaaggttggaccccagcaactgacgggccggtggtgttcaagctcctgcgtgtttggatccaacttctaaatctcccccatgagtatttttcaatagcgaatggcttcctgttgggaggtttagttggtagggtggttaaggttgatctagaggaagacaattcggcagtgtggggaaactctttgaaagtgcaagtggatattgatgttaacatacctctgtttgtaggctgttttttcgagttggcttcaggggctaagaagtgggttcaagtcaaatttgagaaaatcggcatattttgttacttctgtggctgtttggggcatcaaaggaggggatgtaagctgtcttctccggtaatggtgttcaatcaagatggtgttcaatgtccgatgtatggcccgtggctatccatctcttcgtcgtatcttgatgttttctcgggacgaattcgttctgttcgcgtggtttgatctcggaagatctggagaagagtcatgggcgcactcctctgttacctgcgacggtggctgagggggtggaagatccgaagggcaaacgagacaaccttagtcgtcgtccgaggcgtccggtgatggcgacatcacgtactgctggcaacctcgaaaagcccctgcgcatggagtggcttcccaagagctttcctgctggctctgagaaaaatttgcccatttcgggggtagacggtgtcacagaaaacctgcgcaaggaaaaggccactgttcactttccttgtttgttgatggaagagggtgaccggtcaaatgaagggtcaaaggatttggatttgaattttttaaatgatgcaaccgttagtaatggtatgggctctggggcttttactggtgggccaaatgtggttttaaaaagtgggctattggaaaataaggatgctgacgtgggccctttgaagttgttaaatgaagttaatgtgggtatggttatgggctctgaggctttcactggtgggccgattgaggctttaaaagatgggcgtttggaaaagagaagagggccaagatcagttgggccgagtttatttatgaaggggccggttactcttagtaaggagccatctgggccggtccaaagtgagtttcctgggcctaaggaaatagtttgtaataatttactatctcttgatggaaaccgtgggagcccaagaaacgacaatgggtgttcctctctttgcgggccggatcatgttgataagcagagagacgggcacccagtccagcctattacgttgctcccatccacacctcccga

SEQ ID NO: 99392 - DNA, 2038 bp, Cannabis sativa
cagagagaaacaagtgtactgttgaattatgagtttttggaagcatatttatgagcaatgaggaataaacaagggattggtattgacttttgaaagaccaatgttttccgtatgatgtttgcatggtatacaagtataaaaatctaaatcaagcagcaaaactacatgtaaataatgtatttatatatgtatcagcagctttttgtgtatgtataataacatatttgagttagtgttgttctctgtacaataacgtttcttagaatatttgttttatttcgacattgatgatattggttttatcttttttctcagaaagtagtccaaatggttcatgaaactcatccatggctgtaaaggtatcgtctttagcattttctaagagattacccatctgggttatttcaagtgcaaacatttcgtcagtttcctatgccagttcagctgaaattttccctgaaaccaacccgccaaattcatttgatttcaaacaaaatattcagtttttgaggaatgaacttgttccggatagcttaatccgggttttagatggtacaaatgatttgagttcagctgtgaagatattcaaatgggcttctctccaaaatcggttttgccataccgcggatacgtattttcagattattcttaagctgggtttggctgggcatattcaggaaatggaggggttctgtcaaaatatggtaagagatagaattccaggtactgaagaggctttttcagcattgattaatgagtttgttaaacatagtaagctgagtgaagcgaaagtggctcttgtcaatatgagtttaggtggccataatccctcaattgagacatttaatgctttaatgggtgctttagtgaaaaccaagagagattttcatgatgtactgtttgtgtataaagagatggtgaagtcaggagtcttgccaactattgacactttaatttttttgttagaggtgttggttgatactgaccgcctagaaattgcattggatcagtttaagaggatgaacaagaaaggttgtcttccaaatgcaagatcctttgagattattataaagggtcttattgccaaaaatagagtggatgaagctgttaaaacattgtatgaaatgtttgaatctgagtgtcatcctgatttaagcttttttagttgtacaataacgttgttttgtcaggtaaacagaccaaatgagggaatcaagttattcagaatgatgaaagattgtaactttgtgccggatttgtcaacttatacagtcttaattaagtgtttatgtgaagatcttttgttcgatgaggtagtctctcttcttgaagaagcaacagaaattggatcagaactgcctactgatgtggttgttgatgtaatcaacatgttttgtaaattagagaaagtagacgaggctataaaattcttagaagatagtcatattcttgaaacttctccatacaatgcattacttgcaggttgctatgggactggtaaactgtctacagaaaaagatgttctatgtaaaatgtctgagagagatatagacgattctgattcttggaacattcttatcagacatgtgtgtgagcaagaagggatcaagaaagcctctgagcttgttggtagaatggttgtatcttctttaactcctaattgtgacacttactcatctttagttttcggaaactgcaaattgagcaagtacaatgatgctatggaattgttttataagattaaggccaaatgctgggttttagataccgtatcttatgctaagctagttgaaggcctttgcagccttggacggattcaagaggctgctgaagttttctcttacatgtctaataagggatgctctcttcagtcatcttcatttaatatgttgattaagggtgtttgtgacactgggcatctcaccgaagctttaaggctacgccaattagcttattattcaggtacttcttgtactagttcaacttatacgatgattatgcgtggtttgttaaaagtaaacaaaccaagagatgtctc

SEQ ID NO: 99393 - DNA, 1730 bp, Cannabis sativa
atatctctttaagattagttccatttagtttagcttttataagttattttttaagttttagaattaaaaaaattcttctagtaatgttggatgaaaaataaaaaattaatttttaatttaattaaaagttttttttggaaaaagctaagatttacccaaaagacttttaaaaagctaattttaaaagtaaaataaattacatgatttctaatttattcacaattttttttttattttaataatatttaaatactttgaaaaatatttttcatatttttttttacatataattgttatctaaactgtaaaaataagtcaaaatttatacttattttatacttctaactataaacaaaggtagaagtttagccatacgagatcatatatatataacaaattacatatatatctatattcctaaaagaaattataattagaaaagagagaaataaaatcttgcagatatagcatgcatgaaaaacgtacatacatataattaaacctaattaaatgaattaaatcaatccaatttatttctatatattaagtcaggtaaaacccggataagcacacattgaaataaaagattaacaatatacagaatatatatatacatatacttcattaatatatttgattttgtactggtctcagtatctttggatctgatcttgtgaaaagtacttttgagactttagagagaaaagaaggagtgattttgtagtgggcaaaaattccttgtccaaaaatcttaaatgaatcattccaactttgaaagagaaagatcatacgatcatttatcaatgtcaaagaaaagatataggaaaataaccagcaattgcacatgatgtatcatagaaaatcttagaagatgttagttgggaacaataatagaagggtttgggttggaccactgctaatatatatatattttaacaagcaccaaactatatgtatgtgtccctggctagatgacaatttttcacttattattactatttacatgcatttatataatatacgattaaatttatatatgtaaaaaagacatatatctatgtgtgtgcagtgtactaccaatatatagttctgtacaatatttacatttgcacgtcatgaaataagtatgcatatcatacaaaatcttggatgagattttttgatgaagacactagaagttaattaattaatggtcacaaatagtttgcatgcatgcatttatacacatatatagtcaccacttaccaaaaagggcaaggctagctaattaattatgtattcgtataaatatacacatacattttttctaaacatctaattggcttttcaaaaataaaaaattattaaattggctaacttaaaaatgtacgttcaaaacatattatttatatatttcttatattcatatccatagagagaaagaatcatatgaattatgacaacaaatcaagttaattagaaatcaattctttaccaggaaaaaaaaaagagttagaaatcaatcaatatcagtagtaaatattacttactataaatatataacagatactcacatatatataattaaatttatatatataaccacatatatagtgaagtaatgcatcgatgtatttttctttttcagtaccacatatatataggggatcccaatgttccaagaaaatgacatgtatctacttctcaaagatgtctcttaattatacaagttggtattaattaattgatca

SEQ ID NO: 99394 - DNA, 2500 bp, Cannabis sativa
gagagagagagagagagatgttttcaatgatggggtaatttaggaatatatgatttgttgacttatcttaccaatattaggtattttaagtttaggaaaaaaatttccccctatgtataaaaaatcaaatttctctttttcattaataaaaaactcaaaagtaatggattttaaaatgtagaaattacagaaattataagaaatatttaaggatttactttttgtatggtagaattaaataattctaatggggtatggattttttattttgtttaaaatgtgaatgtatttcatgtcaaacgtattagctgctcacggtttggctaagtttactttaagggtggatgaagcttgcttttgatcagattgtattcctccacctatgaactgttgttgtacttatcaaactaatttataataacaagttttttcctaaaaaaaaatcactatgccgaactagcttatatatctcataaacaaaatgaatgaaaggggtttcacctttggaaagagatctctttcttaatccagtacaacaagcaggtaataatacaagaaattggcaaataaaaaaattaggggccagttccaagttcaccagccaaagctcaagcatttacatctttattggcaatcacactatactttcagcaactcctgaaaaaacaagcacagacatagacttcatatatgaatacaattgaatatgcctaatatgtaggcaaatccaatagcaaaatggtatgatgactaaaaaacaaaggaatgtagatattgaatagctcaaatttgaaattccctcaggacaacaataattgtaagccttgtaccttctctttctgtttgaaaatggtctcaatcttcttcatatactcatctatcagtttctacaccaaaaattaatgtagaaaaattagcaagaggaaatgaaacaaatgacttgaaaagaaataacaaaagaaagaattcctctttctttactagtctatagatacccctagagattgaagtctatagagagaaacaacacaaatgtcatgttacctgcaaatcactcgacaagtccttcacattatcttcagagagttttttctcctgcataaatgtgtgaaatcaagataacaaaggatcctagtcaaaggttaaaaaaaagaaggtacaagatactggaaggagaactgaaacaaaggtggaatctaacgcttcaaaccttttcaagtttttcataggcctttagagcatcccttcgtatattccgcaaagccacctacagcataaagaacacgtgtgactttagaattgaggcaattaacagatttcaagttgcacggagaagtttcatcatgacagccatgtagacaaatagaaaagggaaaattaacaagagagtatgatttacagcatatggttagtaaactaaacctgaccccaaatcataaaaattttaagatgctgggcaattacactaatttcacaacaaattaaaaacatttactttctaaaagtaaacaaaatttgtaaacttacttttccttcctcggcctgttttgctacaacttttgacaattcctggattcacaaaacagcaataagtcaagcatgcatggaggagtcaaatgataagaataattcagattgatgcagaaccaactaagcaccatgtaattatagtgtaagaagatctttaatcaagaggaggtaccttccttctgtctgatgttaattgtgggagggacaatcttataacatcaccatcattgtttggtgtcattccaagatcagaactgactattgctttctctatagccttcaagctgaaatatagatgattacaagaattgtaaagataaaacagaataacagagcctacatatagatttacaagatgcaattgtcatacaaaaagctttcttgctttgaggtgacaatgagaaaggaaattaactatccacgccttttctcaatggcaagcatgtatttaatatttattgctaaaaacagaattagaatgatatgctggtattgtgaaattccaactgtttttaaactatacacatatatgtctgtggaatacctggatttgtcatatggctggatcatgagggaacttgcatcaggagtactgatttgagcaatgctcttcaaggtaactggtgttccatagtactccacctagaaaagcaacgataaagagatatttcttagtaaatataaggacaaaatctaacatcagttaacaccattgatctacatcatgataacacgaaaagatgagtgactcataaaacagctgttgaccaggagctctaataaatcattttatggagaaaagttacttgcaataagtatacactaaaatgatagataagggctgctgtaaaaattactaagttttgatacagcgtcttcatattatacaaacaaaaagagtgtgtgtgtgcaccataatagaacatttgttaaaactatgtttctcctcatgctcctccatacattacaa

SEQ ID NO: 99395 - DNA, 5359 bp, Cannabis sativa
agtggcaatttgtgattcaacattacattttagttataagtaatttttttgtagtgtccaaaaataattttagtcataaaaatccttggtgtgactgaaaattgtcactaaatgatatcttatgtcacctcaacctgaactagacaaagaagggtttttataagtttgaaatctctaaagagaaacatccaccaactagattcggccatttatttaaaattccacaggtgcgttaagctggtagaaccctgctcaaaccagtagcagaatagtaacaagaactaatagcacagtagccaaacaacaaaccagacaagaaaatagtaggaaattatagaagattgatatatgtatgagtgaagcaactacaattggtgggagcccttaggcccctttgatgcaaatagtgactactcaatacattgcatacccaattctccccttactcgcctatatatagaacccattctcactcacaaaccctccctcaaacaatgactcaaataccctttttatttaatacattttagctcaccatactaactctagggcctaacataagccagcatttataaaaacttatgaacagagaacagagagaaaataatgggtcaataatatttttataacttatgtttagtttgacctcttgtgattgtccaatttatactttacatttggttattattaaactatgtaccaaacgctacttttgaccattaaccatatgtatatatattttttgatgaaaaatatattattaacggaacggaatggaatctaaaatccaagttttagtttttaatcttctcattcaatttagagcttatttctcttttgtcaagaaaaaaaaaaatggcatatttctcttcacctatgtgtttaattttagaggggtaatttggctcaccagtgctcaaaaagtgtgtttaacttcaagagagcaccaatttgtcatgagttttagaattggaggataatcgtgataattacccaaaataaataaagaaattgaataataagaaaattccctgttttcaaccaacatgaagggaaaaagacataccttcttgttcacaagaaaggttcctttaactgcatagccattgtaaaacatacggaactgtatcaacataggctacagagggaaaagaaaaacaaaaagtgaaagaatttagctggagaaaagactaaatcggctcaacaataatatcagtaaagatataagttgaaatagagagaaagagagcgacaatggtcataattttgatttttaagtacatacaggctcccgtgtcccagttccttgccgttctatttttgcaccatcctccactttgtcatcgtgttcgtcatgattttggattatctgacagcataagaaatgagcaagtcatattgaaaatttgaatgtgtcaaaaaatgaaaatgtgaatggcaaaggctattaaattaacagtgactagcaaattaagcagttatttgagtaggtggcactgcaagcagatactaaacagtattccagatactaaactagttattgatgcaagtgaatttggttgctatagtttcataaataaaactccaaaatatatacttcgaaatatttaaaaaatatgcagataccgtgacgtgccaaattttttaagaagaaactatacaactccgaaacttaaattttgaatgtctctagaaacatataacttggccagaacgattgtccttgtctgcaaatttacttccaagtgcaatttaacagataagatgaaatgaaatagtatcataagttatatgaaaaaacctcagaaaacttattgttgttatattgtcctttatgtacattctgtggacataacaaagctaaatcctcagaaatgtacccagtgccatctgtgtgtattagagcttctccatctcttttgacaatttcaccaaattcattctgcaattaataaaaagaaactttttgcttgaaaaataagccatagctaagaaccaatataaattttaaagactaattatggactgcaataccttgcagggtagatcatcaataaaatcaactcgaacctgggatagatcaatatccatgctatgtgtcttggacaatacaagtgaaaacctgataaacaacagcgatattagttgaacagtataaactgcatggaaatgctttcggaaacaaactgtgtacattgaaatatacctagcatcaaatttggccacattgggtactgtatgcgcatgcataaacagaagtcttctatcaaacattgttttataacatccattggataagatataagatgcattctgatcgatgtgcgcagtggagtgagtgcgaatgaaaaaacactttacaggggatgatgttggacttttcttcttctcttccttaccaccatctttaaaaactgatccattttacaaatacatagatcagaaagattgtcaacattgctggaatctcaataatagtacacatatatagtgaaagaactgaaactttgagcatgagagatcgagagtaagtatgaaagtgccactaatgatgcaaatgtgtgttattgttttctctttcgacagtaaacagaactttattaatgcagttcaaggagggttcaccgaaatagcagtaaagacgtaaaccaactaaaatcccttctttgcatatatttctaaatccaggatagtttggatcacgtgaagtcgactcttcagcaaacttaaccgtcaaaacgttgtcatcccctagaaccttctgtaagtgagttctggtactgtttagataaggaccctgaattaaaaatcaaagcaaatggcaatttagtgtattatgttaccatgaagaagaaaatcacctcgtatgattttagtgcataatattatgaagtactacacgaagctaattatatgaatttcacaaataaaaaatcgacgtatagttctattgctctagaaataatacaaatagctcaaactaagtcagtgttttaaagaacacttagcacttttaatacaaaagaaggtaagtcataatacagaactcatttctgatatgcactgccgttggctcctttgcatgctacacaacaaatgagaaataacaaaaatcaaagctcaatatgatgaagactaaagttttcttttgttcgagccaaagtgattttaaagtaaacctaaaatcaaataacacaaacattaatcatcatgtgtgcaactgcaattaacaaaaaattgtttatttgtatcatgtttccagtagctttagaaagaaccaaccttgaatctataactcccttcaggagaaacatgacagtagtaaaggtgtgttcttctagaatcccaatcatgatgctgtaaaacaccaaataaaagtgagaaaaacatacccgaacaaattatttatgcctttgtaagaagagataaacaatagctgcacccttttttgattaaacagagtagtgttcctaaggagaaagcaaagctagaagaagaaaaactctttttcaaaaaaaaagctagaagaagaaaattgaatgaaaattttgtaattcatttttctgcagatcatatatacaactgaaagaataggaggaccgaaatagaagtaatcattcaagacagtttatagagaaatattaattaaaaagagcaataattgatatgttaccattagacgatcttgtggttccaaagcatttcttccaaaacgtttccacatttgcttttcaaactctaccatggaaacatttttaaagctcctgatttcttcgtcagttataactgtccgaaattcctttctacaaagtacatatacaaacataaatcaacaattcctaattccacacaaacatgaatgaagagacaaattgcaaaatattagtacccggcactgtaattgaggattaagaattgccttctaaactcaagttctcccaaagcttccaatacttctcgttgtcccgtttctctgggcttttggggggtctcagtccgagaactgagcgagcaaggaatggagccactacctgtttcagtttcaccatgaaacgacgccatagggcataatcaagggcattccaagagagagagaaaaaaaaaaaaaaaaaaagcaacagtgactcacactcacttgcggaagtggaagagaaatagattcttcgagttggagaataagaaacagagactctcttccgaggaggagaagaacgagaagacgaaagcgaaggagatggagaaaggaatggtgatgacgacgtcgacggcgacggcgacggcgatgaagaatttccaagcaggtcaacaatgtaagcggagaggttcccgacctggtctctatcaacgatctgcaaaacctgtagagcttctttttcgccggctacgaccaatttccgccggacatcggctttcggcggggactggttcttctcggagcaaattttgtgaagcaaattctctacagaacgaggaagaggcagtcccacgcgaagctcagcatcatcgtaaccatccatggccgatggagagagagagagagagggagttgtttgtttggcgctggaatttggatttggttgaggagtttaatagtaatataatgaaagagtgtttaaattttgaaataaaagggttaatgttgatgatggtgtgtactgtgtagcagtgagtagtgaagcgattgattgaaaagaaggaatagcagtgtagtgtagtgtgtcagtgtgcagggaatcactctgtagtgtgtggtgtagtaccggtaaagcacacactacacactagagtaccagtagagtcacagactatatgtgaaaataaaacacaagtaatagtcagtcaagcaggtagccttagtggtagtgatatagtggtagtgatctattagtttcacatgttttttttttgacatgttgctcttccttttagttatttttagttacgtggagtctggagtctggagtctgattgtttagctttagtttttgcttttcaaaaatgctcttttttttgtaataggctaggtttttttagtttttttgtaatgagctaggtttttcaatttttttactagtttactttctaatttttctgaggcatctctagttcatatctgtttgtcatgaattagttatgcatacacttagggtggagggtgaattaacttagattgagaattttatcatcttttcttattgatttgtattaaactctagttcttgttaataagagtttaatttttttttaaaaaaaaaaacacaagtaatagttttagttagggatattggtggctaaaccacctgaactttacggtttgtaacacttaaccacaaaaaccgaatttttggcggctaaacta

SEQ ID NO: 99396 - DNA, 1173 bp, Cannabis sativa
aaaatagtatttacccaattatctttaattaccatctaaaagggaaaaattactattataatataacatattttattaatgatatttataatgaattcattaaaaaaaaacattactttaaagacatgaaaaagtcagtcaaaattgacattaatcaattgaaatggcctcatcagggctatcaaattttgctataatttaactacacagataatccagactttcataactttgctcatgtaaaaaaatagtcttaattatcacttaaaaatgccaaattccctaaaaaaaccagaataactaattgcaaatttcagcatatcatgagctgagctgctgcaacttttgttgctcagtttcttcaaactcatgacgacgatgataaaaagatttcgagacagggtgacggggttggctcagcttatagagtaaagaagattttgtgtatagaaagggtcaaaatatctgtattgttgggaaagaaaagaataagaattaaacaatgacacaaagaccaaaagaacaccatttgtataacggctttcgcttaaacaaataagctaatgtcagtcaagactcaacaacataagcgagaagttttacccgacaccagctgatactatctaaatgttgtaactattgatataatttgttaatgttattggccaacgatcgactccccacaaaattctctctattcctatgaagcttgtaccaatccacaatggttaaatagccgaaaaaagaatagatagccagggcaattgatagtgagacttgggcgagtggctgagtttaggcttaaaaaattacaggtctttctttcttggggagtgtttaggcatttaatggctcttcttctttgttcttgtctattgctgtccattcttcggtttctgtgatgcaatatatgtaagcataatcaaagacaacataatatgcatagcataggatcaatttgattattgttgtctttgtaaagatgtcatcaaccataaatgacttgtctttaatcctattatatctgataattaattacttcattacttacttgatctgtgactctctccgatcatcatgagccgcctttgcagcacagctgctatagcaaggaaaatggagcacatgccgagcattatagtgatgggaacagcatcaacctttacaagggaa

SEQ ID NO: 99397 - DNA, 5022 bp, Cannabis sativa
  modified_base (3964)..(3969): a, c, t, g, unknown or other
gtacgtttctactttttaaccttaattaccccgagatcaatctcaaccgtcagatcaaataagtctctcatctgacggctgccatacatcacggaatgcatttcgtgaaagtacaatcaacgggacaaaatcatatccctatatattacatctataatcaaaagttaaaactaaaatattaaattattcaaaactttattattcgttatgacaaatgacaactcttgccatcacggttagcctaatcagtagcttggaacattacataaagcatatttagcaaattaattatctaagaaaaaaatatttgaggaggaatttaaatatcttaattaatttattttaccatcttaattaatttgtaataattttattcaaaaaaaaattgtaataattactattcttttttctacaattattaataattagcaaattaattgtcttaaaaaaaaaacagcaaaccttttatttattaacaacgatttaactatacatataaaatttgcttctcaaaaaattaaagaaaaagagaaaagaaaaaacgacaagattgaaatcaaacgacactattgaagaaaaacgacaaaaatgtttagggaggaatttgaaaatcttcttcttcatcaacacgataaacagtaatgatgataacatgtcgaggaaaatcaacacagaaaacgatcacatcaccttcttcgatactccgttcatcgacgaatttcgaccatttatcatccaaatacactgcttgatcatcatcatcatcaccgttctcggatctcaaactcttcttcagcctcgtcagaatctgtatatgttcataagtctgatccctaactcgaaccacaaaactatctgtatcaatcaattcaatctcatcaggaagctccaatcgatctccgctcagatcttcttcgctcaatttcttaacacacagaaattgccgattctcattttgatctcgatcttgattttcatcttgatattgaggcaggggaggagtgagagtacggtagtagttgttagattggggatttaacctgattacagtaacgttaatgatgttaggaacgttatgaacgattctcaagagaagaacgtctccgattctgattcctcgatctgctacgaaagagttccattctggtccttcgatcttgacggaagtgatgtcgccgttattgccggttgagaataccggagtaacgctgcggacgccgatttctgaagctacgtcgctgatgtaaacggttgatctttgaactggcggaagagaatcgattgaagttgcgagtggatttgggagaaggatgttgttgatttccttgactagagttccgaacaggagatttttgtcttcttccattttcttgaaattcaatcaacaatggagtcttcgagaaaatgaaagagaaagtttcagagagagagagtgagataaatgaagagtgttttggtttatatatgtatgagatttatgagaaatgtttgtttgaattggattttcttaactgattttggcgccaatttgttaggatttgggaatcaaaacagttatgttagttattttcattactctgcccttttattcaaagccaccttttctttcttcatttctttatgagcattgatattaggcactagtggtgcctagaactttctcgacatatcgcattgcgattagctaccgatactccataaaagctattatattaaattatatggaattcgatacttagttggaccaataacgatactgacacataagaaggtattaggtatcactagtgccctttagcatttctcttttaatatatgcaatatatcatagtttttttcagaagaaaaactatgttattataaattataacaatattatattataaggagtaatattaagatgatgatttggaagagtcttcaacatcaaaatatagatttcaaaatggtactaattaaaaaaaaaaaaaaaaaaaactgcgccaaaatttagtaagttcaaattcaaaatttaaagagcattgttattaggcactagtagtgcctagcacctagggccggcccaagcattttagggattttgtgcgaaattttaaaattgggctctttagaaataaaaaaccgtgtatattaagaccacaattctattactagccttttttcttttaagattcgttcattaaattttcaattataaattttttatatatgtatatataatataaagaaaaagaaaaaaaatgtaggcattttcttttaaaaaaaaaaatattaggccttaaaaaaatgggagtcttgtacaatggccctagttgtttgggtcggccctgctagtacctttttataggtggtacctcacgattgattagcgatatttcctaaaagctattttcttaagttatattggactcgatattttcttaagtttgccatatttattagggtaaataacattttagaccctgtgttttgcaaaagttactgatttgaccctttgttttgttaaacgacaaaatcgactctgcattttccaaaactataaaaatatgaccctgaggctgagctcaatttttaataattttttttaaatataaataacttgaagataatttctaatacgaatagatgcagaaaatataatcaattttgtcataacacctctaaatcaaattattattaaattttattttgacaaaaattttagaaaatacagtacaattttagaaaatacaagtctattttgtcatttaacaaaacaaaagttcaattaataacttttacaaaactaaaatagtatttactctatttattagcaattctcaaatttaaatctaaactttatataaatataaattcgaaagaaaaataactaacataacggttttgctcaaaattggcgccaaaatcatatcatcaaaacattcaatcttaattttcaagaacaatggagagtaacaattcattactgtttggaaatgtagtgaagaacatcaacaacttcattctcccaaatccaatggcaaattccattgaatcaatcccaatcatcatcagcgacagattgttaggagacaacaacattcgcagtcttaccccggttttcacacccctaccaccggaccaaggcggccgcggttttctcaagatcgaaggacccgaatggaactccttcgtccgagatcgcggaatcagagccggtgacgttctgctcatgaaacttgttcatcaaatttccccaatcatcaacatgattatcaatgtcacagtgatccgattagatcgccgtagtaatcgaactctgattcctcctctgcctcctcctcctcaaattgatcaacagcgatcgtcatcttcatttctgtgtgtgaagaaattggacgaagcagagatcggtatcgatcgaatccagatgccgagagagatcggagaaggaataaggagtcatggagatttgatcgatttgaaagaggatcgattcgaggttgttgtgaaagatcagacggttgagaatatcgagattttgacgaagctgaaattgagatcagaatcagatgatgatggtgagatttttttgggagatgattggttgaagattgttgatgatcgtggtcttagagctggagatttgatcgtgttctgtttcgatgttgatcggagaattattactatgaatgtttatcgttctcatcaacaacatgatttctttattccatttcaacctcaagctatactcaactctgaacttgtttatgtttaattacttaattaattaaatcttcatcataattaattaagttttgattagataattagtagtacatatatgtataggattaattctttagtgaaaatttaggatttgcatgaaatgtacatattattttgggattatttcacaaaaacataaaaacaacaacaaaaaaaaaaattacaaaaatgcggtttcacggaattttaaatattnnnnnnattttttttattttatttactaaaaataagtttttttatgttgtaatcttattaatttgttgttgattttttgttgttattttcatgttacttttatgtagtatttttgttgattttatgttgttttcgtattattttttggaaaactgtaaaaatgtaaaaaatcattatttaaatgtaaaaatgtaattaatttatagaaaatagtgccttatgaaattattcatattatttattgtgttttaatttacatcattaaatctttagaatcatataatatttcttgtgataaactaggtttcaagctttgagtttgatcttaaaggttttgtctaaacaacatgtcgtagctttgagtatgatcttaaggtttgtctaaacgactagtcgtggttagattaactagcttgtagattggcaaaatgaaaacatattattaatttgattaatttgttgcaatatatatattaccaaatcttaagaatcatatgttatttttcaatatatatatttatatatatattaaagtctttacaagcaaaataggaatataggtgttacctagctatgaatagaaaaaacgacttgtcgttagatcaactatagcttgtacatgatacaaattacaatattggcagaatattatgttactcttaattattatgtcgttttttgggattaattagtagtaatgaattaatgacctatttctaaatgttattcaaatattttttttatacaaaacagtaacacccctgaattttgaaaaatacagttcgtgtattatattaaaaattaaaattaaaaaaaaaaaaatagacaaagaagtaaaagaatggttgtttgtgttggattaaaatcctgttgtgggcacatatgtataatgtatattctattataaagtgtgatacaaaattaagtgaccaattatattatgggtatcaaaaggatattaaattgtcttaaaaataatgtgtagataacataagttaatttataatttgttgaggggccaaattataaatacccaaaactcattctaagatgagtcta

SEQ ID NO: 99398 - DNA, 4533 bp, Cannabis sativa
cagttacactaactgtctattacatccccccgcaaactaaagggagtagaaaccatctttagtttggatttcaggtaacaaaaacgatcagtggttaaggatttagtaagaatatcagctgcttgatctatggcaggaacgtagcagactgaaagttgtttggcaaggatctgatcgcgaacaaaatgtaagtcgatttcaatgtgcttggatcgagcatggaagacggggttggcagcaagtgcagtagcactttgattgtcaacccatataacaggacattgagcaatagggacttgaagttcaccaagcagagatttaatccatttgacttctgccgcagcattggcaagagcacgaaactcactttcggtgcttgaacgagcaacaacttgttgctttttgacggaccagctgatcaggttccctcctagaaagaccagatatccaccagttgaacgtctatcgtcaacacaactcgcccaatcagcgtcggagtaagcatgaatgactggtgcaggagctggttttatgcagattccctcttttatagtaccctttaagtagcgtagtaacctcttgcaagcttcccaatggagagtagtgggggcttgtaaaaactgacttaatttgttgataataaacgcaacgtcaggcctggtgagagagagatattgcagtgccccaatggtttgtcgatacagagtgatggcagcagctggtaatggttctccttcttttaaggacagttttgtggtggcactagcaggattagcacacggcttggcaccttccatatgtactttgagcaataagtcagttatgtatttagtttggctcaagtgcatgcccgtgtcatcacgataaatttcaactccaaggaaatagtgaacttgtccaaggtctttgagagagaaacattgatgtaactttgagacaaacttagtgatgagattgacattcggtccagtgaccaagatatcatctacataaacaagaaagatgactaagtttgatcctgatccataaacatagagggaggtatctgacctggaattgtgaaaaccccatgaaaccaatgtttgccgtagcatgtcattccaagcacgaggtgcttgcttaagtccatagatggccttatgcaatttacacacatattgaggacactccttgtcttcaaatccaagaggttgtttcatgtagacaacttcatttagtggcccatttaggaaagcatttgaaacatctagctgagaaaccgaccaattgttggaaacagcaagggataacacagtgcggactgttgtgggcttaaccacgggactaaaggtttcgtcaaagtcaatgccagcttcttggagatatcctttagcaaccaatcgggatttatacctgtcaagcgaaccatctttattcattttgactcgatgaacccacttacagccgattacattcattgattgatgataaggaactaaggtccatgtctttgccttgcgaagagctcccatttcagtttgcatagctttattccaatgtggattagctaaagcttccttgagagtttttggttcagtaggcagaacagactctggtaaaggatgcttggtggccatatacgactttggtttgaaaataccatgttgtgatctggtgcgcattgggtgagttcgagtccctgtagtggtaacttgtggttcatttgtagaatgaggtagaggagatgggtgagttggtgcatttgggacagtggtgttattaggagggggttcataattgataatgggattttgtggttcagtagagggtgatgggataggtgtggaatgtaagtcaggatgtgtttggtgagatggggaaatatgtggagataatggtctggtggtagagtgagatggcagtgggttattttgagtgggtggagattgctcattaacaaatgaaccaaagttgtcaccagaaggcatatttgggtgagaaatatttgtaacagatgtaacagtaggaaaaatagcagtgggaaaagagagggcaggggaatgatgtacctgttcagttgagccacatgatgttgcaggaaataaagtttcattgaagacaacattccgagcaataaacattctgccttgtgaattttcacacaaatatcccttatgaaccgatgaatagccaaggaaaatacattgctgagatcgaaattccattttgtatttattatatggccttaagtgaggatagcaagcgcatccaaacggtttgagtatgctgtagtcaggtatttgaccaagaaggcattctaggggagattgttgctgcaatacaggagtaggaagcctgttaatcaagaacgcagctgtatgaaatgcatgccaccaatatgaaaaatccaaacccgattgagctagtaaagtgagtcccatttctgtgatgtggcgatgtttacgttctgcccttccattttgttcactagtcttgggacaaggatgagtaaactcaattccttgatcattgaggaacctggcaaaagggcggtattcccctccccaatctgcctgaacccgttttatgggaaggttaaattgcttctcagccatacttttgaacttaataaaagtatcaaaagcttgggacttgagtgtaagtggatagatccatgtaaatcgactatgatcgtccaagaagtgaacataataatagtaaccatctttagacttgatatgagaggggccccataagtcggtatggatgagttcaagaggttgggatgctctagaagtggatatagggaatgggagcttgtgactcttgcctaattggcaagcatgacaaaaatcaagttgacttagagaaccagtagatggaacatgctgtaatattttgtttaatacttgtttggacggatgtccaagccttttgtgccaagtattgatgttatgttgagtactagaaagacaaatagtgggagagctatttgaaagagcagtcattttattgattggagtagaattacatgtaacattggagacaatgtttttatcagaggcactagtacacaacatagcagtaggattacaagcatagaccattgattgtggggactgagacatagccggttctttgatgttatcagcaagcaaatatagcccatctttaagcattcccttgagcagcaccttcccagtttgcttgtccttgacgaagcaacatgttttatgaaattcaagaaacacattattgtcacgagttagttgagaaacactaactaagtttttagtaattgagggaacatgtaagacagattgtaaacgaagtggtatagaatgagtagactgcaaagaactattgccaatatgagaaatagacaatttcttaccgtctcctatagccactccttcagatccattgtaggtgactgctgtatccaaattttcagcaccagcagtgatatggtttgtggcaccagtgtcgacaaaccaaccagaatcgtccccaaaatcaggcaagaacgatgtagaatatgcttgcggatcatagtcgaattcatgctcagtgacaaaggcacgagggggagggtttgatgaggtaccaggtggatggttggcgcctggtttgggtggaacccaatttttatcgaaacgatagtggcacacaggggcagtgtggccaaatcgtaagcacagttggcattgaggcctattattctgatttggtccacggtatccgccacgatttccattcttgaattggtgagggggtctgtacacattggttcttgaattggagaaggccacattggcttgcaatttcatgttgagatcagtaatggaattatgattttccagtcgactttcatgtgaaagaagaagggcctgcacttcttctggagttaaagaatcactcctcgcagtaataccagacacgacggaatcaaattccggaccaagaccgttgagaagctgaagaatcatgtcttggtcagagattggtgaaccagcaatcgcaagagaatctgcaatggactgcattttgtcgacataatctgaaatggaaagaccccctttcctgagattcgaaaattggcctttaagctgaagaagcttagctttggattggctagaaaaacgctgctcaagcgcacgccaaacagaatgagatgtcgtgaagtgggcaacggaagcaagaacaccctctgtcatggatgctcgaatccaagaaagcaatagttgatcttgacgtttccattggcgaaacaatggatttggtccaccagtgaccaaagtggctgggggaggattatcagagagcaagatttcatccaaatcatgccctataacagttgggagaacctgagatttccatgacaaaaagttagatctgtcaagtttgattgttaaagttgtagaaagagagtgtgagaagggattccaagaggaattttgttgatttaaaggagcaccggtggcctgagtgaggaccggagaagacattggagctgtgggagcttgagagggatcagttgacgtagactccatt

SEQ ID NO: 99399 - DNA, 3762 bp, Cannabis sativa
  modified_base (3704)..(3704): a, c, t, g, unknown or other
tggctgttgggtcagccctcgtttctattatgccatccgggttttaacggtttctaatgctccaccgcctctcaaaggcaaagctacttcattactcacactatcaatgctcatcggtactctctattcatgttttttgataatcggtattggaggagccagagctggtaagaataactttgaagctttgtacatctccatactcctgctgagtatggcctggactatgcaagtcatcaaatacacattactagctacaatcacaagagtcaagtacatgtacctggcagctggaaatgatgttgaaacaagcttggcattgcgtgagacggtcaagcagttgatgggaagcatctgtgcagggtcattccttgtcccaattctcggtggggtgtggagttcagctagagccatgaaattggctgcaggggacactggtgaattccttttttcatgtgctgactgctacgcagggtgtgcttccacgctagtgatgtatgggaaccgatggggctttgttcatgttggtgtatacaacaaggggattatgcaggcttccatagatgtttgggagttgtttaggaagatcgaattggaacctctaatcaattcagatctgaccggctcattctgcttcctttcgggtgtggcagttggggcaacctgcagcttggtcggcggaatatgggcatttgtaattcataagagctatgcaacagaacttactctctttgctttcttcattggttacttcatggtaattagtaatggttcatagaaacgaaattttacttaactaacctttgtttcttgtagttgactttttcactgttgttgcagtgtcggatagccatggcgtggcaacaagcatgcgtcactgcatactatgttgcttacgcagagaacccgcaaagcccccgatttgacaacaccattccagatcgaattcaacggctgcgaagacttcaagcctaatgatttcacaagctaaggaagaaccccttcctacttctgtacatatattgaaattttgagttttaaaaatacacatatatacatttacagatttattctgttgttttgcacattttttcctgttcaagtattcattttgtattaaggaagagatctgatttagtattctgtaacacagctgtaagaaacgatactcaaatttttatttaagtttgtagcctcacaatgcaatattttgtgtagattcatgcttgttcaatatacagaacagtagatacaaacctaaaccgagcaatactcttatgccaaaaaacaaaaaaaggggggtagggtgcattacaatggcacctccagaaaattaatcaaaggctacaagattgtaagaaatgtgaacttgtaagagaagatattacagtatacaattaaaagaacaaatccatctaataacaaaaagctttgaccgcccgtcagttttatcaaagatggcctcgccctccacactccgaacacataatgttaccactgcctccacaacctacacacatagtcaagattaacatattagaaatttatcatcttttcacctaaatattgtgggcaaactacatgttcgacaatcatatgattaaaaaaatcaactcggtagaggctcaactaaaggtatttatatgaatttttcatctgataatccttcaaacaaacaatagtatctggctttgtaattctcatataagtgcttattttcaaacgagagcatgactatgaaagtgagaaaagccttgttaaaaattaagtaaaacataatatactacaaattaattgttaagaaaggaatacaattttgaacaaattatcaaataactgtatctcctttttggattgatctacgccacatagatgatcagcttcatgtcgctgctcatagtgtctcttctttttctaagcaggaccaaatagagaaaacatctttatttaaatctattctaaacaactagatcatcgggtttgtagaagcttccacataacttatattttccagcagaaagtttttcttttaactttctggtttattctcttataaacctactctaaagcttataaatcctaataagtaacaaaattactgatatgatttgaagtgtaaatagatatcctaaaaaatttatgatgaaactaaataagttcaactagtgaacacaaaatgctaataggttttctaagaagtgaatattaatagcaagtaaggatattcgcaactcgtattaagcacagtgataatgtaccattcaagaacacaaacaatgtgtttcaagcatcatatcaaaccccctattaagcacattgactcaccattcgagtcaaattaaatgttctatgtcatcccagttgtaaaacatacattctataaccataattatagagaagagattaagggggtaagttacctaggcatctgactttaacaataatgccttggctctccaatatagagtcaacatacaagcctgaaccacagcaagtggtacaaaggacagcacccttggcatggcattcattgcatctgggattgtttccaattgatttttcagccaaagatattccaacaggcttttcaatcttctcctccggtatagccttatcataacaaaacaaagattcaaggctgcttcttcgttgatgagtgttcccagacgatgaactcgcaccctgtaccaattcatgtatgcattattttttaaggcaaactacactatataacaaatttcaaaacacataataaatcttctaagttgtgtaaaattcaattcaaatgagccacacagagtttggtttggtgactaaagatagtcactttctctacaatcaatggtattcactttgaaatcatgtaaaaaattacagtacattgcaaaacacataaacttcaatccaaatgaggcacacagagtttggttaggtgactaaagatagacactttctaccatcaatggtgttcactttgaaatcatgtaagaaaaattacagcacattgcaaaacacataaagttgaatccaattgaagcacaaacatttgttttgctaaagatagacactttctaccatcaatggtgttcactttgaaatcatgtaacaaattagatcacattgcaaaacacaaaacaaagcttctatgttatgtaaagttcaatccaattgaaggagcacacacacacacatttttttactaaagatagagactttataccacccctttgaattaaatcacttaatcgaataaaacacataagaaatatttaaagttttgtaagtaaatgaaataagactgactgactgaccccattagaagatgaacgagaaacagagccgttgggggagatggcagagagtttggtgaaggggttagttggtttaagaagaaagccgtgattaatttgggggtttggggaagaaagaggcgtaattttgatgagggaggacatagtgagagctgaagaagaagccattttggatttggagtgaaagagagagagttaaaagaaggaggagaacattggagaaatcgccgtatttacccaactttgagaattgagactatctattagggcccagatcaatgctctcataccagtcgaaaacaatgatttggtgcaaagtttggatttttatcaagaaaaatgtttagaaaattgggattatttcacaaatacacaacaacaacaacaacaacnacaacaacaacaacaaaaaattacaaaaatacaattatgttattttttgttgttgttt

SEQ ID NO: 99400 - DNA, 2007 bp, Cannabis sativa
ggcactggcactggcactggcgctggctgtgtaactagtggctcacgactagtaaatccaccagcaccaagacgattacaaagatcccttctgtaattaggatcaagtaataaagaaggcctgaagcttctagcagcagagagaaatggaaaaaatccacctctaacttgaggctcattattcctatcagtataattttgttgtgggaaggcagctggtaaaggattcgttctggaccacaaatcaaaaaaatcaaaataagtttgaaaaggaccaacgacattcccattatatcatctctccaaataccaggaaaacatatatccaaagcaaagcgccattgtcatacatacatgtatgtgttttgttgcaaagttccaccgtcattcatgcctgtaattccatcgttaaagtgtgcctccacagcttcattcagatttcctccatgttcctgttcaaatatcaaaacgtgagtcaccaaactcaagctgatcaaagaagcgtaacacaattaagcaaacgaagcacaccaactttatctcagtagcagaacctgtacaacacttataatgcaaattctaaaggttgggaaggcttatgtaaggggtcaaggaagtgaacaacaatatcattgcatttatattataataaataagtattaatctcttctcttttcggtctagctactcatttctatatgttgagaatcatgggttccatctcaaaactaattggcaatgagatgtcttatatatggctcaattctctaccatttattccaaatgtccacaatactatacactctttacatgtttggtgctcaaaatttaccaaagacaatgacattacaaagtgtaaaattatcttagtacgtaatttcctaatacaaatgccgttagtaaggagcgatttaaaccagcaagcaacaattgattaaaaagaaaaactctagtcaaattaggagacaacttcaccatctcgcacaatgaacatgaacaaaagccataagcagcaaatgctgatctgaaaactggctctaaaatcaaaacaattaagaacttgcactggaaaatggaaggtgagacgagattgaacctcgagtttctgaagcgcgagtgactctgacgctccggtgagggacatgtaggtctcgattgcatccctagtcggcctcaccatggccacacctcccgtttcagagaaagaaacttcacaaacacacagagagaaagagagattcagagaatgtgatagtgtaaattgagcaactttggtggaatctgatgaaaacgaaaacagtacagagagagagggatttcacacaaagtagttgagcgccatttttccaacttcagagtgattattaatcaacttatacacactacaaataaataataaaaaaaaaagtagatcttgctttaccaaagtgaaagtaatacattttgtctaaagagaagaaaaaaaaaaggagtaatatatatatagctttgaaacgtggcaacttgtgttccctcgacgtggaatattatcgtcgttttgccttgtctctttctccagataagattgtcgtttttttttaaatccgtatggatatcagttgagttgataattggtatcgacgagtgtcaaactgaagtttatgagtcagaaacagaaatgaatcggatcacgataataaaaagaacgttatccatcattaatatcaatcaaacttgtaattaaatgataaaaaaattatgattagtatttatgtgtaactttcatattatccagattaattggtagtgttagagatactttagactgactttttatctctgcacagttagttatatctgttattactttctgttatttcagttggaatgccaactgtcttttcttgtatttgttcattctgttgtaacctcttcagagcctatatatattgtatctggctctctatctgaatacagatcaattcacattttcctcaccttcatttttctccacctttacattcaaaca

SEQ ID NO: 99401 - DNA, 2616 bp, Cannabis sativa
ttaaaattagaaaataaaagtgttacccaacggcaccttagtataagtaataatgattgaaaaatatggagtataattttttttacgtagttctagtattaatgaaccgtaattcacgagtcacttgtacttatggtgagaatgtacccttgattagggaatattcagcttacaaaataagagctcacttttttatgtaagtctagaagtccccttttcattacagtcccaagtatttatagcagattgaaagaaggtcagaggagagaaaggtacatctcgcttagatctctaggcactacctagcatacgaggtaggcgtttggtgaggcaaaatttgtcccatgtgtggctgatgtgacagtgcaatgcatagccatcacttttttgcgtatgtaaacgagttgctaaaacaatatagcttcttaatgatgttaatcatgtgtcgaattagtcatctacagtgattcacttcagaatctatgatgcaaataattgagtcccggatggcctctaatccgggagcttattgcctcccaaatggctaaagagtgattccttgaccatttatcttgtgatggaaaaattgctcccggacacgtcttacacttaacgagtccaagtaaaaagttattttgtaatgagtgttaatcccttcacgattagggccctttagccatgtggagcctcatacattcgccacgtattttggtaaataaataggctcaatatttacaaataagttctagctcataaattttaaggtgggacttgcattgattctttgaccatttagttcgctctcggagggtccgaggtatgacgtcagtggcaagcgaagaggcctcattcatacgaataagccacgtgttatatagggattggtctatctatcatcgtgcctttccacctcaattttgatgatgtcgattcgcttccctaatatattaatccctagagggtcataaatgcagggtgtcaagaagatgcacgagtactaaacgtcccttcataaatgtgcttgttatgaatcatccccaatcattggatttaaagtgtgcttcttgagaaatgagaaacgccataggatcatttaatgtctcggatcgtgaccttgggctatagccgtcttcgaacttcttactttacattctactttaaattttcaaaaccttcaaactggaagaatttttcagcaaattagacctcctcatcattttcctcaagtgttgtgaagcttcatattactatcgttttgtctaaaaattaaatttagatatttatttgtaattgtgacttaaacttaaatatttatacggtaaattactctataaagtatatattacttattttcaaagaatagagtgacattgttctacaaaaagaagtgacatttttcataaaaaaaaaaatatgatgagttgaaaaatagacacattagtctgtacgtaatatttagtataaggggtgattaatacgttaaaaatacctattaacttttttcaattttcataagactttttttttatataagactttaggggtagcatttgtataattttatattgcacacaactaccctattaagaatattaaatacattcttttcaaaaaaataataataaatacataacttatgtcaattaaataaataaaggtggattcattttcaaaaaaaaaaaaataaataaataaaggtggactataactcataaagaagtttctaattatagctgaaatattctaataatcacccgacaaaatctacttaacttacttaaactagtaattttgaaaatcaatttagttaaattactacttaattaacatcatacaataccaaattattataacaccctaaacaatcattagtatgaaaaaacttatattaaaattcacaaaataaacaaatcatattttttgaccttctccattcgaactaccatttgtaaggttagacgttcatattattaagactcacttctattttaactaagagtatgtttaggccaacttaattcaaaatattaaatttgttgaaatttaatacaaaatttattccaactacattataatactctactaattttcttatatataatattttctatattatcccactaacctttgtgggctatactatgatcataccaattctttattagttttaatttaatatttaaataatattttcataatcaaactttgtacatatatataatatgggtgtttattcagtgtgcaatttagtatatgttaaagttgtaaaacaaaaatcctaattagtttttataatttaagaaaataaaatattataataatagagaatatagttttaattgtgattggaattaggataaaaaagtgttaaaagttttattatttatgtatttgtttataacaccaaatttaacattaggaattttatttgcaccataataaagatacttcaaaatttaaaatagttacacttaaaataatttttaatatttatttaaaaaaaataaaaatcacttaatacattttatttttttcaaattattttatattaatttcattacatattttaattttactttcataattttgttaaatataataaatttatatattttt

SEQ ID NO: 99402 - DNA, 4203 bp, Cannabis sativa
  modified_base (776)..(776): a, c, t, g, unknown or other
  modified_base (1631)..(1637): a, c, t, g, unknown or other
tcttatttaagaattttcactaagcaagtgcctaattgtgaagaaaagagattttggggtctatttattaattaaaagactttgtatgctcttattaataaataatataaattttaattttatttgatgattaattataattattaaataaatatttttttgcatttataggattgaaattggaaatattgtattattgaaagaagaatgagtggttgaaataaagtggcaaaaacttaactagagattggtctttctagtggccaacaactctagtgaattttcccccaatattttattcttttttaattcatataattccaacctaagccgtagttgaaacactataaaaggaacatgatgctctcatcttatccaacttaactattgccttcaaccaaatcaaacctagttttctctgtcagacaactagtagatgagagacaccttctgtacagttttcaagcctcttttattatttttcatttgttcagcctatagtgatagagtgccatacccacacatagcaagtcaagtactcaatcatagtgagtaagatggtggtaaccaaactagaaggagagaaagagatctaggctcagatcctgataatattctacgttagaaaggaacaagggttagagatctgagtggaaggagtcattatatttcgctgcaaatcaatgtaaggttttctaaattcttatgtgttttatttcattattttagatatattcatatttaggatgttaattgaacatacttgttagtaaatntagattctggtaaaatattcccaacacacagctccttcgtctgacctctgtacctcttgccctgctctatttgtgcatggtgacacggtgggggttctgagcttgaggatattggcgattgatcttgcccctagagaggttgctggccatatctgagcttctaaggacagtcatcagtgcagcaggcgttttagggctgtgcacacccatttctgctacctttcttgagtacgctgaggcctcaagcctttttctaggcaacacctcagatctgtgcatttttggtctttacccagaccttgacgaatcgtcaggaagtctaccttctcttcttgcatggaccttcttccaaatgggcgtgcaccggtagccaccatgtttaccgagtttttaagacaccacataatattagagcttaagaaagtaatgaaggcataaataatataataacgaacaagagattttatgtggttcatgcgttaattatccttagtccatgagtcaattttattaggctcattagtcagtggttgtttatacaaatattaaaaggatggacttttactccaatccttcgtgttcctcttgaagaagaggaaccttagaaggaatattctgaagttcataatggggttaaagtaggatgttttactgtaaagaccgcttaattttaatttggaaattaacagataaatagggttttattatgaaacttgtatattagttatgaattatcagtttacagagatttatttgaatttagaatgtattttatatgtcatatatggaatttcatatttttacttgttttgtgcccggcaacattagaacgcgatgtttggctattagaatcannnnnnngtatttttagtatagcggggcaatatagttagacattgagaatgttgggaatggtcgagattttagaattgaccaaaataccccaaggtgattttatgactttttgacttaggtgggggcaaaatggtcttttttcactaagattagttttgtcctttagtggacttttattgagattagtatgatgatattaagttatttctaattaaataaaacctattctaattattcatttatttacaaaatcaaataaaagaagaacacactctctctctctttttcgaacactatggaacaagctagggttctgagttttcttcaacaattccagtaatttccagcaagttttaagtgatctcaactcaaggtaaggttcctagaatctctccctttagtttcttaagctttaagttgaaaattatgcttgaattgtgagtttagggtgctgtagttgatgttgttgtttgagtttattttttggagttagattatgtttgtttgtgtttaattgaggtggttttaggagttattgtggggtttgcgcaaacttagagtttaagaactcaagctttgctcttcaatggtgttttgtgattttgtgcttgttgaggtgttttgttgccttgtttatgttctttgggttatatagaacagatcatgaaggtttggtttgatttatggttgatttgagtgagttaggaatttttgaagctttcatgcactgaatcggtcgatcggttcagttggacctgtaggaaccagaattctggttggtccccaagaaatcgcacagaactagaattccagttgtggcagttttgggaaccctagtttttccctttttgcgatatttagggtattgccatgttttttatcgacgagaaaacttttagtttcaagttaaagtccccaaaaagtattttagcgtgtcactcaccaattttacgaaaaatgtgatttaggggcctgtaattcgccgagcaactgttccactcaggttggtcggcacacctgaattcggtaatgaggtaagattagtataatgatatgtatgtgtatttacatgttaagtgtgcatgttggttaagcctgttaaattacattagaaatgtatgttggcttatgtattattcgacagtatcacatcggtacggctagagtatgactagcataccaagtataggctaatattatgatcgatagtaccgtactacttgacagtatcacattggtacgactagagtatgactagcgtaccgagtatcggctgatattatggttaatagtactgtcatacgaatgttctagactcaacaccatgttggacacggggatagggttatgattggtatgggcgtctgatgataatccgggttattgctatgttattgtttatgcttttcttacttagtttgttcactcacagttgctatttccatgtgtaggtaagggtaaaggcaaggctaaggctaagcaactgtgagagcgagcagatagagtttgtacatgtcggggcggttaggcctagagcgttcggtctttgggacatcagggcttatttagtatagtcgctaggcgacagatttttgtatatgtacaatgaaacttttgtaaattcttttgtaaatgggatcccaaaaattatatatgtatgctagtttatgtttttaattaatgaagcaaaattttaagtaatcacaattttcaataaactcgttgatgagcacgagctgcacagtaagctaagaatcacgttaacatgactaaaatagttagggtgttatatttacgaaggattagtcttcgttctcaaggtgaagagccaaaagatggaaagtgatattaggcctctgaattttcctgtcccctcccatgtgtgtctttcggggtatttgtaggctgatctcctcgcatgggccacccttgatgtatcttcatggggatcccctcgcatgggccaccattgatgtatcttcatggggataaaccccctcccatgtggtctttatcgatgtcagattgtactggctgtactggcggtgctttggacgtgtgtcgttctagggccgttttcgttaagaattcccttattcctagctattagatcgttttgcactaaacacaaggacacacatgccctaaatggtggtgtggcgtgggggacaacttctgacaacgtatcaaagagagctttaccattgggtccgtagcctatcacgaatggactgagcttccgtgggttaaaggggtaccttaaactagtgtatcttggttgaagatccatgttccttgcgggagcacagggtctcagcttctagagtggagtgagtcactggctcacggacatctctcttgtggtctgcattcgggaaggcttatctcgcgaaaacttgttccgcaagattagggctcttgccttcccagagcacggaggaaggcacttgggcagccttaatgatctcttgacttttttctaattaatttccacatgtcccacttgcaaaaatacggaaaacaactttaaattttaaaattttacatgaacaatatgttgggttttgtgccc

SEQ ID NO: 99403 - DNA, 4535 bp, Cannabis sativa
ttgtaaaaaaataagctcagggtctaatttttaacattttagaaaataaatggtctattttgttatttaacaaaacagaaagtccaattaatattttttgcaaaattagtatttaccttttcttcatatctattttgttgaaataaatagagagaatggcctgtcgtattatcactatcgttataacttttttcatagaaaacgacgtcgtctgaatcatcacatacataataaacccatcatccacttcgccccactcctctcccactgccttgccgtacctctttctattttctcgctcacattaatctgtttggttactcagaaaattttccattctttgattttctccgaactttactacaatcccctttctcaagcttctcgcctaggtatacatatgccctcacctctttattttattttattttatttgttcattactctctctctctctctctctaaacctaatattgaatttcttcgaatcgatcatgaattttgtcctgtattttgactatttttttcgcatgaaatttagtatttttgcacaattttttcttattgaactcaaggatagggctacttgttttgattttgcttacatttagttttcttttttaaaataatattattattttgttatttttatgcttataatttacaacaatttcactagtgggtttgttaagaaagtgcatagggtatagattttagtttaggatttaggttgcaatatgcattttttttatttcctttattttgtatttattttgagttccatgagtgtaattaggtttgttgtgagataaacaaagtgcttatgaatgatgcaccatgtataattaagaggaaatcattatagggcaatgcagagttctcattttgatattgttaatgggaattgggtagaaagaattaagtacattactgcaaagtatacacatggtagggtcttctataaatttaatgcaggctaaaactgacagctttggtcttagataggtttttactctttttaagagctgttaagaggaaaaatgtacatggggagttggtctttcgggaccatgtgtgcgatttttgtgcaagtttttatcttgatgattttgaaattatgaaatgaatgttaaggcgtgttagaattgtgaaattttgaaatttgatttaagctgtttagtaactagaatgctgaatcagtttaggggtataaagtttttatcttcaattgtatttcacttggctctaccggtacttctaatattttaatcttgtatgtgtttaagattcttaaactactttaggagtttcatatacaaaaatcataatttgtgaactatattggagctaatgtaaatatcaaatgggtcgtgaagaatatttttcatgttactttatcaggtatttgattttacttctttactttagaggctgattattgggattttttgccctttgcttcagtatatttaatacgattacattcatgcatagatgcataaagacatagtacatactaacttggatgtgtgcacgtttaaactgttagtttcagatgaagagggctttaagttatttgttgctgcatatattgcatattttttttacttaatcagttattttcgcttgaacattaggcatgttgatccatagagtacatttgactattggagctaagaagacgaggacatgagaagtctttgacgtcatctgggtaaatttgagtatttgaaaaacaattcctttgctatcaagatagtgtctttgggacatatatttttaaggtgaatgttcctttttttacattgtaaaggagtcttttttttttccttggattttggaagtcttgctctttggctgtttggcatatttctcatcagtttgattatgttctttctaattcagttttctatatggatatttttcagatctcattgttgttgttgtttttaaagaataagatgcaattgatgaaatgaaaacatgtctgttgccttgatcattctatattaccagtgttgctcttatggatagataatatagattcaaagaacagaaaattccttattctgcattttgggttgtacttgcttcgtaatttttcacattttggcaacaatttttttttgatgaacgatttttggcaacagtttttgttggccttattattaactttgttgtttcaatgacatgaattcacttagaacatggttgtgtatgtagctaaaatgtatggccttttcatgatttaagggtattgtttcttaaattgctgatacttggtagggccgtaagccaacacaaagcataaaattactagctcattagatactaattttggtatgtgctgctagcagcttggatgtaatacgatggacgatggcaggcaccacgaaactagcagacataaggtggactattacagagcctcacactctccggtaaccagaacacagatactagaaaaaaatattattgattatcttttttaagctatcaaattcttgattcacttgaatggaatagaattgaaatgtgcagtggaatatgatggccccacatcaagtgaaggaaccgaatgctttagttatgaataaaaagatcatgtccataattgctgagagggatgctgccatacgagagaggaatgcagcagtgtctgaaaagaatgaagcattggctgaaagggatgaggctcgccggcagcgagatgaggtaatggctcagagggattcagccttgttggaaagagataacgcccttgcagcccttcaagttaggaatagttccatgagtgtaacactgtgtgggggagttcaacgtggagtgaagcgcacgaaccacccatcaactcatatgcctaacatggctttagctacttatgactcaaaggaaacgcagataaccgatgccttccccattacagttatatcttctgatgctatcaagtcacctcagacaaagcgaccaaaggtgaacaagggacattcatccagggagtcaaagccaccgcgaaagaaagtagcagaggatctgaacagacgagctacctctgatggcacaaagtatagaacagagtgggatagtcaggatgtgggcttgaacctcataacttttgatgagtctatcatgccagtgccggtttgctcctgcactggtgtttctcgacagtgttacaaatgggggagcggtggatggcagtcatcatgttgcacaacaaatatgtcaatgtaccctctgccacaaataccaaataagcggcatgcaagaatgggtggacgaaagatgagtggaagtgttttcacgagattgcttagtcggctagcggcacaaggccatgatttatcaataccactagatctaagggaatattgggcccggcatgggacaaatcgatatattacaatcaaatagcttgagaaaaaaaaagaaatcatttgggagggttgatttttcgatttgagcagctcactcttcgtttactctactccttgaatttcaactaattttaacttaccagatttagctgatctgcatgaaaggaatagaggttcttgatatggtagtttttcgacatctcctgttggctcagactgttttgtgattaaactcaggatttctaagcccaatgagagagacttttgtaaagtacaataccttctagacgcggcagtgacatggcagtctagctggctctttcctctatgaacatggcgaagctcgaattatctttgattctccataaagaattgtgagattttcttcctacccttttcatttcataaaagcaggatataaattttatggctgaaggctgctgccatgactgtaggttgccatgtttcctgagaaattgggtggaaacatcgagatgtaatgtctttaaagacttttagatgatttcgtagggcatcagattagtgaaatttcatgattgtagttgttgctagtttcatacttggaaccaaaacaagtagattactggttttaagtaacttaattttccatgtgcagctttatcaagttactgacatgcatttcttaagttagcagtccaactttttgctttaaattagtgaataataatcatatatggatggacattagaaagaaaagattccatggttcttgtgtctcaagctattatgaatggtggcaacacgtgttggcgtgttgtggttgtgttcgtgtggcatcttatttgacttgtttttatatttcgtgttgtgttcgtgtggcatcttatttgacttgtttttatatttcgtgtctagcgtgttaactcacttaattttcctaatcttaataaaaaattgtatcgtatttgtgttgacctacttttgacctgttttgccgctcttgtagctagaattgtagaaagagataaattcagagttccattagatatcgacttatatatagtttgtatacctatttatatataggttttttttttttaaaaaaaaaaaaatatttcaaattcttaaaaaaaaaaaaaggatttagaattgttttttaattcaacatgaattaat

SEQ ID NO: 99404 - DNA, 2810 bp, Cannabis sativa
aataatattgtgtcatgtgtacatatcgacaatactctatgtagacaaaaataactaacttagtagttaactaccaaaaataaataaaaataactaaatgctaaaaggagattttgttgtcaaaatttatattttaagaattaattactagcgaaataaaaatattaagaatacgatttacctactaaagtagtaatgacatgtacacttatttataattacactaaattttcgctttttgaaactagagaaaggtgaagcacacatttttatttttatgtaattgtaaataaatgaaaaatgttaaaaaatattaatagtgtgctgtgcattaataatatggctcaagttaaataaatagtcattcttctaagaaacaagttttttagtacatgttacaaattctagtcgaccactcactcagtacctccaacgcaaataaaagaaatgtccctggttggtctcagttgcactccttcaacgttcttatatacctcaaattcatctcaaccccttcccaaaccatccaacaagatttgttatccttcttctacccttaatttctcaactttttctggcacaattttcagatatggaaactgggtttctcccagaaacaaattttatgcaaaatcttctgactcggatgtagataacagagaagtagacactcagttttctccacaaaatgcttctctttcaactaatggtggcaacccatcaaccagtttgttgtcttttctctgccctttgctcaagttcttctctgtaattatctttaacctctttcttcttcttcttcttcttcttcttcttcttcttctttcgctagttactcgttaattattaatgtttgtttattgcaggggggagatccctctggagaacgcaatgatactttagaggtaactattttcaactctactgtactcaatttgaaaagaagaaagaaagttctttggcttgttggatgggataacaatatttttgccttatttgttggtaatatctttaggtgttaacatcatctttgtcttccttggcaagatttccatgggggtcaaaatcactgtcagatagtttgggtaccaccaacaccatagaccctcctatgcgtttacagctttttgaatttggtatgtacatgttacctatttcaaggttatgttagaatcaaaatcaaacaatgtaacacatgttaaaatatcagattatcaacaatgcacaaaaacagaaaactaaagagaagaaaacaaagaaaattatcctggttcgtatctcaataggagtcctagtccagctctcccccaaagaattgctccactattcaatgtgaattacaaacaccaatcagttgtcaacaattctgggatacaaaaccgaagagtaaagctctcaaacgcttgaagaaatgagcctatcgaacaccatgaaaacacgatcactagcttctctttttagtcaaaaggattaaactatataatagtgttagattagttgacatgtccaactaacttacaaagttcacaactaacaaaactataaaaatactaaccgactgttcaaaacagttaagaatgttaagagtttggttttctttaaattacaatccacacaaagcataaaatatacctttaatgctaacatgatggatctcaataaataatttgtatagattcaactccaatctttgttttatagcatctgatgcagttaaatctcaacttcagtttccatctatcaattaagcttatcatagctgcaatgcattctaattttgtcgacagaggcatgcccattttgcaggagggttcgagaggcgataacagaacttgatctttctgtagaggtgagtggttaaaaaattaattttgattacagtgtttaactttctttcttgggaaagttggtcttattcttttcatcatataagcaattttttgcagtcatatagtttttgtccaataaaaatactatctttgtacttagaattctgtccagaaactttcatgtacatcatgaagttcagaagaatactgcaaaacattatggttggggttttactcccttttgtcctgccttgatttctgaccaatgtttattcagtcttaatagcaaattcctttttttcaggtatatccctgtcccaaagggtctctaagacatagagaaatggttagaagatttggtggcaaagagcagtaagtagttactaactttattttacaaaatggtctcttaaaagaactcatagtatgccttttgacatatgatcatgagtcaaaatttaatttaccttgtttaaacaagtcatcttgttgcctcttcacatttcctaagtaaatatgcttaaaaagtattgatctaatgcaggtttccatttctcattgacccaaataccgatatcacaatgtatgaaagtggtatgtcatgaattcactcttttatacttgacctgaagtagtttgctcaacttttaagaactgtatatttaagggaaaagaaaaggtcaacgttagcaattgcgtcatcaaattcaattgtataacttgtatttttccaacatttgatgacaggtgatattgttaagtacctttttgagcagtatggtcaagggagaaagccctcggcagggcttttggaaaggtaacgaacgtcaactcccgtgaagaaagctttaacactgtagatattataaatgattagtatgcagcatttactgctagctagctaaacaatttctgaattctaagtggttgtcaaactttgattgagtgtactaattgcagattatgtttttagcatatatg

SEQ ID NO: 99405 - DNA, 3950 bp, Cannabis sativa
tttttttttttttttatattgaattgcatcaaatgtagtttttgatatcttaagttgtcccttggtgagtgaggtatcatgtattgatttgataaagaaaaatgggaaaagagtttgggataacagaggattaatatgtaatatgatcacatggtgttgcacattgagacatgtacatgaaggcccactttgttaactcaaaaacaaacatttttttagaagcccactttatagatccaactccaattagaaacaattacacaaccaaagagactcttgatttctctctcttaagaagacactaagcctagtccactgctttctccaatgcaaatgtcttcttcagctccaacatcgttgtctttgttattgtactctctctctctctctctctctctctctccttctctctctttgtggtccttgctctttataactcttatcactttcttcggttttttgatatatagattcaaatctagctaactactttgtcaagtccttattctcttcagcttaattataataaactcagtttttattgctagcttcctcattgtaactacttacctacatcatcttcattcatatacacttttattattcttaccaaactactactactactactagtttcattaactatatattattaattcttattacaagtttttactatactatatatataattcaaaatcccaaaaagtaaagttagtaagtaataaaatcatcgatcatcatcatcatgtctagccgaaggtcgaggcaatcgggttcatctaggatttcagatgaccaaatacttgaactggtttcaaagttacgccaacttgttcctgagattcggaataggccctccgctaaggtacttttttcttttttctttttctttttctgatctcttttctctctctctctctctctcttcttgtaaaatatacgttatataatatgtatatatattaaaaaaaaaaagtacatatatatatacagatatatgtatatatatgaaagtactacacacggaaccgaaaaaaatgcatgtgccacatttaaaaactatatataactgttattttgggcctcttgggtctttgctgtatatatagtctaaattttgaccccgggtatccagggacagactacagagtacatatcataatattttctaaattattattactctatattatgtatatagatttgtatcatgtacatgatgatatgcatgtaacgaatatatctattattaggcaatatatatgattaagagcattgttatttgggcaccatgtacagcatctttcataagtgtcgctacactatttgttagagacattctttaaaaattattttcttaaattgtataagatttgatacttaattgtaccactagcagtatgacaccaggaaggttatagacaccaaaaatgccttttagcaagtatctatgattaattaacatgtattagggtatatattatcatatgtataaatgcatgtacgtacatggatatatagattttaattagtttgatgatatgttgatgagacaaaaatattttgggaataatttgtagtatatgaaaatgatgcaaaaatataatgtttaaagttagttattagaaggaattagaaagcgacatataaatgatattttaaagatgatgatgaatgatatatagttatgaaatgagtttaatttatttgttgttgttgtacaatatgtatatatgtatattacaggtatcagcatcgaaggtcctacaagagacctgtaattacataaggaacttaaacagagaagtggacgacctaagtgaccgtctctcccaactcttggctaccattgatgctgatagtgcagaggcctcaattattagaagcctagtttcccaatagaaattattatattaattaataatcaaacaagagatcatcatcatcaacataccacgccatgcactactaccttatcatcttataatttatatatataatgtgttttttaatgtttatatttagatgatctctttgttatttattgtttggctaggttttattaattaattatatgtatttaaatgttttggggatattaatgtaccctatcatccattattacgaggttatttcatattttgtactaataagaaaaaagggtacttgcactatctagcaaatccctcatatatatgaagataatattatttatatgagaaatgctgaagtcgtgtctaacagtctctataataacaagttaatattgttattgatttaattaagtatttaggtttcatataatttattaattataataacatttagaaagtatcgctaactaattgcaagacaacacgcttagaagttgtgtagcacgattggtaccgagtggtacccaatagcaacactctatttgtatatatatgtgtaatattacaacgcgtcctatatatctaggtatagccttttagctctctatggtatataatttctttaataattagtacatgtgatgatcaatataataattaattaatatatataagaaaaaaagggcacaatctatatattgagaagtagtatatattaattataattaatctctctctctttctctcgttgcctaattaaattgattaaagcggaagcaagctgcaaagtgtgaatattagatataaaaatataattaattgggagataattaatagttgtgtgtctaatattttagtgtttttttaattaatcattttagctttttgtcggtaacatataagatcaagagagacaacatctacccaacagcgacaagtattcattttgagtgatttgacttaatgttagattatgtttagacatgatcatcactaatattaatctatatatagatatataaaccatcaaaactgctgatatataatatatcatgtatacaattatcttaattatgtgatttgttttaaacttacatccatatctggaagtttgatggtatattagagcatgtatacaataagctatatatatatatataattagtactaatcagggaggaaatgcagaaaatatttgtaagaggggccaaagtgtaaggaaaaataatttgagggggcattaaataaaattttaatgaaagataaactaaaaattataaaaaaaatatttaggggattttttttataagtggagatgtgaaaccactaaattatatgaggggactagtactaatacttctacatgccattgaataaaatcaaaattatatttaattagttaacatattatacttttttaacacacacgtacgtacatataatagtaaaaaggaagaataaattaaaagtttgatatattttatatatagctagttagtgcatatagttcacacattcagcaattaatatatatatatatatatatatataattagcttgaaaatcgaataaataaattacaaaaaagcattagatgcatgctagcaattagaataataaaatatttatatgtatgatcgttttaaggatttagttttttttttttttaatttttggacaaaatgaagtaattaaaacgtagagtacaaaattgttgagtgatgaagagtcataatgagtatatccttccataaaacaaggaagcgacaatatatgtatataaaatatataataatttgacaaagttgtaatgatgatatctaaagtacgtaatagagcacgaatgaatgaggattatatatatatttgatcaaattaattaagcttgacttaattaattattagtagttagaatgcgaacaaattatgtaaccacataaattaataaaaatatcatagcatgcatgtgtgtgagagagatggaaattagaaataattaataaggattatataattaattaattctcgatccaatttctagaaacgataaattcaggatatcaatatgcttgg

SEQ ID NO: 99406 - DNA, 2518 bp, Cannabis sativa
agtgacatcactttcaagcctggatggaaagatatttttaggatgaatgaaaatgagattcgatcagaaattagaaaagtctctcatgtttcaactcttgatccgagaagaaaaacttatctaactcaaaatctgatgaccaggtatgtttgtgtattaaccattttgatcacttttggcacacaagttcacatgtttatgataattttatgggttatatgccagtggatacatagcctctcagcagaaatcaactctagcagctgattgtttgaacggtgaagacttacttggatgctctccttcgtttcgtgatttagagaaacaagtttttgggtgtgagcattacaagagaaattgcaaactccgggctgcttgttgtggccagttatttacatgcaggttttgccatgacaaagtcagcgaccattcgatggatcggtaaccttctattttttgtttcatctggcatcttcaattattgtgcaatatatatatgtttgattgaggatgttatgtaattaatgtgcaggaaggccacaaccgaaatgatgtgtatgcagtgcttgcaaatacagcctgttggaccattctgcaaaacaccttcctgcaacgaattctcaatggcaacgtactattgtagtatttgcaaatttttcgatgatgaaaggttttctccttgactataacctttccacttatagaaataaaaacattactagatttcagatatgacgatatgaattatcattgtcctttctgcaacttatgtcttccttttgtcatatcagggaagtttatcattgtcctttctgcaacttatgtcgagtcggaaagggacttggtactgaccagtttcattgcatgaactgcaattgttgcctggggatgaaagtcccagaacacaaatgttgggagaaaagtctggaaataaactgtcccatttgttgtgactttttgttcacgtcaagcgcaactgtgagagctcttccttgtggccactacatgcattcagattgctttcgggttggtttttttcctttcaacatattcgtttttgattccagttctcatggttgttccatattttttccatttcttgaaaccttttgaaaatggttgatatgtgattaagctatttttttcatcctgtcaggcatatacttgcagtcactacatttgtccaatctgtagcaaatctatgggagatatgtcggtacgaataattttaactttaacacattcattcacattacaaatgtcttgtgctaaaatgtgttatttctggctttcgttttctttcaaggtttactttggcatgctcgatgcgctaatggcttccgaggaacttccagacgaatacaaggatctctgtcaggtaaatatttcggaatgaccccaatgctttatcctcattttcatcagctgaatccccgataactgacttgttattggcgtttttacaggaaatactctgcaatgattgtgataagaaggggaatgctccctttcactggctctaccataagtgtaagttttgtggttcatataacaccaaggtaattaaggccgaacccgattccctctgctcgttgccaaaccagtgaaaccgggttttgtcgaggcttttatctgttctgttcatcatcccacaataagggctggtgaaaccttggcccctttgtatgatcattagatgtacccccaacatctatatagaaaatggaagagttcttgcataattacgaaaatctttttcgtatacgaaattatcaacctaagcttttgagctgagagacttgaacttacaaaaatggtggaatcccatggatttagtttttgttatataggctaactatgaggaaaaaggttaagttgaacttcacctatagaaattttcatacatctaatctaagtagttgagtttctaatgtaaactttaaaaaaggaaaatgattttatggagtatggaccatcattgatacttataagattggattggtacatactcacaagattttataaggtgataaataaatcactatagtatctcttctcctatcatactcaataatagttgtaaaatattcctcaaaaggacagcttatcaaatattcctcctcacaaaaatgtaaaatcgtacatgtattaatttaattccatttcttccacagtcccactatcacactactatcttttttgtggtgtttcaatcaactttctttagtataactagtcttagttgaaacttgggtataaaaacttgggattataatgcatttgtagtttttatgacttttcaatgggaagtgttgaaatcaaacaatttggctatttaaatttttgaaagagcaccaattctatgtacaataataagagatggaaattggatgggtaatgagcggggaatgcagtctccaatcccgtcctcactccctatttatgtccccgccccactaaatccctagcgagcaaggtcaaccctgagctaaaatgggatgtaggcaaaaaaaaaaaa

SEQ ID NO: 99407 - DNA, 3239 bp, Cannabis sativa
  modified_base (42)..(42): a, c, t, g, unknown or other
ttacccattcatgggtaataaccattaagagtgcacccatanatatatatatataatataatgaatgatgctagttttattaataatattttttattataattatagagttatttaattatgtatttatatgagtctatagtataatttaaatggataatttacaggttgattttgatcattcatgttatttgcaataaaaaagaagtgtaaaatttcacattatttgatcagtgtgtactagtacagaacagttatatatctaggattgtaggatctaatttatttgactaatcaacaaatgagaaataaagaaaacaaagaaagtgtgtattcaaacacgatgtttaacaaaataattacttgccaaaagtatagataaagcaggaataagaaactcgcatgtataagtatttaactaaactttacaaaaggcaaaaggaattgctaataatgagatgcagtcttaaagggattaataacagcaaaagtgcatccaaagttaattattgcatgtattcataaattgttttattatattatattataatattatattattatattatattattatattattatgtatatatgcatggtgtttctttaagattttcctttctccacttttacaatctaatggaatgttttgccaataataatatgcatattagtacttaaagaagaagatcatgagatagaaaaagtaacaataaactaattaggaagttcttactactttagactagctaactttagtattacatctcttggagtacctcatcagaattcatatatagcacgaacacctcaaatctgaatccatattagcataaatggattagacaagaataatatcaatatatcatatccaacactagaccacccaaacccagtttgatacctaatatactaagtagcagaaaccaatgttattttaatataagtaccaacgaaaacccagataaaaatagacacaaaaaagagtgacaaaaatgacaaaaggtacagtgtgaaaaaaaaaaaaagagaaaaaactacttaagaacaaactaaaaataaaagaagaagaagaagaagaagatcgaatctatggaggagagctagagaaaagagttcattttgatcttggttcctttttaattaggcaggtggaggatttttctttgctagattatgcttgttgttgtgcatccaaaccttgagaactctcctcttgactccaatctcctggcagaactgttggaccacagattcttcttgcttctgaattttccatccaactttttcagcaaagttaagcattttgtccttctgttcttgagtgaacttagttctgaatctttttttagccaaatgtggaggcctgtaggccacagacccacctccacctccaccgccatcaccaccaacatcttcttgctcgtctgactcagaagggagggacccagccatgttgtaggacatgatcatatgatggggcattggacctgttcttgaaggtatgaaagtacctgtggctgtagggtaccctggtaatgaatctgggcctagcatacccttgtgatgaggaggacctaagatgaatttcctcccagcagccattctactgagatgtggggaattaatattattgctatggtggaactgatcataaggggtaggctcaccttcaacttctttcctgtggaaatttctgtggcaattgcaggctgagcacttgagggcttcaatggttccttcttctccgctaggcatgaactcaccacacccatcagtggcattagctcccatagaagctgcatggttcttaaggcactctctgtacttaacacctttcttgttattattagtattattacagtagggcacatggtcctccaggcttgtggggatggaggagccattattggaagggatgatttgggctactgccgaagaaggaattatgtggttgtggggtgatgggtcatgatggatcagatgcccatgcccatgcccaccatccccatatggagtactgtttaaggggattgggatgtctccttcttgatgactagaaagttccatgataatatggcctgagctttttatgatctctctctctctctcccccactctaaggtctttttttttgtagttttcttctgtggggaagaccaaaaaccaaaaaagagatgagaagaaaggaacaagacaagaggaagagagtgtgtatgtgttgaattggaaggtagcagctctatggagaaataatttgaaatggtaaaacaaataatatatatatataaatatattctcaaaatatgtcctaccctaagatagaattgatctcttcttgaaaattgtccactctttttgaagcaaattaacacaataggagagaaatagaaacagtactggaatgttctctttagggctgcttcatgtctttcatcactcacctttttcgatcaattctctaccagaccaatcaaaactaagacaagggaaagaagaaaaaaaaacacaatgaacgaacttaggctattaggaataaacacagcgagagagagagagagagaaataagagtataaactataaattctgatggggtctagttgggccaagccttttgatcaaagaacaggtgcaaaaggttcttcatggccatactttgaatatccatttcattttccagaagtcaaacttagaaggaaaaggaaatcgaagaagcatatactactaatactgcagtccaaaaactggcggccgcagaagagaactggccatgcaaataaggaactttctttccgctgtttgcatctcttttatttatatatatatatacttgtctatcttcactgatcaaaagaaatggtggtcactcatgagtcaaaacactcaaaacaaaagacttatcatcaactaaaagagagagagagaaagggatcgatgggtactaaatgtgtggaaaatatcaataagtaaacccttctatctctttatttctcactagaaataggaattgggagagagagagagagtgagcacaaacaaggcatcatcaaataacatgaagaacgctgaaacagacaaaaccaatgtcaaattttcttttaaacctcttatatacagcgataatttcgctgctcctgagtgcaatttcaattaaaaaaaaaaataacatatagagaaaaggttgagatagaaaaatatttgtgaacagcaaaagtacagtcaagaagaaaaaaaaaaga

SEQ ID NO: 99408 - DNA, 1573 bp, Cannabis sativa
tttttgcctccaaacctccaaaaataaataaaataaatattaggtatttaagtgtataaaatctaaaacattaaatatttatgccgcaatttattctaaattatatgagatttaatatttaattagaccaataataatattatcatatacgagtatgctaggatcactactacctttttaacatttctctaacatgcatgtgctctcttacttgactgaacagttgtgggcccatcttaaatccttgcccggtccaactccaacttcttatatattcttagctgtgatccactgtggaccaccacacccactcaaacccaatgtaattctttaaagtcaaatctaattttaattattgttatgttattagtctacctagtctagtaacgttatgtttggatagtaaattaatcatcttatgtatttgaaaaaaaatacatgaatactaatatagagagaatttggatcttgcattatatatatttatatgaatatatagtaatgtaactaaagaaaatatttaaaaaattaatttaacaacatatataattaatcattttattattagatataatttaattacattgagaaattaaggttttttttctagataaaatatcaactttaataaatttaatattctgaatacaaaatatttaacataacagttggtgcattaaacatgcaaatgctacaatcaagaaaataccgagacatcctaacaacaacatatgttaggcagtttgctaatcatttaacaaaacaaattttaacgtaaggtagcaatagcaataaacgaattttaactagggcttttttcttcattaaccaaacaagaacttaaaatgtttcatatgccaaattgtgttataaatataagtttattggaagttatcatcattcatcagattgatttcgcagctcttcctctctttttattcttgttaaatgtgaatgtgtgctatacttgttatccatattaacccaaccataatgcaagatatataacatttacttttctttaggaaacaatataagttaatttaattatacaaaaatttattaattttatcctaaaggatatgttaaaagtttgaagacgaaatagtgttttaatttccttttaattaaaaataataatactcaataattaataattagacaaattaaaataaaatcccatagactgcggagagctaggacagtacacatttcatgtcacatctaccatagtcgtaacttaatattattcgtccaaatatatatttcttgcttagcaatgaaaccgcgtatagactttttttcatttattactatatatttatttatatatatataatgaggtatgtatatatgtgtgttcatctctctcaagtactaattattagtatatatatatttctcattcttagtcttgaccatttacattctatctccataaacggaggaagtggaagtcatgaggattatatatataacctattttttcttccctaaattcatggtttttttttttttttttggaaggtcctaaattcatggttgcatatacgacaaatatgatatatatata

SEQ ID NO: 99409 - DNA, 1867 bp, Cannabis sativa
atatatatatatatttttttcaaaattcacaattaattttgcataaatcatagaatatgatttaataattaactaaaattttgatgatgagttcatgtttattttgtgtaattttaattgaataaccatattttggttatagggagattgtggggatgtattgtactgaagtgagagagcttggatttagaatacaagaactaatttcagagagcttgggattagagaaggattatataaagaaagtattgggtgagcaaggtcagcatatggctgtgaattactacccaccatgccctgaacccgagctcacttatggtttgcccggacacaccgacccgaatgccctaaccattcttcttcaagatcttcaagtggctggtcttcaggttctcaaggatggtaaatgggttgctgttaatcctcatcctaatgcttttgttattaacattggtgaccagttacaggtaacttaattcattcttactttctatgtccaatttcgatacactttcaaaatgtcgaatttgattcattccaaccacactctaaaagatattttatacataacaatgtctattctatatattattagtgggatactgaagactacactaattcttttttaaataattaaaattttttatatttattatttgtgtttatttataatttaataaaataatatagttttagtgttaaaattctagtgtttttgtgttggtttaataaatactaaatttaacatttattattggagttgccctaagtattttattatattttgtaggctctgagtaatgggatttacaagagtgtgtggcaccgtgctattgtcaattccgacatgcctaggttgtcagttgcgtcgttcctctgcccattcgatgatgccctgattagcccagctaacgggctcaccggcgatgacggttcgggtgccgtttacagggaatatacttatgcggagtattacaagaagttttggagcaggaacttggatcaagagcactgtttggaacttttcaagaatcattaactcacgagtattgttatgtgacaccttataatgcccaacacctcgtgatggggtattaggtgattggcgtaattaaatacgtgaagactcgataagaaattacaccaatcactgtataccacattatgtggtgttgggtaccataaggtgtcgcgaaacaatattctttaactatataatatgcagttctagctagagtagtaatttggatattctaagaacttttgtttggtaaaatgtgcctttaactatataatattatgtagcatagttgaaggttgcagtactactattactaccaccattactttttgaccaagtatggttttggtagtatatatagttatattttctgttggcatataaataattaaggtgttttgggggaaatagtatatgctaattttctagtcaagtatgttgggactgttttagttagtttattatgatcttatatatgtacgttttatgtactggtctggtgcctatattttatgtaacccatcttttgtattatggtaattttcaataatttgcattgttctaaatatttatgaaaatatagcttattggtcatttggctaaccagataaataaaggtcagtattgaagctttcacaactactaataattgtttttagattacgaactaaaccacatcgtttacaaatacgagaagtataagtatgatttatggtttaaagatacaatagtcgtaagtttttttttggtaatgaaaactttatggggtaagttgaaaaataccctttttattaatcaattaatcaagtttacctctaattttatatttatttgaaacatacctct

SEQ ID NO: 99410 - DNA, 5791 bp, Cannabis sativa
  modified_base (4241)..(4242): a, c, t, g, unknown or other
gttagttagggtgttacagcttgtgtaccaatctcatgcttaataaaagagaaaagtcgctccccacagataaagaataagaatggcaagagtgaatcaccttgtcgaagtccactggtaggtacaatattacaaacaatatcaccattaacattgacaaagtaagtgacagtgatggcataatgcataattcgactaatccaaccaggataaaatcctatctgctccattcaacgcaaaaaagcctaatcaacatagtaatatgctttagccatattctcccttttccccgtcttatgtcatttgatggaatttaaacattcaaactcaatcatgacattatcagagatgatgcgtctaggtataaaagtattctgctatttgaaaatcacatcattcaaaacctcccttaacctgttagttatcattataacaatgatcttataaaggacattacataaactaagtcaaaacccactaattaaagcctagctcttgacctttggaataagagtaataattatttcattgatagaagtagtcgaacctttactcgcaataaaccaaggcacgcgaagcacacaattgagccgacgacatcacaaaaatgctgataaaacccagcctaaaccacgtaaaaaagttctcttctttaacttccattaactactacaaatagttgtaattaatagttttcgaaaatctcagtcaacaagtataatagttaataggtttgaagttaagacgtctgtgttaaaaagttcgacattgctaatgtgcagaaagagtataacgtgtataagattcataggctacttctctcatagccaattagttttgagatatggaactcaatgcatcttacaattttaacatggtatcagagcaaaaaacaaacaaaaaacctctgacgataatccaatccaaaaaaataaaaagttgatcaaagtagagccaaaaaaagatccactaaatcctaaacttgatccaaaaagtagagccgaagtcaaaagcgccacctctgatttgggaatagtgagcaaaaaagagctactaaaaattcaaaaactgatccaaaaagtagagccaaaagagtcagttgtgattcgaggatagcgagccaagtagaatcactaaaaatttaaaaaaacagatccaaaatgtagagtaaaagagtcacttgtgatttggggatagtgagctagaaaaagaacctcttgtgatcgaattgtctaagacagtgaacaaaaaatagctaccatcttaaggggatattaaagagtcctacattactaatgtgtagaaagataatagaatatataaattacatcaactactattctcattattattattaaatagttttgatatgaaattttatgcatcttacaattcgagcagtctaccaataataatttaagaataaaataaaggggttggttttagattgttgaggtgtaaattttgttatagaagatttataagtaaaatagtaattaatttacagtaatagacaacccagagacaacatggtagcactgtaagactcatgtcgtcaaatgtttcaaacaaaaatacatgtcttatatttgacaatgaaactcccttaaatatcactcaaaaaaaaaaaaaaaatagtagaacaagtctctattttaacatgcaatgcatatatccatctttttgttctttatctttgttaataacaaaggtatataatatgtaaaaataataggaataaagttacacgattgataaggaattaaacaaataagaggcttaaaattaaaataaatagaatctaaaaatgaatggaacaaataaccatctttttagcatcaatgtcaatcatattagtttccgccacatatttttgttccatttcttaatttacatagagagtgcaactacttttaagaaggggtgacctcattatatttctatcattttcttctacaatttgaaaataattaaattctattacactcggttcaaccaaggaataattacaatttagtatatatctaatatttatgattttgttgcttttcttccataactaagcactgttgataaatgagttaaaatagttcaatctttacactatagtgaaaaaattataaaattaagcttctaataagtgaagtaaattttagctattttacatattttttagctgaataaatagtgtttattttgagagatattatttacaagccgtttataatttgcatctatttattaactattatccaccatattatttattttacgataaatttgaataaaatgtgatagaaggatcatattattgtaaaaatatattttgagagatattatttattagttgcatataataaaaggtacaatttaatagtgtaaaaaattaaagagataaaaatattaattattcttaattgtataaatagggttagagatataagtaataatgtgtattcaattttaattatatatacaatgagaattatataatatatatagttaggattaattaaataatatgtaaaaaagtgtatataatttaaatatttcacaacttttgtatcctctcttttcttatatgtaaaaaagtgtatataaaaaagtgtacataatacaattaatgaatgagtacaacttttgtatcctctcttttcttatatgtttttctctaagaaatcagagtttcacttgagactatttcaaaaaagaataaataataaataaaaaatttgtattattattgggatatggggaaaaaagacagtctacgtatcaaccttaacatccttacatataagtgtcacataagagtgtgaatgatgtacatagggacctcaacacaataattgggataaaccaaatgggatttggggttagggaacaaattgacatgaaatttcaaaagcagaggtgtttaataagaaagattatatgagatatgtcatatcatatgtatatgaaatggtaataacaataataataaatgacaataaaagacaggaccaacttattgtggatggtatgttagtgaaggtctcctttagaggtggctgctgtctattttagatttataagcactcaccatattgagggacaatatgcaatgccattacttttcaactccatacacacacaccattctcttgctttgcttgggtccacacattaatgtataaatctatatataattgtatatagaatgtaagtaatcatttttgaacaacttactgtatctctcttgtgtttgggtcttaaatcttactccatatcatttgtttatagaaagttcagggctttgggtttttagcccaaaaatcagtggaccaaatctttccaaacacctatacatttttttaggagtttttataaaaatattaaattttggataaaagtttacaattttactgtcatacagaattttttataaaaatattgtatctttatataaaacagcaaaacaaaataattaaaacaacagtagattaacgaaaagacaactgtggaacaatagtgaaaacttaacataatacatagtatttttaaataaaatttggccccacagtaaaagaaataaaaaagttgaaaatttcaatatgtagtataaaaatctcatatataaatctatataattgtatatagaatgtaatcattttttaagatcgatgttgaggaaattacactgtatactcattttactttatatattttaatttttacttttatttttatattttttaaaatatatccacttttatagataatgtctctattatactttttaagtttatgaaaattatgtgctatactcaagtagaagataagggtatataagacaactcactcataaaatgagtacattttaataaaatataatataaaagtatttttaattaatacgaggatattcctcgtcgacggggtccctcacttcttttctttgctttgtatctctcttgtgtttgggtcttaaatgttggtccatatcatttgtttattgaaattataggctttgggtttgtagcccaaaatcacaggatccatatcactacattttttttaaatatatttattatatgtatactctggaggttgttttatttggttcctcaagttactagtgctagttgtcatgttaactttggagatccaagatcaaatttataagacaactctaatgtcaaaagttaaatctaaggttaaatcaacactaaatttacactaaaaaatattctttattnntatattattttattaaattatctcacattataatatatatataaatttagaataattaatatttttatcctctaaactttttatttaacactacataattttaccctttaaaatatacaatttattaaaaatttctcttaaaatataacaattacataatctaaattttttgagaaaaaacagactcaaacttgttctcataaaatttagtttttataaaaattaaattttaatatatttttttataatggattttttaataaaaaaaataattttttaaatcgattaattagttttacattttaattttctttttaatttttttaatcattcaaaatgatttttttaagatctaaattattttttaaaatttactaaaaaaatgttgaatctttctcatttttattttaaatagtgttattccaatatttcgagcattgaatacggacatgacacgttgatttaagcctcaaaaattaaagaacttataagcgtgaggaattcaataggtttctcgccttaggatgtgctacaattaatgatgtgtttgtattataatatggctgccaaataaaagtgataaaattataaatacaatgattagcgagataacaacatcataatttcatctcagacttgaccgagataaacaagacatgtatgggatacgaaggaatgagctgctggaaaggttagataacgagttttttagagcttgcagctcattgaccacatactcatgagtatgttaaaaggctaatggatttgagcaaaagacgatctatctcgaaatattcataaatgacgtgagatgattgaccctaaggaacacaaaagttcaatcctaagtgctatcttgagacctttcttatacaacaaaagcgaggacaacacctcaattagcgtctcgcaaaataagactactaattcctaatattattgaagaatgcgagacatattttgggtatgtcatctcaacaaagaaactgctttcaagataagtacaaaaagcgattaccaacagttaattcatgtatccacaaattgtaaatatgaaacgtgtggattatccacagttcaaaaacgattatcaagataagactaaaacggaatagctgtcattcctaagaatcctataaatagaggcagaacctacgatgtaagggatagacaatttttgggagaaaaaaaaatcttaaaaaattaagtgtagaaaaactcagaggttattactttgtatcgaatatcttgtattcttaaatatatcaagaacttagaaattgtaacgctctaatctatagggacgccacgtgtgtgattttataaaatagtttaatactaatagaataattaattattaaaaaccgtgatattattaaaaattttactaaaataaaactctcaaaacagacattataacgacataaaaaacgcgctctgaaaatccatgttataaaaaattgttactaaagaaatatatacgacaaccatttaaacacaaaatcaaaatacacaatagatatagccagcccaaaacaactcctggcaa

SEQ ID NO: 99411 - DNA, 1438 bp, Cannabis sativa
  modified_base (1221)..(1223): a, c, t, g, unknown or other
tcataaaaacgtgtgtgctatgttaattacattattattagatggctaacatgataaggaattaattgtctcgtgctaaaatgatattattaatattattttgttgacatgattaattaggaccaagccaacacctatgcactggtagtgagcacagaagccatgaccctgaactggtacggcggcacaaacaagtcaatgcttatcaccaattgccttttccgcctaggcggcgctgctgttcttctaacgaacaaatcatcggaacgccgtcgttccaagtaccagctcatgcacaccttacggacacacaagggcggtgatgacaagagctaccgttgcgtcatgcaacaagaagatgatgacggacatattggcgtgaagctctcgagggacctcctacctgtggccggaggcgccatcaaaactaatatcaccatgttaggccctttagtccttcctatatcggagcagatcctcttcttggctaatgtagtagggagaagactactaaggatgaagatcaagcagtacgtgcctgatttcaagctagcctttgagcacatttgtatccatgcgggtggtcgagctgtccttgatgagatcgagaaaaaccttgatctcaccaaatggcatatggaaccttccagaatgaccctttacaggtttggaaacacttctagcagctctctttggtacgagctagcttacactgaagccaaaggaagagtccgcaggggagaccgggtatggcagattgcgttcgggtcgggttttaagtgcaacagtgctgtttggcgggcgatccggtctgtcgatccggcaaaggaaacaaatccctggattgatgagatcgacgagtatccagttattgtgccagaggtgcaacctgttctagccgaataattgcattttaattattgctagggaaacaaatggtgctcgagtaataatagagccttaggtcactcgtgtcttgaagccctatggcgtgtggtgtgatagcatcatcaccaatcaccattgatcgaaattaaacttcaatttatgttgcctttttatcttctttctgttttggtgtactttgtgtggttatcgtccatcgatctgaagggcttatgtgtttggtactatagtattagtagaacgtgccttttatattgactgcatcatatttgaagcaagctaggagagaaaactattatgttttttttttttttnnnaaaaaaataaaaaattaattatatgtacgttttcccaatttctttaagtaattttctgataaattttagaaaaattttataatgcaccccgtaaaagggccacatcgatatatttctatctgttttagtattcaaaataattttttagtcaatttttttttcataatcatgtaaattataattaattaaggcatcttacaaaattttaagaaatt

SEQ ID NO: 99412 - DNA, 1402 bp, Cannabis sativa
taaatggaggcagtattccactgatgacataatggactttgtttattattattattaaaaattattttagacggttttgttttttaatcaggagtttagttacatattattctgaactttattgtatatgtcaggctgcttgggttgcgggacaatacgctcatattaatttctcagaccagaataatttccggaaagcactgcagagtgttgtgtctgggatgcgagatccagaacttcccgttcgtgtcgattctgtttttgctttgcgctcttttgttgaagcttgcaaaggcgagtatctgtctgctgttccttcactctgtctgcacatatatgtatatataaatatcgtcttaacacttgtacgttgttgtgatttttcaatatgcagatttgaatgaaatacgcccaatccttcctcaattgcttgatggtatgtggtttataacttctactattagagtttgtcaaaatcatgcaactgactgagtttgcttattgttgtcccagagttttttaaacttatgaatgaggttgagaatgaggatctagtgtttacgttggagacaatagtggataagtttggggaggagatggcaccttatgcccttgggttgtgccaaaacttggtaatatatgcatcatttagatacaactatactggagtatgtacttttatatattaaaaggaaaaaaaaagttgaaacattgtaattccttgtttgtaggcttctgcattttggaggtgtatgaatacagctgaaaccgaagaagacgctgatgattctggtgctttagctgctgtaggatgtttgcgtgctataagcacaattcttgaatcagtcagcaggcttcctcatcttttcgtacaagttgagccaactttgcttcctataatgcgtagaatgttgacaactgatggtcaaggtgtgtgtctgtgatattgctttcttcaatgctattttattgacctcatcgtctctattcttctttctttcctgccacttgctttgaagggaaatagaccatttgtgactttatgttgctcaatgcaagtattgtaaaatttgcagaaatgctacacatggtttctttagaagggttgactgcaaaatagaattaaaactattatgaaagatgatattttttctttgatcatgcgatcattcatcttgtagtacgcaatccaaggataataaggcatcattgggttgaaatcggcaactgatgatgctttacaattttgacaatcttgatgcattaatacttgaaactggtatactactttgagtttattatttatgatcaaaataacatagtgatctggtttagcaataggatttgtaggtgtttaatcatgtctataatgtctaggcagtgctcactttattgacttctt

SEQ ID NO: 99413 - DNA, 4027 bp, Cannabis sativa
aacactaatacaaacatgagttgtaatttctttttcaattattttagtagggtactatacttttctttttcaattcatccccttgagctcgctgtagtttctcaagttcattgtcgttttcatatcagagttgtcgtttgtcagcttataccattaatataatgtcgttttcacattttatgtccagtagtagaaaagagtagtggagtggaggcattcaaagccgttacgacactttaaataggcttaggacacgtgtcatcattagagtagtccaatccctaatagagaaagagatagagatggatagatacaaataaatattcataattttgttttttttgttttttctttttttggccaaagtcgaaaatggcgctaatagctctgttcatctccgcaaccaagctcgccggaatcttggtcacagtctccgtcgccgccaacgctttcacttactctcgttttcgccgcaaaagtctccgtcccttcaaatctcctctcgacgagtcctcccacatactcgcagacttcaatgtcaacggtaactaatacgttcatgccacagccactagctacctaggttcgccaacttagagaaagtttactccttttattcatttttcattaatttcttgtattgggtagctgtagattgagtattatcgttcatggttttggattgagtggaatcggtatgttgggaggttgtttggaagcattcatttctgctcatttaagtgattattaatatacttattgttgttggagaaattgaaattttgacaacacgggcattcaaagttcatttgaacactcaagaacaaaattgcaagtaatcacttagaatagcaagtacaaaaaaagtaaaatttatgagagtacgtaaataatgtaaaaagcacactaaaattatagcgaggtttgagactaccccactatgaaaagaatactctttgttttcttattactgatgagtcccctcttgaattgaggtgtttcacttcacatacttataatatagtgtgggtgaaggttacaaattgtggtcataatgtgactgttacaataataattggcctattgattgtactaattacagttgttatagtatcaacatattacgggtgatgtaggagacatctctatttttcccagcttaaatgtttgattgtttattttcgttgattggtgtgtgtttccacccttgttgataatgtggattttacttgatggggtccctttagtgaaatcattctccctctatggacactttacatagaattgaaactgattttaatctaggattctataacaaatttcccaacaaaaattggggttctttttagagtttggtattgaaaatctatggatctataaattcatttcggacatttgaattttttcaaactgtttcgttttaagaaccaaaaggatttgtgccaaaattatattgcttgcttttgttgttaatttcacaactgggactttgttattgtgattttcaaggtttttgttgttgttgttgttgtgtgatgattgattgtagatggtgaaaaggagtttttctttgggttggccacggctccagcacatgttgaagacagattgaatgatgcttggcttgaatttgcggaagaaagtccatgtgagaaaacggagacacaagatgaaccagtgcttgtagatgccttaagtacagctagtggtgatggtggctcacagccaaaggtaacttcttcatcaacttttgataaagttaatcaagaaagtaagaaaaagaagcctcttaagttagctttggaagcaatgataagagggtttgaaaagtataaagaagatgaagaagaagaagaagaaaaaaagaaagaagatgactctcctgcttcacatgaagaatgtcatcataatgtagctgcatggcataatgtcccacacccgtaagccttagtcttttgacactatgtcttgtaattataaaacatgttgagaaagagtgtgttatgcttattcatgattcttttgtcttgctacttaatatgacataatatgagagaacactttgtcttaaattggtttcagagagcaaaggttaaagttttggtctgaaccagatacagaactgaaattggccaaagatactggtgtcagtgtctttagaatgggtatagattggtcacgtattatgcctgaggagccaatggataatattaaagatactgtaagttggattccaagttttcaaatatagaattcatccattgttatttcattccattatgaagcttggtgtagatagtctttttattatatgcatatgtttatttggttcttcttctgttatgtaatggactgaatttgatgttgtcttgaaggttaattatgctgctttggagcgttataagtggataatcaacagagcacggtcacacggaatgaaggttatgctcactcttttccatcattctctaccatcatgggctgggaaatatggtggatggaagatggaaaaaacggttaattatttcatggactttaccaggttagtcttcttctttttaatttttaatacaattcttaagatgttgttctacagtctttgacatgaactaattacccctgtctcatccatttgaagaaaagattggagttgatatgcaagtactcttttgtattatcatttgtcacttaatcatgaataagacatttatattggtttttctaaactcttgtttttgacatttcaggcttgttgttgactgtgtatcagatatagtggactattgggtaacgtttaacgaaccccatgtcttctgcatgcttacttattgcgccggtgcttggcctggcggtcatcctgatatgttggaggttgcaacttctgcattgccaatgggtgtataccaacaggctatgaattggataacaatagcacactcaaaggcctatgactatatccatgaacgaaggtatttctttcttatacaagctctgttaaaataatcagtagctgtaagatagttctaaaccatttgtggacaaagttgattagattggttaaattaaatttgggggggtgtaaacaacattcccttttgtcatatgtggttcactaactataaatttataaacttctttgtttctttccaaatatggctgtgtcttccctccatcagcatcttaccaaatcccatagttggagttgcgcaccatgtctcatttatgcgtccatacggtgtatttgatactgctgctgttttactggccaactccatgactctcttcccttacatcgatagtatttctgagaagttggattttattggcattaactactatggacaggtttttcttctaccaaatatggctgtaacttcagtgctcttaaatacaagccttaaacatttgaacactaacattatctgcccaatgatcaggaagtcttgtctggtactggattgaagctagttgagacagacgaatatagtgaatctggacgtggggtgtatcctgatggcttgtatcgcatgctgcttcagtatcatgaaagatacaaacatttgaatgtgcctttcattgttacagaaaatggagtcgcggatgagacagatttgatccgccaaccatatcttttagagcatctgctagctatttacgcagccatgcttaaggtttgacacactaaactgattaaagttgtcaattcagttagtgtaagtggttgataaacatgtttgaattgttctgtagggtgttcctgtgctaggctatctgttttggactatttctgataactgggagtgggcagatggatatggtccaaagtttggacttgtagctgttgatcgtgcgaattctcttgcaagagtaccgcgcccttcatacaatctcttcaccaaggtcatctaagctgccctacttatcttgctcaattcaatttgtttgccatagtgttaagataacaaggtctcacaatcgctagccgatatggttttttagtttaaaactgcagcatttgtttcgtgtc

SEQ ID NO: 99414 - DNA, 2222 bp, Cannabis sativa
  modified_base (1430)..(1435): a, c, t, g, unknown or other
tagccattaaataaatatacatttgttagattttcagtatgccattttgtagttcagtgtgccctctcaatatattctgatattattatcccaaaaagcatgacttccacacagtaaaataaaactatcttggtagctataaattccacacaatcccagctgctacatcattcatttgataatcaagtagttacacccacccaaagaataagatcaccaatgtctcatcatgaatatgatactaatcaaaatccaatctgcaccgttgatccttacgactatctgaagatcatccgaaacccagacggccgaaccatcactcgtcacctccaagtcccaaccaaatcggcctcaccggatccaacctctctctccccagttctaaccaaagacgtcactcttaacccgacccataatacttggatccgaatattcttgccctcaaaagccctaactaatactaataatgatgataataagctccctcttattgtctactaccatggcggtggcttcatcttgctcagcgcttcttcttctttccaccacgatttttgctccgacatggcggctcaactctccgccgtggttgtctccgtcgaataccgcttagccccggagcaccgcctcccggcagcctacgacgacgccttcgaggcgttggattggattaaatcaacggacgagatttggttacgcgagtttgctgacgtgtctaactgttttcttatgggtaccagtgctggtggcaacattacataccatgttggacttcgtgctttaacagccgtcgatgaacttgcgccgttgaagatcaaagggctcgtattgcatcattcgttttttggtggggtcaagaggactgaatcggagataaggttggtgaacaatcctgttttgcctctaagcggcaatgatctgatgtgggagcttgcattgccaattggtgttgaccgtgatcacgagtattcaaatccaacggctgatgttcgtcgttggtctgataattgtgatggaattaaagggctgggatggcgtttgttggtggtggggtgtgatggtgaccctctgattgatcgacaggtggaatttgtggaaatgcttaagaaaaatggtgttgatgtggtttctcagtttagccaaggttattatcatggggttgagattgtggatccaactaaagctacagaattatttgttttacttacacaattcctaaataatgacaattcacaactaccaaaattaaaataaacatattgtttcagtactgcttccaagaaaaaaaaaaagagaaattattatatgtatacaataaataaatcatataatatgtttctcaaataataaagatgaaaaatcatgtaatgtatactttatttatttttatttattttgctttgtgcctttttttttattattattatttnnnnnnttttttttttgtattcttttagttttcgcctaataaataagcttgttgtatcgtgtcttggtaagcagtatatttcaaaagattttttttaattatttattattatcacgataataacttgaaaataaattaaaatccaatacttattatttcttttccttttttgtttatgtgtgaaaaaagggaagaaagaaggatcatggttacagtgacgggtcagaattagataataagggttaatattaagtggcttatactacaattttaaatttaggtgattaaaatttatttttagggtgtgtatcaattgagaaaaatattgatagtttttaatttttataaatattttacaaaatatgaatcaacgtaattaagctaaaaataaaatataaatagtgttaggaactcaatttaatattatcaaaatcaatatttacttataatttcttagagaaaaaaaaatagtataattaaactaaggtatttaatataaataactataataaaattacaatacaattataatattactattattattattattttattataattgtaagagctacacttaatatatatagtatacttatatgtgttgaatacaaataccaattttttatcgtccaatttaaggagggactatatttttatttacttttatatataattattatatatatcttattattataaaagtgtgacaactttacctttagtgaaattaaatataatgtgataagaagacaattttactatttgaaaaggggaaatttgaaattccatg

SEQ ID NO: 99415 - DNA, 2460 bp, Cannabis sativa
  modified_base (76)..(114): a, c, t, g, unknown or other
  modified_base (2299)..(2306): a, c, t, g, unknown or other
  modified_base (2417)..(2419): a, c, t, g, unknown or other
aaattgaaaaacaaaagtggttacagaacgcatttttgttttttaaaaacaaattttttaaaaataaaaattttannnnnnnnnnnnnnnnnnnnnnnnnnnnnnnnnnnnnnntaccaaacggcacctaaataactatattgtcccattcaaaaataacttaattgtcaaaaatgtttattaaaatcttaattgcgaaaaagcatagagttagtggagtgatgcatgaaaagagagtgatacataagttaattcatatgtatgtatatatatatagtacggcatggaacatgtatatgttgtcaattgatcccttcctacctaacaaaaactagtattttcctccaccttatcatgtgatttggacaaagctccccaaataattattattatgactttttttttttttccaaatgaactattattgtgattataaatacatgcatatagttcttcctagttgcatgtgatcaaaacctaattaattttgatttttattgctaaaatagagagacaaaaaaaaatcaaaagaaaaaaccccttctaattatagtaagcattgaccacgttaatatatactcatgtgattaatttacaatttttggagaccttggtatttatttttatttttttgacatgaatgctgctttgcattatttgattggcgttataattaaatattgtaaatgtcgtcggctaatttttcaattgttttagttttatcagttactaactgaatattctttcttttttaaattttattaatttaagttttcaatgtaattttaaaagtttataattcataacaatacaattttctcatgaagaaaaagttagtataaaaaattaattaaacactgatgaaaaaaaataacaaagaacaagacatcaactttattatgcaaatcaattgaagattaactaaaaataaattataacacaactaattaaaaaccacgtcaaaaaatttatcgctattttttgaaatgtataagaaatagactaatatatacaaaacaatcaatatcaatcaatgaatcaacataagggaaagactaaacaaaaatgaggtgacatgttatgaatatttcattgtagtgtatctttttttctcattttttttacattttttatttatgttattcctcgaaatcaaaggatgatggcgttaatttttcttctgtatacaaaggaagtcatatcacctgaacaccattttgagaactttggtcaagcttcatcagttcatcgccctagcatagcgatggtgcatcatctcggccctagtcgagatgtacattgttagtgcattatctcggccctagtggagatgcacaccatcaggaccattttggccctgacaaaggagctccccaccacaccatcatctcagactcacctactttgcaacaccaaggaattatcttggccctagccgagatcaccacctccaaaggcctcatcttggcccaggctgagatcacaatactaggacatcatctcgaccctagccaagatgacaacaccaagtcatcatctcaacccaaatcaagatggcaaacccaacatgctacttcgacctaaaccgagatgataactccaacatatcatctcggccctagttgggaagagcctcaccaagcaacatctcgaagctcaccaacaagcaccatcttggcccgagatgcacactattagtgcatcatctcgaccctaagctaagatgctccttacctcagcacgtgcttctcacaactcattagcatcatgatctcgagatgtgctccttgtgatgaaaataacctaggatatgtgcattaaagatattttcaataccattttcttagatatttattttgaaatataattttcttatcattttatattttaagcctaactcggctatagttaggggaaggtgcatcttaggtaaagagattttaaactccaagagagtcctcgatgaaaccctatataaaggtgatatcaattgtaaaggatagtttgagggacacttttttaattactgaaatgaggcctcaatcatttactgcgttaagccaagcttgaaggaaattatcgtttcacttctaataattatagaagctatagactccatatctatgattagcgctctcactcaattgcactaccatgttcccaatatgtaagtattaggctgatctaattggtcagctttaacgaataactcaaagaacaaaaatcatacattcaagctaaaacctaaccatctcaggattaagatctattgaccaaagtgttgggctttgtgccctannnnnnnntctatttcaatgtaattttttctattcaattatcaataaaaaagatttaattccattagttgttcaatgtgttatttggttcatgtgatcatttatttatttatttgattnnnaaattcatccaaacccttatcacgctgatattcttgtttat

SEQ ID NO: 99416 - DNA, 2583 bp, Cannabis sativa
tattagctaatttattatatgattttcttaatttttttaaaaatggacatttagtaacttattttccaaagtttccaaatttaagactgcatctcagcccatcaaaagattagaacaaagtttcacattccacatacaattgtactctttttctaaatatgtcttttaaaaaaagaaaaatcataaattaaaagttggatgatgtagtgttaggcctgagaatgtgagtaagattttaacttttgcgtatgcagaaaaattgtttacgatcaaacacaaactataagtaatataacaaaatgaaaaacattgcacgaagcaataacaaacttgctgatattgtaattccacgctactaacttacatttataaaagctaattttccttgaaagtaggaagtagagcgcgcaagtactctctcaatcaaaacgatacgcgaaaaaagactggaaaaggccatgcaagcaaatcaataataataataatatatataaaggggtctatttgaaaggtcaaatagtcaatctgctacaatcagtgggcttaaacgataccgttccaccatcaatatcatagcccaccaaaaagttcatttgagctaagtttccaaatatggcaaaatccgtagaaggcgccatagtgaagcagaataaatcatcctcaaccttcgcaaacgtgttcagcggattcaaaacgacgtcggctcctgtaaagtgagctgtgatagcaggaacactaatactactctctgatctaaaacacagactcaacactcctttcggatcactcaccttctcggcttcaatggatttttctagaacctgcaccaaatcatcgtagaacccagccgggagaaacgtcagagtcgtcccggaatcgattatgatgttcccctcgttatccgctaccccagccttggacgatgacgtcatattgtaatggttagtatcatataccaacctctgttttccaacgctaatggcttctaaagtgaggtaatagtaagttttagggtctttgtttgagactaaagacgtggaaaccacaccgttaccagatacaaccgccgcactgccgaaattgatcttgcttgtgacgtaagattcagctgacaaaggaactaaacagtaggagaacttaccaccgatggtcttgcccaattgagtgactaacgaaagagacccacctccgagaccaatcaagccagaaccagactcgtcgaaagtaccaccattgtcatggccacaaccgaaaacgattttggggattgaagtagagccaacggtaaaggtctcggaagcgagatcgcccttcgtgtaggaacggtctccgtatgagtagctgtacacgcacgtgtcgtggtgcgaaccacaagtagcttggtagagctcggcgcagggtttggcggagcatggaacgtcatggtaggtggtggacttggctgggtcgaaaagggttggggtctgcttgaagcactcggtgcatggcttgcactgagtccatattagatcgctgccagtgtcggctatgccgatgagttggattggtggggtgccgatggaaatgttcatgaggtactcgccttcgctgggaatgattcttgattggatagctgatttttgtgtcactaaggttgattggtagtggctgaggcgggagaaagagcggcggaaagcgttgtgaaggcggtcataatgagtggtggaaggaattgtagtgtgggagaatggagaatcgcgttgaatgagatcagttgagaaaccattagttttactgattgatgctctcgatgcagctgtgaaacaagaacctggtatgaaacaaataattgttaacaaagggagagcaatgtgtagagccatattattctcttaggtaaataacaatcaattatatgaaagataacaagacaactctatagtggttttgcagggcttatatagagattgcggtaaatgaccgttattaaattttacttcattgtcccatgaattggttattaagaatagggaaaagtgaagagttggtcaataagtatttatatgtttatcatgatcaaatgttaataaatgtgtacgtttctaggtataaattaattaattttctttctcgttattaagtattgtgatatttatgaaataatctcgttactagttattaagtataaacttctccgcatagaaaataacattttaacattctgagttgaagatgaaaaagcgaaacctatatatgcattaaaacatacgttatgtgcctatgaattttattgtattcaaaggggttattgaccacgataatgttatttaaatgtcatccttcaaagaaaagaaaaaagctacttagttctctctctctcgtacacccaaaaaaaaaaaaaaaaacaatgtcaaaaatgattaagggttatcgtaggaattttgacagcactaaaatattgcgattacttacttagaatacttagtacgtacttaatatggtttacaatatcttagatcagttaggaattagttagttttgttagttatttttctgtttattctgttatgtactgtagcttggctttgtgcctataaatacttg

SEQ ID NO: 99417 - DNA, 1431 bp, Cannabis sativa
ggtgattgttggaggggttttcgtattcgaggattccagcaacggtggtgttgtcgaaagttcctaggcccgtggagtaaggtctggctagcatgaggaatttagtgtggtttggtggggaatttggttttgttttgaggagaaggtttgtggtttggccaggcgtgattagtataatgtcagtctcaaatggcttgacgtatagggcatcggcttcaactacggttacagtgtgatttgctatgctgaaaaagagttcatcgttgagtgcagcgttgatcaaacggaggagataggtttttcctggcttcacctttaatctaaaagtgtctgcaacatgcaaaatcaccatgtaatgtaaattattaccaaccaaaaccagtaaataaattattaccaaccaaaatcatatgtttatatataaaaagaagcatatatggtccactaaaggttttggaagttcaaatttgatgcatgtgtggttcatttacctttctgtgaacaattgtacaatgggccaggaagcccattgattgtgtaggcatcagagacatttgggcccgctccagtctgaagagcctggctgataacagtctctgtatccgcattccaccactcacctgcataatattgttgttattattagctaagtaatcacttacgtaatgtaataataagtaattggtatgaatatgatatggtaaaaatgtaaaattaatatttaccaaaaatgatgggaacttctttgtggggtttgggaaaagggtaagaatcattgcgggtagggaggataataatgggtccatagacagttgctctcagccatgagatgtgagcatgccaaaacagagttcctctctggccagttatggtgtagttgtacacataactttggccactttgaatggggcattgggttatatatgctggcccatctgcccacccgcttcgaagctgtctaataccatgcctgcattatcaattaaacccccaaaaaatgaaattattatatacaagaatatacattttaataactaataaataagtcacctttgaggataccactctataaatatgataagcacaaattgcatcaataaaaatgagtattattatttgatttatttatttaaatatttattcaaatttaagagtattgctatttactattaggcacgacaacatcttattttttaatacttaattacactaatattgacaatcatacatattaataacatttgtccgaagtgtaataattttgtgtcaattcaaatatttctaggttttaaaaaatgtgaggcctgcttgatttttatcttcatactattagaatatttctaattaaggaaataaaataatattttttattctgataaatgaatattttatattcattgaatctgaacagaatcaattacgtaatattct

SEQ ID NO: 99418 - DNA, 3063 bp, Cannabis sativa
  modified_base (3000)..(3005): a, c, t, g, unknown or other
tatatatatataaatacatatatacctcttttggcttcgtcttctctcccaccacaccacacaccgaccctctctgccattttcgacgcgtttctcttgctttttccacacctgtgttctcaccactggcagcaatatttccaacccacgccctctaaatacacacaaaccttcttatcctaatctttacttataccattccaaaattgcaccacgcctgtgtttgtctccctctttctcacacacacacacatacattatatatattacagttatcgtacgttttgataattataaacaatggacaacttccctactacggtccctcatttccttacatcaagtactagtactagtacaacctcatcctcacccttaatccactccaaagaaccaaaaattatgactgctactactacaactacaactcatgatgattctcacaattcccatttcatctacacctcccctcagttctgttatgcgactccaacgtactggggtcatcaagatcatcaaggccgccgccatcaatttcctgcgggaagtggcagtgttcatcaacctgttcctgctcatcggtctggtatggcctatcacccattcatgatggcaacaggccggcagactagtggtggtggagtactagtgggggtatcggaagagcaagagagaaggcttttggatgcctggacaaccaaagttgcaaggagtaagaggagaatggctcgtcaaaggagtctcaatttggtcaccaggcagtcttctcctcctccttcttcttcaactaatcatcatgcaactagtttctccactgccactactctcggcgagtacacaagggaacagcccatttctggctccggcgacagagatctctacaccttttgtactccagataagaaggttggtttgcttctatcactcttagcttaagtattgggtttctcattttattttatttataattatatttgtttgtcttttatctgttgcccacttctgttgtaatttgtcctctatatatcatcatcatcatctatatttggttcttcttttttataaccaagttaataagctatataagttacataatcagtactttgggtgcagagactgaggatactgctgaagaaggagttgaagaacagtgatgttgggtctttgggaaggattgtccttccaaaggtgagtattaataatttatctatgtatatgaagaaagagcgttaaagaaaaactattttgatttatattatcgttccttatcacttttatttttcttccaaataaaagggttaacaaaagaaataaacgaccaaccaaactcttctatttgatttcctcttatatattgactactgcaacatgattgtgatccagactgcccaataaccataatctctttgctgacataatctcgatttttgtacacaaagatggtaaagaaataaagtcgttgatatataaaacaggaatatacttctaaaaaaaatatgtatttacatatatctatatacttatcttttgataatataaacttatatatacaaacatatccctattgtactgaagctaatgactattatatctgaagaagtttatatgagagattacttcttacttatcatgcaattaatttgacataaagtcgaaaatgatataattaataatcatatcttagagggaggcagaggaaaaacttccaaccctttctgataaagaaggcatccaagtagtgatgagagatgtatattcaaatcgggaatggagtttaagatacaagtaagtactacgtacacatatatgtgtactagtatactatttcaaataattttgttatatgtatttagagctaattaagctattaatcatgttggatttttcaaaaccatttacaggtactggtcaaataacaagagtagaatgtacgtcctggaaaacactggtaaatatattttttactaaaataatttattgacccacatgataattatctttacaatcccaagttatgcttacttcattatcgtttctagcattttggaccttctcttatcgctttcactatatgataacaaagtctattgctcattgcaatgtaacaggagaatttgtgaagcagaatggactggagattggagattccattgctctttacgaggatgaatgcaagaatctcgtgagtgttactttcttattagtacaaaattagcactgtgctagctgaactgctgatcaaatacactaatttttcttttctaaaaaaaacagcaaagagtaaaaaataatttaaagggttaatcaacattcaaaactagcacaacttgcataagaaaatgacacaattgcccttacccttttctcattatgatgaccatatccttttgggagtaagagaaatggcaagagacagaaatggaaggtgcaatatatgtttatggacaaaagaggtaataaaaaataaagtattaagtgacacgtagtagatgatgtgttggcaacaggaattgctttttgaaataaccagctaagactacacacgttgtgtatgtggacttatattttttgcaagtgaaacggctccaagttcttggctggacttgccatacaaaagtcttaataagcatcaaaaccgtagaactactactggctctttattttgcattgtccctatgtggatatatttttatatacccaacatgtaaggtgggccagtctccaacttaataattccaaattgagatgcttagcattaaagcacaaccaatacttccctcatgttgcttacgtaattaattaaatttaatgaccgtttttcattaattgcattcaaatactaggaattggctcatggttttagttttcactagtagtattgtaatttatttattatttaaaggttatatttttattgcaaatattatgtgtacatatttttttttacctataatagtaggttatcgataggtaaatttttttttagaatcaattaattannnnnnattatttacttaaaataattaattgaatatttaacaatacctcttttagcaattaata

SEQ ID NO: 99419 - DNA, 1328 bp, Cannabis sativa
tatatatatattctagaatatataataatattatatataatattcaaacaataaacaccgtcaatgaaattggaaagagtttggatatggtttggtctacactctacgactttgaaacatttcgactatgaagcaatagaatgaatatataaataataaatgtagatatttatgtattacaccaaatcaatgtgggaaaggaattattaaataaagctctatctgggtgggtgtgtgtctgtgtaaaatgtaaatatataatgttcactttttaatatggatatatatatatatatttatagatgtggacttagatataccaaaaggaagtaattattatgtgtgaaagcttattaattattaaatagttcagtgtttgttatcaaattagctccggcagggatgtcgatcacctagttgctaactataagtcggtgttggacctataaattttggaaaaaagacaaaattatatttgcctattcgaccgacatgaaaaaaaacaaaaaaaaaaagagagagaatacattggacctagtttttgattagtactatgaatccaaatttcagtatatatatttaattccataaaataggcttgtataaaataaatcttattccacaaacggaatatttataagtcgaatattatttaattactttttcttagggttaatattatttaattgctttcacggaatggaaacacatgtaaaaatatgggacataaagttttttttttccttctttttttaaatgtaggacaggaagtttcaatccgccaaacacattatagaacccaattgtttataatttctttgtccatagtttaattggctgatttacaaattttgattggctttggccaagaattttgtgcaaattttgaatacttttcaaataactaactagctcgcttaataaacaaattatcagagtgaaatactaacatttttaacgatacataaaattggtatattattttacttcatgacataccaaattatacatcaaattctacattattaatagtattgtattttgaatctacaccaatttagtatataactttcttttgtatccccgcattaatttacctctcaaatcctcaattaatttcttatgcgcatgtaatttgcttttaggaggtgtttggaatggattaatgctaacaagggtggtaaagagaatggtaatgtgaaacattaccttgtttgttgtgagggtttagccttggaatattattcccttagtaatataactaccctcgaggagggtaatgttgatactttaaaaaatagtatgattgaatcattaccttccattat

SEQ ID NO: 99420 - DNA, 2855 bp, Cannabis sativa
gaaagaattgacatttatccaaatgaaagtaagcataaaatttgatttgtctctaaaatttggcttatggtgctagaaagaaatgtctccagacaaacaaataaatttcacaaaagggaactaaaactagaatgaattgccgcaaaccttgtaggcttttgcagcttgcggttatgagtgagagagttaaagttataaaataaaatggtggatagttaaatacaagtacatattaggcctcaaaatcatgcctaaatttacagaccctgaatctgcatcccagacatttttttctctccctcatctcttttgcaggaacctagcataaacaaaggtcagtaagcatcataccaatctataagaacaagcttagcttgtacaagacatcatagtatacttaacagaactgtatttgtccaagattcggaacactgtaaacttacactgatcatacacaagaaaaagcaagaatgctcgcttaatcatcttcttctccaaggttgaaaagcaacctgaaatacacccccgtgaaatgagtaaactatttcaacttaatcagatacatgataaaagaactaacaggccaaagcatgattttatgataataccaaaataaggagaagatgaaaagaaaaatgagatatcccatcttgatgaagcgtttctttttctccacttttagttgactatagatttcagttacatctaccaaatgctgtccctgaatatatctgaatagaatcacaccatcatattagattgcagcaacatttctgaacgtggtatttaaggaagaactagtagtttctttaattatgcattaacatggtatttaaggaagaagatttgtagtttctttagttcagtcatcactgaacttacagagaaacagtaaaataaagaccttagcttctcatttgtgccagttaataattacaaaagtttgttcaagttatgactgaccaaatttcataaaaaattaacagatatgactaatgccactctaatttcagaattaattgttatcatcataatggtagcagcttaaacctcagtatcctcaggccaaatactattaggagaaaactaacatagcaaaccgaattaacatgagatagagttatctacatgaagcaattttcccagtaaatctcatcaatgatagttatcttatatgacgactagcatactttcagtctatgtgcagatcagattagattataagcattagacactactggtattttacaaatttactagaaatctagtttcaacgctgtttttgcttcaggatatatgaatttaaccacaacagtaaatatagacctgttagataatctctccaaactgttctagcatttcattacagttaagccttcatcttgtaaatcagacagcaactggtacaggtattaatggagactaataggttttactctgaaatcaaggtaaagaatgcccaattgatcttttcataacaaaatctcgatagggtaagaaagaaacttactgtctcacattataatacaggtatgggagatgcaatagacacacaagccaatgtcctgtggcaagaagtactaagcatagagctccttgagtaatgaactctggcaatacaacattgtttatccttgatgctgaatcataggggttgatataatcatactctaaatcaaccaagcatataagctgcaacaaacatattcaacagtaaagttagaacaaaaatcaaataattgataagtgcaccccattgtcaaacaaaatacaatctcatcttctccagttgaggttagagaaaactccatgaattaattggtcttctttaatttataacactactctctaataaagtgcccaaatatttttcaaggaattataaatttaggtggaaaagaaagtatcaaagttttcgtatgaagaaaagaatagaaaaaagtaaacgaacagaaacactacacaaagcagatggtaacaaatgtttcgttttagaccaaaccaaatttgaattttgaatccaaacgggtaacaatcgttgatattttatttatttattttattataaaaatatatatatttatatatactctgatcctgctacatgaaaatgatctataatttatttacaataaaagaagaagaaacctgaaaaccgagaagtaatagcagagctaagatgaagaagaaggagaagagccaagtccacaaggcccacatggcttccgatcccaacttggagagaagcttagtattttctcgtgggtttttcctttttgggagttaagttgcccccaattgttctttgctatgtgtttctttctgggtttggtgatttttggtatgtgaaggaacaaggaaggttgatatgtgatttgagggattcaatttcaattcaaccagagaagctctccattaataaaccttgagatgagaatggcagtactcggaaatgttaaattattattatacgattccaaccgatgtttgcaaaaagagcccttcgctattgacctcattgagtttgactaattatatattagtttatttttcttcctcaatagtgttgattaattaatagttagggtgtttgctaaaaaaaataataattaaataaatagataaggcacattatttatttttttttttttgaataaaagcgtttatacataaataaaaagagttagacctcatggtcgttacaaaggatagcaatcggaatagtggatatctctaccataccgttaatatttatggcaaaagcccatttagccacattatgagccacaaaattacaatttctagtaataaaagaaaaaattacagcaagtcatcaaagtagagagaagattaca

SEQ ID NO: 99421 - DNA, 2638 bp, Cannabis sativa
atttgtaactggagtatgtacttgtaccacactcatgaattttaagctatttaggtgccaaagttggcaaaagataactcaaatttcttaggttgacaccaagtgataaagtaatcattgtcctcagaaggcagaatccctctttcattgtccttacatgtgcatttgacctgagaacacaaccagggcagccccagcaaaattcatagcctttcaaaatgaacttcgacaaatgagttgatttacttcaagagaatcaaattcaagagactcatttgttacccagaatttcatcgacaatgtatataggccccaaatgaccaagagaatcaaataagcatcggactaagacgttccatgtagcaatgttaggaaagatctcttcacttaccatcttatgaagacatacaactgcttcgtctaaacctatcgaactacagattccccacaagagactggtgtatgtcattacatccggatgccactcatttgatccaccaaccctttccaatagttggattgcataccttacctttccctgcttacagtaggcataaacaattgtgttataagtaatgagatcaagcaattttccctcaacaaccattttgccaagtaactgcaaagccttctcaggcaaaccagcatgacaaaacccattaagaatagtattataagtaactaaattccgttctattcgcttttcttccatcttcctaatgagctcaaaagcttctttaaatcttcccaccttgaagtgaccatccaataattcattgtatgttgtgatgttaggcaaacaaccatacctgctccacatctcatcaagcacctctagagcccaatcttctcttccactcccacataatcccttgataagggtgttgaaagtgattgtattaggaggacaaccttgggcagtcattttctctattagaatatacgcccggttgaacatagaattcctacaaagtacatctaccatgcaagtatatgctacgacattaggacgacagccagaattcatcatacggttccaagtctcagatgcaccaacaagatcacctacttttgcaaagccatcaataagagtgctatagatgttaacatttggtgagcaaccacttctctccatttgatgagcaacagatacagctctattcacattcccactagagcagagaccatggataagagtattataagcaacaacattaggctctaatccatcaataatcatcttgttccacaaggcaagagcttcatgaaatctaccttccacaaacaacccttttatcaatgaagtaaaagtatgaagattaggactacatcctttcacaaacattttagctaaaactgcaaaagacaagtttacatgcccaacatcagaaagagaactaataatagtagagtaagtgataacattagggtcgattcctttatccaccatttcagctaacaattcaaacccttcatcaattttgtattccttgcacaccccattaatcaaagcattatacacaggcaatatgggttcaaatccaacagcaagagctttcgcttcctcaactttaccaagcttacacaatgaagaaactatagttgtatagctaacagaatctggggaacaacccttcttagacatttcttcaagcaacttacatgcattatccaccctatcatttttgcacaaagccttcaaaagaatattataagtaaacaaatttggttcaaacccatctttcttcatattaatatatataggattaatcatatgaaatctgttctcaccaagcaaagcatccaaaatatgattgtaaatcctcaccgttggtttacacccgaactcgcttatcctataaaacatcttcaaagcctgctctgccgaaccagctcgcttgtaagagtttattacttgaacaaacaaatcttcagagcacccaattccttccaacttcatctgctgcaaaagatactgaactccatccatttgggtatcccacccgagcttttcaatcatggcagagtacgttaaaggagtgtgcttgaaagctcgagaattggctacggacatgaagtactccattgctgaggagatatctcgttcctgtttcaacttcctcaacacatcgaactcgctgagaaaagcttcttccatggattgaaattggggtttatcaactgaatttggaattgggtttgtgttggtggttaggacaaagggtattgatggtttgtggagtttgagtaataaggaacgtccttctttgagatacattttggagctttctccagttttatctcacaaaaaaactcaaaacactttcatgaaacccaatttacagagctaaagagagcatttttggttgagtaggagaagagtagggggagaatctgacgacgaacatgtgctggtttgcagtagtggagttggtcttgttgtcgatgtaaatttttggtgtaatatcatatcacaaagaaattgatatcactttcaaatatatttattcattttggctgcaagtaatgttaacaaaaaaaaaaaaaaaaattgatgttaacaaattgctaaatatttatcaaatcatgttttcaacattttaactattaaaaatagggttaattttacaaatgcaca

SEQ ID NO: 99422 - DNA, 2447 bp, Cannabis sativa
tatatatatatatatgagtttttatttatttttttttgaaatggatgataatctgctttgaacaagattaaggtgtaaatgttgatagtgcgattacgatttttgtgtctgaaggatcgatagtttggggctaggtgtagctcgggatggtgtgtgtacactaattcacatattactgttaaaatgattttatattgaatggaattttaattaagtaacaaaaacccaattgcattttttggatttaatgggatttattttattatatataaatgaaaagtgaccatgaatttctcataaaccatttatttttattaataaactattttatttttaatataaataaaaagacacccataaatttctcataaaccaaaaattctattatataggcacactttatatagaataaatgtacctacgaggcctcttttatacatatattaagaattttaaaagaaaatagtggatacatatacgagttattttcaatgaatatatataagctatactatattaaacttatttgttattttgcctcaaactccattaattaattttactgctaccacacatgagatgtataactctcccatatatttattatatactcataattttatactttgatagggaataactttgtacaatattagcatactcaataaatacttaatacaatagaaacagtttataatacactcaatttaaaagatgtacttttattatctattttaatattacaaaaattaatttaatttttttcataattatgtttgttgtaattatttaagacattctctaaaattttgaaaaatttaaaataatttaatacgtcaaaaatttaattcaaacagtttgttgcacatgtgatttattttttattttatatgcgtgtgaaatagacggtttaaatattaatttttatattgtaaattttttcgaatttttaaaaattttgtaagatgtcttaaatagttataacgtacaccactatgaaaaaaaattacacaaaaaaaattcttttagataccgaaatagttagggggttacatcagtgcacctgtcatgctactacaatgcacccccaccaaaatcggtgcactgatacatcccctagctatttcggcatctataagaatttttagcccaaattttttcataatcgtgtacgttgtatttatttaagacattctgtaaaattttgagaaattgagaaaaatttacaatattatagaaatcaatgtttaaaccacctatttcgcatgcgtataaaataaaaaaaaacagtcgcgtaaacaacaaactctttaaaccttacttttagcttattaaatttttatgaatttttaaaatttatcaatgtcttacatatatacgaccataaaaaaaatttctaaatttcttttaaatatagaaacaataaaaatgcaaggtacatctatttcaacgagatgtttataaaaatcttcaatattttaaactctgcaaaattcatcgaacccacttagtttggccatgttcaaaacaatctctccatcgttgtaaaaccaaaacaacacctctactttgaagaattctctctcggactttcatgacaatctagagatatataattattcgtcttttatagtctgaatcaatctttttcatctcattttttcaatttatagtcgtaaattttttaacatattttagatataactataacctcagtgaaaaaaactcatccaaaaaaatattgtgcaaagattgaagactttgaatatattgcaattgcaattatgtgtagaacaaaacaaaccctataatttttactaaactaatttgggattattgttaatcagaagattttgagaacaaacaatggaaatttattataatttggaaaaagaagaagatggagaatgacacataagattgagacaggaatgaacccaaattatccactttttccgttctctctctcattgtcaagtcaagttggtttgaaattactaaaatgccacttgggttggtagtggcggcagtgggtttgcaaaacgcgttggagggtcaatcttgtaaaatcacgtattgctgccggtttcgtatatcggttccgtacaagtgacagtgacccatgggaatgcatcacactcaaatactcactcacttgttggccctcaagtctcatccatcaccccatgcgagtagcactcccaaagttgtccaaaaatttcacctcatctctaaatataggctaattaagatttttaataaccgaattttgacatttgccgaattatatcccctaaatttttaagatcgttaaaaatattctttaaactattgagatttgttggattgaaggactttgtccaattttagtaaaaaaaaaacttacatggatgaaaattcagatggcatgatttagtacatagcaaagttcgacggacatgatttgg

SEQ ID NO: 99423 - DNA, 2820 bp, Cannabis sativa
aaaaaaaaaaaaaaaaagagtagtttgtgtaaggcgtgtgccgcaacgcattggaggtaaatacactagttggtagagagtgggcagattaaagatcgtttgagccatgagatgaggcaatgtggtcctgtgtttaagaggaagataaactagtattagagtttgattcgtaatcatgtccacagtaaaatacgatgtggaaaaattactggtacaaactctttaattggacaaaattaacgttatgttaatgctacattaacaaattatttaaatacatgagtagaatataactgtagggtatttccagcaattttttataaatcatgaggaatttttgctaacataaaaaaatttagaaagcaaaattgtataagatcatagtttgaaatgataaatcctatttattctatattttaatactacaaattacaattatataaaattacactcattacatttttattttattcctcatcatgaaacccactttcagaaaagaaaaaaaaaagttacatttatgaagcacaaagaattgtacgaaattgggtgtggtaaaaaagtcaaaggagtaatgggtaaaaatatattttttttttcaatgttgttatactcctttggtaaccttttgtagatgaggaataaagtgtgtttagaaaattactttgtaaaaaaatattttagaaaaataccatttttgaataccacttgagagtacaatttgtcatcaagtttttggtgatcaaagtccattaatttatatttcatgtactaatattaggcttaagaaagatattttataaacttatagcaacaatgtaaatatttcattttataaataaagtcatattttactaataataagttttaaatcataaaatgacaattattcttctttcaaaaatttgtaattttacttttcttcatgaatttagtaactagttaccgatttttctaaatataaattagtaaccacttctctaacaatctaacaatctagtagcatttttcatatacacttttttttttttttgctaactactttttcacatactttataattacatatttttcatatttaaataaacattggtaacaatatctcattttaaagaacatggtaatttgtttacgataactttgtagaaatatagtaaccgaatttgtaaaaacatggtaacttataactttgtattttgaattatagcaacctattacactgtattggaaataggaatgcagacgggtgggaaattgacgatgagtgttcccccgttcctatctctgttaaggattttaatttctatcctcgcttatttttcattggaaatccctaacagggataaggacggggtggggaatcccctaataaaaaaaataaagtttataataaaaatttaaatacataaaaattaaaataatatacattaattattattcagtaaactaattatcatccaaaacacaatttacaagtcataaaaaggatactaaaatactttaaaaaatacaaacataaattataaattataaaatattattaaatatataaaataaaatactaaataagtccctgtcagggcggggagtgtgatctccgtttccgctttatttaacattcgagaacaaaaataatctctattccaatactattctctatttaaactgagaatttccgcttcattaagaacgggtcactgcgagactcatccctatggaaaaaatacacatttctaattggaaagcaaaacacagaaagtatttgagtattatcattattatttcggttttttttctaacatgatacactactacaaaattgagctttagtgacactatttagtgacccgcacaaaagtgcgtgtcactaaagggttaggggtaagttttagtgacacgcacaaaaagactttgaaaattcaatgttagtgacctacaattcatgtcactaaaaatatgaggtgtcactaaaaagtaaatcttataatttttgttattttttttttttttgaaaagttactctatagtgacgcgccaaacgcgaataggtaaatatttcccaacatgcctggcgcgtcactgtatcataacccaaattaaaaaaaaaaaaaaaaaaaactccataattataaataaaaaagtaaaaattaattaaaaataatattaaaaaagctaaaaggttatcacggtttccaagtttcaaacctaaactttttttttttaataaaatctgactaaaaatatataagatttatttaataaaaatgaaaagaaatgataaatataaaatttgggtctgaactcctctctctttcatacagaaccctaatcgcctcttcccctctctctctcttcctctcgcgcctctcctttctttctcttggcagttgatgatgcgcagcttcctccagcgacaagcgcctgggactttgcggatttatggcatagaccgtggatgcaacggctggggttctggttaggtggccggcggagatgccttcttctccggcattgaggtcttctcctggaagggaattgaggggtgggaaactaagcacttataaggaactatgcaatttggctaatgaaatggggcaacctgacctaatttatctgtttatggatttggctaatcataaagcatctctaaactcaaataggggtgctgcatttgggttttctaagattgcaaagcaagcaggggatattcttaagccacatttgcattcattaattccaaggcttgttcgttatcagtatgatcccgataaaaatgtgcaggtatagatccttcagtgctttgtatgatgtgagaccatc

SEQ ID NO: 99424 - DNA, 1438 bp, Cannabis sativa
tgcacttaaattttagcaacccgaattttagattgggttagaaaatatataggataaaccgtccaaaccgaccgatgtaccgccctagttcacctcccatgtcctgattataatgggattacatatactttttttttataaccggggttacaactactttgtttttattaattgaatccgacacactagaattatgttctcaagagtgtgataatatacaaaagtaaatttataggcgaaatcaatatcgaagcttataagtaaaaagctcgtggatgacacaataccatatattttgttcaacaactctatgtatgtattttttgtctactattaaattgtgccatttctttttttttttttagaattaaagtatgctcatttttagacaatttacttacctagtcataaaacaactcaaatatagttattaaaattaaaattattttggcaaacccaaaaaaagaattactcaagctcagaagcgctttacccttaatcaatctgatcagacggttgtgaaagacccatcaatcacatcaaacgctagagaatcatcacagcttgatattgcaccagccgggaatcgaacccgggtctgtaccgtggcagggtactattctaccactagaccactggtgcttcttgtttaatgtccttcatcaaaaactaataatccagtaaattatttctaaatcaggcccaactgttcaaggcccatctaaagcccaatagtttgatatcaatgatttattatcatttagaccttgaattttgatataattatgatatgagagtgttagacatgtttcttgacatatatagccattgatttaatacaagtttgccttatctaactttagcctcagaaccagaaacttcataacacaatccacacaacgaaagatttgagctttgagctttgagccatggcgtctttggctcagcaattcactggacttagatgcgcaccactctcttcttctcgtctctctaagcctttctcctttcctaagcagcaacagactcataatagaccaccaactctgctccccattgtctcagctgtagccatttccaatgctcagactagagagcgtctcaagcttaaagaactcttcgaagaagcttacgaacgttgccgtacaagtcccatggaaggagtcacttttaacgtcgatgattttcactctgctatcgaaaagtacgacttcaattctgaaattgggactaaggtataccactcattctctctctctttttctgggtgttaatcataattcttgtttatgtatttttatttaattcaacctcaattatggagaaaatgggtatgagcttgaatacccaactgaatgtggccactaagccatgcttataattttagtgttaggaactatttaactaatttaagctaacttaagacttaaattatgga

SEQ ID NO: 99425 - DNA, 1476 bp, Cannabis sativa
ccctttcgtcttctgtggcgccgtcactcttactcgcccctccgccgtcctcaccctggcctggcctgaacccggtggctctctgacaccgcagcttcagattactggccccgatgcaccaccgatgtcggctaagatcggagtgtcggtggaggagctagcgtcgctgccgtcgcttgacgtgacggcggagaagaggatcgagcggctggcgttgaaggttggggaaagcctgttcaatttcatgcagtcgttttgcggtgtggatgggtcgaaactggttgtgcccatggatatcttggatagatggttcaagaagtttcaggatagggctaaacgtgatcctgagtacctgaaaggttttgctctgtaaatttaagaattttgatattaattcaacttcagcaaaagaaatgttagtttatttttgttctccatctctcatctctcaatttttgtcaatggtgtaatttttggtgaacttttttagaagtagaataagaaactctacttgtatgattttaaggaaaaatggtaggtttgagattcatagaatctaaaataatctacaataagcagaaaatctattatgatgcaaacaatgggcaagaactatttagatcatgtttgtagtcagttcattaagtaaaacctatccttgttaacaaatatcattgtccaagttcccatttgaatttccagcaaaaaaaagaagttcaaatttgaattggcaactttactgttaggattgggaataagaccgctcagtatgccgaagtaggcttaaccttctcttgcgtatgttcactcttccaaactccagttgtcacttatggtctccgaacgaatttattgaactataacataaggaaagcggtcctgttcttcttatggacacttccaatatggcaccaaaataggttacttgctggaactggaaatatcatttagaactggaagaatcatttagaatcttccgtgcattactaaagtaatgtttgataggaagtagtgagagtaggatagaattggatggagtgattagagggaccggagattagaagggatgaagaggatagttgctgagagagaaaaaatattagcaaaatgataaaattgttcttttaaatataaatattagttactatttagaggaataattattgtattaatttttttctacaatcctcctgaagtcggaagttttgaatttttttctcccaccatttttccactctccttcactccctcatgctaaataagaatttaatctatcatttcatcattttctctccaccctctccattcttccttctctccctattattaaacatagtgttacattcagctacaaattattatagaatgtatgaaatacaattataaaataaataaatatagtaattatagaagtataatgaataaatatttgaaaatttcatatccatatagagatggtatgatcttataagatag

SEQ ID NO: 99426 - DNA, 2423 bp, Cannabis sativa
catggtgcattgtcagcaatcaatcagtatcttagaactcctcaaaatggagtttggtgtagagataagaagaaacatcttcagccttgtcccatacaatattttttacaagattaaatattccatgggagaatgttttcttgttcacatatcatgctgaaatgaatattttttatatgtacgaatttgaaataatgaactagaaaggtacaaaaccacgcttaatactaacctttccgggctttactgcatttgattcctccaaagaacaaattacacactgtcaataggcaaatgtatagatcagaaatcaaattaaacagtacttgaaagaaccaaatctactctacggcaaaaattggatgctgacagaaggtccttagaaacgagtacattcaaactagcatttttctttcactcaatacatctttcaactataatatttgccacttgagcaaaaacaagcacgaatgatatttgtcgtaaaaagcatcaaatgattgagcaaggactaccatatgtcaatacctgcacagggaaatccatttgtggcctcctcgtgttccagttaatgttgtcccaattcactgatggcggaaacattttgtagtctttttgcataaagaaaccctgttgtgcagattgaataacataatgtgtaccaagaaaaaaaaaacacaacttttgagatactaaaacatttccaaacctggcattcttctgcaatcacagttatagaatcaagccatttgacagagcgtgcgccaataacaccagggacaacaacacgcaatggatatccatgatccctattcagaggctttgagatgataaaaactaatcagataacaacatgctgacaaattgtgttacaaaagaaaaacataaataaaataatgcaactgatatattttcaagtttcacagaaaactttagcaatttaaaggagtgcaaatgtttatttaccaacattttctataactagacagttccctctgttctatacctatgtttagttaccaaatattctcataacacaaatttcttaggatgggaaatgttggttgttatgatcttagcaccagcctttgtaatgtgaaaaacaaagtaaatgggtataatcccttctaaaagaacagaacatccagggcaagggagaggagcattttgctctatctttataatgccccacgtatcttagaaagtaagcaaatgtatgtgttatgttaactagccttgtcaattttgtcaaggtgaccaagtgggggtgtgtgagctttgaatttaattactagaaagaagaaaaacattaagcatgtaattgaagatgcaaacagtaaagttgagtggttcaaattgatcgaataactttagaatagacaatcatgccatttaattccaactgagaagatgcaattacctctccattcatctcataagcaagtaaaacatctgcctccgggtttgtagcctgaattagtggaatagatgctgcataagggcctccattttcctcctatttcagttgacaataacagaaaacggtgtaagagaaaacttcgttcatcaaacattaaggggaaaagaatcaaacttatccgcagaagaccagggttgtaccttacacctatcaacactaacaaactccacatgtttgcctcctgatttactagaacttgacaatttcggtactccaacaagttccagaacgtcagccaatttggcacctccccaaacagctgacaggaattaaagaatgaaaaagggtgaaaatttatcagctaaaggatcttcttgctcaagcaatttcattaaaaactgatttagaacaatacaagcaagagagatggtttaaaactaaaaggaaatgttttgcatttaacattctagagtagttatatttaagacacagcataaagacataagaggcacaaacacttgacaattacatctcatctttaattattaattatgcaaaaaatatatataatctttttttattatttttaatataaacttatgaggttttaaatcttggaccactcaagcacccacctactttgagcttaccccaaactatgtgttgacatccctaaaatatctgatacataaactttagaagaaaaatggaaaacacataatactatatagacataggccataggcaattattaagtgatatttgttcactctagtatttatcacccctttttgcaattttgacagttatcaaaaaccattccaaggttttagccgagctttccttcacacccggaattaatagcaaaacactacattctagaaagttaaaaatggatccatagtcaagtaacaaaccatttcctatagcagacacatcccagccaactcctttcactgttctagttttgctcatagctgttcttctattacctgcacactat

SEQ ID NO: 99427 - DNA, 2271 bp, Cannabis sativa
gaaagagggtgctatggtgggatacactttggctgatccttccatggccgaagctgcaaagcaagcctgcaagttgtggggtctaccgtcgactgacatattgggccccatcacagaggctatagcttctcatctgcgtgtctcgccatccggcctgccacgtggggctcctggccggaatatccccctctccgacgagtacttccggaggatagaagccatcgagttcaccatcaagcaggacgatggggctttgcctcagaatttgcacaaggctgatattattcttgctggtgtctctcgtactgggaagacgccattatcgatttatcttgctcaaaagggctacaaagtggcaaatgtgcccattgttatgggcgttgatttgcccaaaacgcttttccaggttgacccagaaaaggtttttggtttgactataaacccattagtgttgcagactattaggagggccagagctaagactttggggtttactacagaagtggggaatattaattactcagaaatgagttatgttagaagggagcttgaattcgctggcaggattttttcccagaatcctgtttggcctgtaatcggtaagcatatatagttaacgagttgttcattcaaatacttctcagcttgaccaatgacataatatagtttagtttatcaaaatcacaatgatggatatccattctttaatgaaatgcagaagtaacaggaaaagcaatagaagaaactgctgccgttgtattgaggctttatcaggataggaagcacagatgcacaatgccgagaatctcaaagcgttactaaagctggttatgtgttatcttaaagctttaaggatgcaaaagagccatctacctagtccttgatatgagatgatgttgaaatttgctctgcttttcatactgtcatacccagggttataacatcatattctgaaaattgtaactgtctatattgtatcatatcagataatacaatacaagtatactgcatactgtatgctattgactgttgtttttaatgtgcttgactcaaataatatatagctcgccagaagatagccttcatatagggaagatacttgaacttatatgaatttttccaacctataatcaaaatgtttcaatggaatattataattcgtcacaagaatttcgtgtagttaagattgagtttgcaaaaattaccccttttcaaatatgctaactccaaaaaagtgttagaagagagagctgtctacgtttgttgtagggtcatgacttgaatggagaaatcattgtcttattttcccaatgaaatcctccttgttagactccagcatagctgtaaatacattcgcgcagtgctagtccactacatattttttggattttttaaaatacaggaggtgccgtatatgccataaaaaatataaattgtgttgtacggtgtcataaaaaaatatagatcgttctatgccgtcgataatttataggataaagttcataatgattcgttagctcaatagtgattagtgtaatgtttttttaggctgtaatgttttttttaggccggttcattttttcttaaatagaattgatgagctaattactaaaatatgtatgcattttatagttttgtttacttttacatcttttttcagtcacacacaattatataaaaaaataattataattattaaaattaaatattttctcaatatatagaattttaatattactatcattttaattgataaataaatatttattattgttattattattatcaaattattgggcctttcaaagtgtcgtgctttttagttattctattcgtgtttatgcattgtgcttttaaatttatcgtgttgtgtttaagtccatatttttcgtaccatgtcatactaattcccaacaccacaccatgtcatgcttaaattcaaatttcatgtcgtatcatgtttaaccacatctttttgtgccggtcgtgctcgtgtcttaggtttgtgtcatgtcaaaaagtcccaacccatatttacacttacccaagattcaaatccataatcctcaatgttgtttggttgtttgtagcttccatattcggataacaagctcatttttgcacattcagacaatcttagtatagaaaattgccttcgtcaataactaatatcaattgacataacaaaaaggaaaatttgaacatcagtaaggtcgggcctagacagtaaacataggcgggctaggcccgcgcttgagactcgcttatttt

SEQ ID NO: 99428 - DNA, 2274 bp, Cannabis sativa
tctggcaggtgggaacaaagggtaataacaggaaagattctattgaaagcccagatttctaatttatcagaataacagtcttaagggttactgttaagaatagctcttgggttactgatgactccatagtctttttatgttgtacaagagtaactaatgaccctctttttcttactttatgttatgatgttttaatcatgtttatttaactcaatagtaacattttcctctgaaggttgatacctacttttctgaaaaccaaagctagtgctaaaatcacaataaaccagaaatggaacgaagaagttggtcaactatattcaatatcaatacctcttttcaacaagatctgtcttgtttccaacaagtacgataataacatcactgcccctctcgctgcgcacctcttctatccacttcagagtgttcaggaatgattgtcgacctacatcataaaacaaccaggaagaaaaaaatgtgcatcatggattaggacggtagctgaaaagtaaaaaaactttaaatagtactgatttttttatcatttttaattttgggctgaaagtgagttcagattacaataaaaaagcagaaaacgagaagtttataactcatgatgctagcactgtaagaaactataaaagaagccagacattccaaactattcatgcaagccgaagaaattatataaggtattaatagaaaaatccaaactttcttacttgcaacatcataaacaatgactgcaacagatgaatctctgatgtagcttggaatgagacttctgaatctttcctgtccagctgtatccctaccaccaaatgaataaagtcaagaacttagtacacttaattcaattcaatttttaattaaacagagaacagaagattattacataaaaatgaaggggtaaaaaacttaaacaaacatttttcaagctcaaggaatagaaggaaaatataaaagcaactagtgccaaaatgttatgttcatactattataaaggtgaaaccacattactagcaaaaaaaggactgtctacagcttagtgaaatgaatgagaatattaccacaattgcagtcgaacagttcgatcttcaagatacatggtttttgaaagaaaatcaatgccaattgtagcctggtcaacaaaacagaagaatcattaccaatagaatagcaaagtaattcattcattatatactaagaacactatttgcaactcagaaattcatttgtgaacataagagtcaggtgaggggcaacagaacaaaatgaaagaggcaaagaaatggggaaccatcatttgtttttctacaagtggagagcaaaggaaagcgttccaagttagaaattgacatagcactacagttacagaatttccgataggatcatcaatacagaacatataacctttaccctttaggatacagaatacaaaatcattcaagtaagcaaataggttctatttcactgtctctaaaattagatcttgtacatacttaagagtttgtggaaacccaaggaaagaatatacaattaggtaacctgaaattctatcagcgtcttctacaagacacctagaattacttcttctttatataatctaaactgtagaagacgtagtacatgtcccaaatcaccaatggaaaagtactttctaactaaaactgtaaggtcccactgatattgtactacaaagattccatttccattccagaatgaatgaatgtcaagaatagcttgagtaatttccctctcaaatggcaacagacccccctgaccgtaaagtatgcctcttacacaagaaatgcatactgcacttccttctctttagatatatttagttaataatgttagttagcacacaaaaacaacgagtgctacaaatctgtcaaatctgttattatcagctcaaccatatttcatctaaattttcctttcttcactttcatccattatgaatcagcaactttatcccaaaagcacgttattgccaaacaattcacataaactacatcatcactgtatttgaacaagtaaatcagcatacatctacgcgtaattaagctcataaactttcatttcttcaatttaaatgtgttgaggaatacaacaactttgttaaatcaatagatcgttttggtagataaaagaacaacccaaactagaactctccttaatcaaaacaaaagaattgacacgatccatttcatttatgaaattatgcaaagtctgtgaaatcatcccaataaaattttcgacgtttttttt

SEQ ID NO: 99429 - DNA, 1104 bp, Cannabis sativa
tttcgaaaggtagtcatcgagcacactcctgaaggatagccatcgctcaggcccgtctcaaggcttaggtaggctagctctatgcttatagtccacttagtccaggaacccgaaaaaattttccttttaaaaagatacataattttttactaatttttaaaataatatattttttaaataagggtctattttttttctatggctcgctaaaatttaagatcgaccttgccattggtatatcccaatgagggtggcatcaagagcatacccaaccagtggatccatttcccgagctacgtgctctgatagcggttgagtgtatggtaccaagtccataggtcaatgtcaaacgcatgagcccaaaatactccaaatgcacgagtataggacccacgagagtgttcacccatcaagtgtctatgcaccttctgagcgaataagctatatctgtgttactatgatcatgttaaaaatatcccaaattatttattatttattatttatatttttctttctatttttaaaatttttgtttcaaatttaaaattttaagtttatatattttgtataggaataagtgagtaatttttgctcatttttccaatcagtatctgctcgaaagctcttgattaagcattattttttgtacgcattcttctttttctaaggcttgtgtttgagaaactcatttgatccattttatctgattttaaataagtcatcataataaaaatatatagtgaaagtacgttattttcactctttgggattgaatcgctgtggcgctattataattgcttgtattatttatttttttaagttcaattgttgtttattatgtcgtcttgatgtctactcattgttgattaaattcgtgatcaacaaacttgttattatttttataaactcaaaaatgtgattcattgtagtttacaaaagttctatgtttctaattatgttatgcgaactcgcttagttcggagagaaattaggtcaggttcaacaccaataacttacttttttttatatgtttgattttttttttctttacttactttttctcaatttttaattttcttaaaggctatattcccaaatgattaa

SEQ ID NO: 99430 - DNA, 1421 bp, Cannabis sativa
tttgggttttgttcggatgaagaaatagaattgaaagatggattttgctaggcagtggggaacttgtaaaagctatggaggtaactaaattttggggtaaattaagattgatgaatgagacataggagaaaatggattgtgagaataatgatgatggtgttgttgttgatgatgatgattgttatcttattttttgcactatgacatggcaattagctggatgacacgtgtcctatatttttccatctgggcggaaggttatactcctagcagctcccaaagattggtagaaagatccatatcaacagtacataataggatgtccgattagagtcataaggagacatccgaccaaagctcaatcgtgtgatcaactcgcatgcaccgaataggatatgtgagttggtaacttcaaagatgggcatcgttgcttccaagaacgaagataatccctacattcatgggattagttcaaagaataagagcaacaagcctagatttcccattctttgtattgtaattatgaaagtaaattagtttcctattttatttagtataaattaagagaaactatttttcatgtaataagtccctataaatagtagtttaatctcactattcaggaacacgaaattaattcagaaagaacacttaagagagaaagagcgatctaagagaaatttactcagatatccattgtaggacctagtgtgagagagaatactcagttctttatctttcaagtcaatacaaccaaaagagaagtaggttattactattctcacggggctaaacctctagaaattctgttattctctttatttattatttttattttctattatttattttatctaatcgctttattttgactcactgtcattgactagaagcaaagtcaatattttgatattttcactaagagcaaaaacataaacttttgtctaaaagtcttgacagattaacatgatagttgtaactcctgagagaagtcagactgatccaatcgactcgatggtgacaaatccaaacatatagactcctaaaaatgcaagagatccaccacacaacactatccttggatgttattaagacaacactagtctatgaagataaccaaaggccctgaagtcatcgcatcaccactacatgaaatagccaataattatgcaaaccaaaaaaactcaataggtattcttcacctttataaattcaaatttattcaaattcaatgaatattcttatatataaaattttgatgttacattttttaatcaatgttgagaattatagggttctatttcaaaactaattggtgatgagtggagtagcccatattcttttatatggctcaatattctactatttattttacgtgggtaatatccatataatattccccctcaagatggtgactattt

SEQ ID NO: 99431 - DNA, 1752 bp, Cannabis sativa
agagagaagtaaaggagggaggggtttttgtggtatttttcatatatagaagcaaagcaacacaagtccaaaatccaaagaaaatctaaataagattgcagaaattcccaagagacgaaaaagtagattgtagatagcaacccaactgagagcgaccagatcaacagagctgcgttttggtggatacaatacagataaacactgtcatgcattagattaataaatattatgagccattacggaattaaaaagaaaagtctttctgtggctatcttttcctttttaagacctacacctacactgtttttctgtaccatcatgcctctctctcactctatatatatatgtattaaatatggtcttaattttcttcctatattatcctaatgctatcttttattatttctttctttaattgactttttagcctcttctccggtttgcttgtttttccctctcttttctctgttactagttactacacacaaattatgtcatgtcacattcatgcacaagattctctctctacactactacagctactttaaatatactgcaaaacatagtagctgtattcttataaatttttgttttcttttgggggggtggatttaatttcttgatttttcataacaaaatttctttcacattgattgatagtgactttatcttctgctggatttggtctggaaagagagagaatgagagattatagctaaggctaggctgtagagactagtagctttagtcttaaaaactctatttggttttctacttgtagccctgctgcttatgagacttgaccctaccgcatctttcttatcacaaatggagaaaacttcacctaagaagttttactaggaaaaaatatcaacaatggaaacaaaagtatcatttttcactcatagttaagctctttataaactttaaagccatcaaatttaaaaaaaagttttccaataaataccaccacattcctaggaccccctatatcttttgaaaaagagtgcagaatagagaaagtttgagtttagatcattttggatttatatgagaatagggtttttggttggttggttggttggtatcctctttcttttatggaagaatccaaacaagtcttcgccttgggtttgggcataacataatagaggtgcctttcatgtccattacaaggtcctagaattatgggttttttctttttcactttcaatgtcctcacacaacaacacaaaggaatgaacaagactaagactgggatatactgaaagggttcgttttgtttgttttaagattccccctaacaaatgtattaagtcatcttctttgaagtttttagcacataattttttttaaaaaaaattttagattgttaaatttaagaattttattttgtctaatttcgtttaatattttactaacaaatgcctaattaggctattgtcaatatatatcaaatcatatcatccgaactttttggcatgtaggcatgtactaaatcgtacctcttgaactaatgtccacatcgggggcttgttagtaaaattgaacgaaagttgttaaattcaaagatcttaataattcaaaaagaatttttaacggtctaaaacatttagagaacacaatttaatacattaaatttagaaatgagggaatcctaattagcctatattacttttgacttggttcaaaagcattacatttaaaatatatatcttacttacactacaaaattttttacttttagtcaca

SEQ ID NO: 99432 - DNA, 769 bp, Cannabis sativa
  modified_base (627)..(634): a, c, t, g, unknown or other
atacttaaatgttcaagcatccacacaacaaagaatagcaccggaattttcaagaagaaattgatcaaaagaacttagttgctgttgttctagttttcaagattttgataaattcaaataactaaaggatccaaaatgcataccagaggcttgttgaagtacatgtaatgccaatgaatcccaattgtcctgaaaaataacgacacaatatacaagaaggcggtaacaaaagtcagtaagtatcaataaccatccaagagcctacaaaagataatcacagacatacaaaatgtaaccaacaacaatctgcaattcaacaggaccaaaacacaattacaagattaaagatacttatcaacaaaagcaatacctttcttaatacaaaaggtcgattcagctcaagttctaatgtatggaaagctcctatctgccatagtcaattaacaataagttcaaagcggaaaaccatgagaccaaacatatgacatttagttcagtttgatactaacctttacatgttcattctccaaaatatttttaccacgtatccgcaagacagaaccaaccttgtcataatctgcaatctacacaaaaaagaatatatgttagagagagagagagagagannnnnnnngagagagagagagagagttaataactactcgcatacaaaaagttccaacaaggaataatctagtttcgaatcattttctctccatgtgcgtcctttgtaaatttattgtttaccaatacaaaatgacaccaaaag

SEQ ID NO: 99433 - DNA, 1027 bp, Cannabis sativa
aataaaagtaaaataatttttttataaacagaaatatgcatctgttaattaattgataaaccagacaaatacatgatataacttataaagataaatcattttatcatatgatttttttaagacattagatatactaaaaatatattaatctgtatatattactttgtcaaaaaataattaatcgaacaattaactaattgacaatgatattaaaattcaataaattttggaataatattgtcataaaattaaatcatttgtcaaattaattaagaaaatttatttgtcaaaaaaaaaaggtcacatttagatacataattttgctaatttaatttaatcacgactcatgataataaattataatttttgtgactaattaattaatatttttagttgcatttttttttagtgatatataacacataaggttaatgacatttagttagactcaaaaataatttattgtgattaaaaataaagaaaaatagtgaaatatatataagtaaatctatttaaattaagattgattttactcctttaaaaaaaaaaacaacttcaaattttaattttatatatagaagtgccttttgacatataattaatttaatatatttcaaataaaaaaaaaaatacatttatgttaaacttaaaggtgaagtggtaaactatgactcatttttattatttgataggaaaggtgatctagatttacaaacttaaaatattaattggttgaaacttgaaaaagaaaacgcccgtagttatctaataaactaatatctccttaagaaaacaaaaatatcatattgttaatcttatacaaactatctatctaacaacagtcaacatcgcatttaaaatttaatactttacaatataaaaaattttaaattacataacttaataatttttttcttcttcaataatattataagtgtttttttttcttttcttttttttttttttggtattttattatttaattttctttattaattataatatatagttatactcatcatcaaag

SEQ ID NO: 99434 - DNA, 2265 bp, Cannabis sativa
tctttattttcccatatttttgtaaatagcccttgtgtaaatgggtagaacataagatgggctttccagttcagcccataaatgaacaaagtccaaatcgacattgatacaaaacataacgaacagctcagactaaaccctctccttctctttctcctctgagaaccctaattcgattcgattaggggaaaccagtaaaaatgggaggaaagtgcccccatagaagcgtcaagaagagaagatactcacacaagactcatcgccgtgacaagttcctcattaatgatatcctttttcactttctcgatcgtccctagggttttggctttttttctgttttttttttcatttattttgttgaattttccttgacttggaatgagtacgtgatgatatggtatatgatgccctgaagaatccagagggaattaagcccttgcctgttgatgaagacctccctgggatgggccagtattactgcatacactgcgagtatgtttctttcttttttttggtgaaaattgtttgtttatacaatttcttcatacatatgaaccttatcctgttttggagcttgtttgattgctttgctttgtttccgagaaatatgtaggaagccatctactaaaagaaaagttctgcttaacttggtattgaattgaaactagattgcggtttgtttactatttagttatggaaagggaaataagattctgacaatttgatttagaaaccaaaatcagggttttgaaacataaggctttaacttttagatcatgtttactaattcgtaatggtgatggaaataatggtagctattttcctttgcttaattaggagagggttttatgtgctctttgcatagttggttgaaatcaggaaaagataactcagttacgattcattttgaacttcttattgcgattttattagtaaaaatagctttatgttatcatagctatatgctatgagtaaatgtcaaatgtatatggaatttgttgagttaagtacttggttttcatatgcagccgatactttgccaacgtgtccgtgagagacgaacatttcaagacaaaacgtcacaggaagcggtaagggttacctgttctcttatcctttttatgtattttatcttaagaaaatcatatggttaatctgtttcaagagaagatgtttgttgctagtctacttagtagtattaagaggaccacttatattaaagaataaaagattgtaaattatttaaatcgatgaatttgagtttgtcaatgcctttacggtgggtggtatcattttgatgggttttacctagtccgggagtcacattttcatttatgtttgccaccatggactttcccacaagacctgttccagttagttatgtaaccttctacttctatatggttgttataagttacaatcatttgggttttaagatggatagtggcgttttgaagggttttattgaatctatatacaatttagcatattccttatcttgggcgtgtgaatatatttatattaacttttctagtaccaagcataggcattgaacattaacatagttctatctttctaaaactaactggatttttagacaattagaatagtgcagcagtgttattgatgcagtgggctctctgaatcattgctctccgaactaatattcaattcaacttcttttaaatcactttgacacatgtttgaacaattctatagctattcggctatgatatttcttttcgttgaatatggtcgtctgttattgatgcagtatgaaattaatgatgggtcctgcaccacacactcaactcgatgctgacttagctagtggaatgggaatgccggataatggcccaaagcttatgtccatgtgaagtttgaactatctgttttttaagttattttgcttagcagcatgtaaggcttatctgaaatagaatttggagtttttagtataaaatgtatcagtgatatatcaattttgttcgttctattcttatgctacattatatcgtaactaattcttgcagccgttatatgttattaaactttgccctccttctttttcctttacactatgttttgtgtggaggaaagaaagaaaaaagaaactcgaaaggcaaaagaaaaaaaaaatagaagagagagaatggaggagagtgtaatttcttaatcctttagggcgcgtttggtaggcagattgaattagatagataggctagtttgtccattccagtatttgcggatgttagaagtttggat

SEQ ID NO: 99435 - DNA, 3926 bp, Cannabis sativa
cattccatttggcctcggtgcctggtccgggtgcatttgaaagagggccgaccgaacctcatcactagaaattggcttcaaaagttcagcattatgagcagaagtaatagagcaattgatgccactcacaacctgatcccaaacaacatccccagtcgcataaatgatgttaaaataatcaataattacctcttcaagaccaccgttccaggatgtccaaacgccagcagcattttggagaaattggatattgttactatgctttcgggtgctggccatagcatgaaagaactttgaatttttatccccactatgttgccaaaattgctttgacctttgtttccaatataattcttgttgagctaaaatttcaaagtaattattcagctcatgaccgaaactactaacagaaagaggatcgaatttacctttaagagatgaaaggcgtgctttgctctgacaaatcctttttttaaagtttgtagttaaactctttccccaatcatcaagttgtttgctggagaattttatcttctcctggattgacaaatgtgagtgcaagtcccaacaagattgaataatttgagcacacataggttcccttgtccacgaattctcaaaatggaagtgatgtgcagaaccggttaaaatcgcaggtgctggttcaagaaatatgggggtgtgatcagaagaagaagcatcaccattggtaagagttgcagtcgggaatatatcaagccacagatgggaaactagtggtttgtcaaggcgaatttccacccaattatcagttcctttaccacgttcccaagtataaggatgtctgcggagctccaaatcaaccagatcacaactgcataatacatgttgaaagccatcaataagagacgaagggtaaggtctgccaccctttttctcattttgattgccaatattgttgatatctcctattatacaccaagggacactattttcatcaaaattcattgttagatcttcgatttgtgtctgtaaagagcgcaagttgagattaagtggagagagtagtaataagttgccaagttttgaaccttagacttcgattaggctcgccgtagaagacgattaaacgccaaacagggaggttgagagatgagacttcgatgtcgatatggtggtgtgagaaacccagtagacgaactccatcactgtatcgccacagtaaagcaaggcctcccttgtgaccatggacctcaacacagtgggctccctcaaagcccaatttaactcttagcctttcaataatatcttttttacacaaagtctcacacaagaaaataaagttgggcttctttgaacattaatgttctcaaggaattgttgggctcgtgggttcccaagcccacgcaattccaactgagtgtactcataacgattggtgggcctggacaccagaacccaccatattcaagttttttgacccagtttcagcttggaccgaagtattagcatgcccaataactctctcagcaacaaatctttttctttttaattctgcttgattcaactcttcatcagccagttcactatcataaagaataactcctttatttttgctatttgtttgagaaatatcaggagatattcccctaaacgtgggattggatgacgtcccaaaattttctcctgcattagtggtgttcacaccagccgaaccgttcactggtgccttaccagaacgcaagaatggtgatgctgcaaaattctgatgccggcgagggagagccttcaatcctaaaccgtaaggtttcacgatcaagtgtgctggtgtgtcaaaaagccgagggcagaatcgctccgaatgtcccatcttaccgcaaataaagcagaaggttggtacattttcttaccgaaaggttgcataaaagatatccccatcccacttgcaaaacttcatcctgtgtttcaatggaagatcaagtgaaagcgtgactcaaattcgaagatattctcgccaaacccctgtaaaattgttcggatccgattcaagaaaggttccaatataagctccagcatccttggcaaccttcatagtcatgaaaccagagtgcaaatcatggatttgtatccacagatcaagagtgttcaggcttacagttctggggttgtcaccatcttttgaacgagttaagattatctgtttacgatcataagtccaaggactgcccgagatcacacgttgtatatcttactcatgataaaattgaaacacaaaacgattttgatcaagctgctttgcatacaatccttttccaggtctccatagatcagccattatattttgaaaaatacgaaaatcggataccttgcctgtgagcagccgcccaaccagacaccatctagtgtcaataaccagatcttcttctgcttcattttcttcatagaatgtttcctctgcttcctcttcttccaattgaatacctttccattgttcctctatattctccatatcgctgctacttgatgccataagaaccaaaatcatacacgtacaggaaaacgacacccaaaagaacagaacaggacaaaaacaatcaagacacactcagaaacgagagacagacaaaacactcaaaaagagagactgtttatttttattagttaagggattatgacacataatttatatttagtgttggttgttcacgtgtatataatgtttattttttaaattttaaaataaataattgtatatacaaaattacactaaaatatatatttttcttttgacaaagtttcaatttttttatttttccttttccaataataaagactatgttttatattataattgaaaaagaaaataagaaaaaacaacatacaataacttcaattgaaaaaaatgatatagatgagaaaaaaaaaaagcagaattgtaaatatatatatatgctaaataaaaatttaatacgttaaagtgagattatcttaatttggaactcaaataattaataatatcgtaatcacatttctatgcttttaagaaataaaatcaatcatataaaaaagaaagtatataataatgtaagtgaaaaatttaattataaaaaattattttttctcatgtcatttcaactttcaagaatcttcccaaataatgcataaagtatattgaagtatattcacgacgaataataaaattatcatacaatttaaaagtataatcaaacaatggatcacttttttttcaaacttttcaatgtatgactattcccacgaataacattaacatcttcaatagaatcattaagattataaataggtattttctctaatctagaagcccatcaacaaaattactcatattctgtatcatataaagtaaaattaaatcaatacataaagtattaataattgttaaaacagaaattaataaattagaaagtaattagtatcaaaaggaataccatataagcaaatacatattaaaaaagtctaaattgaaattttaaaaccaaataaaaaaatctaattgtataaatacatattatatataaaataaaataataaagaatattacttaaaagtaatcaaataaatatatatatataaacatttataaatctttataaaaaagagaatagtttcttcgacttttcatagtttatttacaaaaataacctttattgattatttatttactgttaatgcagattttcgttaactaaatttgagcctgaatagtgataaacttgcacagaaaaataaaaacagcaaagaaataaaaagataagatgaacacgaaggttttttacgtggttttgcagttaaaattatgcatagtccacgagtcaatcttactaaatttctgatattgttttagggccttttctcttatcaatttttccgtcccttttttagtctaacttgcctctatttataattac

SEQ ID NO: 99436 - DNA, 1010 bp, Cannabis sativa
ccagcccctcatagcaagtctcttggttcgtcacaatggcgctcagccgcgatcgaacctgctcgaccacctcctccgacgtcggaaactcggctgaccggagattctccgatatggactcgagaaactcgacattgagctcgaagagctggcggcaatcctccacggcgccggcatctctccgggagatggagttccggtggcggcggaggaatcggttagttgctcgggtcattctccgtgccttctttaagcattgcttgacggagaactttccgtaagtgtagggatcagccggggtgtactgtgtgatggaggagagaattgagcggcatagctttgggtagagagaagagttgcaatttgggtcaagcggagaggtagcggtggcggtggcggtggaggtgatgaatagaaataagtagagagagggtttgatgaagatgatgagtggtagagtcatggtgaaaattgaataatgagagagtagctactactactagctagatatgtagacatttatttatgttatgtggtgttattacttcattcatatacttgtttgtttgggaaaatgaatttatacaggaaggtggtcatatatagctgtttaattactacatggaataaatgcaatcatgcatgaattagcatgaaaagtcagtaaaaaaaaagacttgaaatataaggcgaggagtacaaagatctttttttagttaccagtctccatattatatatttgataaaataggtatgtgagataaaatgtaccaataaattatacagcattccatcaaaaaagaaaaagaaattataccctttagcaatttttttgtttcggacaaggtgcgggtgggggaaaacatttatcgctggcacatttgtttgatatattttttttttattttatttatgtatttttctagtaatttttttaatgaataaaattaaaggatttttttattttcacactttaaaatagttttttttttttgtacttttacgaaatt

SEQ ID NO: 99437 - DNA, 1559 bp, Cannabis sativa
ctaataattacgtattttcaattatatgctcatatgacacaatttctaacttataaactataaaacataattaataattggaacattatgatccctaataatattaaaagtactagtcatatcaaaatataataaatccaccacatatgatttggttcttagtgcaaatattgttttaaaaagatgatagatcatcctaagtggaatttatttggaagagtgatgccacgtgtgaatataaataatagtataagagcatggaagtgcaaatttcgtgtggtgtgcacaagtattaagtaagcactacacttagatgcacgtggcatggtccgtcaagcatgtgggtagcacacaccgctggctgatcctaaaaggcttaaagccacagaaccaagctcgttgaggacacgcgaaacagaacattcttctattagattctttgatacttatgtttccaatcattttttattattaatacacaaagttctttcatattttataacaacttgtattgttatattgatctgtcttctcaagtattctacttttcttaatttaatccaaacacttttttgaataataaaaatatgttgacgggtgcaatttaatactatttgacaataatttaatagtatttaacaataaatgagccttcacattattgttactcatgtcagttggtctatgcaattaataacaataataattttaaatataaggagtgatatgctaatcgcatcttatatgtcaaacgaagttctataaataatataacttagccatctacggggagaatctgcttgaaatataaattcaataatttggtggagatgaaaaactaaccacaaaaattatttaacaatgtcaggggttaattgtttgttataatttattattaaactccggtttagttaaatctcacttgatgaggtctggtagtattgatggaaatattagtgccttttaaggctctaaaaattttagagaaattacaataacaaaacgtttagttagataaaaacaatctgccacaaagttgtagatctctcaccaatgaatgctttttgtttagggtcttgatcacaatctctttcaacaatcataaattgatgagccttaagtaaagcaattttaagagccaacttataagctacagcttcttcaataaggagatctctaaacaacatcctattagttactatcccaaaaaatttctgagctatgattctagccacagtagcaattcagggccacactttttgggggtctaaaataaaaaatgaaaattctcattaggcttttatttaaataaaactaagtatatcataaacaacaaatattcacagctcgattgattcggtatatggcacattataaaatagtatgggtttaagtcccatgacgctcttttttcaatattttttaaatggccttaggcccatttccagggttgactttgtagcaaccatcatagcattagaactaatagcaacatcacagtttatcttcagccaatcaaccgaaggaggcgtccaacccaactattttggtttcttcta

SEQ ID NO: 99438 - DNA, 3201 bp, Cannabis sativa
cttctctctctctcttgctcacgccccaagggctctccctctcctcttttcatctctcacacatgcctaccctaggttgtccaacaccctaagctgtttaacacttgaaatctgcccactaattcatactttgtaatcctaaaggtgctataacagatcccacctacagtaatctagatagtatttccctcggtataaatacaaccaagaggggagtaggttattacccgctatcacaagggggttgaacctctataacaaatctctgtgtttattatttttcattctttgtttgtgtaacacgtggcaagcatcagtccttacgaccccgctggtggttgatcactttttgaggtctacactaacggtcttgaggtcatattaaaggagggtatggttgagattattttctcttattttgatgagtttttctctgcttctaatattaatgaagaagctttgaattctacacttgcaataattccaactataatcacacctaaaatgaattgactctttaatcaagcctttcacaagcaacgaaatcttagcagctctacaaaccatgagcccagacaaaagcccgagaagcgatggcatgtctacaatgttttatcaaaaatattggaatattgtgggtgatgttgtaataagagtcatccttagtgtgttgaatgaaggtcggagtatgtaatcgattaaccactcaataattaccttgattcaaaaaatcaaattaccacatggtatgagtgattttcgcccaatcagtttgtgtaatgttgtatacaaaatcatctcaaaagctttaccaaacagatttaaagaggtcctacttttagtcatctccaaaaatcaaagtgtttttctctcaaataaactcatcacatacaatattctagtcgcttttgagttgatccaccacctgaaaaataaaacatgtggaactaggggttacacatttctaaagttggacatgagcaaagcatttgatagagtaaagtggatttatattagagaggttatgcgtaagatggggtttcatatcaaatggattgaagtaatacaaagttgtttatgctctacaagattctcttttatgctcaatggtgaagttgtagaccatattcaaccaacaagaggtcttagacaaggtgacctattatccccttatctttttcagatttactctgaaggactttccaggctgttacaatttgtggaatcattaggaaatcttaaggtctttcgattaacatgccatgatccattagtttctcatctccaattcgttgatgatagcctcttattctatgaggctaccaatagttcatcattttctattaggagaatattggacacttaccacaaagcatcgcgtcaactactgaatacaaataaatcagtgatgtctttctcgctaaacattccacaagctgctcaaaaaaatttccaacagattttggggatgcctattaacgaatgtcatgaacgttatctcggcctacctgcttatgctagtcgtgataaaaaagaaagttcagcgatgttaaagagtgaatatggcaaaaacttcacgcatggaataagaaatttttctctattggagggaaggaggtacttttgaaagttattatctaatcaatccctacatatgctatgagttatttttaattaccgattactttttgcaatcaattggaatctatgatggcaaatttttggtggggggcaaataaagatggttcaaggatacattagaaaagatagaaattactttacaagtcaaaatttgagggagatatgggtttccgctctttcattcattccaactaagtactacttgctaagcaagcatggagaatgtttgagatgcccaactgtttgcttaggtgcttgttgaagcatcgttacttcccaaataattctttttcggaagctagccttagacactcaccttctttgacttggcaatgtattcaatggggacaagaatttctcattgaagggttgcaatttaaaattggaaatggattcaatgttatggcaggtgtggacaaatggattcctgagcatattaatttcaaagcattaacttatacgggccctctagcactctccgtagaaaacttcattacagataaaagagagtagaatttgaccctcctcaacaaattttttcagcaaatcgacgtgaaaaaaagcgtaccataccgcttagttttttttttccatctcaagaccgtttgatttggcaccacataacaacgggtatgtatgcggtaaattatggttttcacttggttggaaatatagatgaaagcaatgagtctttagccttaaacactcataggggctggtgaaaaactttttgaatctaaacttgccttcaaaaatcaaaacttttgcttgaagggtgatgaaaagtgctctttcagtggcagcagctctaaggcaaagaatagtcattaattcagcatcttgttccatgtacacaaatgcttgaaatcaattgggcatgccttattcatttgccatagagctaagtcagtttggaagcaaactaagttcaccattgactattgcaatgctcaaaactataatagtgattacttgatctctttatccactctacatttcaaatcaattttgaattgataatatgcattatgtgggccatttggaatgaaagaaacaaggttttacacgggggagttcaaaaagacatctatacatcaaaatttgcaagtacattccttgacaaatacaaacgagctacaaattgtaacaagccatctcttgttcaaaccaactcgtccccaactagaaactcagaaacattagatgtccctcctactaggcagctatcatatgataccctatggggaccaccagactcttttgggctaaaaatgaacataaatgcttgtttggaaccggttcaatatccctaagcatagttttattgcgtagttggtaatgcttgggaagttgaaaacgaaggaaaggctaatgagatttggagtaatagaagaagacttatgccaactgtgtaaggacagcagtgaaaccattgagcacatgttcttctgctgcattttctcgaaaaactgcctgtgcaaaattaaagagtggctgggttgggaggtcacggctgtgtcacttaaaaccatttgtaggtggctgtccaaggctaggtgc

SEQ ID NO: 99439 - DNA, 4375 bp, Cannabis sativa
aagatataaattagtagggtgttacaattaatatctttttgattaaatgattacaaaaatatagttgataagttaattaaaaatatttaaaacataccatttgaatttaaatttaattagctataattctttatattttctcattattaattaatgaattttatttgatgtatttcctttataaaaataaaagcataaattcacttatttataaagtgagtagttaatttattgtttatttatttatttatttattttgtaaagagtttattgagaaggatagtgacgattacaagtgagatacagtgacaattaatatactaacaaacttttcaatccttgtagtaaaaataattattatattatagtaatatggtgaaatagacttaaaaaaaattctcttattttatagagttttgttttttaataaataaaattatgcaataatatgacgtaattttaatattatataaaaaagagtaattttaagttgttatttattatattaattaagaattaattctttctattattatattaaaaacaacttaaacagtaatgcgaagagcagttatactacctaatttgtatgtaaaaatgagaaaatatttctcatagttaaaaaaatatataagactccaagagatgcagaatatgttaactttgcttgtatgcaactgtgggtgcaagttcataacctcccccatgaatacttctccatacagagtaagctaagtttaatacagagcaagctaagtaacaaactctctaactaacaactgaaccaaactaattaaccaattctaaccatataaaccttatgtagtattgattcaataatgcgcacataataaacaagaacacataataattatgattaaatactgcatgtcatcctatatcagtatatgaattgttttctttttaaatgatagtcagtttgtactacttgttgcctttagcatttcttgatttgctttaattttcagtaaataataaaattaaattagaaacggtaggatctaggaagtgctatttctcaatatggtattacttcttttctcttccctccctattaaaaaaaaaagaaaagtttacaatatgaacaatggtttttattggttttaccttcccattatagatgttaaaagtaataataataaaaaattaatacaatgaagtgattctaccacttcttagtattccaaaatatgctattactataagatgaatactccattgttgccaaggctgagcatgtagctgagttcatgatccacaaaatttccaacctccaaatgactagcagataagcttcacattatccaaaactcaaatgccattctttacattttcttcaaaattgggttgatctctatattcagtatcagattctgtggaatgttttctacaagggcttctaactagagtgtgcgagatgaagctcacactcttgaaatcggagaaaatggtggattgagcacataagatggtgggatttcttttaccctcttagtgacattcctcttctccgctgtgactgcttcgatcaagaacttcacttcctcttcaatgagtagtttcagcgaagttccccgtgataactctttgcttctatcctgtgtggtgtccaccgaggtttctgtcccatgaagaatggaaacacaaatggagaatgcttgtaaactagataactgggcatgaaaaccaactgcatacagtccttcctcaatgactgtcatggtcaatgctggtctactatctttcactccctgtgttcagattagaaagaaaaaaaaaaacagcctttagatgctttgtaactggtgaaaagctaaaataatattagaaaaaaagtgtgtttgtacaatgcacaaattgtctaattctagaaattttttgtcataccaaaactagatttttttgtattactaacaagtgtctcattaaccattgctgcataatataaatgcttggcattcaagatggcatagattgttttgctttcctctttaaaaatgtttggaatgcaacaattggcatcggaatttagtaattaagaagtttttctttgtaagatggaatcttctcctgtttattcaatgtctaagtccttgtttcctggacgttattctagcactataatttccaattatctaatttttaatcacactctgggatcacaaagaaagtttacctgaacatataactccataggcatctgattctccacaagtgattgactgttattggcacaatggaaatgtggattgcccaaaacagtaagaggacaggccatgtcccatccaccacaatcacaccctccacccaacctccaacgatttagtaacgatgatgggctcccgctttcagttcttggcaagccatgatttcctgctggaatgaccaccttcaccttatctggagtcctcccatcagaaaaatcttgcttcctttgttcagccatagagagattaagtaagttcttatgtgttctctctttattcttatcacctctcttgtattttaagctctctctcttctcaaatggagcatgcatgacaatagctgcgatttcaagactcggatgcaaacttgcagatttccaagggcatgaatttgaatgattaaattcatcatcagaaacatgtttttgttgaaccttgacctcatctccacgagtcttattttccaactctaatgtctccccaaccaagccttcatcagaacctctggaaactttgtcactatcaagggtacatttcgtggcagtatcacttagtcttgcatgagcaatgtcatacagcacaaactctgtcaccatggaattgtcaaaaacaccctcttttagttctgaacatagataacaggaaacttgcatctgtccaaccattgaggaatctttgtcattgtcaagcaaacccaatctactggcattactcttcttaccgccatcactggagtggaatgtatacacccagttaaatgcatcctttgctttccatgtcttagctacaaggacatcttctggagattttagtgaaaactcaaaaaccggtaaaccatgtttattttccagcttaagataggcatgtaagtgaacaggtgaacatgaaatgaaagactgatttttgctcttgatgtgagattcacaatctaaatcctgtgctctatcagaaaagttctgcacatgagattttcgatttgtcttgtttgttctcatgtttgtcaatccatttgttctgaccgctcctggttccacaacatagcttaaaggacttcgcaaagactttgacttcatgaatggatcaaacatctttctaatgggactgaaccgaacctttgagctggtcttcgaggagcaatcactttcagattgagaaggggaaggtggcaactctaccttggcagaaactgatttgtgcagtgtcctaaatgcatctctttctggaagctcattactactactcagaggaccaacaacaggatcacttctcatttttgaatccacagaggctgctgcacctacacattcagcagaattgttccccctactaccaggatccaaacagatttcgaaaaagctattcgacttatgtggttccacataaggcttggaaacagatgtcataacagaacttgaaccaaaagcgattgctggagatcttctttttgaggtttcttcatctgagctacacaacgaatcaacaacagacaaagaaaggtcactatttcttgacacttcaatttttttcctcccctccatagttcccattttcttcattttcctcacctcttttgagctttgatatatcgaacctcgcttaaactctacactacattcttttgtaacaggtcgagatgcattgcttttacacgaaacactgcgataacgactaaagttgatctctctgaaatcatcctttagaatcaataactcatctttacgtgaaattcttccttttgtgactccattcccattatatgaacaattttgatgagttggaagaacagtattaggactcaaacccactgtacagttcttttcatagtctaactccatctccaatctcattgctggagcacgaaaagaaaatgaagagatttgaataagaatctacacaagcaatgctaaacaacatgtagacaaacttaacggtaaccccattgttaaaggctctaatttgtaaacaaaaaattccattttgaagtccttgttaggaaaacccagaaaagaaaaagttaggaaatagtagaaacgtagagtctgcatagacttcatcattgaccaaagacaaacataaacatgcttttgaagaagaaaagaaaaatatcaatgctcataatttgttacaaacataccaaaatcacatat

SEQ ID NO: 99440 - DNA, 3145 bp, Cannabis sativa
aatcaagcacagtataatcaaaatgatctaccaagaattgtcctccccaacaacaatctacttccgcttaatcttcgtcttgatcgaacaaattatacgatctggagatctttggcccttgctgctactcgcgcctacgatctcgacggatacattcttggacttcgtccagctcctccgattttacttgcaggtaatgtccctaacccagaatatcaacaatggatgagatttgatcagttcttgatgcattggcttatgaattctgtttctgataatatgcttgggcatgtcatccattgtcaaacatctgctgagatctggagtacctttgcatcactgttcgtcaccagatcaagagctagactcctgcaactaagaggattgctccaatccaccaagaaaggctcactttcaatcgaagagtacatactgaaaatgaaacagtatgctgacagtctcaatgccgctggacaaaccatgtctgacgatgatttggttctttacatactcggaggcttgggatccgaatatgaagcagttgtagtcaatctcacctctcgatccgaatctctctctttgcaagaagtccaatttatgttacaaagccaagaaatgagactacagcagcttacatccgattccatgtcaaacatccaagccaacatagccaatacaaactttaataatggaggaagaggctatcaatcaaacaggggctatcgtggaacaagaggaggaagaggtcctaacagaggtggttttcaaccaaatcgtggcaatagacccatttgtcaattgtgtgggagaagtggtcacactgtgattaagtgcttccacagatttgacataaacttcactggtcctcaacccaattcaaatcccacccaatcccaaaccagtgacacctctcctcaagccaatataacagaaacaaacatcatgcccgatctgtcaaatgcatggtatattgacagtggagccacccatcatatgacaaatgattcccaaaaccttgccacctctactgactacaaaggaaaagcaaaagttgttgtaggtaatggcttctctctccctattcatcacataggcacaagtactgttcctactaaatttccttcccaatctttagttttacaagatatattgcatgtgcctagtctaacaaagaatcttttaagcatctcacaattcacaaaagacaatcatgttattcttgagtttgatgattcttcttgtgttattaaggacaagaaaaccaggcaagctcttcttcagggtaatctctgtgatggcctctataaacttcaagtttctcatcctggccaaatcaagccacctgtgtccaagtcttcctttcttgcctttaatcacactactacaagcaatcctgttcttgacaagtccaaagctgctactgtgtggcatcatcggcttggtcatccatctcatacaattctaaacaaagttcttgcacttgtttgtcctaatgtgagatgtaaacctgattctttttgtaatgcttgtcaaatcggcaagcttcatcaattcagtttcaagaaaacttctactaaaacttccatgccttttgaattagtcttaactgatgtttggggcccttccttttatgcttccaatgatggttacaagtattatgtcagtttcattgatgatttcactaagtttacctggttatttcccatgagaaccaaatctgaagtcaaaaccatttttacacaatttaatgcctatattgaaagatttttccaacttaaaattaaaagtgtccaatctgatttagggaaggaatatgaacctttgtataacatgttcaaagaaatgggcatagttaaaaggaactcttgtcctcatacacatcaacaacaaggtcgtgttgaaagaaaacacagacatgttgttgatatgggtctcactcttcttgctcaggctaatatcccattacagtattggtgggaagctttcacttcagcagcttatttaattaataggctacccactcctgtcctcaatttactatccccatatgaaaaattattctcacaaaagcctgactacaatttattaaaagtctttggatgctcttgctatcctttattaagaccatatgagaaccataaagttgcttttcggtccactaaatgccttttcataggatattgtctttcatccaaaggatataggtgtttacacccaagtggaagagtgtatgtggcaagaaatgtcactttcaatgaagccgaattcccctttttagacctctttcctacttcctgcaacaacagtacccactctacacataaagtcattgatcctaatgcttttcaagttcccaccattacccccatgtcacgtccccatcatccacccactccccctgccactattaccaactcccaccagtcaacaataccaactgaattatctcactcatctcccacactcgtgcctcacatccctccaagtaatgaccatattcaacaacacaattccccacaaaccagtacctctgtcccatccatatctaccacacaaaatcccacacacaaccagcatcctatgcttactcggtctaaacatggcatatataaaccaaagctctatcttgcctccatttttcaagacactgaaccaaaaagcctcaaagaagccttagccaatcctaaatggaataaagccatgaatactgaaatttatgccttaaagaaaaacaagacatggacacttgttcctccctcctctgaaatgactattgttcataataaatgggtctacagaatcaaattaaatgcagatggctccatagaaagattcaaggcacgtttggttgccaaaggttttcaacaagtaccaggagtggacttctttgaaacatacagcccagttgtcaagccttgcaccatcagactcatgttcactatggctgtcacttatggttgggaaatccaacaattggacatcaacaatgccttcttaaatggagaactcaaagaggcagtctacatgtatcaaccacaaggttttgttgatccccaattccccaaccatgtatgcaaactcaataaggctatctatggtctaaagcaggctccaagggcatggtttgataaactcaaacaatcat

SEQ ID NO: 99441 - DNA, 1103 bp, Cannabis sativa
cctacaataatattcaatagttttatttaattattatacaaatatattttaacaaaaaaaaagtaaaaaaaaaaatgtagtgctaaggacattagagagtcccacaataataagaacattattgttattagataccagttatattcagcaccactacgagttgtcgcccttgtgaatgaatggctagcttatatagttgatattttatatatttattaaattaaaatatgtagaatctaatacttaagtgtacccataacaatatgacatctcgtggtggtattaaacaccactggttacttttaatatttctctatatattaataatgtacgggaacttaatgaggtgtcatagtattattagtgtaaaatattgagtcttaatgaatattgttattagatattactggttaacgatagttcataataattattaaattaaaatatataaaattcgatattatacactgataataacataacacttcggtggtgctatgtcctattgatgctatttaggatttttggaacttaaataccatataagtgtatagactactcattcacttattaagataatgatactgagctaggctcggccctaggttaaggcggtgcttagggccacccaatccaagggccaaatgaataaacaatcattttaaaaatatatatttataataagggttcaaaaattttactttttcaaagaccgaatacaattcaaggcagatcctatattgagcatcttaaggtgtcaaacaacaacattctaaatgataattggaaaaactaaccttaacaaagcaatcatgaaattgcagacgaagaagtgcagcaacaatagtagggtccttagagaaagcagctttaacaacggttttgacggtggcctcaacattcacttgtgttgtttgagatttaaaaagtggccaaaaaccaggggttgtgatggtgcattttttgttgtagtagctatttgcaggttgcaacaccacaccaccataacattgcccactcaaactcaacaaaaagagacccatggtcaccatggccaaaaccctattgttcatcatattactcaccattttcatatatatata

SEQ ID NO: 99442 - DNA, 1114 bp, Cannabis sativa
aaatataatattacatcagcactctattgaagatagtcttacttgcaggttattatatttaaaaatttatgattctcattaaaaataaataaataaataaggaaaagtatatatatatataattcttgaatatcccatttccttgaatcacataatttatatacataaaattcaatgaaaaaaaccaaaccctcataccaaattttgagtagtgatcatacattttttattcttcttttatcaaaactcttagaaaacatatataatatcaacactttaaaataaaataattatattcaaagacaaaaaaaaattgaaactgacattaatggtgtctctctcgttggaacattattacagaacctaacgacgaaatggttgaaacaattgatgataaatacgattatgattgtgattatgatgaagaagatcagtaccagaacgtcgtcgattattctcgaacctttgaacgaagcttaacccaactaagacctcaacaatggcagcctccgtcttctccaaatctgagaaatgcaaggtctgcaaaagcagcaccgtcggcttagtcccttccaagtacttctgcctctcgtagttcctctccgtctgccacttcatagtgtcatgagccatgggagccagccacgacatgatctcctcaaccgcctccttccaccccattgcaagggcatgaccatcgcacccttcccccacctcttcttccttcttcttcatccaatggcttctcagtttcgacctcaccgtagtcctcagcctcaccgggagcatctcgtacagcccctcgcgcgtgtctgtgttcacagtgtccggggcgtgaagacaacgctcagctgttatgatcacgttcgcataacggaccgccagcgccgaggcgcccactgtggaaggctgagctagccctgaaactctgttgtgagcgatgtctagatggttatcgtgttgatcgtgctttttgtgatcatcatctagctcaactggtaccaaaactccgctggggtggaatgtcctatgactctggtgatggcggtggttgtggtggtggtgattatgatgatggtggttatggtggtggtggttatgattaatatggcta

SEQ ID NO: 99443 - DNA, 1528 bp, Cannabis sativa
atcagcaccctttgtaaacaaggaaaagaaaactatgtataagctttaaataactaaatgattttatttatatgatgaatattcattatgaaaataatggtaattacttaatttggacaaataataggagtatagtatttaggcagatatttggagcaaaatgattgggccactttgtgggcccacgttgagagttgtaggaaccgaatccgaacccaaattgtgggaatgtttagtatgaacattgagatggtaatatccatggaaaagggaggtctcaaagaaaccatgggcatcagttgtcccaaacgacgtcgtttcttggtatcgaccccattcacgcataagcttgtcaacgacgtcaccagtgggtaagttgttgaaattattgtcagtcaaacacattcggtaacatccctggggtctccaagctgtccataaaacgatgccgtttacgtgagggtgagaccttgcctctcttaatatttcctccaaataccatgcctacaatacaagccatcagcccatcagttagattatattattaataagaccaatcattttaagaaattaataaaggtttaatttgccaaacatatataagcttctatttgaataaatttcactattatataaattgtgtcaaaacaaaaattaatgcatgaaagacactcaaaccacaatactctattgcattgccatatttatggacttgtagtgactgatagaggtacagtgagatattacgataagaattaattttaatatcttacttaattttagttttttgtctaagtctttgtaattattgtgctattgagagtggctcttattataaaaattttgctttatataacttctaattggtaatattgagctaatgataataatattaagcagctaagtacatttgttattaggacccgtcttaacttatttggaattttaagtttgaaaattctttttgggcctttatgcaaataattttttgcttaaataatatcaagtaattaagtgataatagtcatgaggagatcatatacttttattttttttttttcttgaaaaagaggtaaaatatgattattatgatttgaactatttaacaactttacacgtaaagtgaagatataaaattgaggaaattacactctataccctttttatattatccttttttatttttaccctcttttttaaagtctatcatttttacttttttttaaacattgtaccaattttgcccatgtcacttcaagatactctccatgtgactctcttatgtgagggtattttaggtacaataaatataaaaagatgtatgtttcaaataaatataaaattagaggcaaatttgattaattgattaataaaagaggcatttttcaacttacccctataaaatttcatttcataaaagttactttaatataattaattacaattgattaattcttattaaaatttaaatttcttggatataaaaaaatgtaaccgccccaccttaattttatttctagattaattt

SEQ ID NO: 99444 - DNA, 1633 bp, Cannabis sativa
atatggggtaattcccctaattaatcattatgattttttttttttatatttagaaaatatttttttgagttattattgattatttaatattttttttatttttatttaaaaaaattaaaataaatgtgcgagagtgattatctagttaatattaataaaaaaagtaaaaaaggtttaaataaattttaaagttaccttttttttatttttaaatttttattttttatatttatgaaacgggttacttcaaaaaattacaaataattatagttttagtgaacataattttgaagatattttcacattttatattaaaaaaaacaaaagaattatttaaataataaaaagaaaagggggaaggaataggatttgggcaaaacagtaattgtaggaagagaatcgggatttgtttgacctaaataccctttttcctgtgaaagccccaaaacctgtatttcctttctcaaccctcacaactctgcctcttctgcccctgaaattcccaatcttccaccactctcttctcttctcatccatacccttccctttctttttccgattttctccactctcaaacttacccgccattcttttctatttcaaattatagttggtccttccttctctttcgtttcatctccttaacctcaattcccttccaccacctacctaatgcccttgatccctctcctcctcctctttctttccgacccagccttatattttccaccttcacccactgccccacaccactctctctctccatatgttttttgatcccttttagcgtggttctctgtggctcactcgtgttctcacaaggtaggttttcgtgtcattcatctactttactgttgatttatatttttctgcgcttgttctgagatggggttatgttatttctgctatattttgattactggttgttgattgttgttttattttgtgggcatgcttgaattttctgtgaaacgtattttcttggactttggttttgagatgtttccacttcccaaagtttttttctttatataccccttgaatgtatatactttataaactcgattgagaattacctgtagtcggtaagtgggtttggtttgtttttattgaaatctctgtttggttgcttaatttaactatcgtggaagaaagtgttttcggattatttaactatgcatatatctatatatatgtgtatacatgtgcttctcaatgtgcggacagggatatattctcttatttcttgctgtgttgttgcattcgatcttttacctttgctgtgttgttggaacctgttgccaggaggtggtgtttttagtctgacaagtttccttccgcaaaaggagaagagttctgttcatgatttatttccgttttgatgataacggtactgatttgaacgagagttgcttgtttgattgccctccagttattgagaaaatgatttttacatggtcttcttagctgcatgtgttctttttttgtttccttttttataatgtggttagccgaatcatattatgttatttctaggtacgtgcatgtttctctttatgttgcataattgaataatgtggtttttaattttgaatactgttacttttggttggcaggcatgctgtaatattgc

SEQ ID NO: 99445 - DNA, 6342 bp, Cannabis sativa
gaagtgaaatatgctaattttgagttatttccttatacgatgtataaattgggatgctttgtattattcttttttattctcgttagtttttgttttcatacattctatttttgttttcttatgttttatttcagtcaagagatccctaaatctccttttagtgtggagcttgatgctgccaatgcaacttggctgtcaaatgatgtggccttgttatcaactaaaactggcgagcttttgttgctgaccctagtgtatgatggaaggtaattgtaggcatcgtactttagttgatttttctatgtcggctgatgaatccaaacttgtgttttatccttccatctcacctacatggttgattaacttatttatcccttgcttccaggagagattcatttaaataattgaggatttcttattttttccttttctaatgaaaattgatttttgttgttcaccaactctgttttacaactatcatattattataatctgcagggttgtgcagaagcttgatctttcaaagtcaaaagcttcagtactgacatcggttagtcataaatgttagaatgttatgctatttgttattgttagatatgcatattgccagtcctttggacttcatttctgtaataacaactgcagttgcatctcacaatctgctaacactttttctatattttttttttggtaggggattacaacaataggaaattcattattgtttctaggaagtaggttgggagatagtttgcttgtgcagtttacttgtggattggggacagcaatattgtcttctggtttgaaagatgaggtatggtagaacctaataaagttttctcctcttaactctagataacattcacgattcatctattcctttttttagtatttatgatttcgccacatagggtctcgtggggtcatatgcttccatcccactggattttatgaacttatgtaagtgacatatttattgaatattgcatcaatatatctggttatttgatgtaaaataatttaagggtgtttattttctgatttactgagttatttgagtttttatattgtgattgtgttgttattgttgtttctagtatgacattcattcacactttccttgaattatctatgttttgtgctacttttcattgtaaccacggttttcctctaccacaagtgaggcttttcaacaaattagagtcggggtcagtctaagacaagtgacccttttctccttttcgaaaaaatgaaatagctaatgaaatccaatgagaaaataaaataagaatttttaggatgtacttctaattttccttggattgtaccttttaggggtcaggtctcactggtgtagaccttagcctatacaaaatgagattctcctcccccttctaacactcccttttgcttttggaatggattgaatcggttcacaacattatgtttcaccttatatctacggacggagggacttaggccattgtgtacgcttaagccctcactcagttatatgagaaaacttgtatattagttagctctatttaagtctttgtttgactataaatgtgtataaagtcctcactcaattcggtcatcattcccaattccaaaggccaaacataataaattataccactaatatttaaaaccacatccacatttaaatgaaagtaagaagtcctttgattcattttttattcaagttctcttggaaaaagaaatccaacccctcactgagccgaaatttgtatttcatcttatatcatcattaattaactaatggtcaacttagtttttgatcctgtaaattagttgtttcttgataaaaagacttaacaaatgggagagattatttgtgatatgcatatatttattttttagttgtgaaaaatgaatacacaatagctggggtggactataatgttttgctttggtgtgtcattgtgagtataaggactaaggttttgtaatagacatcctgtccgtttttaagatattctgaatactttatgatatcaaaaataaagttttaaatagtcttttgcatgcatgcgtgtaagttaaaatactttatgatacaaaattattcagaattttttaaaaataagcaggatgcttagtataactataatgtacaccataaattactttgtaatttctttactaaagacaagaaatgcctttatggtaggagcgaaaaaaaattgatagcctcactgaaaatattttctgtctctgccactggtttgtgtttatctatcaattgacttaaagttctaaaacatatatggtgacatttaaactaaatctgttttgcgttctttcttttaaccataacttttggagtttcttaaaattatccaaaactttgcttgaaactcttgtttctctgatgatactttctgtcgaaactaacatggtcttcttggcgtagtagtatctgcttcttaatcacaaatactatttatgtatctctgtaaattcaatttgctgttaaaatttttttagataacagtataacactgtttcgcatttttcccagtaattagttttgagctctacttttccagtaccttctgaaattttagttaaaactcaaaagttgctgcttgtttgtaaatgtacaggatggagatattgaaggagatcctcctacggcaaagcgattgcgtagatcaccctctgatgtattgcaagatatggcgaatagtgaggagctatctttgtatggttcagctccaaataactcagaatcagctcaggttatttacaattctgggatgacttcactgggttactgttcttcccaacttaatacctgtagtgattttctttgaaattagaaagaggagggaagaagattaatgtggtacaattgcaatcattgtacaccccttcttcattattggtacaagcggtggtgttttgcttaataaattacatcttaaaactggatccacataaaagcaactttcttcgaacttaagggatgctccaaattatgtatttcccaacaagtaaaatcaattggttttgcaatttagtaatctctactatgtacattataagatgagcctctttttctcaaagttgttcatgtgtgcatcattgtagtaagtaataactacatccttagtctattgttacttgttatgaaagacttttgaccatcgattttcttctcattcttagggcttttaaattggtgatttactcaaatttgttagtattaccgtgaggttaattgctgcatttgtggcctaaagttctgaagtacatcctatttcatattgtgattgcagaagtcattttcatttacagtgagggattcattgataaatgttggtcccttgaaggacttctcctacggtctacgtattaatgcagatccaaatgcaactggaattgccaaacagagtaattatgaattggttagtttttatttactatgccacgagttatattattccttctccactgtataatgaacgtcgcttattatccaaagaacaatgatggatgttaggctttctaccttctgatttccttggaccagttatccaaaatgtagaaattactagtatatccaccgaaacatgaatatctatcctaacgagttttttgccatattgccttgggtgattcttcaggtttgttgttctggtcatggaaaaaacggcgccctctctgttcttcgacagtctattcgcccagaaatgattactgaggtctgtgatatctttcctttactgtgagttgtcattggagacaaacaactttcaattttatatttgttaagtactctttgcttttaaaattggtccaaacctcgttttcaactatgggatgtacatagctgttaataaattgtattatttggttatcatatattttattttatatgtatatatattagaactcaagattattattattattattttggtgctaacgcaatattttgcacgaattcgaatgataaaagaacactgcctctctgaaaataattagtggctgtatgttaattcttgttcctttttcaacttggcaggttgagctgccaggctgcaaaggaatttggactgtttaccacaagagcacacgtagccatactgttgactcaaaaattacctctgctgatgatgagtaccatgcatatttgatcataagtctggaggctcgaacaatggtaatgcctaacccatacttgagttatcctttactcagtttatttgttgagaagggttattttgctgttcaaacgaatgagtattaatattgtaaaatttgagggttttaaagaatataaattattgtgcttaggtttgggacataattagtcattacgtaacaaattcatgatttttcatgcattgttgtatttttacactaatgatttgagaaataagacaatttttactgtgtgttaagatttctatttgaggatgatttagtacgttatcaagattaaagtttgttggaaattgattattcttttgttgatgggtaggttcttgaaacagctgatcttttggcggaagtcactgagagcgttgactattatgtgcaaggaagaacaattgctgctgggaatttgtttggaaggtgagctgtatcttgtgaatcttgtgataagaggctttaaatatgtatattgatactattcaaggtgatgatttgattcttgaattgcgttttttgggtacttgtgaccttgttctctatgttaggattgtattgttagctggctagtaggattgtaaagtatattcatggctgttagagtttgttactttgggttggggtcttactagaaaataaataggagagagggtatggcaggatggaggttgaaattttgagttttgagagcattctttcttgctcactagactctcgaattcctaggttatccatgttactttccatatttcgtttacaattttaatcctctctatgatatacatttttgagtgttgtatgaggtattgtactattgtgggtagagttgatccaaagtctcatcaattgattccagagtcatcgatcttggttacttttcaccaggtgatgtgatagaactttctatttacacttcgaacaccaatagattagattcctcaaagaattctttattggtagaagtggccaaagttacaactagcttttgagaggctagactcctctccaattacaaccttttgagagggctgctccatccttagactcaaactcttctaatcccaagctatcttacgaatgaatccctctaaacaaacacagccactaacataaaaagaagggaaaaatcattaaatagaacagaataaaaaacagccctgccctaagctatttctgtggcctcctattgtaaacaaactgtagtaggggcttatcatgatcccaaagaagtttaaagtattaccttctttgaatgacgaaggtgatgatctgcattggtggcttcatctcattgaagattactttgattgccaccatattgataacgagcaataagcagctattgctttaaagtattagaggtggatctatttagcaacagtttcaagggttggagggaacgtgagcaattcatcgattggctgcaagttttgttagtctgtgttaattgttgctgcttgagtattgatgatttgtattgatttgatctcagtgcaacaattccattaatggtattgaatgagtttacaagctttgaatatatacagaaggaaagaaattctcgatactgaaatgtctgtgttcaattgttgggatttgtttgtttaatattcacgtgtgcatgttttttgcctgtttgaatgtgtgtaggcgtcgagttgtgcaggtttacgaacgcggtgctcggattttagatggttctttcatgactcaggatttcagttttggagctgcaaatgctgaatctgcctctggttctgagagttccacggtgatgtctgtttccattgccgatccatatgttgtattgagaatgaccgacggaagtatccggctccttgttggaggtatgcttgtcaagtttttttaagtgcattacaagtttatgaaacttgcatttgatttcaaatttacttccagttatcttgatatgcgactttattctcgaattttgtttctttattcttattattataattattcccgttacatgtccctttatgctctcatctactaatgtttctatgctcttttgttttccgtcaccgtctcattacttttctgacgtttttctaatgtgcctgttgatttgggtttgtagatcccagttcctgcactgtatctgttaatactccagctgcctttgagagttcgaac

SEQ ID NO: 99446 - DNA, 6673 bp, Cannabis sativa
  modified_base (6358)..(6358): a, c, t, g, unknown or other
agtgaaaatcttctttaaatgtaacgagaactagtgagatattgatgacaacacacaattttaaaattatatgagattttagatttttaattttgtaagagggatcggatgttcaatttttaagttttttttactataacactaataatgatataagtggggaccctctttgatcatatgccacgtcagaaaatatctctactcttattggatatttatgagtaaaagctttaataatattatatatatattttaaaaaataaagtgaagagtataatagaatatatgatgttcaaatttttgtgaagaaaaaaggaacaaaacaaaatagatatatataaaagcattggaatgaaacaaaatcaaacacactcccattagtttcgtcgtcttctttcttctcctgttaatgctgggagctctgtattggcccaacccaagccatgtcgaccattactatagagcctctcttccaccactctcgtatacgaaacgccacctgcttttccggatcaaatcgattccactcctcctcttctttctatgcccaccccaacaacctcttctcctcctcccatgcccaaccacgcttcttctgcaacttcaagcctccgcgacctcttcttcttagagctagttccaccgatacagctcttcttgacacctctacatcctctgatgtatcgtttaagaagactttccctttgaagcaaactatattggttagatttttttttttttgaaaatactatattggcgttagtctctgttgatttagtttggtttattctaaaagtatttctctgaaaatttatttacgagaaaatttgaagcttgaagcaatcttttactattttttttttattgagtaatttatatttttaatggaaaaatagaaaaaaataatgtttgtaaattgcatggcttagatggttcttgagattttatatgaaagtaattgttgatcggtttgatttggaattggtaggaagagggaaagatcttcatcagattagatcgtgggaagaatgaacagcattggcagcttactgttggttgtgatattcctgggaattggattcttcactggggtgtttcttatatcgacgacgtggggaagtgagttttcatttaatattggaatatgattttttattattattattaatggatgcatatccatttatccatatcaacttgccttggtgaactatgataagattgaaatatattgttccatttagtttgatgtttttgttagattttctctactagctataaaattatcacatcatgttgttttttttttttttggcaatgtgcagtgactgggatcaacctcccgaaggaatgataccgtctggatcagttcgcatcaaggtacttagtttgccttttccaaaataacaggatggattggatttccagcttgcttaaatttgataaatacaattactgtttgttttcaggattatgcaatagagacacagcttaaaaaatcatcttcatcttcggcaggtgatacatttcaagaagtcaagattgattttgatcccaagagtgctatagcagcaataaattttgtcctaaaggttttaaagttgaatagtttacagttgacattgtcttttctttatgtaaaaaatgctaaagtatataaaaaaataatatcttattgagtttaataagatatttttctccagagttttctatctggattccgttttcttattagtttcttcctcttttttggtggttggggtccgttggtgaagcaggatgaagaaacagggtcatggtatcagcacaaagggagagattttaaagttcctcttgtggactacctgcaggaggatggcaatatggttggacggaaaaagggaaacagtatgtggccaggttgttatcctcactacatcacctttcttgattttgtatgcttgatttaatacattgaatgatatataatttcatactatatctgcctggtgtcttctcttctatcattttccaatcttaaagtgaaacgggatttactggttgtctgataattctaggagctttgggacagctatcaaacatattcattacaaaagaacaattggattctaaagatgaagacagtagcatggactccattgagcctattaaagaaaaaaagatcctagaaggattctatgaagaaattcccattgctaagaaggtggatgttcataattcaattactgtttcagttaggaagtgccctgatacagaaaaaatcctgctatccatggaaaccgatatacttgggaatgttgttgttcactggggagtttgtacggatgatgccaaaaactgggaacttccatcttcaccatatccacctgatactgtcatttttaaggacaaggctttaaggacattgttacaggtagaaatgcttttcactgatctagtgatttgcccattctgtaaaccatcttaaatgacattgaaatactgttggttttcccttcctttcaaatttttattctcttacattacttataagttttaaccaggaaccaccatcaattttcattttcacattttttattaacattttctgtaactactaaaagatgaaatgaactgggtattcaagtagtgagaggtgatctctgaatgtcatggctatttaccctttcatttttcaattctgattgcatgcaattccttgtttattctcttaaacttctgttactttcagctttccttcaatttttgtctgttttattttgaagaatctacttgtctctctttttttccctcgaaagaaactgtgtgaggatctctctctctctctctctgaagataatagtattaagcaggaaaactagattatttgcttgatcttacttcaacttatgtggatttttgtgtgcagccaaaagaaggtggaaatggctcccaaggattatttactttggaagaaggttctcaaggatttctttttgttcttaagcaaagtgaaaagacatggttgaaatatatgggaaatgatttctacgttcccctttcaagctcaagtatctcttctgttcttcccacttcgggtctgtctgcagggcaagagacacctggaaaatctgtagaggaaagtgaaggttctctttctgcctataccaagggaataatcagtgaaatacgaagcttggtaagtatttcctctgagaagagtttgaagacaaagaccaaagaagcacaagaaagtattcttcaagaaattgaaaagttggctgctgaagcatatagtatgtttagaagttcggttgcagctcctccagaggaagctgtttcagaaaccgaggaattagaacttcctgtcaagatacaatcagggacaggcacaggttatgaaatagtatgccaaggatttaattgggaatccaataaatctggaaaatggtacatggaactcaaagaaaaggctgaagaattatcttcgcttggttttactgtgatttggttgcctcctcctaccgaatctgtatcacctgaagggtacatgccaaaagatttatacaatctaaattccaggtaaggtatcataaagtagcttttattatatttgctgctcagtattccttctttcttacctaagaaattaggccagctcctccaccccaatggaaaaacttttctctctctagtatgaccagttttgcaaccttctaaactcaaattagcttagagctgtctgtttccttgtgggacatttgactcaaataacttgttgtaacattttttttttggtgaataggtaattttccttctgtaggtgtaaattgttagagtttatattgtttttcaatgcattttatttcttgaattgatttggtttctgggatgtttatttatatggtggattctctgaatgttctcttttcccttctatcatataaaacaaaagatatggaaccatagatgagctgaaggagattgtgaataaattccatcaagttggtatcaaagttcttggagatgctgtcttaaatcatcgttgtgcacactataagaatcaaaatggtgtttggaacatttttggtggtcgtttaaattgggatgaccgtgcagttgttgctgatgacccacattttcaggtataatatttcctttgtttcaaactgagatatttgttggaattagtgatcttttttgatttctttcttttatttattttgttcgcaaaagattggaataaactgtccttccaccattgcaagtctcgtttttgcttccctcatttcctaatgtgacatgatttttcttcctctcttattcagggtaggggcaacaagagtagtggagataattttcatgctgctccaaatattgaccattcacaagattttgtgaggaaagatatcaaggagtggttgtgctggctaaggtagtgcatagataagttctcccattccctaaattcttatggtcacattttgtttttgtacatgaaaacacaaatatgtatgaaattgggtttcagatagtaatcgtggatgtcttattgcaataaattttcatctttatgtgacctacaggaaagaaattggctatgacggatggagacttgattttgttagaggattctggggtggttatgtcaaggactatttggatgctagtgagccgtactttgctgtaggtgagtactgggattcacttagttacacatatggagagatggatcacaaccaagatgcacataggcagagaattattgactggattaatgctacaagtggaactgctggtgcattcgatgtcacaacaaaaggaattcttcatgcggtgagcatttcatctagtagagaaaaaaatgaaatggttttattctctgcgtaaaatatgtggagtggcaattagagacgtactcatagtagtaatccttttgctatttccatcacaggtgtacagccactgtttaattataagaatatatgaattttgataaaatatatttattttcccatataggcactggatagatgtgagtattggcgattatcagatcagaaggggaagcctccgggggttgttggatggtggccttctcgtgccgtcacattcatagagaatcatgacactggttcgactcaggttggatttcctctattcattctgtcagtcatttttctttaagaggaaggtctaaactgattgtaatatttctatttgaacaaaatcatctgagcattgaacctaacaaacacctgctgttgaacttttgtaaataagcattgtgctcgtagtcctgaaatgcagtgcttctttagtttcagatatttatgtttgaatgttctttctttgtgaagggtcattggaggtttcctggcggaaaagaaatgcaaggatatgcatacattctgacccatccaggcactccatcagtgttttatgaccacattttctcccactgccaatctgaaattggaggtctaatctccattagaaatcggaacaaaatcaactgccgcagtacagtaagtatcaaactatgaaactcattttctcaagttatgacttataaagcaatggctatcaaaacactattaattttctgatgcttttgtgatcagattaaaattacgaaagcagaaagagatgtttatgcagccatcattgatgaaaaagttgcaatgaagattggaccaggtcattacgaaccccacagtgaatctcaaaagtggtctctggctatggagggaagagactataaggtctgggaagcatccggctaaattttggaggtggggtgttttgtattattcaattatggaagtttcagttatcaaaaaaaaaaaaaaaaaaacaattatgtgaagtttgattaaatgaggcgtccggataggagtttttcctaaattatatctaaacagtaaactactgccttgtgaattgtgatggtggtgctgccatgtttttcctgacgtggaagaagctcaagaaactcgttcttctgtctgggaccaagtacaacacttgctgtgtcagtcaggtaatgtaatgggtgtgatcagtaatgtataaatataaataataatgttatcagtaggtcttatttcgctttattaaccattgttgtaacaatgtattgtaaacaagtcattggtaattaaagagctaccatgtatcattgctattatgcattattaaggctttcatttcatccaattggcattattttgttacattcaatctgcatgaagtgttcattttatattttagatacaatccaatctgcatataaactcaaatttaattcaatccaatcggcaaaagtatggattaaattaattattttgaattagttattttttaatattaaattatntaatatttattaaaaatatatatattttttacataactaacaataaataaaataaattattattgttttatgtctccaacaaaaaatttaaataaataaaacaaaaaataaaagtatagaaaagaattatacgcataaagaaatgttaaattttattttagattatatttttcttgtaaataataatggaatatatatttgacatcctaccatatttcatgaaagtaaatcattaccatgctctgaggccagttgtgggaatattttacctggatctagatttactaacaagtatgttgattaatatcctaaata

SEQ ID NO: 99447 - DNA, 2825 bp, Cannabis sativa
aagtatcttatgtaattattcttattttaattggctatcaatctatcatcatatagattaatgggataagttgataaatactacttatttgtatctattaatcaaaaataccctcatattaaatttcattaaaatatactcatttttatgagtggttgcctaatataccctcaccttccacttaagtctagtacataatttatattaacttaaagagtataatggggatatcatctataaaagtaagtatatcttaaaaaatataaaaataaaggtaaaaattaaaataattaaaatatctataaagtttcccctctatccatatgtacttcttgaggaagcccagcccagtatcataagcccaagcccctttaattagggcttcatatttctagggttacagacccaaactaaaagaaacaacctttaagcttagcttctaaatctcatcggagaagacgaattcgttatggttggataacacaatcatcaattacttcactcacaggtatgaattcatgcattaattataagattagggtttagagaaacaaccgttgatactgatgatttttgtaaaaagttcgaaactttttttgaattcgagttgtgtaagaagaggaagtactacattactattcatcactaacaatggaaatcgaagaacgagaccagaaaaacgatgccctcgaggaaaagtcgccgactttgtttgtggtggctctctgtccctgtttggtgtgtttcattcttctcctttttgtaatttttatagttcttatagtcaaattccatattctttgtcatacaccgcttcactctgtactatacaagagaaaatgttgataccaatttcaaatttgagagctttaagggagaatttgggtgattttgattgtagttataggagattttctagtgtttgttgtgatagtgaaattggggatgaagttgagaattttgatgatgataatgatgatgagaaaaatgaggttttggttgttgaatctagtgctgatcctatggaagttgatcgtgtatgtaaggtgattgatgaattgtttgaattagataggaatatggaagctgttcttgatgagtttgggattagtttgtcacatgattttgttgttgatgtgttggaaaggtttaaacatgctcgaaaaccggcttttagattcttttgttgggctgggggtaagccgggattcgcccatgattcgaggacttataattcgatgatgagtatattagggaagactagacagtttgagactttggtgtctatgttggaagaaatgggagagaaaggtttgttaacaatggagacttttatgattgctattaaggctttcgcctctgctaaggagaggaaaaaggcggtcgggatgtttgagttgatgaagaagtataagtttaaagttggagtgaacactatcaattgtttgcttgatactcttggaagggctaagcttggtaaagaagggcaagcacttttcgagaagttgaaagggaggtttacgccgaatttacagacttataccgtattgcttaatggatggtgtaggttgaagaatttgatagaggctgggaagttgtggaatgagatgattgatctcggtttcaagcctgatattgttgctcataatgtgatgttagaagggttgttgagaagtaggaaaaggtctgatgcaattaagttgttcgaggtgatgaaggcgaaaggccctgtgcctaatatgaagagctatacgattttgattcgggaactttgtaagcaaggaaagatgagggaagcagttgaatattttgatgatttgatcgaatctggaaaccagcctgatactgctgtgtacacatgtttgataacaggtttcggaaatttgaaaaatatggatatggtttatgaattgttgaaagagatgaaggagaaaggttgcacacctgatggaagattctacaatgccttgatcaagttgatgacaagccgaaaaatgcccgacgaggcagttggggtgtacaagagaatggtacagagtggtgttaagccatcaattcacacttacaacatgattatgaaatcttattttataacaagaaatttcgaaatgggtcaatctgtatgggatgagatgattgaaaaggggttttgccctgattgtaattcttatactgttttcattggagggtttataagacagggaaaatcaggagaggcttgtaaatatttggaagaaatgttagagaaaggaatgaaagctccccaactcgattacaacaagttcgcagccgatttctcgagagcggggaagcctgacatccttgaagaattggctcagaaaatgaagtttgcaggcaagtttgaagtttcaaatgttcttgcaagatgggctgagatgatgaggaaaagggttaagaagagagatcctattaaagttgggtagcaagtgtatctaatttttttattttttttgtaaacaaatttatgtattttacaacttgtgtaatgtaatacaattgtcaatttttttaattaatattttgctgattattttattttatgaactacaagattcttctcatcaatctttacaacaacaaagttgatactttgactagaaattaagttcttgcctctctaccattacctttatttttagggtaaatggcggcaaaaaacccctaatacttttgttttagtttcattaaaccccccaatccaaatttctgttggtaaacccccaatactcgagttctgttagtaatttaacacttccgtccaaatttagctgttaactgcaaggttggattgtccacgtggacac

SEQ ID NO: 99448 - DNA, 1918 bp, Cannabis sativa
tttttttttttttggaaaaaattgaatttgagtttgtttattaattactattattattgctaactgggtttcaaagattatttttggaaaatttaatttgagtaaaagtgaagtacattggaggaagctgagaagacaatgatactttgatttattattattattggaaaattaaatttgagtttttgattgttctttctttctgggttttgagaatcattgtgtatagtttgttgttactttgggggaaaaaatggagtactttggaggaaagctgagaaatgctttgatttatcatcattgaaaaattaaatttgaggttttgattgtttatctatttttctgggtcttaagaattatttattgtgtatagctgttgttactttgagacaaaatataagagtgcattggaggaagcttagaagataatgatactttgatttgttattatattacttattggagaattaaatctgaacttttggttatcttttcctttttggggttttgggtattactgtgtgtagctgttgttactttgagaaaagttcaagtacattagaggaagcagagaaggcaatgttggaaatgtactgtgaaaagtcaaagcttgaagatggtcaaactgttctggatgttgggtgtggatggggatcactttctttgtacattgctcagaagtataagaattgtaaggtcactgggatttgtaactcttctactcagaaagatcacattgaccagcgttgtaggtaagaatataatttatgagtttgttttgaagtcttaggattttcatttggttgattgattttgaagagcttaggggtttattttgtgactttttgtagagagcttgaggttgagaatgtggaaatcattgtggctgatataagcacatttgaaatggaaagatcttttgatagaatatattccattgaaatgtttgaggtatgtacatgaataactttgaccaaactaactgtaactgtattcgaattgagagtttataatcgaatagaggtatttggtataatatttcattcctaaacttaaaaacatcaactttaacacaataacgataaaaactagatccgtaaatattatcctaaaaaatattttggtacctacaattttttttttgggataaagttgtttgatacattgagttattctatggaattgttatacacatctttatgtgtaattaatctcacacatgagacatgacaatacatataattttcctaatttagaggtgaattctatttataactagccaagttgaaactaaaaaataaaataatagaagtattttttatatagagtattcatatttagaggttttattatactatgctttgcgctatatatgatagtattggatttgtttgaagtattgggtttaatgtgataattacagcatatgaagaattataaggagcttttaaagaaaatatcagggtggatgaaggaggatgctcttctatttgttcatcatttctgtcataaaacatttgcttatcattttgaggtataaattagtttttttttctttttataattatagttttggtttgtgctagttttgttaatttgatttaagttaaagtactgttttatggcataacttaggatgtaaatgaagatgattggattacaaggtacttcttcactggaggtactatgccttcagcaaatctattattgtatttccaggtaaattttgctatcaaatatctcttttcttaattcaagttgagatggttttcgttatatatattgctaatgcatctatattataacctaccaaatttgagctatgatcatatatatcatatatgtatatatttttcgtactttcataatctcaaactttcatttcttactacattgagatgctaatgccacaaaccct

SEQ ID NO: 99449 - DNA, 1179 bp, Cannabis sativa
cggcccacttgggaagtcacccttttctttcttatacaaggagcgtccactgggattgagatagctgccaagaaagccgccggtgacacgtggcgtccgcacaaagtggtgactcgagtgttgactttgggattcttaacgttaactggtaactggcttttctttcctcagttgcttcgaaacggtgtccatgagaagggtataaaggagtattcgctcataattgattttgtcaaagcgggtttaagatatcacagctaaaagaaaaaaaaatgtaaaaattatcatcaaacaaatttacatattttgtactaatgaagttcataaaaccccttttcagtatcagtttttgtatagaattaccttatgtctttttttctgcacttaggcttaagaaagaggaagatacccaatcttataatggtatcaaacaagctttgaatatttataataaagccctcatattaaaaggccaaacataatcaacacttgcatatccaagttgatagatcaaatcttatttgggtttcacctcaagttagctaacttgaagattaatgtagtaggaaaatttgagaaattttcctcatatgatagttcatataaaaatattaataagatagttgttattataaattaaattgagtcatttataacaatagtgaaaataaaggaaggtatcaactttattcatacataatctctatttgttatctacgtttctagtattagacacgtaaaattcagatcaacacccaatgcctaataataggtcccaacgaagataaagtgggtggggcccattttatttgaatattttaggaacgttcttcagctctgtgatcggataaccttccgccattgatagctcgtgttcagaagtatgtccagtattatgaggctggaagggtaagacaacgtgttcttagaagaatagtctagtttcctattatttatgcgcacaaataaagaaatatttgttggtcagatctcgacagaggatcacatcaagctagaagagaaaacatccttaaacagatatcagacaattaattcacaattaattgcccacaattacggtacacggttttgactaaatctaactgaatctcatctgcctagtcaacatatcttctcttttgtgggatggacgtcacgaggcagcccaattgtttaatt

SEQ ID NO: 99450 - DNA, 2800 bp, Cannabis sativa
  modified_base (165)..(166): a, c, t, g, unknown or other
acagaaatgaagttgtatccgaaacaactacacaacagcaacccatttaagagagatgatgcctccgccacatgaagatgaaaagagaatgacactggatcacttgaagaatagtaacaactttttagtcacaacaaaagaattttgtgactaaatgtgactttnngtcacaacaaaatattacttgtgattaaaacataatatttagatacaagttgtcactaatttatttttagtcacaacaagtattgtgactaatacatttagtcacggatcttttagtcacaacatagtaatgctaatttataattagttacaatttttcacttttagccacaaattgttgtgactaaaagtaagattttttgtagtgaccgctccaagacccatacaaatgtggtcctcattgatacctgaatcaattaaaatcacattttagttatatatgtaattggattttgggaaaggaattcactccaaactcaaaatgtttaatccttcctaaaatgggagaatttaagaaaaagacaaaaaaatatatatacatattatcatattttcttaaaaatataataaattactatattagaaaggatagcattataattttagtaattaatttacattctatattttcaatttctcatcaaacaatatagaagagaattactttcctatccatcatttctatcatttcttttcccctaatttccatccatcctaccaaacatagcctaagatggagtatagtataaaatataaatcccgtgaacacattaatgcatataaacattaattgcaaactcttcctccatttctcgtgaactaatttattacttacaattctcttcaccaaccatataaatatatatatatatacacacacctcaattcattgtcttctcactctcactcactcactcactttcactttctcttccaaaatcaataatggctcaaattttctcaacatccaaacaaacgtatctctccctctttctctttctcctttcatttcttccactttcaaaaccattcacagtcataatgtccgactcaggtgtaccatctgccttaatagacggaccccaaaccgggttttccatgaacaccaacgacggagcccgaaccgacccgaaagagcaagaagcagtttacgacatcatgagagctaccggcaacgactgggccactgaaatacccgacgtctgccgtggccggtggcacggcattgagtgcatgcctgacaaagacaatgtctttcacgtcgtttccttgtctttcggagccttatcggatgatacggcctttccgacctgtgacccgacccgatcatatatctcgaattccattactaaacttccacaccttcgaacccttttcttctaccgttgtttgaccaataatcctcaacccattccctcgtttttgggtcaattgggttcaactcttcagaccttggtgctcagagaaaacgggcacgttggtcaaatcccaattgaattgggtaacttgacccggttaagagttcttgatcttcataaaaacaacttaaacgggtcgattccgggttctttaaatcgggtcacgggtttatggtcgttagatttgagtgggaatagattaaccggtttgatacccaatttcagtttccctcttttgagtataatcgatttgagccaaaatcttctagtgggttcgattccattagggataacaacttgtcattcgttgattaagatcgattttagccgaaatcgattaacgggttcaatacccgactcgataaatagcttgaaagaacttactcttttagatttaagctacaatcttctctcgggtcgacccgtacccgactcactcaagagtttagattctctccaagctttgatcctaaaaggcaattcaatggaatcagaaacgattcccggaaatgcgtttgaaggaatgaagagtttaactgtgttgattctatcaaacatgaatttgggtggtaaaatcccagtttcaattggtcacttaccaaatcttcgagtacttcatcttgatgggaactatttcaacggttcgattccaaagagttttaaagagcttaaaagtataagtgagctgagattaaatgacaattggctaagtggggaagttccatttgggagagaaatggtttggagaatgagaaaaaagctaaggctttataacaacacagggctctgttttagtgggaataatggtgtgaatgatgattatttggattcatcttttaattctggtattggtctttgtgatatgcctaaacctggttcgggtagaacggttcaacatatgtttactactcagattgactcaactgatgtgtcgcatagtacagtaacagttcatagagtctctgttcatgccctgttgattcagatagttattattgcgtttctaattttgtaactgtaaacacaaacagactgtacagtgtagtgtttttgttactttaaatgtttcacagcagtgttaaaatattatggtaagaagaaaatgattgggatttatcaaaaattaattagtttttattataactaattaaaatgtatatatattatttttcttatttttttttcaagagcgacggtcttaccttgtttctatgtgagttgtgtaagtatcgatgatggtgaaacaagctaaggaaatttataaaaatataataaattaaattttaatttttaaaagtatgaaaagaaaaaaaataccaccaaaatattacagctaattttaaattttaattggtgtatgtgtatcagtttcttaa

SEQ ID NO: 99451 - DNA, 2459 bp, Cannabis sativa
tccaaaatggtatttaccctataacaaaaaagtcttttgtgtttttttaaagcaaagctaggatatagataccatatgacatgatggacagttattatatattaatatataaggggagagagatcgaaaagactttctattaatttagtgaaataataattaagatggaataatttgcctgcttatatatttaatttttatttttatcgatgcacgttatatatatgtataatgttttctttttaataaatcataaaattcgtctgtattttttttatgaatgagtctcagtagctaggttagtatgaaatgtaatatgtagggttaattataaatattgggggagtggaataataaatattatataggaatatggtcatgcagtattaattaatattgggttgagtgtgtgatgatcaaattgatatttaaaggtataggccggtgtggagtatttattcatgtataaatagggtaggaaagtaaagatgttaacagttgttttgttgtaattggttgggtttgttagttagaaaggttgttgagagttcctggtttgttgttattgttactactggtttgaactggttttatgtattttctgcttcagtaatatgtaagctcagtcgagctaacttgtatcaattgagattcattcaataaagatttcattcattttctctcctaaactaaaatggtatcagagccaagaaattcttgagctcattctctgtttcttctctgttcttctcttcttctattcccatctctgcatctgttgtgtcccagctgccatggcaagaggaggatgagctcagactcgtaatacttccaatcgtgataacgatcctagaaacaacaatcaattttccacattagatcaaactactcgatatgatgatccacgaagtccatactacctgtcgcacagagaccatcccagtgccatgcttattgcaaaagttcttactggaagtgagaactatggatcttgaaagagatcgatgatggtggccttagctgcgagaaacaaaatgaagtttgttgatggtagattacctgaaccagatgaagaagatgaacatcacgaatcttggtgcagatgtacaacttggtcatttcttggattagttgtatccaacaaaatacgagacagcattatgtaccatgataatgcttctaccatttggtctgagttgcaagaaaggttcgaccaaaagaatgcccctcatgtttttgaggcaaaacgtgccatgaatctccttaatcaaggttcgagtagtgtgacttcgtattttaccaaattgaaaatcttatgggatttgattcaagaacatagaccaccacctctttgtaattatggggctatgaaagtgatacagcagtaccaagaagaagacaaagttcttgaatttcttgttggtttaaatgaatcttgcagtcttgctaggtctcaagtcttaatgtaagaacctcttccaagaatcaataaggcttatgcctcaatcattcaagaagaaagtcaaagaggtattacttcccttcaaatagaatctcaaaaatctagttcgaaggttgttggtgagtttcctggaggagtgcgatgtcagagatctaagttgttttgtaaccattgtggaattagtggacacaccatgtctagatgctatgaaattcatggttatccaccggggcataggttgcacgatcgatttcctagtaagaatggtgagagcagaaccacacaaggaaaactagcagctaatatgtctgagacacacaatgacaatactgaagggagtcctagagctaatcaagatcctctagctggtctttctctcaatcaatgtcagaaaattatggccatgattgctcgaaaattccacatcgagagtacaggaccttctactcagcccattgtgtcaaatttctcttgtaagaatgattttattcataaaaacaaataaattattgatacatgtgcaactcatcatgtcagtccttacattgatttatttaccaacatttgtcacaagcctatattgtctacagttactcttcctgatggtaccaaaaacaagatttcttgtactggtactatcaaagtttcaccagaaattgttcttgttaatgttctatatgtcccaaattttaaatacagcctgttgtctgttatagctttgatgtcttcagctgattgttcttttgtgtttcatgataattcttgtatcattcacgacaccaagaagaagaaggtgatcgggaagggtgaaagacatggagatcttttcttttctaaacctgattctaatcctactgttcttgctttttctgattcaaccataaatgttgacactttgtggcattatagatttggccacccttcttgtatcaaagaatttcctttgaataaagagttgaatttttctcaacctacttctcccaattttcattgctca

SEQ ID NO: 99452 - DNA, 1437 bp, Cannabis sativa
  modified_base (1340)..(1353): a, c, t, g, unknown or other
ctatatgtgttcttgattggagtatggtactaccggttcagacccaaaatcccagccggcatggatacccgactctcgcaagccgaaggggtcgacccggatgaactcgatgaggaattcgatacgataccaagttcaaaaccgcccgatatcatccgggttcggtacgaccggttacggatattggcagcccgagtccaaactgttttgggtgattttgcaacacaaggagaacgagtacaggctctagttagttggagggacccaagggccactaaattgtttataggggtgtgtctagctataaccatgatactgtatgtggtgccacccaaaatggtggccgtggcattaggattctattacttacgccacccaatgtttcgagatccaatgcctccagctagcttgaacttttttaggcgccttcccagcctttcagaccgattaatgtagatcaaaaaaatagtagataattagacatatattctctatatataatgcaaaaaattgttgaggcaaaacaaagtaacaaaattcagaaaagtgattccttaataaggttttttttaaaatggctgaggagtgaagaaaaaggagtgggggagtgagggggttaaagtagagaaaagtgggaagttgtcatgatgttctttattattattattatttcaaaaattttggtgtttgaattgaatattattgatcattgactaactatttgagaaattgaaataagagaaaggaggaggcagaatgcagtttaggtggggagaggaaattgtattgagaggatttgagaattggcagtgagaacttgttgtaatgatgttttggaaagtatgaacacacttgttttcttttcatgatatatatataaagtctataaaaccatttatttttttattaattcttttactacaatacttgtgttaataaatctctctttcattcttttttggatttttatgaggtgaataagttctggcttttgccagcaaattgccacttacctagagaaatgtatcttggttttaagtttgtcatgactcatgttactttctcttctttgtcaaacttgtgaagaagcttatcagagggtagggtagacttcaacaattaaactccataatttctttcattttctttcctcgagaaaagtttgaatttcttcactaccttattatgggacatgggtcaggactcaggagccatagccaaaacttctaatattcacatttaaaaggggtatgttattgaaaatttcaatattccgatttgcaattttaaaaacatgaacaaactacattgagtcagacttagagcatgtttggtattgnnnnnnnnnnnnnnttttcaaaaaattgtttttagaaatgagaacaaaaaataatttttgaagtgtttaaaacacaagtcatgtttggttagtgtttt

SEQ ID NO: 99453 - DNA, 1130 bp, Cannabis sativa
  modified_base (1073)..(1081): a, c, t, g, unknown or other
actagtgtgactaataagattcattagtttcaactcaaataatttatggactacattagtggaactatacaacaaaagaatatatgtcatcaaatctattgaacttggcttatagaattaaactaatgtcacactcataaacactatgtgtgtacgtttagaatttttttctagataaagacatgtgttaatgaaacgaaactttaaaataacgaccaataatatttgaaaactaaaatgttacattaatttaattcgagtcaattatgtagtcatataagaaagataagaaagttgaactaaattcacataatgaattgatcgatatagtaattagaggaaataaaaagtatttgcaactatgcatgcatggctttcatttcccaattaaattaatccccttaatttgggggttttttttaattaaaaaaattgcatacggataataaggagaacttaattaagtaataaaattcaagcttggagtgcagtacacgaatgaattagcttattatatatattttttatattaatgatcatcacatgcatgcataattaaaccacttgacttcccacttaaaattactatttatatacatatgaatatgaacattgttaatatttgccaccggcccacgttgatgcaatttaaatcactttaggtctttaaccaaagattaatatataattaaaaaaggcttgtaatttcactagctacttttattaatatacttcttttatgtttgaaaataaaattatatagtttctgatgagatgatccgttccaaaatctcaagaatctttagttaaaatataattccaagtcagtagtttttgagattttgaaaagggctactctttggagaacacaatatgatgaaagttgtatgctgtgttggagaagaattattgtctattgttggccatctttatctaggtaagttttagattacttaaaaaaagtgagtcaccggtttaattaggtacaagatatattcacatgttaccaaattggaagtagttgtggataaattaagaaatatattaattttttgggtaaatattattttggnnnnnnnnntttgcaaaagttatagattggaccttgtgttttgttaagtgacaaaata

SEQ ID NO: 99454 - DNA, 1190 bp, Cannabis sativa
aaataaacaaacataaataatttatacggatgatatagtctgtcgctgatttttttgaaaacaaaacgagcaaatcataaaaatcgggatcgaaaacgaggaaatctataaaaatcgggaatcgttattgtcaaaaaaaaaaaaaaaaatcgcggatcgtttaactcatcacaaacgacacgtcgtatatttcataagtcaaattttatgaatgaccataaaaaagagggaagtgcgtaggggcagaatggtaaaaccaataaaactaaggaaactgtaaaagaaaataaggagggttagaatgggaaatggggaaaattgagagcgcgtgctgatgccgctctttcaaatttggctctttcaaaatttcaaaatgaatagagagagtacttgaaaacaaatttccagatccattatatatataaccactaaaccaaaacaaataaaaaaaactcaaatttagagtcatatatttcactttcgtatctatttaagcgggctcaggcgggatctgaacatagttcaatggcggcgccaccgcccactgtcaccggaggggactcctctaaacaccacgcctatagccgaaagcagaagtctttaggcttattatgctccaagtacttcatgccaactctctctgattttacttagctttggtaattttttattattggtttttctgaactttgaattcgaattcttaaattgtgggttttcttttctctcccagttttctctgcttgtacaatcgcgatgggataacatctattggcctcgatgatgctgcttcacgattaggttttatattattcactttactcttgatggggttttcaattctggtcgttgttggaaaaaatgtaatgactttggattatgttgtaggtgttgaaagaagacggatctacgatattgtaaatgtacttgagagtgttggggtgagatttttttatccctttatttgaatattgtactggactcatctgaaaacagtttgatgatgaattgtttcttgtttttctcaatattttccttgaaataagtagagtaaattggattggtacagattgacctatattcagtggtcaattctgaacttaaagggttatttatttttctgatacaccaaatattggattcctcattttatttttccttggtgattcttgttttgtgtgaaggtctaa

SEQ ID NO: 99455 - DNA, 3538 bp, Cannabis sativa
gtatttttgtaattttttttcctttttagtatttttctgtttttttcccaaatcaaaaaacataactggaagcatgcaaaggtacacgaaaactgtccatgtatagtagcgcctcatgcgcccacacatgtgtgctcaaaaaactttcatctaaaaaaaaaaaaaaaagaagaaaaaagatcgatcagatcatcagacaagagatcgagatcgaaagattagccttttttttttttcctatctttttactttagttaattgtggtgtatgtatgatatatatgtatatattcaaagtttggccgcaagggaaaaagaacacttatcacggccaccgactcataatatatcaaatattcaaacgcatggaacatagtttataaacgtgagttcacatgaccctttatagatgcttctatatatactttgtccttttttatacttatggtcttattaaagatctcttgatcacgtatatatatatatatatcatatgtatatacatacatacaaaaaattaatgttagatatatatagtaatattgtcataaataataagtatatatcctaattattaattaattaagaatccacccaatttaactaataattatgggaccccattatatcccattatgttaactatatgtatattattattttggttacatattccaatcttatcacatctttgaagtagtcaaaattataaaaaataattaatactatgtgtacgtagtgtacacactagacactaaatagccggagagctagctatagctaattaaaattttaaattatgaaataataaacaagtgttcaaaagactaaagaggtcctggcctggaaaaagtgtgatgatctatcgatcgttaaattattaatacatataattactaagcaactatatatattaatattttagctaccttaatttgttaaatgaaacctagctatatataagatcggcacaaaacattcccttttatgttgtctcttttttcttttggtttgaaagtgattcttctgcttactatatatgatcatcatcatcatacatatataaaatatggctaaatatatataatgcactaagagataagaaagtaatgtagaaagagaataaagaaataaacaagagagacaaatacgtaacccatatttttcagataaaggaaaaaataaaagtaaaatatcttcagatgattcatctcttcatcacacgtacgagccttttcttttgttgccgtaactttcccacgtgccacggaaccccgttcacactacatgtatatatatatactaaaagtgtatatattatatatactattaatttacatgggttttgaaaaatgaagtggtcaaaactatacgtatgaaagtgtctagtcgagtcgagtcgaccactttgtcggaactctaaaccaaaaaaaaaccatgcatttaaaatatttttgattcaatatttgcaaccggctttgttttcgtccgtacaaaacccttgacctacaataaccagtcaaccttttctttctattcatatatgccttccttctcatttctctcattttcttccaaacccagagaatatataataaaccactatcgatcccatactctctctctctttctttttcaaggctagtacttaagggacgttgatgaaagattattatatatggagatgaagaggaagatgatgatgacaaaagatagcagcaacatgatgatgatgcagggatcttctaataattcatcatcactttctgatattatctcatcaaacggttctaattattttccaatgtttgagtcggctactgctgatcagttttttggaggtgaaaataataagagttccaacttagggtttatggagcttctgggtgtccatgactacttcactactactaatattcctcctgctccttcgccattctttgattttccagctttattagcttctaccaatactgttccaacttcaaccactactaatattactagtactgatcatgatccttttattgctattcctaaaaaagaggtggtcatcaattcggatgcgtgcttgaatagtactagtaatattaataataacattaataatcaacctgcaacgccaaacacttcctccatttcttcggcttcaagtaccgatgctctcaatgaagaacagactaataataataaagctgcagacccagaatatcaagaagaggaagaagaagatgatgacgaagaagaaggagaagaccaaccaccaaagaccaccaccaataaacagtcagtatatatatatatatatatttatagtttttatcagattttttttttcttttttgaagctttcatattaaattagatcaaaataaaaagtggggtttctagctcttatcttccttttttagggggatttaattttaattttaaaaactttatatgatcaattgaaaagttaatagtattgagtattgattaatgttcgttgaatatatataattaaggttgaaagcgaagaaaacaaatcaaaagaaacagagagaacccagatttgcgttcatgactaagagtgaggttgatcatttggaagatggctacagatggaggaagtacggtcaaaaagctgtcaaaaacagcccatttcccaggtatatatatacatatgaaaagaacaatactcaataacattattttgtaacaaaattaattaataaaagtaattatactaatttgtatgcatgtatataggagttactatcgttgcaccagtgcctcatgtaatgtgaagaaacgagttgagagatcgtttacagacccaagtgtggtggtgactacttatgaaggccaacacacacatccaagcccactcatttctcgtcctactcaccaccaccacaccaccgccgcagttcctccggtggcagccgcagccttcaccaatatgccatttcaatttagacaccacggccagttgcctcaacagtatcacttcatgactgatcatcatcatttgttatcatcatcatcactctctttgccctctaaccataataataataataataataataataataatagtaatagttttgctaataataataataataatggcataacaacaaactcatcagcagttgcttttctacatgagaggcgcttttgcaacccttcaccagctccagctttgatcacagaccatggccttcttcaagatattgtcccctccaatatgagaacaaactagctagaagtaatagtaactatatagtctaccagcttcataatcaattagctatatactacttatcattctataatatattaatggttggtatagttatgtagttcagttcagatatgcaaaaccccattaactactggtatatgtacttttcctgctgaccggtggtggtaatttttttttttttttgggtctgatccgaattaaagatttatttcttttttttttttttgcttttatatatacattacccaaatgctgatgctgattaatccagctctgggagtggcta

SEQ ID NO: 99456 - DNA, 5682 bp, Cannabis sativa
ataaaataatataataattgagaatgtactttttagtataatttttggtgttgtgattggaataaaaaaaaataattagtattgaaattatacttttttaatattaaaccgacaccaaatataccattagagttacttaacgaattttagattattgttatatttgtttttgtgggtgaccaatgtatttttgttgagtctcatcaataaagtgtggtcataattacacagttatttctcagtaaaaaaagaaagattattggtagaaattagatggtatggatttggagctttgtgaagcttcacagttctctctgcattactattcggaatgagagacatgcaagtaatatttgaccttgtaataatccaaaccaagcctcattcaatattaactattgtcgttaggcgttagccatagctaaaaaaaataatacaaatattaataataataataatattcaggggtcctatgatcttaaagtagttttaatttgaagtggacagtagaagagagtggacacatggaagaagtgtaaggttgagaattgaacagaattattgacaaaatttgtaatgtcttgctaaattatgcaccgtatctagaactggaatctctaatcacgaatcataaatttattattatgttaattaattgtttttggttttattgaaagaagatttttgttgacgtctcacctttcttattattctattaacaactttttgtccccaaatactagtgctaatttctaattagttattgttaaagaagatgtcaaaatcaattctaaaggaaatttcacaatcctacacaattgatcttacttttctcatttttcaaattgtcggcaagtgtttcaaaatttttattatacttcacattttttttaagaaaaataaattaaattaaaaggtaacaaatacaagataattgatcttaaccataatcaataaccggtctttttcagttcatgatgatttgtatctacataaccacttggcatgaaacttgaaggtttttgagatttcacaattcacaaactctcattcttcccacaaaagaaaaacaataaaaactaaaacttatcaacatcttaaattcccaaacagaatgaacaccacatgatatctacacctaacaaaataacaacaatttggggaagaagtaaaggaaaaaacaaaaataaaggccaatggaaatggagtttctcttttatctaccatcagaagaagtaaaagactctgcaaacccagttggtctggatggtatgctacccttgctgtcctccagatcaatgtaactgaagtctatttcctctgcttctttccaatcctttaccatctggttaaggggtaggctataatcgatccccgagtattcctcggtgtcatcatcaagtggtttccatttttcgacgagtggggatagtacacttacagcgtgccccatgtccggcctttggtttggctctcttgcagtgcaatgcccggctaattcagcaatgatggcaatgctctcgaatgcttcttcgtttatttcaagcgcagggtcgatagcctccattagtttatccttgtttgattttatgtgccagaaccatgcagctaagtactgtttctcttcaggcctatcttcatcaagtgccatcattccagtcaatagctccattagcacaaccccgaagctaaagacatctgcttttgttgtgatctttccagtcactaaatatatcagagcatgtgaaaagttggtatcagttgaataatcaatcatcaaacatgtgtatgtaaatatatataagtgacaaagttgagactgagcaattcaaagtaaagtgtcatcaaataaaacagagtactaaccaaacaaactttcagataaacacatttagcattagcaaaagtaaaatagtatggtataagaagaacacttaccagcatattctggggctaagtaaccgaaagtcccagcaagtctggtcactactgattttttttcaccatcaggagccagtttcaccaatccaaaatctgagacttttgccctaaaatcatcaccgagtaaaatgttagatgatttgagatccctgtgtatgaagctctggtgaccaagatcatgtagatactccatccccctagcaacatccaaggctatatttagccttcttttccaagagagaggctcaatcttggaacttttccaatggaaaagatgcttgctaagagccccttgtggcataaactcataaacaagaagtctctcatagccttctacggaataacccaaaagggatactaaatgacggtgcctgactttcgaaagaactgcaatttcagactggaattcatcaacacctttggagctaatcaccccacactccattcttttcacagctatttttgtcccatcatccaattctcccttataaaccactccaaagcctccacgaccaagctcattctccggggcgaaattcttagtcacatttcgaagaacttgaactgatataactagatttccagcttctatgacatgagactcacccgttccactgctgattctgcttgtcgaatcactccctgtggcggtggaagcgctcccatttgtattacttgcaacagcaatcttatacatattttctggatcagatgaatctcttgggtgaacaacaagagaatttggaggcaaagcatcttttctcttcttacaatagtagacagataatggaattactagcaaaatcgcagccactgcaacactggcaataggaacaacaataggaactaagctagacctattagaatttttttgtggcacagaactagcattggtattccgtgagcttgatgatgaggaagatggattattactggatttgggtgaagatgttgatccctcagacccggttggggtagctccggctggggctgccccagctggactactctctggtgatggaactgtcttagctggaccaccatttagcaggggattcatatcaatgacaatttttacagagctactgaaagttggcagaggaggggaaagattgttactactaagatccaacaatgtcaaagatttcaaactagtccattcctcagggattgaacctctcaaattgttattctgtaccctaacttgtttaagagaatctaattttgacaaggaaggactcaatgtaccatttagatttagcttaggcaaattaataacagagaccttaccacgatcacaagtaattccaaaccaatcctgacaagggtcattaccagaccattcagaaactagcctcagtggataattcaacccatcaagaagctctatcaaagccatgacttccggattacaaagaagcccctctttagtttgacaaaatgcattagaaccataggaataattagctgctttaaactttggaattggacccatcagatggttgttgctcaaatctaatttatccaactccaaatctgccaaaccattgggaactaaccctactaactgattaccattgagattgagatctttcaaagaagttaaattaccaatgctttctgggattttaccattgaattgattcccatggagccacaaaacactgagggattcaatcgctgtaagggtatcgattggaccagtcattcctccaccattttgattgttcagccaaagtttgctcaatgtcaggtctttaaaacttgccgggatttcaccggacaacgtattcccggaaagttccaacacttgtagagacgacattttcccgagaaaatcaggcaaaggaccaactaaattgcagctcgaacaagtgagattcaccaactgagctgaatccgccagctgaggcgggaacatccacccaatactgccattgaagctgttcccatccaatgctaaaaccatcaaagagtcaagctcatcaaagaaatctcccggaattgaatcaaagttgttgtaatccaagaccagccactggaggttcttaagcccggaaaatgacggaaccggcccagaaaacttgttcctctgaaaaccgatgttttctaacatagcgagctggttcaaattctggggaagaggaccttcgaggcccaattcctgaacttgaatctgggttaccctgtcaccttggcaaaagacatggggccatttcggagtcccacatgggtcgtcattttccggccatttgagaagctccggattcttcatccctttacggaactggttcagaatagccaagtcgtctgggtccgtggcacctaaaaccactgaaagaaaagaggcttcaagaacaatgagaagaagaagaagatctttctgaacaagctttctcagttggccttccatggcggatctgtgatcttcgtcgtagctacctatatttccataagaaatcctcctttcctcaatattttggcgtaggagcttcacatggccattaatggaggatttaaaaactaaagctcaaatctttcagaagaaaacaaataagaattctccaaagaaaaaaacatgcattcttaaaccccggtagtagtctaatcactcaaatatttatataaataaatattagacagacttattgagaaagtcattaatttttcaacaattagtaaagaaaaaaaataaaataattattaaaatcatatgataaagacaccctttttggtaatttcacgttgtactactcttatgagtcttatccattatatcgtgaaaagtaaaaaattgccacagtgtccactgtccccaatcgatcaaaagggctttactgtctttttaacaattatatgtttaattttgtgagaaggtagtggtggtgagggtgattctgtaattacacaataaagtatagtacttagtattcttaccaatcaaaattaatataaattaataatgtattaaatctactaactaattttccagaataaaatcattttttaaagggctttgaatcattttttgaatgtaaacaatacttattttcttcgttacttttatgggctggattttgtgagattttttttttcccacaatcaagatctacgaatttaattatttattaatatggtacaaaaatataatatgtttattttttaattgttcaatgaacaataacagaacgaattaaccaatgtgtccttacctgatataagagctcgaacatacctaatattattattattaagaaaattcgtaaatattttgtggtttaaaataagtgttatttgatttgtcaaatcaatatgaaagttgactttctgtaataattaatgatggaagaaaaaaattgaaaagaagtaggaagaagatattaaaaaaaaagtttaagaaatgatgttttgcataaacattaatgaattagcccgcctgtgaaattattaaataccaattatgttttgtttgaaggtttgtgatttgtgattctttaactcttgtaataaattaagaattttcttctttctaaataatgcatttcatatctgtctcaagacaaatcttgtctttcattaatcattcttcacataatacataataaattaccatttgtgtcaatttaaatacattcaaattatatatactatatttacattacatacaataatatataattaatttcaatacatttatatatggacatatttttcaatgtttatgcaaatagatagtaaaat

SEQ ID NO: 99457 - DNA, 2289 bp, Cannabis sativa
atagtagaaatgaaaattgcaataataaaacgattgaacattagtaagtgaaataaatcgtctaattatatataaacataatgggttaagttaaaatcgttaaaataaccaacaaaatacatacaaagccagcggcccccaaaaattttaagcatctcataataacatgtccaaactacaaacatacataaaaacctaatactataatcgaaaccactcatccctgtttcgtcctccattttctttttcttcagtaacccgtgggaaactcgcactttccataccctgcaaaaacaaatatactgtttcagaaaaataaaataaaataaaacaaaagcagaaaacagtacacacagcaaacaagttgtaatgtttgaccaccacttttatcaatgcaaaaactattacccgattttcaacgttcaattattctcctaattacccttttggttttatcaatgtatatcattcggtatcgtccctattatattaaacccctcctcacccaatcaaaattactttatagctaacaaaaagtggcacgtgaccaacatcactgccatgccactataaaataggcacgtgatgacctggcgtagacgatgcacaactccattccacacgttccgtggacccgcgttaagcttttaacttaccaagtgcatgttagccgtgcagtcttactgctaacatgaacaccgtaacttacgcattatgcattgaaacggtgaaacctagctaccatacgccgcaagtatgcttaacgtgcgcagcaaaagtaaaatcataattaagagagagtgttaaaatacgcactgggtggttgagtaacgacgtaagccgccccgccaaaatagcaagaccccatctgacggctctgtttctgataataactattgaaggcgaatgaggcatgggcctcaatggtattaggatcgtaacacgtggagcctggctggatcggacggcaatcagcaccgccctcaccgcaagcgaaatccagagctgcctgtagcttttctttccccagttgagcattcgcaacacaccaagtgctaccggttaaactcttcgacacacctccaccattgacagggttagtaacctgttgaccggcaggttctcctccactagccggtgaccggtcatcgtggtagctctttaaaccctcggcagtaaaagggatatcataaaccttcttttcgtccgggtagaaaagcccatagtttctttccgatgtgggaccgttctttttattttcgttgaagagagcgaagagataaacggtgagatcatctttgggccttaatggagtcccaccaccggttaaaattcgacggatcagattcccgttgtaggcggctgcattgtctaagcttgcacccacttcgttcttatctccctttgatggccaacccgtttcagaaacgacaagcttaatgtcatcgtatttcaaagctgacattgcagcaaaaacggcgtcgatttgtgcgtcgaagaggttgaagtaccgtaaacctgaacccgcatccaggacacctgggttctcacggaacagtgcgtagtctaaagatataacatcagagtttgactcgtaagcgaaaaatgggtaagcgtttaccatgaggaacgacccggtttcgcgaatgaaatccaacatgggtttgaatacgctctcgacgagctcaggtcgaaacgaaccagccgatgcagggtatgagttctgtagggcacttagagcaatgggagaggagattttgatggcagaatccagcttgttcttaattagagccgagtgaatgtttctcatagctgggatgagaaacttggtggtgttatgcgggtcgacgaagacttcgtttccaacagcaagagcttcaatctcggtagatgggtaataagcagcgacgtttttctgaacccatgagttggcaaaggactgttgtttggctgccgcgtaaagaagctcgttgggtagatctacggtgactttgataccagttccagctaaggctttcaagacagaagggtcggcgtcgtaaaccttgaccttctgaagaccctgagatttgagaagctgtaccactttcacggcggaaggaaggttattcgctattcggccatagttcactcctattgaaccagcatctgcaaaaatgtaccaacattaatatatcaaaaactaaaaaaaaaaaaaccaaagacgaactccatgacaagttctctaaatcgtttgttattttgaaagcgtaagaagtaaaaatatcatagttgaaaaaaaaaaaaaaa

SEQ ID NO: 99458 - DNA, 2533 bp, Cannabis sativa
tttagtgtatgtataatatatctatttcttggtaattatctatgtaaaaaatattgatggtaaatatataatataaataatttcattttgtaaaaaaaaattatcacaattattaaattacttaagggtcagtcttgatctgaggcaagcaagacgtacgcattgggctccataatactcagggtctcgaaatttcgatacttcatcttaaattttatgttaaagttaggaggtaagttagcactttagctaagttaatactttttttgaatgatcattatgtttggtggctggctatccagattgtattgctgctgttttgtaagtagactcttatgattaatgttatggtctagtcctcttttttctgaggttttaataaagttaccactctactaaaatttaattttgttttagatcccctataccttaaaatcggctcgccgtgactgaatcccacaacattcagtaatatagttaaaatataatttattttcctttatgtttttactctgttcatccaatgttgattcatatcagcattcagcaaattctcaattggaaacaaacattttcatgtcttttcttggtggatttgtgtgaagcaatagcatttttatccatagtgcacttatctatatatattttgacaattgtatttttagtatcttgaatcatactactaaaaaattgttgtaagaaaaaacaaatcatacaaaaaataaaaaatgttatttacaaaactatagaaaaaaaaaatgaaaagtttacataaatataatattaaaattaatattaaccacacaaactaaatatatggatatattacactcataatactaaactttaacctttggtaattagataaatattgtgtgattaaaattcatcaaaaaattaagatttttcttttctgagagaactcccaaataataaatattttttttatttatatttattactattttagatatatatatatatatatatattttacaagaacaatgttattggataatttataaaggaaataataaacctatcaaacacaaacgagttacaaatttgttaccattctaatacacacgtttatacaacaattgcatgaaaataaaaaaccaaaagattctaattaaattgtgatatgtttctcaaatttcatacaataaaagaagtaacaatatttaaaaaagttatttctattttatggttaaactccaacatcacaaatcaaatataaatttatttaaattttttaaaaaaaaaaaatataaatggtaaataatagtataagcacttaaaattttaagtttataagtggcataaattctatatttatttttagcagtataagtactcaatatttgcaatactgtaatttttctctaatttcgttagtacatgctctgttattgtcttaaacatgacacatataagacccagaatctagatcattaggtctacataaaaacatgtagtatcagttactcctaaatattgttttaataaattcaagacggaatctaaactgaaaaaactgaaagaaaattattcggtatttatgccgctaaaaataaacatatatatttataataacttaaaactttagttacttatatcgttatttatctgaatataaataaaatatacatatatttcttaataatgagttgttttgccctttctattaattagatttgttcacaattgactcctattttcttgctctagttccacattgctttcaactcgacggactcttatgtgttctttggtaagttcttgacaactcgttctttgcttaaatgcctcatcatttgaaaattttgacattgaacttgcaacatcttttggtgtaataagcttagacaaacacatctagttgttgagttttagttgctttcaacaatatttagctatttaaatacaatcttctttgtcctcttccataataaaaagacaggttaggcgcaagcttaaggcctactttatttagagaccaaaataataaaaacaaaaaatatacacatttttaataattttttaaaataccatatttttcttttgaaaatgaaccaataattctattgctaccgtcacgattaattacttacaattaatcactatatggtgcggttatcagagtcggttttgagcacaacacaaccaggcgagttaggcccatgtttaggaacctcgattaaaaataggggaatttttaattatatacttaattcttaagtaattaacaaatataccatcaataatttaaataatacaataagcggtaactgtaccgcatgtataaataaatatatgcaatctatttttggacgtattcaagtggtacatttatttattttttcatcattttctcttttatgtatggttacttttttttatttttttttttattattttcttttggatctatatctatttttatttcttataatttaaaaaataaataataattacacggtcaattattttgaataaaaaaaataacattattgcgatctactcctcaagt

SEQ ID NO: 99459 - DNA, 4926 bp, Cannabis sativa
  modified_base (2861)..(2869): a, c, t, g, unknown or other
ttaatgatcattgacacgagagcagttgaggcatatgctgttgttattgaggctggaaaaattatatttcaaatgtattattaatatctaatttaagctgatgtgagaataggaatcgatatattaattaatattttaattgatatgagaaattattatgaatattgtgattaatcaatatcaataattttgtgaaatattttgccccttatgttgacatttagtattccacctcatataaatcaataaaaagaggcttcttctttcattcaaaacacactaaataagaatgttacactcaaaaactctctagtcttcttatttattgtctttttcagtggtgtattgatctactcgttagttattatatctcagaaagtgattgctcacatatcctctaacaggtaaaaagggaacaaatttatctactttaaaaaaaaagtgtgttttacttgcctcaactttcctttcaatttataactttgtatctcattattctataattatgtttctgttcttcaatctatgttgttatatttgcttctttatcttgtccattctctatatgctagctaacaaatgccatgtacacctcaaacaaatgaggtgcatgtcaggccaatgagctctacgcctcagcttttggctttgttttgtgtgatcggactgttatttttctggcctcacttggtcttattttcagagctactttactcgttactaagaatatgccttgtaaatataaacggaaagataaatgaaaccttaaaaaccacaaacaattgaggcatcatctcttcagcctctaagtaacaaaatcgtgacagactcacacttactatcatccttaccaggtttatgccttctttatatgtttagacttttacctcctaatcctcacagactcactattaattaagatttttcatttaaatttaactttttatgaacttagtttatcattttaagacttaactagtaatttttatgattttttttggttttgttatagaattatgacgtgttatttgttatgaattttatgagtttcgtgatattttgagaaatttgtgcctcgaagcttatgcctctcgcagggctaaggaaaacgccttggtactcctttttgcttttaaaaacttgcatgagacaatacaaattttaaactcatgaagacacaaataaagcataatagagttataatatcgtacataaaatataattttcaatcgtaaaattaattttaattagataaatactattaacatataagtaagatttatatttttctatatatattatgacaatgacaatatagaaaattcctttccaaaaaacaaactacataaaatttatattaagtatatctctttgagcattgctattgggcatcagtggtacctagcaccctcaagacgtgtccccttgtgattggttagcgatactccctcaaagctattatattaaactacatgggatccgatacttaattagacccatagcaatattaacacgtaagagggtgcttgacattactggtgcatagcttttagcatttctatctctttagtgactggcacacatttggtgattaagagactcaatatctagagatcaaattccaactttggtctccccatttcccaaccccctcacccatgttctagaccaaccaattatcattacctgtgtctctctttcacaaatatccaaaattacttcttgtttttataatataatattgctattggatacactagtggtgttcatcattttttatataggtggcgatttatgattagtttgtaatatttcttaaaaactattttcttaagttatataagatctatactttttttttttgaaaataacagtatattactactacaaaaatattaagcataagtagtactttttaatatttctctgattttaaagaagttaagggacttaattctttaggatcgaaaaccttaatgaaaaattcaacattatttcacacttccaaaacattattaattcggtattaaaaacaagtacgctttctatataaatatttatgcatatatatcatgcctaattaaagagactatttttttaaaatatatattatatgtatctactttaaaatttatgtaagggttatcatttgtccacattaacacctcttaaaatccatttagtaataagaatgaactacacgtacctcatttctacatatggttaaataacttgcatacttgttactgtagctaatttatgtttggatttatcatgggttcggaagaaaatactgaaagatactcgagatgtttaagtctaatattagcaatttaacaaacaacacaattttgaaggttttcttattatctttgatcaaaagagctgcataaaatgtcaattatataagaaagagaaaaagaagttccataaaatctaagtgaatatcccatatatatatatataagaaaagataaacatatatgcatatatataatagaatatgtatcttgttttcatacaaaaattgtatttgttcaaaaaaatacaacatatactatagaaattttaaattttgttgatatcattattactatatcttgatatcccttttggcctttgtgatgatggaacttctatctaagttgtcaatttattaattatgcagaaggtactactttgtaatatctttgtaaaaaatattgtactatacggtagctggtaattaaaaaaaagaatacacaaactaaaaagaagaagaaaagaaaaataataagtgaaattataagtgtactataatacaatagcaataaagagaaacacggtggatttgacgatatttattaatattattattattnnnnnnnnnattattattattattatattaaatataaaatcaaaccaaaagcagctataaggtacaaaagatagaacagctagttatccccagctggtactcgaggatatatggaatcaagttgaagattatacacataagattactttatatatcttgagatcttttttgctgctgctatgtattttttactggcttattatttgatcctaattgatcgtgaattagagaccaaaagtgatcaaatattaggtatgagtaagataaagattagtctatactgatacttttgtactaaatgtgtcaacacctaaacaaaattactcagtcttattagagatacataattaatatatacaatcatcataaactaaagcaatcagtacaaacacatcccgtacctttaattgtaagcgaactaaaattaaactttatatatattaaaacaaacaatacacatatgaacaaaaagggggaaaatctcagatcaaagcatttttattaaacagaaattttatagataatgaaagaaaaacttactcggtagttgagaactcatagagtctgcctttctgagaaaaaatgatgagaccaagttggacatcgcaaagaacagcaagctcctgagctttcttcaacaacccacttcgacgtttcgagaatgtcacttgtctgctggttgcattctcgatccgtttcatttggattttccctctcaccatgatctgccatgccaatatcaagtaataattaatgatcagatttttcaatatactcaaaatggtatgattttttttaaagtcatataacgaaactatcaactcaatagctctgtacaaatacacgtacggtcgaaaatctgaaatgggagaaagatcaagcgtaacaaccaaaatatcttatctcatccacaacgaattttactcaaaagagtttccattattaggaataaaaacacagatgggtttgactacccaaaacccactacgccaaatctgtcgaaaaaaattccacaaatgatagatcccaaaaaactctactggacaggtatgagaactatagatatatatagaaagggtacaaagatggaaaattagaagatttgacaaaaaccctagaaactttcaggaagtgaatgtaaggaagaaaattattatatggtatgtagacatatatgggaatgtacaaagtaagcgtataaatatgtctattctaaaccacaaaacttctattttggattccttattcatccacttctccctcgtttccattattgtcctctgtctatctttttcaaggtcttacccacccaaaaagaggaatacaatttaatataaataaatgaaataaatatggacataccaataaaagaaaaaatatatatatacatataatgagagctcttaaattaaagcgcattaactaccttgatttagtaaattaaactgagaaaaacaaagtttacttggaagaaagacaaatggagtgaaaaaaataattaaaaaaatatgttttaagatatttattaaaataattatataatgttaaaccttattattcgtaaaaggataaaggaaaccaaaaatgtggagaataagttgtgtaagatggcaacttcatcgtacaatgacttgcgtgaaaggccaatgagtcagtgacaacacatcagtgtgtgtcagcagaaaatcatcacttgcaccaatcacaaacgaccgtgtcacatggctctcttgtgtggggagtccactcttgtactatcccctattatttaattattatattactcttaaaagcatttaatatttttacatttattattgtggaaatataatagagaatggtggagagacaattcaaatttcttattatttgaacacttacgtttttttgccattttcgggtataattccctctttgtgatgataatgtcttatttatttaggtggcgtctgttaacactttattttctaattttttaatcagaaaatgaaagtaaaatttttgtttttaaaaattttgtttttgaaaaacaaaaatgcgtcatgtaactatttttgtttttcaat

SEQ ID NO: 99460 - DNA, 2883 bp, Cannabis sativa
gaatattatagaaggatttgccactagctcaaccgcaattgtcaacctctttctttgctcagttgagagaccactgaccccaggcaatccaactagtgcttgtctaagtggagtgagctccactagctccattacttcctcaatgaacatctttccaatacataataaaatctgttagcaacttcttctattttttattacttggcttgctatatttaaggaactaacctttctcttttctgaatcaacttcagttggtaaacgaagccatgctgagtaaagcaatgactcataaacagtaacgtgaggtgaatgaatgtcgttttgctcacagtatcccgaaattcgagcaaatgtttcttgtttcttagggtaaccagaaattcgaatatcgccttcgatatatccaccggtttttctaccagcaagcacatccatcaaagtggtcttaccagctccactgattcccatcaaagctgtcaatacaccaggcctaaaactaccactaaccccttttagtagaacaagtttatcctcaactacaccttgattcttcattgcctgcatgttcaagttcaaaaaaatttaaatctttaatctgtgtgaatgatcaaactctacagctctctctagctaacatgttagttattattattaataactcacttgtggcatgtccactgagtaaataacatcattaaaagtaatggaatgtggctcaaatggaagaatcattcctttctttttactctgattttcaccagtgttatttattgatgatgtttgttgtatttcattggttcttgtttctctgccaacttggatttcatgatcattattctcaggatcttcattagaaagagcttgtgatttttcaattgctgcacaaaatatgttatatgaaattagtttacttaatgattttgtttagtatatccaaacaaaagatgaaagtaaaaggaagttacaattaaggtaattgagagccaaagtgtacaaaatgttgaaaagaacagtatatgcaaccaacaccccaaagccaagccaataccaataagaatcagtaaagaatcctctagattttaacacttgaattccaagagtttctgttgagtttggtgtaacctattatgggaaacaacattaataaaagtagaaacctcaaacaaatcaaattaacccttaattattagtttgtttcacaaaaagaaaacaaaaagtttgtagaaacattttatttattaccttattccatttgcttccacgaaactcattaacaagaattccagtctgaccgtacatcaaaggggttacccagtaagcccaaatccatccactgttgatatcatctgtttgcaatttgcataatataaaaaaaaaattaaaaacaaaagaaagaatctatcagttacgaatttatttaaaacgtttattttacctttagacaagatgaaaccgcctagtaccataagtaagagcaacacaaaggacccaaaagtgttggcaaatatcatattcctagaaagggccgcaatagatcgaaagagtccagaggccatctgattaacaatgactaagataaaataaagcctaaacatcctgcaaattaacaaataataataagaaactaattaaaaatgcatgatatataaacaatcaaatcaatgatgtgtatatatgtatgtaccttacaacacttggttccaatccagttgtatagtatgtcaaaatgatccacactgctacttctagaaaagcaattgggaccttaaacaacattgatggaactgcataggcccacgcagggaagaactgaagatctctttgtttgtaaaacactggaagcttggcaatggtcataggtatctctgacattccattaaacattatcatcaatgctgcgaagaacaaactaccaagatagattgtaccatcttctaatgtcctgtgatgcatctttgttcttaggaaaagagtcccatgaatcaaccccattaccgaaagctgtatacatatacaaaaataaacaataattattataaaagaaaaaaagattcatcataaactaattaaacaaacactaactaaagatttttgcccctaacatatacccaataagatttgctctccaattttttaggttgttaaaaattttcccgaactaaatcgtgtctttaaattttgacatgtaccgaatcatgctcctaaactagttcttaattccaacaatcttaatagttcaggagaatttttaacggcttcaaaaattgaagaacataatttgatcatgtcaaaattcagatggtaaaacttagaagaaatcatcaagaacaaaaatccctacttggacaatcttaaagatgtggacaaaggaatttcttttcatgattaagtactctcttgacatgcatgctttcaaaagttccatcttgttgagaccaaagttttttgttgtcaaagcagctggatggctcttagtcttgtcaaatggtgttgaaagatattctcttattttctgtccaacatgaaacgatttgaatgcttcaacaaattcttttgcactcacaaacctgtaagcttcatctcctcttgtccagtattgagcttggtctttctttgatgttacctaaatgtatataaaaacatgttacacatatatttctatatataattatagttgaagtagtgatgatgatgatgatgatgatgataatcacctcttgaagaaagtcagcaatagctttcctctcaggacatttaaaacccgtaaattcaaagaactcaagcacattttcacgaggaccctgatacacaatgtgaccatcagatagaagaatgatatcatcaaaaagatcataagtctctggtgctggttggagtaat

SEQ ID NO: 99461 - DNA, 1571 bp, Cannabis sativa
acggctgccgtacatcacggattacaatcggtgaaagtacaataacaggacaaaatcatatccctaataaaatatgtctcatatcatatcataattagttatcaattataaattcttaccccgagtagaaaaatttattgagatgatttattgaattgctccttgtacctattaaaatcataaaaatataattactcataaaaaaaaataaaaaaaacttacaaaactgtcattttagaatgatttaatactttaaaaatgataatagaattactagagaaaacaagagtacaatattcaaggtaaacaagagtacaatattgtacaactaccattgtttgtataaaatcatgcatagagaaattgtttatatatgtaaaatactaagaagacatatatactagtttctttaagtgtagttgctaacttatgaaagatgctagagagtggaatacagatttattggagcaatatttctcatctattgtctattgatgtagataatagattcatctggcattttgactcaacatggacattttgctgcttctctagatgaagttgaatctagacattttaaatatattttcattaatattatagtctatcatttactgtgtcacagaaaaaattaaatagaatgtgatagaaagaccacgttaatgtaaaatttatatttcaataagtattatttgcaagtcgtatatcttgggagacattaaataatgaaaaacgttcaagagcgaaaaagctaattattcataaatcaaatgtattttttttctcagattgtttgttttttactcgttggcaataaaccaaaggccaaacaccaaaagagaaggctattggcattgatgatggtgtaaacatggttttttctttctttcttttgatctgattttgttttttaagttgttaattactagttaagagagttatttgtattttaaagttggatgattgtaataaatgaatttttttttttaatattttgaatttttgatgacttttccaattttttataatttaatcatatttagttctaaatttttaatgaggaaatcataaattttatgagtttttatattatctgtgcaaaaaaatgcataattcaagaaaaagttgaaaaatataagagtactaggtaaaggtaaccaagtacttttaaggtaaccaaatgggtaaccagttacgctaagagagttaactaattactttatactgtttggtctcgtgagcctttgtgtgttgagcttgtgaaaaattgttgggccgtgaatagtaatttatcccttgctgaaaagttaaaatgttgcagcattattttatctgaatggggttttgagcttacgggaaattttaagaaaaggctgaaacagagtaagaagaaaatggcaaagctgaaagtggataatggtgattctcatgctcatgatttctctgctgaacagtgtaattattttgagattttagctcaataggagatctattggaaacaacgttcaaaacagttttggcttcacgcgagtgataaaaacagtaagtattttcataccactgctagtact

SEQ ID NO: 99462 - DNA, 1795 bp, Cannabis sativa
  modified_base (1556)..(1566): a, c, t, g, unknown or other
ttggtagtggtaattatgattttttaattttaatattgaaaaggccaacataaatatattttctcaatccattctgcctcatcacccacttgtttcactctcccaagctgacttaaattgattaatgatataattaagctgaataaccttggttaagggaccatatacatagataattgattaatgattatgtttatttacttattggttaattagttaagaaaatggagttttattaaggccggctatttgtgtaaacgtattatgttcgtgttataccatttattagatggctcaattaagataaatataaataagacaaaattattaaatattgtcaaaaacttaaatacaaacacaacacgtctaaatagcaactcatcatttattaataagtgtatgtacgagatcccctaatcaaatgtaagacgttcttcaatttaacgttactctcgactgtgaaaatatacgacgcgatttattaacacaaaattaaatacatattttgacacaaacatgaaattgacaccatcaaacataattataaagaaacttattgaaaataaaacaaaaatatttcaactacaaataataatcttcaataaaaaagataagagtgactttaggatttctttcaaacataaaaaatattttaaaattacgacatatttacttaacgacaatttaagaaaatgaacctaatacaacaacataaggatcgcgcaatagcccttaaaactacaaaagatgcaaaaattttatttatacttttataattaattcaagacatataacaacgattgttatcgtcattattgttgatatagatgttctattttataacgacattactatatatgtataaatttttttagtggtaatataaatggtatagcgagtcaatgacaaaattgtttagtatgtatttttttctttgttttgtacttttttaaataagtctttagcgatgaattatctccgttatagaatattaaaattttgagcagtaaactttgttccaaaaaaaattaaccaaaaccatgtgagaaacttagatttcaacaccctatagcgatgagtggcgacattatcatcactataaatgaactaaatgattatttctccactaattcatttactaaaaataattcttaatttttactttttgtgtgacactatgacatacatgatatatatatcgtttttttttttactaaaataggacattaagaggctatagtgttgctctgatcctatctggattctaccaagagaactccaacccgcctaaagaatgttgccataatcatatttgttagatcactcctacctatttggggttgtgtcacttagcccttatccaagtactaaaaactaactgttgggatttatgccctaaaagtaagtaattaatagataatatattacaaaatatatgaaatacaattataagataaatgaatatattaattatagaagtataaataataaatatctaaaaatttcttattcatatggagaaggtataatcttataaggatgtacaagagaattannnnnnnnnnntatgaataaaactagtcggtagtgtattaatgtaaaatgaatctttaatatagtactactaagtacggtttactatagactatactctagtgtgtgtgattttgattcagatcacaaatatggatatacatataataaaggtgttgtgtataatttaattatgcatgattggatcgatatgtaataacatctttcattaacgtgtcatttaccatgaaagaattattca

SEQ ID NO: 99463 - DNA, 2819 bp, Cannabis sativa
tcggccaaaacttcccagaatctaaccatactttccaaaacacctgtacacatattctagaacaatttccacacaaaaacaataggagaaacacaccaaaactcatcatgccattgtagagtcaagtttgagttctaagaactcaaacttgctcaacttcaatattagctaacaacaacatcacaagcagtcataaatcaacaattgaaacctacagaagctaacccaaaccaaattcatccaaacagaaccgaaatcctcaaattacaatcctaatttcaacaaaacttcaataataacatagatagaattcaaggtttttaccttcacttgattctcttcaaactctagctggaattccacaaaattatggtgcaaacactgatttccccttagcttcaaggctggttcgaacaaggaataagagaaggggtaggtaaccctaggtttatttcaattttgtctcatccttcctaatgtttttacaccaaataaaccatatcattattatacttaaaattataatttttacctacaaaaagaaaagccagctgccactctaacaaaatgacacctatacataacactaaaaaaaccaaactacccttacacttaaccctaactcaatgaacgacttaggggtaaaatagtctaatatcacaaccccgcctaaactcaccatttaaatctgcataatatatttccaataacaataggttctatatttatccatgtgactaaaatacctctgttgcatttttcatcgccaccgagcaaaatcacaagaataacatattttgcatttaacataaacattcacatataatcatcagtaataatgataaaaataataaaattaatatttataaccccactaatccatatctaaatcttgcggtcattacaaatttactttatttttatagttaaactattttacaaataaaatttaaatcacaccaaaaatatcattttatatatattgtgtatatatagcttatcttttattttcttttaaaaaatattcttcttgagtgtttggtatgaggtttagatttaatgtaaatgagaatgtcaaatttaaattaaattttgattaccaagggctttgtatttccaagtgagtctcactttttaaactaaaaatagtggtaatattaatccgctgtaacacttcaatttcatattccctccaagtcaattttctctaactcaaactcacataccaaacaccctgttagtggcacatttagtacacaacattcagaattagaataaattattaaagaatcataaccgtataataaaaaataatttgagtcaatatttgtaatatgttgtttactaaaattgtttaaaaattgaatgataataatttatcttgtttactttatcaggttacgtaatcaaaatgcttaaaatgactaaattgctcttttaagttaaactatagtatatatagtagttattttgtaagacatattttaaaagataaaattatcattatttatttaatattttttatagtaattatacattttatatttaaaaaaatatacataaataattaaaagacattacctaatgtcattccttgaaaaattggtgggggagatattttctttcttttatcccttatttaataagattcttcatttcttaattttaataaataagtaaacaaatgtaagaaaatacttatcttagtgatttttagtgcttattagtaaaacatgttatggtggtatttaattggaaagtgaaaatataagaataacattttaattaataaaaccaaataaatgggaataaattttatattatttttatttaaaaaaaaattgcatgaataaataaattataagcattaattaattaatattaggttgtacaattataccagaaacatggctttagccttttggtattaaactagcaatcttaattagattttaatgactctaatagtttagtagtagtacttgtggttgtgggagttgagatatatttttttaattattttttgtatttttaatggccacatgttaactacgggtagcctttttttttcatctacttttagggcatgcatagtgctttaaaggcatggttgataaattatatacataggtttcaattaaattaaagcacaaattattaaacaatagcaccttttttttaggaaaaacaatagtacttttagttttaaaggaatacataatgataaatgcatggttggtttataggccccttattcccccaacctcttatttaaaccttctcgttggagtcctttttaagtcaattaaataaaaatattaaaacctatatagaattttattattatttattactattgatgtaggagtaattccaactgccacaaataattaatcaattcaatttcgattttgggtaatttctttaaaaaatattaaagtaagtcttttggaatttatataaagctaaaaagtagtttaataaaagcttacacaaccgaggcttagtttaataaaataaaataaaaataatatcctaaaaccatgaaagaatagagtattgcaatgtagcatgatatgaatagaatagtttttcaagttgcatactcttacaaataagaagctaaaactcaacaaaacaaaaccattatcataattagttcctttcaaacattcaattctgcatattgaaattaatatatatataggtgactatttaatggatacatttttatagtaaccatatgattacatttttctttaacctgtaatagcaggttactaataggtagactttccttttttagatttaattaatta

SEQ ID NO: 99464 - DNA, 2042 bp, Cannabis sativa
cctattctacaagctcaccaagttcattaaggaaatgaataactgagtatttgttatgtccatttccacacgcactctaacaaatttaaccatatatctctccttagtgactttatcaaccacgattggtattccaattgtacttacaataacacttaagcacttacttcataatactacaaccctacgtcatgtaagtgaattcacaatggaactaatttgagtagacaaatcaaatacaaattagtagtccacaaccagatgatgtcaagtttttgttcaaacttaatgactccactctcaagcagatgatcactagtcgcatcatcattaatattaacgattgtaaagtctccattcattcaaataatttgagcaatgcctgagtttttccagatacgcttgataaaatccttaaggacagtaaaggggggattagccctactgaccatccattacgattgcaaaactccaattcatttcttagagattaaattcctcaatatcaacttgagaaaattttttttccatctttaatgattggtagaatatgacagtttaacatcactgtaaaaaggcttatttgctataaattgcttccaattctgttacgaattagaagtgaggtgtcacacaaggctcctccagtctagaactggtagcttctacattcatcgccacatcttcacaaataatctccccagcttaaagagcttctgttattagatcttggccactagtatcagcatcatcactatgatcttcctaccattacagtcttagattgatgggggatctaaatcagtcaatctggctagatttggaataattactcgctttttcttcactatagaggagtaagagagatcacgcacacttcttttaatgtgaatattaatattattagcaaaattacatattaaggaaagttgtgatgttggttagtaattttatactctattatttcatataatctaatagctatattactcagatataataaaattttagaatttgagtacattatatcctgaatatttattattatttttctttagtgtaaatagtaatataagtaccccaaatttttaagtttgtaagcggtataaatttaatgtttatttttagcggcagaagtactctgtttgtaaaattgtaatttttcttcaatttcgtcagtacaaatttcattttgaaattattaaaaaaacattaaaaaataactgatactacttgtttctatctaaatttaatgatatgaaatttggactttacgtgtgtcatgaaattagaaaagaaaaatacaattttataaatattgaataacatttttttttttggttaggatactcaaaaattggtaagtatgcaatgttttaagtaaagatattaatgtggaaaatgatcttcccactacaattattaagtggcccacttagtttcgtgtgccattacctaactggaagagtgactgtgagtgacacattattcataggcagataacaataatagcatttacaatcaaatggaaatgcactcactcacacacatacacgcattacatcttacagttgttagatattggacgagaacccataaccaccaatataaatacccattactaccgctctagtctagatatcattttcaattcgaaggggacagcatatataaattatcaagtaaacatagtatggttactttgtcaattcagtagccattatgtatttagcaatatcaccaattttaacacattcggctgtaaaactttcaactaaatagggcatattcattacacatgattaaaataatagggtttcgtgtaattttctcccaattattatcttactttgtttcttgtgccatttccgatgaacaaataagtatgtggaccacatctatatatataatgaattttgtccattccttttaatacatcccattattgtattttcatgtctgctttactatattgtattttcatcaaattttaatgttattatagattttattttttcttttagtgtagggtaatagtatta

SEQ ID NO: 99465 - DNA, 1305 bp, Cannabis sativa
ttataaggataaagcaaaagtagttatatattgactatggtataacatttaggtttagggatataattttaggattttttaagcatagaaaatcaaatttcccattcaaatcaactatcatacaaggacaaacagtaagtataagtttttactacccgtaaagatttgatacaaacacaaaattctaaggatcaaacaaaatttaccattcaactacatgaaaatatacctgaagaacatgaagtacactcacaaaaacattcaaaggaaagattaaagaaaaaactaacatcttgagagtttttctccaaggctcaaggctatgctccaccaaagaacctgttcacctgcattattagtagaattttgtgtattagtgacagtgggttaagcttgttggttccttaccgaggctaacggatctatctcactcgattcgccaataatggaatcgggaataaggctctccaagggctacattagactgatcaaaactcgaaaacgtgttggaagaggtagaggatcaatagtagtttgggactacatgacctccattctcaccaaaaagtcctcattttcaacttgcaatttcttcatctactctcgaaccttgaccgcttgagcagtgaggacaatgatcttggttgtcagatcaagagtttcagtcttcaatccttgcggattgtgtaccagtattaataattttatcaatttatcacttatttgactaatgataaattagaataaaaattaatgcataaaatttgacattattattattattccgaacaaaatactaacacactcactcaccattaaaagccacatgtacgtgtcaaacaaaaactataaaaggagagagatattgagaaaaattcatttcagatagttaaaataataataatggctgataccaccgccaaaacgacgtcgtttttgacaccaacccaacgttacgcggccggagctctcttcgctttctctctccaccacgcccaaatcaaccagacccgtcccttgggctcattcttctcctccgacgatgatgatccctcctccgataatcggatcagtagtggtagttgcagtagtagtacttccaccagtagcgactcggtcgccgacgatcctgacctttgggttcacgaagtctctggacttcttcgccctgtatttaggttcattcttcttgtcaattcgattttgaatcggatgattaatttattgtctgcggctgatttgatgatcgcattttgaggaaacttgatatatggttttatctttttttttttgaaaatttgaaac

SEQ ID NO: 99466 - DNA, 1675 bp, Cannabis sativa
ccgcagcagctgcagctggccgtcccactgttccagacgatttatcactgagcttcaatgctgggcccacagccggagccacctcctccgctatgtggtccggtccatcttcaaggtccatcaactacggtcttccacccgagatgggcatggtgggtcttcgagacgtcttcgtcgtcgcaccagcctcttctttccaccacaacaaccaccatccccaccaccatctccaccacaacctcaaccacgacccaaacctcatctccgaccactctctcaacggctccaaccctgccacagccctcggcgtcggcgttggtgttggcgtaatcccattactaacagcagctccttgtctcggtccatcacatctcgatgaagctgccgaggccaatgcactaggctcttcctcagctgcggctcgaagccgaaatggcgggattcagctgtggcaaagtcaggctcaacaggcggctgctgtctcggcagctcaaactcaactccatccgcatttctttaagaagccctcgattcacgaccacggaaacagcgaaatcgggggtaatttggtaattcagagcggtggaggaggcggaattaatgttgggtctggatcgacgtcgtcctccacagcaacgtgtcaagattgtggaaaccaggccaaaaaagactgtacccatagaaggtgtagaacttgttgcaagagtcgaggtttcgactgctccacgcacgtgaagagcacatgggtcccggccgctcggaggagagagcgtcaactcatgacttcggccggtcctggtggtggaaccggacctgggtcttccgggtcgacttcgggtgcaaagaaacctagactcattgcctcccaaaccacttctcacacttctacttccaacactactccccctagaagcttcgataccagctcaagtcaccaaggtttgattttagagcctttacatacactactttttctctcactcattcaatttaggtcaaggtatatatattaggtttagggttttcattttatacttttttaattactaatttattttatgtcacagatgcgagcttcaaagaaacgttgccgggtcaagtacgtgcaccggcggttttcaagtgcgtacgagtgacggctgtggaggatggagaagacgagtatgcttatcaagcggttgttaagatcggtggtcatgttttcaaaggctttttatacgatcaaggtgtcgaaacaacaacccgcgataatagtacttttccaaatctttcagaattgcatttgggtggcggaggaggaagaaatggggcgtcttcttcgtcgccaatgctcgatccctccgatgtctacgcagcctccacagcaggtttgctcggaggttccacctatggtaatccaataaattaatcaaaaattgttgcacttattgggaatgaaaataacattcttattgtatttttttgaaatcttattttcattccttcacattttgtttttccctactaattaatgattttatgttgatcaatttgtggacttgcatttcattacacctgtcttttttttttttaccattattatatttataactcctttgttatctcataatatataatatataaatagatagtcatataatacctttctacaactgatgatcaaactggggattat

SEQ ID NO: 99467 - DNA, 4618 bp, Cannabis sativa
  modified_base (211)..(211): a, c, t, g, unknown or other
  modified_base (278)..(287): a, c, t, g, unknown or other
tgaattgttaatatgcggttcaaaacgcatcgctccgcacattataaaaataccaattttttttatttatttaggtccaatatgtgaatgttcaactcaaagcccactaattattgtattgttgaaacttaattttttttatatttattttcaagccttatggtatctttgacaagtgttgctcaagctttattgtatttgtgatagtttnattatttggtgatagtccaaatcgtaaaaaccaccatttttgcggtgtggtttttgcggttttttannnnnnnnnngcgggtgcggtttggaaaattggaaaaaccttacgtgcgggttggtttgaaaaaatggcaaaaaatcgcaccacccgcaccgcgaacacccatactagaaagggatcgcttgtctttaagtgtcagccccttacgggcacaaattcctagcagatataaaataggacatacatcctatgtcgtaggtatcttagggattaggtgaaagtaatctttatccttccgtgattgacgtgattcttcataatggagtcgtcactagacttgttgattattatgtaatcgtcgtaaaagaggcttacgccatctgtcaaatccttttatggggattctgatacgttttccccatgccacattaaatgtgaaatgactgttcaaacgggcccttcttctcccggagacgcgttgttatatttctagctcccggagagtcaaggcatgctttatgctcctctctgggggctcactccttgagatgcactttcctacccatacgtgacgtagccaatttttgtgggtgaggtgttcttgaaatccacatgtcacacgcagccgctgccacgtattttgagaaaaatccaaggcaacaacgatgaaatttacttttaggattttttcaacagtcatgacatcgagctcaacttttcccataggatagacctgattgttgtcaaaggaaagcactgacaaggtctaacttcttatttttttttgtcaagccccatattgatcaatgcctcataaaacaaaatgtatgcactgctccctctatctactaagattttgcctaagagacaatcttaaatctgtagatagatgataagagcgtcatcatgaggcaactttactccccacatgtctcctttggtgaaggtgattgttgccgctggaaaatatctctcttcagaaagaatgtaattgactttatgttgctgagctcccaccctttttactttttcgatggtttgtttctcctgacgagttatattttattgatgaatcattgactctgtgcttctcagaataatgggaatttgcttcaatactatcatttttcctttggagaaggtcccctcttcccaggtctgttgtcttatgtttccccatattttttcctctgtgtatctatatgtatttctcctttcttaatttttctttacataatgctgaaagcctccctcctaaattatcatttgtattttcctcatcagaaatctatcgttatctgtataatgccctacatcaatgtggaaggcacaaagttttgtgcgatgccatcatattgtaaggatctttccaaataggtttttctttgttatacaagtagatctaagcatgttttatattgagctcgacctcaaattcaggctctattcttggccttttgtccatatgtcctctttaatcttgcccaaatctcatttttgaacatttttcaccaattctcgatggggaatttttgtcaagtggattggaaattagagctactcttccttcttttttccttctcttactttcgagatttatcttcttttgttctttttctcattgttccacgacctcggtttgagattttattcattaaataaaacttaattttattgtaatcctatttactttccataaagatcaaaaatcatatcttgaccttgtcgtattcttttttcacatattttatacatgattataggtttaatatataagctctatcaaattctgaacatatagttattcacaattacaatgatgtcattacagtagaaagtaattatgattatatgctttaaactatttagtttcatgatttatcaatgcactgaatttatactgacgtgataatcaatgataaattttacttacacactaatatgtggaatgtcctttcgaggacattagcaaagtaaacttgtattggatgtatttatacatcagactgaaccaatattgacagtggaaaagatataataaacttacctgtatgtattttctaagtcaatgtcacttagttgatcttaggtcaattgatctgaatcttaagatggttaagttctaacttaattgtactatacgcgttctttgacttgtttgttaaagctgaccaattggaccgacccaatacttacatcttgagaactcaatagtttaattgagtgggaacattaattacagatatggaatctatagcttctaatagaagtaaaatgatggttttcttagtgcttagttaaacgcgtttaaatgattgaggcctcatttcagcaattatattagtttcttgaaatatcatttacaagtagctaagtattttaaggataaaattaattgaagggtaaaacggtatttcaatctctattcaatgtagaccatctatagaggattattgattgtttagattgtaataattgataattcataacatatctatatttagtatgtagagcattttatataatcaagaggcaagtctgaatccatagtagagccaggaggaattgataagctaggaaatttacttggtaaattttggatcttcttattaggagcttggttacataggcccatggtccccgtattaaatgagataatattattttgtagtctaaattaattgatttatttaattaattaagattctaaataataactatgtcatattaatgaattttactaaagaatgggataattgagaagaaaagagaatttgggatttgtttattaattaagagactttggagggtataattaataaacatatttaaatagtaattttgtttaataattaattataattatcaaatagataaaattaacatttaagtaattagaatagataaatggtatttttgaagatagaaaagattgtatcacttttagaaacaaaagtatcaaaatttaaactcattggccctatattaatttcggccaagcatgagtataaagcaattttatattcttttttattcagttcatttcttataaatctaaccctattgtctccttataaatagaataaaatgactttctttcattactaactctcttgactctcttttgtctgacaagttgaatgaaaagctaactattattattctatttgtaaattttaaaattctctttgattttactctcaaatttcgtgctccttggtgttgataatatgcccccacacatgtcaaagcaatactcaatatagtgaagaaaattatgtagttcaatcgttatcagaagaagaatccaggttcagatcttgatcatactctgcaacaaaaaggatcaagaattagagatctgaatggaatgagtcatattattttgatgccatcaatgtaaatttttctataactcttatgtgtttatttattgtttttaggaatttcatatttaggatattagattatagaattataatcaacatacatgatagtagatctagatcctgataaaataattagttttcaacactcagagctactgccttgggagtgtccccttcacccagagctactgccttgggcgcattttctagtgctttcttggatcccatcttagtttgtaacctagtctttagcttttttggtgattcacacagacagcgccagctgttgatgctgaaattagctcaataacaaattggtattacgatattgaattctttacatcaggttcgatctagtccaaatacaaactctctgttagtttacacaattcctccttagtttttactatctttctgattcatttaatctcaagctcgaaatggtttcaaggatgtatccaacagtgtttcgactagcttgatgtgagtaagaatctatccccctttttgaatgatggggcgtcttatttataggcgagagtgactgtttgtccttcgcttttcttctattcggattgggccatgtaaattagttcctctcagagtttttgggcattccatctgcttgtttcgatcttcagaactcctcaagctctgctcctaattctctcgagtttcgctctgctttataatatggttgagctctgtattttgacccctacattttctttcaaatgaaacggtgtgttaatcgtgtctatcatatgattttattagttcttcttatatataataataaaaaaattatctttttttttttttaatttttatcacttataatttcaatgtagatatataattttattaaaatactacatatatttaattcttagttttatatactttaattgtattatatttcgtctattttaaataatattcaattgtatttgcataccgattattagtatattaattttctgtactacgatatataaaagggatattggcggct

SEQ ID NO: 99468 - DNA, 3740 bp, Cannabis sativa
  modified_base (3708)..(3714): a, c, t, g, unknown or other
cgcacttagtagattcatctcaaaatctattgaaaaatgttgttcgctattactgtgaagtaataagaggtttgaatggataaaagaatgtgagtaggctttttagaaaatcaaacaacgtttattgatcccactggtgttatcaaaaccactgacaggagaaattcttttcctataatgaacacttttagaaatgttgttagtgaggccttagtgcgagaagagaaaaaaagttcagcgaccactttattacataagtaaacgattactaggggcagaaatgagatatccacctcttgaaaaactcgcgctaagtctactccatgcctcaagaaaattacgaccatattttcaggcacacccgattcaagtcctaattaatcaaccactaaggcaagtcctctcaaaaccatatgctttagaaagactaataaaatagtaaattgaattaggataatttaaaatctcatatcatccataggtagcaataaaagggcaagctttaacagattaattggtagaaggaattaaaaccgatgaaaatgttaaggaagcttagatttcactatgcattgagatttcaatttctagcttctatcaataaggtcaagaatgaagcgttactagcaggactaagaattgttgaagtcttaaaagctaaagcaatccattgcttaaacaactcttgactaacaataaataaggtactgatcaaaatggctaaatatttggagcaattatgaaagaacttagaaaaaaattgattattacaaaattgaaaaagttttaagagaacaaaactccaatgtcgatgcattagtaaagcaagcgtcactgtttgagaatgataacctcagcttggttcccattgaaaacttgaatagcccagtatttgcaagatttatgaccagaatataaaattgactgatataaatccaacttagatgacaataatagtcaactatgtattaattggacaactcccttctaataaaaatgatgccagaaatatcatgtgcggtcttcaggtagacaattatagatggtaatctctatcgaagaggctattccatgctactactacaatgtatactacaaaaagaaacccaaagcatcattaaggaaatacatgaaggtttctatgaggatcatgctggaagacaaagtttatccaataaatattttgacaatgatattattagccattcattaataaatgcacgtatgagttcatgaagaagtgtggcaaatgccacagattctcgcatatacctcaaatacctccaacagagctttgaatgatgacctcgccttatccatttaccatttagggaatatatttaattggttcattaccaacaggtcgaggaggagcaaaacatatagtaggtcgatttctttaactgatagacataatccaaaacttgagtctctatctcttcaaaaaaagtcttagactttgtgataaaaaaacattatttttcagtttaaaatacccattaagatagtatccgataatggaactcaattcgacagtgatctattcatagagttttacgagagaaacaagaacataaaaagtttctcatatgtgtcttggccgcatgctaatggccaggtagaggcagttaacaaaactcttaaagacactatcaaaagaagctcaatgcgataaaaggaaaatggatagatgagttaccacaagtgctttgatcccatcgaacaattaaaaagacaactataagacacactccatttttgctaacatttagctcagaggcaatgctaccggtggaaatgaatatcatgactcatagacgtgaatcctatgatcaagataaaaaccaagaattataatggaaccctttgacctgcacaaaaaaaaaatgtgcagactctcaaatatgcaatgcgacatatcaccaaaaaattacgatgcattttaataaaagagtccgagagagacttttcaatgtcagtgatttagtgttacaatgagtatctagcaatacacaagaccctaaagttggagtgtttaatcctaattgggaaggtccttatgtaatagtagctgtgataggaccaacggtgtataaattgactaggccaaatcgcttgatagtgaagaacacttgaaaaaagagcatttgagaccttattaccagtgattaactttgttttgtttaatttttaaactacaagattgtgtaatatatttcatatcaatggaatttatatcttttagttctcaagtaatcataaattttttactttaaaattacttaggggcagactattaataattaaccaaaatttatataatcatattatgtattgggctaatggtcaaaatgttaatattaaaataacaacaaaatattttttaaaaaattgataaagtggcattagtaaagtcgatctaaaatagttcatatattgatgtatatactttatctttaaataaaaagtagtaagtaaaggatatcacaacgagattgccaagaatcaactttgaaaatggttcaaaagctaaaataagaacaaaaaaactaatttctcgcatattttaaagaaagacatataagcaacttgaaatggttgcataagatgttcaagtttattttgttactttaggaataacaagtaataggaattgggattctctatgaaggatgttaaaattttaatcattggaaagaaatagaattctctgtaaaagtaattaaatcatgagtcacttttaaataggaataactcacccaagtttttcacaagtaaagtgaaaaacatattttaaccagcatatataaaggaaaaagatatgcatataagttaaaatattcatatataaataaagttgaaattacttgtactatggatttttattagatatttagatatatatggataaattttaatttaggtaagttatggtatttttctattttaaattgttatgtgggttttttttttttttcatttttataactttcttttattttttgccagatataggaaaccattttcccacttcacctctttgtcttctcctccatcttcacaccattttccctcttcacctctcttcacccctttcattctcaggcgatgcttcttctaaaactcatttctatcattttcgtcttctcccatcttcaatcattttcttctcaggcaggtatgattttcttctcaagcggagttaggtttctattcccttttttgacgaagctagtggttcgattccagtgaatcgagtttttcaagcaactatttttgtggaggaagttttagaactaaatcggtgtggtgtaagtaaagtcatactcaaaagaaattgtaagtccttttttttccttttattctttcacatagcattgtataatatcaatgtagggtgttctagaggcaatcagaatcagctgtgttggatatcctactcgcaaatggtcctttaaattcattaactgatttaagctcctctcaacacatcttggctattggttcactttgtcaaatatgtacttttaaggcagaattactttctaactcttttggtaatgtactcacaagcagctacgatgaaaaagttgcttgcaaaaagattatagaaaagaaggcacttaaagggtttcaggtatatgaagagtattttttctatttaatggagaaaattttgttgtctattgatgttgggttttatgcccnnnnnnnaactccatttcaatgtaatctatttt

SEQ ID NO: 99469 - DNA, 3619 bp, Cannabis sativa
gaatgaaatcaattaataaagtatcaataactacaaagacaattggcttaaataagtttagactccctctaaatttttgccgcaatcctttgtaatgcaacttttgactttgacttctgaaacacctctaaacagcgaactcccttcgtctttgaagtgtgcgtgcttacttcctctcgaagtaaggcttgaacaagtcttctcttgaagacccctctcttgtttagtcaagtcgttctagcaaactctaagatagagtaagaacagatatgaaaaacactagaacctagatgaacaactaggttctcacaaaacaaaaactctcttctcacaaataataaaaatgcaaaaaatgaatactagaagagctgattcaaatggctgctctctaggttctatttatagtacatagaaaccctagagacagccacaaggtcaaatctacagctgtacaaaactttcctaagataaacatgatttgcagcatcaaaaacggattctgacgtagcaaatcagaccagaaaaggaaacttaccataaacgagtcttatcatgtattgggtcttgatacctgtcataaacagtttttataatctgattgtatcaagacacaatcgaatttcataaggaaaaaggcaatagttaaagtttcttttaaaaaccaactttccataagagaattgcttctcttacaagaagtttctatacaagaaaagtccaactaaaaatgcaagtttcctaacatagaaaagagctataaaattgaatattaaaggtgagaaaatcggttaggtaagctaagaaatatcatcacaaaaaaaaaatattttggcatctaacttgccaaaaaattactttacagaagaattagaggagggtttttatattgtgagatctaagatgtctttactgcttaattttgaaatgttcaaaagtgaaaaatctaaacccaaaaaataaaagatttcatttgacattacatatcattgacatataagacaaggtcatattagcttagaaataatacaaagtcttgtaatagacaaacctttaaatgatttggtggtcggtactctatcagtttgtgaatcttgtctagagggtaatacaaagtctccactaaagactttagagccaaagaaccattgtagcttgttcacacagatatattttgtcccatggaaattcaagcttgaggtggttttgagaactatgccatcttcattgatgaatattaaagatatggatctgtctatctgctacaaagaaaatcgaaaacttttgaaaagtttattgaattttgatccaaagctgaaaaatcagttaagaaaaaccatcaaaacattgagattatatcggcgtggagagtccttgataatgagtttgagaatttattaatagagcatggaatagtttcaaaactcattgtaccaggtactctgcaataaaatggtgttgtagagagaagaaataaaatatttctaaacattcttagatccatgtgtagtgataatttgtgatcattattattgtggggatatgcactacataaaattgcatgcatttttaatctagttccatctaagtccatagctaaaacacttacagtatggacatgtcaaaaatatagtttgagatacgtacgtatatgagtgtgtccaacacacgtgctgaaagaaaaaaattaggaaattagaatctagatatgaagtattactatttataggatatgataaaggcactaaaggaggttatttttatagtcgaatagacaagaaaatatttatttctacctatgctacttttttggcaaaagactatatgagaaacttgaaacctctaagtaaagttgtactcgaggaattacttaattgtaagaataaaaaaaattggaagttggaaaagaaacctagctaattccaattcaagaatcatctacaatacatcatagtggaagggttgttcgacaacttgttcgttatactagatttgaggaagcacaagttattgtatttgatgataatgtagatgtcatgaaactcaaaatggagtcaatttattctagttctatcaaagaacttgtagatttgccttaagaggtaagacttattggaaaatggaattattagagaaaacgaggagtggacgataaagtaaaaactttaaagttaggatcgtaggtaagggctacacacaaagaagacgtggactatgaagaaatattttcacttgtggccatgctaaattccttccgcatgttgttatccattatcaatattttcaatcacaaaatttggaaaatgggcatgaaaatgatatttctgaatggtcatcttgacgaaagcaactacgtaatgcaacgagagagttttgtgaataaaggccaggaccaaaatgtttgcaagttgcaatggtcgatctatggacctaaacaagcatctagctcttggaacatacagtttgaccaagccgtcaaaacttatggcttttaccaaaatattgatgagctaaatgtatacaagcacattgacaaagacaaagtatttttttctagtattatacattgatgacatattacttactgagaataatgtagatatattatcagacataaaaaagtatgtttatatgttaaataatatttttttttccttaaaacatatttattttgttcctaactttagaagaattttgatttttattaggggtggttttatgtttagttttgttcatattttaggtagtatttatttagtgtgatattatgcttttgcttacttgtttttcaagttttagtgaatataggataagtggagcaaatagagagaaattacttaaaatcagagagaaaatataaactttttgtgttgattttgttaaaagaagaatccttaagagattttgaagattagtgaattttttggtaaaaaatggcaaaaaattgaataaaagtgttagagccataacatggtgtgttggaattttatgccttaaataaaattcaatttcattctaatcttatttacttttaataaagatcaaaaatcataccatgatttagtcatatgctttgttcacatattttatacatgattataggtttaatatgtaagttctattaaatctcgaacatgtagttattcacaaaatagtgatgtcatcacagtaaaaagtaattgtgattatatatgtaacactgtacttgcttaagtacgctacaatagttttttaattactgtacgtgcctttgctaatcaaagagtttctcaaaaattgtatcaatttaaaatttgaattaaactttaaacttttataaataaacaaccatacacaaaattcgttgtaacgccctaatgctaaggcaggctacagtgattttacaattgtagtgctatctttgctaatcaaagaatttccttgaaaattgtggcaaattaaaacttttagaattaaatatgaaattttataaactttataaaaatatttacaagtgccgtgatcccgttatttaaacttttaacaaaatattccaaatataaaagtcaggtcgcacagtgactacaaaaaggaaaccccagatgtcctgagaccgaaaactccaagtcccgctgccatgaca

SEQ ID NO: 99470 - DNA, 4639 bp, Cannabis sativa
tctaaagtcattatcattctttgatgtatatgattcctaagtctagttaggacaaagagttgctttaatattagtggatattcggtttcagaatatcaaactcatgttcatacatcatccttaaggtttcagatttattccagcgaaaatatagagcctttctgaggcatcctttgtgtgcattcaccatagcctaaaataatctaaactcaaacaacaatagcttctaatttgctcgagtaactttgataagcctcagctccgatttgtttgccaaataaaaggtccggataacttgtttaggcttacgaaaagctagttcatgtactttgcagttgtaaagtgtattgattggctgagttgtattctcttttagccgctcatgtggcaaatgttttgagtatattttcctaggagatctgttagagaggatttggagaaaattagtgagagtttagacttaatggggagagacccaatactctcaaaagattagaacaagcctcttgaaagcagcttgggattgaaaaattgctgaacttaataataaatctgtgagggaattcatttattctagtgtgattatctaactagactattcttagaaaatagtacctacaaacccattcatatcttgtttaccagctgctaatgtaaagggcctagagaaagaaataatttactatctaaagtataagatgccaaaaatatctcttcataataacgatattgtactgagtctgatacaattgcctgaatttgcataattcaagagcatgtatgatcctgaggagcagtaaaagaacagaggatttgccaagtttaaggaaagatcatgtaaacttgttcaagatgaaaaacaatattgataaaccacattcttgaaagtgcagcacagcttgaataaaatttttgaaacaatattatctaactaatcatattatcaacataatatacaaggtgtacatatagtgttcaaacttcaaagttaatagaagggtactcacagacatgaaggatggtgcaaaatatctaacaccatttcttcagttgactttgatccatcagcattgtacggtgcaaatgactgaagaagaacaaatgcaaagcacaagttaacgaaaccagtgaatttcaaccacctgaatttcacaattggagatcttacctgatgcattgaattagccgcctgtggctgagtaggagcactaccttgtgcttgtactttctgttacaaatagatagcatcagaaactggagcaaaagaccacatcgaaatgaagcaactacacaagaaccttgttttaattttcaatcaagaagagtcttagactaatgctctgaccttcttgttgtaaaaatgaacatatatgcactcaataaaatggtatgcaacctcgtcgtagtcctctatgggcctgaaaacaacataaaaatagtgctgaaaagctaataagaaaccagaaacaaaaaccaatgacaaataaatttaaatataaaaggagatggacactaacagaattaccacaggggcatgcaagtagcaagtagcaagtagcatggacatgatatataaactcctatacatgaatgaatgcaaaagaaaaagagccaccaaagtggcttccgtcttactttcatgtttcaatatattccataaatatttagagtgatgctacacagcatgaattttatcaaagcattccaactcatgcaatccgaaacatggacaccaaaacaataagttcattttcaaaaattgttgaaacaaacactcataaactttaagatgaatcataaagtccttgcgaaattgcacatctagacacatcgcctatcccccaacttgttgcactaaggagccatataaatcatattaccgtgcacagctctcctcaaagaccaatagaaatattttaagaatatgatattaaaatgatatggaagaaagaattcttacctaatggagaatacatttaaggttcttttaccctggaagctttttaaacgtccatgcacacaaacatacatcccatccctaaatataagagagaaaatcaattaaagagagtgagagagagatgacaacttgatccacacatatttccacagacaaatcagttataactctgattaaacttacgaagttctatgcatttaggggacaaaaaagaagcacattgaaacacagaataaatctaacattcttctcagcctactagtttaaagtttcaaaaagtccagcaggtattcagatgtgtgaagtgccatgttatttaggaacaaaaagcatatttaaacatagaagaatttttaagttcttctcaaccagcttgttccaataaaacctgatacaggataacacaatgttttattcaactgaatcctatgatacattttcactttttcattcagtctctaagaattctaagaatcaatttacaacagcaaataaaccacactaaaaaagaaagtctgaatatcaagattaagttagcaatagcataaaatgcaaatataagtaggaagagcatgaaatgagtttggtgacaaagattgcatacgagattccctccatttcgcttgtatcaacggcttcatgaaacctacacaaacacaaggcagcaagttcaaattaatttaactaaatgcacaaacaataagaacaaaagcatggaaaaagattgagaaagctcaccacttgttacaatcaatacgtccagtcccatcatcaagcacaaaagtgacatcagtaatcattccaaccttgctactcacaattcccactagcttgacctaattaaaaagaaatcaatatccaagataaaaacaccctaaaaataaaactttattataacaaaaattgaaaaatgaaaatcagggaatgaacccacattgttgacatccacaccatcaataacaaattctgatttttcacttcctggaacaaatgcagtgcttatctgcttcactgtcacgggaagcaaagcttgaacatcacgattctgcaacagaattcaaaagcttatcaaactgtgaatttaggcagcatctcgacccacattcaatttcttctaatttcagttcaacaaaatcgctccaatatataactagctatcaatttcttgattttctcagcaaccaaacacactacagcatacaaagccctaaacctgtacgagtgcagttgagaaaagagttgaaatagtagaaattctttacaaatgtaaagcaacaacaacacaccatcctatatagaacgaaacagagactaagtgagagttagagagagagagaggaaaaggtcaccttggcgggagagaatgaagagtcgggattttgaacggactgagaaggcatgaatccgccgccggagaaggcggcgttaccgtcgaattggctgccgtacatagctagctacgataaaccctcaaccacgacaaaatggggaaagcttcggtttcggcttatcgagcaaggaacaaacaaaacctttaaatgagggctaattaggattcttaaacccaactttcacatctataaaattgtattatttgatatattgagattgttaaatttaaagatttttaacaaattttattcaattctactgacatgatgattgatatgtattaaattatatctttaaattttaaaatatacaaaattgtatctttaaatttgacatgtactaaattgtatcccgaactaagtgtacctaatgcaagattagctttcattttcaatgatagatcaatcatattgttgtgatgctccaagcgacatttatgaaacataagcaaagcttgaaccttttcaagaggcaaggagtcacttcgagaggtgatgccaaagatcatcatatcaaaatcaggttcaagaccatttagaaacttaagtacaatgtcttaattacttggagaagagccatcaatcgcaaaagcatttgtaagagactgtattttgtcaacataatcaataatagatagattacttttctaaacatgagaaatttggcctttgagttggagtaatcttgcgagagattaacttgagaatttctattcaagagctctccatactgcaaatgaggtataataattggcaaccgaagcaacaacgactttaatcatggaaaatcagagccaagaaagaaggagctaatcacgtttcttccattgtaggtagacaggatttcatccaaattatgtccaataattgtgggaactacttggacttccataagagaaagttaactcaatatatcgaacaaatttttgtgcgcacgacagtctaacaaccacgacgtctccaagataaaacaggctttgtatatgatatgttttgctctgagaaaaatcataaggaagaaagaatttttttttttttgatgttgaaaaggatgtattttttgttgttctgatacgacttatatagagaagtcgatccaaggttcaacggtaagaaaacaataatataatcgtggatgagttggatcatagcagtaaaaaacggatgattgacttgatcgttttttgctacttcatttaacgttaaaattatttaatatataaataaaaaataaatctttatttaattaaataatagcatgaatgatttacatggatgaataataaca

SEQ ID NO: 99471 - DNA, 1881 bp, Cannabis sativa
aaaaattttcaatttcttgctcagcttaatcatacggcctacgcacctctgaaacaccaaaaaaatgataataagatagtcttcataatagaataaagggagaacagggttttacctgaatcaacctttccgtactcaatccacaacgaaaggttgcatatatgcggggatacaaaaaataggaagctgcaataagagctgatgctgcaataactgatggtttctgtttcttcataaaattgcctgtgtggaagaccaaggactaaatgttataagcctaagtttaataaagcatagtaagaagaacagagcagaccataacataacgaaacgaaacaaaacagagtgaagtatcaaacttactttgatgtgaatttatgatgatatcatggataattctcttattaattctatgagaagtaccaagaaatctagtagtatataacggcacaaagcatatgggtgtgatcacacgcaggtcccagttaagtccttcgagaatcccaaactccacttccatgaattgctcctccgtaatttgccttagatttggcatctctgcctgtttagacaaaacaaatcaatcataatatatctagagataataaaaataggaccattatgggtaacagaggtttaaatttgacctgatattcagagatgttgaatgttatgtttctcattttccatgcaagtgtgaggcagcatataacggtgagttccacattgtggataagacaactcattacattctgagaaaacaaatgcaagaattattactcaacaggaaaaaatgcagcaaagctgagaaaataggtataaagattccaagattgttcaattaataccggtacacgatttccattatcaagatagcgatcgaaataattcagagcaagataagaagccaaaggatcatagcttttgcaattggaatactgccgagaaaccaagaaattttttaaacaaaagcacaaaattgaaaattttgaagaacaagaacttgcgtaaactactggtaattttttttttccctttttcaaatcaaatcaataaaagaatataaatatgctcaggaaaaagtaacaacttactttgaagatcacaattagagcacggcaacgaaacttatatcgggatttccttgtgtcgtaatcctcagggtccgtaacggaagattcaagtttaaagtagtaatcaaacttattacgttggtttccatggaaaggaattggattgtatggatcataatcaggtactctcagcattttgcgatgaagctgtttgaatccaaaacaaaggagagtaattactgaaaagcgtttgctcagatgagaaaaaagaaagaatgagccgttgggaatgattcactgggtttataacgaaactgtggttttggcgggaaaccaaggtctggacatttgcgagttgccacatccctccgtacaacccaattcttaccgtgatactgggatattcaatgttttgttttttaataaataggaatatttaagtagtgttttatttttataacaattatttatttttttaatcatacaggttaaaatatttaaaaaataataaaaattatttaaaattgttactaattttattcttttgaaattcaaaatcaaaattttaaaacaaaaataaagttactaaatgtatttgttgtaggaatgttcatcaaaccgctcaaactacccgcactctgcaaaaaaaaaaatacggtttgaaattcattgtggtgcagtcgcagtttgattcttcctaaaccgctacggtttgcggcatgttaatatgcggttcaaactgcaccacaccgcacattatataaagggtaaattgcggcataaatacttaatgtttcagattttatac

SEQ ID NO: 99472 - DNA, 2524 bp, Cannabis sativa
agttggtaattattaggcatcagctctactcggttgaaagggaaattaaattaatacacaaccttataatctttggtgaagtacagttggcgactacataaacatatgtgcaggtttggaaaacttagacatggttggtacagaggctagcatatctaaatttttatgaattatcaaatactaatgctatgtttggaagttggattttggtgagaaaagaaaaagatgaggaaaatgtagggaaaaaatgtggagaattaaaaaaaatcaatttttcatggttggtatggaaattttgttgaatcaagtttttttccatacactttttcattccacactgaacatgagaatttattcttttttatatttattattatttttttatttcacttttttttttcctacattttcctcacatttttcatttcccaccaaaatccaacttccaaacagaggatagagaaatttcaattactatatggtgtaactcttggaagattttgccttcatcattaagatgtggggcaatgtggaggatctctttgaaaccatgagtgggaactttcaacttaatttttctgccccatttgtcattttgttgttgctcatgttttccagtttgaatgaatatatcttaatttttcaatggggtgccagataatgctagtccagagtgcaacttaacagtaagctgcgcctattatatgggtgagatagccatgagcatcaagaaggtacttgcttttgcacttccacattattttctttgtgaaatcatcaaattactttgcagtggaattcaagtatctaaatccaatttaatgcatgtaacttttagatctggtatcatataatcattgaaatttcaattagttacaactttggaaataattttgctactcctgaacatttattttctcacgttcgattttagggatcattttcgtacagacttccagcagatgatgtattgaatggtggtgacttgaagattgactctacacataatactattattgccagcactctgttaggaagtataataactttcattcctctgtcaaggtaagggacaatcatttcagctttcttgaggaataaataaatgcctatagaatgcaagaagtatagttgattaatattgtggatgttcggaaatatgttgaacatcttaaatatctaacaattcctaccttgatcaggactttgattactcattatctaattaattttgagttgatctaactgatataaacttcattttcctgcagagaagaatacgaactcttggaagctgtccaagctagattagtgattcatccattaactgctcctattcttggaaatgatcataatgagtttcgaagacgagaaaacccagtaagattagtggctaccattagtacattatatggtttgacatgctttcatggggtttgtcgaaaatgttatgcatgtaaatagggttattacttttttttatttattttttattcttttccttatgttatgaacttatgatcattactttcaccttgataaatgcatgggtttgtgtgtacatggattctaccctatgctcccactgaattattgtttcttgggtgtagaaacttcacaaaagcagttgtgtgtcataactaactgttgtatatgttgcacattggattcaaactaaattatcttttgcctaatgatcgtcgtatcaattgcagactggagtaccaaatatacttgacggtgatatgcttactcagttcttggaacttacaagtatgcaacaagaggctgtattattgtttcctcttggctcaagagatgctgtaagctcaagcatgaaatcatcgtcatcacctttacctatcaatcaggttgtacaacttctggagcgagttcattatgctctaaactaagtacatgtctccaacttgttctggagctatcgaaaatggcttcgacccaccaaccttgatggtcgtcagatcacttgtcatccaattttcccagcactgattcactgactatcaaagaaaaattccttatatataatcacttcacttggatgaagggagtggaggtactgatggtggagatagaaatgttcagagaacgtacttggttggttcttatttaaagtggagcaacaattgagtaaggtggggaagaaagtgtgaggggttaaggttttttaccatttgttccatgtaattaattgctgcgttggatttgtgttgttcctatttattgttgacatgccgtgtgggaagaaagttaaaaatcatcattccgtagagtaattgattcaacttttgttcttttttttaagccacaaataaagggtttatgtatgtatcacttgccttgtagctaatgccatctgttgcaagcgacgaatttacagaaatggtaaaaaaaaaactgaaaagttagattttataaatctggacaaaaaataatgataataataataatattaataatgcataggtagttagccaaaaaataagggttttctttttttttt

SEQ ID NO: 99473 - DNA, 3485 bp, Cannabis sativa
ttacattgaaacagagttttatttagggcataaaacctaacaatatacccctctaataaccgacgccataagggtatatatggcgtcggttgtttataaccctttagtgtcgccctaatcagcgtcggtagcgaattttgctaaaaccgacgctgaaagggctaaaaaatctcttctaaaggggtttttgtagtagtgattgcatctacacttttttagcattttatgtggagcgtataatctctactccattaagtttctttaggcaaccaaataggcttgtttcgcactaccatgaatcgaatttatttacggtcaaaataggttatcacttggcagcgtatgtagataaacttgagtgctcttcttcctctacaagccatgaagcttggtgaaaaactttttggtctctacatttgccatctaaaattaaaaaaaaaaaaaaaatcttggaaggttatctatgattcactaccagtggcaaaaaaaacttatttaaaagaaagattatcactagtattacatgttttctctgctcacatgcttgggaaaccattgggcatgctttatttggttataaatatgcgaaataagtttggaagctctcaagtttttctatagatatctagcaagccaatacaatggtgcaagacgattatttgatgcatttatctactctatactcaaaatttgaaatggaatcaattttttgcatcatgtggtcaatctagactaaaagaaatggtgtcgttcttggccaacaagaaagaccagctactgtgttggtgtctttttctaccaacttcctactacaatattgtgcaccagccttacatgcccctttgtgctcaatactagtttcctctccgactgttcttgccctacatgtcccatggaaaccacctgcttctaatggactaaagctaaacgtagacgcagttgttgatccttaggctagtgttacaagtattggagctattattcaagatagaaatggtaaagtgatagtttctcttttgaagccacatacatggtgttttaaaagtcatgaagtggaagttatggccctttttcatagtcttccttgggcttcgcaactgcagttaccaatctctaaagtagaaatgtacgaatgctcttcgggtctatgctacaatcaatcagctaccatctgcttcatctatggtatcctcttttacaaatattattgtacaagctgtaggttttttatccattttctctagagttgttgtctcgcatgtttatcgagattttaatagagccactcataatttagcaaagtatattttagagttggatgaagatttaatttagttgaaggaaatcccctctcttaatttataaatattgttataaatgaaatctcctctcatgtaatctcagtgttatacatttataaattgagtttttagatgcactcctcattttcgatcaagtataattgagaaattcccaacactatatctttagcaaattattataatatataggataagcaataataacactttccgaaatgtgtgacacaatattatttagattttttttaaaaaaaaaaataatgaattaaaatctttaaaaagacgttcatcctttctccatgtctagctttgatatattcttcatttaaggttttgagtttgtttttgagataaatgttgttcttactacaatattgctctttatctgtaatttgttgtatttgatcagtgattttgatataaaagttgtccatctttacttttgttttgttgttatttattgctctaaatatattttattaattattttgagttttaataattatttttatatagaaatatgtgtatatactaatattatatatttaaaattaaaatataataaaattttaaaaagtaaaattttagtaatgtgttttaatgaaattgatgtatgatttaatgtaaaaatgtgctgtaaaatagaaaaaaaaataaaattttaataatatattttaaaagatagagtaaagaatttattgggggtactctaaaaaagttcttcttttcaaaaaaatagaaaatgaaatcctttcttataagtcaataaatttatgtttgatgagtgcaaagtttaacatgttgagaatatatactacaaatcttcatgaaataaaagaaattttgaatacataatgcaggaattttgtgataatttaatttaaatgagatgacagattaaaaagttctcgagaaaaacatataggtggggaaatatgcaccactataattctcttcccagctataacccttgaactacgataataggttgatgcacaaacacaagaataaaacagagaaaaacgccattaattgagatgaagagctacaaaacctaggcctgttgttgaggatgataagcctgataattgagccatgatagagaaagacactaattttcatcgttaagctccaaagccgtaaagctatatttatcacattccattttcatgcataaaataatatattatatttgttatagtaattatttattagtaaatcaaaacattaaaggatgtaaatagtttagaaatgacataaagttagaggttcattttactgaaaatagcattacatgtctccctcaaattctctctcattaacccaaattctgctttttatatattattatctgcatgaactactcttgtatgatagctacgttagcctgttttcatggatttttgagagagagttggattcatgttgtttcaaacaacaccctactttaatttattttatttttatttgtaatttgtattaattctagggaagtactacacataaaatagagtaggttttttttggacctattcatggtgaaagtggccaacagccgaacacaaatatgaatttttaacaatgtgaaaagtgataaaaatattactaattatggagaattagttacgtagtgacaaatggccgtcatgagtcatggactctatgtccattaatccctcattaagcctaggataaaacaactaataaaaagaataaatttattctcatcaggttaaagcataattgctttatccgagtgctctaacctatcactttgatttgactactcaatgaattaaataagctagttaggactagtttggtacgtcgtaatgtatattatactatattgtgttggattgtcttgtattgtattagtattatttaatacaatacaatgtttagtattgacttgtgctaattgattgtgtaaagttattatatatttttaatacactcgatcccaaaactaactacgggtctgggttcggatttggggtcccgagtccgcggttcaggtccggattcgggaccccgggtccaagtccgggtccgggtctgggtctcgggtccaaggtgcgggtccgggtctggggtgcgggtttgggttcggggtctgggtgcgggttcgggttcggggtccgggttcgggtttaggtccgt

SEQ ID NO: 99474 - DNA, 3717 bp, Cannabis sativa
aaatagatttactcaaattgtttcagaatttcacagttacaaaatgcaattgagcagagcatgccttgaatttgcgaagggagaataaaaatgggtatgatgttgttataagtgatgttcacatgccagacatggatggattcaaacttctggagcgtattggtttggagatggacttacctgtaatcagtaagtactgtttttctttctattatagttttggtctaagatttaacaaaccctcctattaagaagccaaatactagtttgtatatctatatttgtatgtagtaaatcttgatatatataatgtctgtaatttgttcagtgatgtctgcggatgatgggaaagatgttgtgatgaagggtgtgactcatggtgcttgtgattacttgatcaagcccgttcgcattgaggctttaaagaacatttggcaacatgttgttaggaagaagaagaatgaatggagaggggaaatagaacagtctggcagtgtcgaagaaggagatcggctagctaaaccatctgaagaacccgattactcgtcctcagccaatgaagggaactggagatcttctaagaagaggaaagatgatgaggaagatggtgatgacagggatgattcgtcgacgctaaagaaaccgcgggtggtttggtctgttgagctccatcaacaatttgtgggtgctgttaatcaattaggcattgatagtaagtattttccttcatgtcttactttctttctcttctttactttcaatgatctggtttgagattatggtgtttatttcatttcaagtttggtctaggaatctagaaaattggatttaaatgtacaaacattcataatgtggaagccattgttatgattccccccaatgcagtatatctctttctgcttttttgtccacattctttgaagaaaaatatgttgggagaaattagagtctaatatttgctcaagcattgcattgaaattgtgaaattctctatcatggtactcatacttaacatgttaatgcagaggctgttccgaaaaaaattctagagctcatgaatgttcctgggctcactagagaaaatgtcgctagccatcttcaggtattaggcgattgtgatcggtcctatttgtgtttttgttttgctttctttcttaaaattatatgttgtggtagtgtatttaatattttctctgatctgtgacaaactcaaatttatggaacagaaatatcgattgtaccttagaagactcagtgggcagcaccaaacaaatatgaataactctttcatgagtccccaagatccaacttttgggccaatgacatcattaaatggtatggatcttcaaactctagctgtgacgggtcaacttcctgcacaaagccttgccacacttcaagcagccgggcttggtcggtcaacaccaaaatctggcatacctttgcccattgtcgaccaacggaacctgtttagcttcgaaaatccgaaattgaggtttggagaggggcagcaacaacatttaagcaatggtaaaccattgaatttgcttcatggaattcctacaaatatggagccgaaacaacttaccaacttgcaccagtcggcccaatctcttgggatgaatatgcaagtcaatccccacggatcccaaaatagccctctacttatgcagatggctcaatcccagtctagaggaccaattctaaatgaatcttccagcagtcatgcttccaggcttccatcatctgtatcgcagcctatggtaacaagtggggttctagggagaaatggaatttccgataatggcaggggagcaggatacaatcctgttatgcaaaactcttcaatgttgaatttccccatgaaccactcctccgaattgccaggcaacagtttccctcttggaaatccaccaagcatatccggtctcgcatctaaaggggcattccaagaagatgttaactcggaaattaaaggatcttcaggttttatggcaagttacgatatatttaacgatttgaatcatcataaatctaatgattgggacatacagaatgtaggattgaccttcgatgcttcgcgacagtcaaacaatttaccaggtagctttgacatggttaatcaaggattttctcctggccaaagaaatctatcagttaggaatcattccaatgctggcaagaccatattctcaatgggagaaaatgatcatgggacctcacataacatcaatcagaaccttaatcctcatcacggtgaccattcggtgagggttaaatctgaaaggattcccgagataggtaacgacaccggcttctttcctgaacaatttggtcaagatgatttaatgagtgcactccttaaacaggtcagtttccattttttatatctttatgaacttatttagtatatcgaaatagacactgattattatcgaaatgttctgttttcctaacagcaagaaggcattacaccagctgaaaatcagtttgattttgatgggtattccttggataacattcctgtgtagaatacacttggcattttctggtgtatatagttgctgtgacagattgaaacttatccttcttctgcaaccatagggtggattttaaagtttgtctaattcaagaaacttggacttcttgatttttcatttagccacatatcttttctatgtgaatataccatgcttttttctgctctgctgcttaggacattgttaagatcaggcattttggtattatttccatatggatcaaccatgtgcttggattataaaaaattcactatattgcatgatatgaaaaagaaaaaaacaaagtgtcatgccaaattatgcaacaggtgtagtgcaaaattttgtgcggctttggcggtaaattttgaccggggtcgccactacatctcggctactgctgctgatgctgctactggcatagcttcttcttcccttagtttttgggtacatctccaattgtgggtagtaagtaggttttgttgatacatttgcagactattttaggatcattttctaactctaataacacatgaagtttgccccatcccttattttatgtttcacttccatttttttcttttcttaactttgattgtacatattgtattgcattgctcatgactcaagtctgagtattcgtttcgttttttgtttttgtgtactaagaagctctctcatttattatgttagattttactctcaaccatgttcttctctacaactttaagctaagacagatttatttgattatgaatttatgaattaagataataacaatataattaattttctggttggtgagtaactagctatcgctatctccaacagtattctttaacatcaaataattttcacacatttttggtatgattttaacatcaaatggctgttttgtactcattacacttgaaagggaatattctaaagaacattctttctcaatttatgtgaaaaatatatcaattattaaagaattgctcaaatatatgtgtaactgtaagttgtggttgttatttttgaattattttaataagttgtgccatatggagttcaattattttccctttcaaaaaagaaaaaaaaagagtgtaattattttaagttagtccctaatgtgatgctaaaatttttattttaatattaattaaaacatttggtttcaaacaattatacatagaaccttttaatttgtaaa

SEQ ID NO: 99475 - DNA, 3048 bp, Cannabis sativa
cgacctgctcagaaagcaactcttgtcgaattcagatttcaattcgctgaggtcgtgcttgtactctaaatgaactgcatcaagtcaattctgctaagcacatccgtctttggacccatggaggatcggtgtctttgatactaattgataggataattcctacacaatttgaataaagagacaattgatagaagaaaatatggggaaaacccccattgtattgataatgccagagaatttgagagcttggcctctccttacaaggaaaatagcaaattacaacttggacaacccactccaattcccactcaactcctattataatatctaaggtgcactatatcctagctgcactaccctccacactaacctgccacgtcaacaacccttcctaatctctcccctttaccttttctcgagtacacaaatgtaattggaggcctatcaacatatgtagagaatatgaattcgtgatgttgaagcatctttatccgtacttcggatttagtatgaaatcattgacttttcagttttgagcctttttttttttatggaaaatgaaggaattaattactaaagttgtggaactagagagtaaagaagatgaaagagaagagaactagagaaagaacatagagttttgaaaagaagagaacgataatagatatttaaaataatctttcattttttccccttaattagaaatgagacgagctttattgtatgcattgcttttcttgattggaaagaaagtttttaattgaatgaaaaagggatttcagaaaggataataagatatcctcctaatgaaaacctgttaggccttgatattagcctcttaaatataattgattaggaatatagatgctgagttgtcaaattcttagttgttgagatgacatgtttttagtcccaaggggttagcttaaaacagtagtgatgggagagtataaatagggggctgattaatcctaaaggattaggaattgatttgtattgttaagagtaaaatttactcaaggagatatccaagtgtcacgaaaagcttggaaaaattgttatcctttctttgatatcaatgagagtcctatcttctaattctttcaatatagaaatggagcaatagtgtatcaaaaccataataaaatgacaaaagaaataaacaaaattctatctagaaagagtaatttttccgtctaagtgaaactaatgaaagggggaaatccttaagctcctttgccacataaaactaaagagaacctaaaatgttactcttactcagagaaaccacagttaaagattttatttgtgatgtttcgtactgatgcaaacttgcatttgtatatatgttttcctaatgagttttaagtgttggttttctttatgacttattgcagattttgggaaggatattttgattatctaatggagaggtcttcaaacaagtaaaaattccagtcaaaattattaattaatttatttcctttttttatttgctcttatactcctatttattttaatttttaattttgttctgtattctttcgtcttcattttacaccatttcagctttgagttgttggttgaattgacgcacacatgcatttagtttccgaaccttttgtcaaatagagtttcacagcatagagattttgtttcaaggatgcttatttttcttctctggtatttcatttggtgcaatcacttttagtttcagtagtgtgaccgatcaatttatataatactttaaaccttactgctaaaggagggaataatctggttacttgaggcagttaaagtggtttgatgattgttctatccagtttcaatctcccttattattattattattttttaggaaggggaaaaaaatatcacattctgacttaatatgtacttttcgtgaaggaaatgttcacttattttcctgtaattaatatgttttaaagcttactgtgctcatgatttgatgcacatgtaaaatgaaacttctctgcaccaaataggaagtgatgtttcgctaactaggtatctgctgtctcttcatttgtcaggtcggcaaattatgcatccctggtgacatcacagcttattgtggtggcatcacacatggtgatttctattgttatagcactgctactaatcattacttattgttatatattacaatttaaagtattattattgtttatgtaaacgtttgttttatgatgttatgaaggctggattgggacttcctgacactgatgcttggtatatgattgaaactatagcggagagaaacaacattggttacaagcaatttgtaagtaaatttccccaaaaccgttgattgattagtttacaaaatgttatctatggtaatccttgatgtgtaatttatgcgactagttattaatataaatttctttttatttcacgacaccataattgacaccagttatatgtgcaatgtgatcttggataatttcgtcatgacccttaattcagaaaggtctgacaaatttattagaaatatcattctaaaataatccatcgtggaaatttctatatggagttttaaattgtatggaccctttaacttctttccaaactgtattttggatgaacaaaatctatattgcaatatttcaagggggacaaaaaacaatatagtaatatgtttccgttagtacattcacttggggaggaaacatgcaagaacctacttaaaggcatttttaacatttaggtttgcagaatgcaaacataattgtaagtgctgtgtaatatatattcaattatcttttatttatgtatttggtttcatatcagagaaaaaaaattatgtattctggttgtatcttttccacgtgggaattgccacatccaacagtcttgtagccatcaaacaaaataattcatctgaatctgaaaccggaaattctttgtctttccataaccaattttgaattttctttttcaccagcgcggaaaaagaaaaaaaaatcctttctgtccaaaaaaagggcagaatgactacatatattcctccggggggcgattggg

SEQ ID NO: 99476 - DNA, 5257 bp, Cannabis sativa
gttggtttgagagagtgagttgtcctaattattttggagagtgtgttgagtggttgggctgggccattatgacgtggtcttgggctggattgggcttttttctttacacgtgtgctaacttggtgcctagagcacgtgccaaccataactggtatttggacaagtttggggaagattatcccaaatctagaaaagctgttctaccttttctgtattgattatgatcaattatatgctctttttattgagttattttttttccatgaatatttgttttgagtaattgaatatggtgaaattgactggaattgttaatgagaagaagttatatttggctgtagatggtaattttgaggaacacaattcttaaatatatttgtaatgttgcaagaatttgtagtcatgactcatgaggagttaaacaaaacaaaacaactcataattacgagtttagaactataggtaaacttattcctaacaaccacatttcaatttgatccactacaataactatcacaccacatagcatttttctttcattgtcccttatcttatataataacattaatgaggaaagagtggtcaaatcagatatggcccttacaggaataaagttccaaagggaaaccacatgtgtcacatgcaatgtaatagcttattttatcatattcaaacaacaatggaaaagacagcaaatatcacccatttcttgacaactatacaaagagtgtttcatagtttatgaaccaaaacaaaaacgataagtgtctaccatagttctattattgaaccccaaaaacaacactatctcaataaacaagggaggtaaaaagttaagaagatgcgaataataatgacacatagatgctaatatcatggaaaacaaattccaattaaaagagttccaggcagatttttttttttgttgctgttattattattttgttttcttcctatttctgtagattcaaaaacttgtgcttcatgtctacaaatttcagtagaagctgtgctttgggagaggtgaactctctctgaatgttgggaaactttgaactcatttatcaatgacttcttccacctctgttctgaactatcttcatctccaacaaaacagctactgctgatagaaaaatgaaatacactataataactgaccaagctaacagttcaattccagaagcagaagaaactagtcgaaaaatgaattccgatatagctatcttaaaatacttttacaagtataatcatttatttgccaatacagaataaattcaatagtgtacttctttatcatacaactacaagaagttaaacaaaataaaacaactcttcaatttcctagcttcaaacaaaatcaagaaaaataaaggaaaaggagtagacaggttgagcacacattataagaacagaagggactcacattaagcgaaggtgcgatttgcaccggcattcatcttcagtcttgcatcttcgggactgttgtttttcagactcccatccagtcctccagaagtttcgatgtctttagaaatttctgccttcagcttttcatgcttctcctttaggtctgaagaatccaaggccgctgctacgctctgcttaatttgttgctccaaagttgcaattctttttttggcttctaaattaggtttctttcctgccttagcaatctccaacttcaatagctctatcttgtacttcaagtccgatgagttgataacactttcaatcccatggttaatttctaaattcaattcttctatcttggattttacttctgatgatggactgagttcttctaaataagttgtgtttgacttaacagcctcaagagccaaacccaaggacttgagaacatcttcgagctcaaactctatctcttttctgatcttcacaattttctccttcaggttggagtccaaatcctcaaatgaagagaccccagaattttgaatttcagtcttcaatgcctcaaacttgtccttcatgtcttgtctttccacgacctctttaaatctttcattgatttccagcttcatcatggaagccttactgtttttctctgcaatattctttgcttttgataactctttcaacatgtcaagcttatttgacaggctttcataattaggagattttggaaggttctggttgaactcctccctaagcctatcaatcttacttttgaaagctggatccacaatttggtcttgtgaatttattttctgatagtctgcacgcaaagccgcaaacttgtcttcaaaacccaaggctttagctgcctcagaaaactcctgatcaacatccttcttcagtttctcaattgtctcgtttagatgcaacaacgggggttcactagaagattccttagctctcaaaatttgctgtttcaccttttcaacctcaccctctaaatccacatgtagagtgggttcctccttctttttcatgttgactttcctctttggatctattgggattccttcttggaagccaccaatttttcggaacttaagcatacgatgtttcaatagctcttctgtgttcattttgttaagctcctgtttacaacaaaaaaagacttctagataagcatatataactccatctattaatctttaaagatgattaaatctgagtggcacttacatccatagtttcattaattgcagcttttatcctttgggaagtccaagaggaatcagcatgtgcaccacctaatggctcctgtcaaagagaaatataatggttaattgtagagaaaccctgttacatatttgacacccaaaagacaatctgttcatcaaatatggaagtcctccacaattatgcacgggactccaattgatgattaagtgcagtgcagttaaataaatgattaatataaaggtgggaaatcatgaacaaaaagaaaaataaaaaattggttttcttcaagttgtaaggacggaaaaaattgatggaattcattaagaagagggatgaggagatttacaggaataatcccatctgcaatttgcagcttgcacaattctgttgcagtaattttcaacttctcagcagcctgcaaaatagaaaaagagagaattacaaaaaataataataatagtcacttcttaattttctgtaatatgtcaagcaataattttttatatagtcaaattgcatggcaggcatataaggaacttttgtataaacctttggagaagctttggcagtcttccacaagattgctgcacatgcttctggactaaaccatgacaaaacaaagacaaaataagaagaaagaatagaccagatcatatggtaattgaggttgtaaatatcatagtaattgtgtggaacagatatttttaacttttacaagctaaggaaaaaacattggacatatctagcgtctaagtaatctaataaatgatagcattggctccacataagtctgcacttgtaataagggaaactggcacaaaattcagatatattgccctaaagccatttcctcctttccggttactgacaatcagaataattattatcattagcatactaccatggcaatcattgagatctattttctctacattagtttgaagttcttttttttttccacttccatgctagaaagaagagccattcaaagcaaactgactatacctggcaacatagaaaactgcattttcaagcattaacagtttattggcacagccaatggcaagggcaccacccgaaccaccttccccaatgacgatagaaataattggtactttcagaccaaacatagtcctcaaattttgagcaatggcttcaccctgaaggcataaagagaaagtagtttattggaagaaagcataaatggcccacactaaaatggaaccacactttttaattggaaggaattgtttaaatcatagctgaaaacacacttggcctagttcctcagatttaaggtctgcaaatgcaccaggagtgtcaataaaagtaattataggaaacccatggtgatctgcgtaatacatcatgcgtagagcttttcgataactgtttgcatatatgtgtcaattagagtcagagagattcaaaaaatataattccattagtagctgaaaggagcaaatagcatctatacaatttcacaaaacatacccatggggagtaggcatcccaaagttacgcataatgttttcctttgtgtttctacccttttgatgacccataaacatgtaacgtttaccatctatggttcctataccagtaacaattgcaggatcatcgtaccctgctcggtctccatgaagctccacaaactagatatgtgaagagaaaaaaatcattagttaatataattttgtgaatgtctagtttttataaagattcaaggagagatcaactatcaaaatacattaaccccaaatgagaattagtcgataccaaaccgtaccttttcagttatgttaaacacgtgatcaagaaaagttggcctgttaggatgccgagcaatattgactcgctgtatgggagtcagatgtgtatacaagtctttcaaagcctgaaaattaaaagccaaattacgaaattgtatcaaaatctgtatttaaggtttcccatcttagcataaagacagtgcataaatgcccaataagatgcaaaacattcccacaagttatcaaccacaagtataatgaacctgctttaaccaaatgcctaaaggagaaatgctttctgggcacagttcatagcagttacattgaacattccttttagcccattggtaactacatgcagcttttcatgatttttcatatatccctaagctgcattgagtgcatgtcatgtgcagtgattaacctacgataactattatccctgacatgagtatcaagagaaactgttgaaaatagcaacatttgctaattgtaacatgcagtcaatatccaattactagaaagcacacagaataacaatctgaaataccgggaagaaaggtgaaaaagaaaactttggtttgcttgttggcgggtaaactacaatatcacttcaaatagataagatgacgaaaagactaaataccttggcatggatgcacaatgcataagtactttcaaaagaatgttcaacgtaagcaaagaagacaattaacaatcaatcacatcagccctataaactaaattaaagtagtgcatttatgtcaggtcaaaagagaatctactatgaccctcatataaaaaataggcatcccacctgatgatacttgttc

SEQ ID NO: 99477 - DNA, 1166 bp, Cannabis sativa
  modified_base (29)..(29): a, c, t, g, unknown or other
  modified_base (57)..(57): a, c, t, g, unknown or other
catgccaaattgtgtaattacctccaatngtaattacctccaattacacacaattcnaattacattgtggcttttcaaacgcacccttacttaaatcttattcatatttattatttaattattcttaattattttaatttgactcattattgttggctaaaagcaagatcaatattgtccatcctttctaaactctttctccatcctactctccctccataccaaacataattgttgttgctcgaacacattaataataacttctcatataaaatgaaacatttgaaaaaccatttcttttatgtttttttttaagaaaccatttttacaagtactttttggttgaacaaacatttttaaaagctttgagtgagttcccacttcccacctatgtatttcacccaaaaaagaaagttcccacctatgtaggccagtaggccttatctttctttcaaaaaagattcaaattttacaaagtatgcatatttattccggtacaggtgcgattttgaaatccaatgtctccccggtgagaactctgacccatttcaggtcatctgccccgaccctgatgggatcttgggctactctctagctctttgtactgtgttagcggtggcggcgaagctacattggggctagtgttcaaagttcattcaaatttgcatctgtgagttctctttctctcttacttttcctctacaagttttggtgctcactcctaaaggttttgaactgttgcaactactaattcatttgcaattttatctgggttttgtaagatccatagaaaaaaattaaaagttagttgatgcaagaactagcttgattttttttctttatttgctttcctaggcacatcatcattatttgctttgtattggtttaattgttgccttccaattgtttgagttttgatcttatagaagtagtcattttagtgattttcatttttctttggcttgttggagtagtttctgttgataatttttaaggatctttataatggtaactaaatatttgattactgttataacagaatggaatcgctccctgatgcattggtacacactatattattgtcatacatgaataatgcccgagatgttgcaatttgtaactgtgtatctaagtgttggaaggatgttatgccttatattagtagg

SEQ ID NO: 99478 - DNA, 2439 bp, Cannabis sativa
  modified_base (283)..(306): a, c, t, g, unknown or other
ttatgccaagtcatataaatatgtatttagatatcttaagttgtgcaaccattaaaaacaattatcttcagtgacaatttttaagtaacaacaaaaaattacttatgacaaaaacatagtatttagatacaagtttttactaatttaattttagtcacaataagtattgtgatcaaaaatacatttagtcacaacaaattgtaatttttgtgaataatacttttagccacaggtattttaattacaacataaaaattattatttataattagtcacaattttnnnnnnnnnnnnnnnnnnnnnnnntgtgactaaaagtaaaaaaattttgtagtgaacatactgatgtaacgtatttgaaggtttccaatattattttatttaatcaaaatgagtgtaactcgatagtgaatgacaacaataatagtatgtcatctcttgtagtacttgacaccttaaggttaagtgtccctgtaattcttttataaaaaatttaaaattcgagtttctttcaaatacatatacaacaattaatataattttttagtcttcgaatattgtaaaaagacggaacccaaattaattttacattttgatcggtgacaaaattaattagattgttcgaacaattgttgatgattagaaaccttaagtgtataaaatgaagcttaaattaaattacattaaatctagacaaaaatagaaaaccaaagttcaatatgggcatcataaagtggccaaattcttaagggctcaaaaactaggcattacatgtcaaatgcacatggtttacttcactagatttcatcttgacgtagattagaaatattctaatgctgagtagagaagtacacttcctaagcatgcatcattaaaaattattatatatatatatatattgatataatcaattaataagagctgcaattattgatattttatctgcacaaacaagttcatgttcattacctaaaactaggaaaatataacaaagataaagaaaaatgaaatcaatcaaatctaactaacttcccaaagatcaagtcttttttatattgccatgatataaaaaaggcatcttttgcttataaaagctctggtttttaattggggaaagtgaataaattacatgtttattattctttatacatttatacatttacaccaaactttgcaggagaaaaagggggtttgcttcacattgtgtacaagtccaacacatgcccactttcttttgaagcttcattgatggtgctgtttttccacttcatatggtatggagtatggacaagaagaactagaaagatgtgcctcaacatgtgacaaaggaggtcccttgtgaatctgataatagaggagaggagccgaaaatgcaatgacaagccaaaagattcgaaaaaaagaagttcttgcattcaagcctacaacataaaattcaggcatttgcatctttcttcttgatatgataagaaaaatgttgtgacagccaaacaagttagtgtatagatatagataaagttgcaacaagttttgattttcatgaatattgctcgagtaatcggtgaaaatagagctttttaaatgtcattttgtaaaatggcattcatttgttagttcttgaaaaagtagctttccggacaaggatgtgtattggaaaagctaggctcaaaataaggtcatttagcaaagtgacattaaacacttcatttcgatcaaaacactaggctaagtttttaaaagaaatgtatgttcctaataaaagaaggagagatgaataaatggggaatgtcagcaaaaacacatctctgaaacccgttgaaagccgaagacattaaacaactaacttagtacaaaatcactagcacataaattgccaccgaaagtgacagaattttctttatagcaaaagtacaatagtttattacacatagcaaatgaaatacgtattttagtacctaccccctccttcttccacttgacacttttacagaattttatttatttactttttgatataaaaaggaaagctacaacaaagatagaagaataacctacccagataagcaagggtagctttgagtaattgatacagttcaaaatagtgtagtgttgtaagatattttctttttaatatgaaagattggcattaaaaagactaactacaaagctcactctcttgaattattttcaagttcccaattaaacacaaacatactttgtgaatctttatagtaacttcttatacaaattcaaccaatgtcatcattcatataaagtatgttgttttttccatctacacaaacaaacagtttgctcaatagtagagaactgttagtaaggacaaatctttccacatattctctgaaccttcgagcgattttatctatattttatttcttaattatgtttttcttccaattatgaaatgagataatactt

SEQ ID NO: 99479 - DNA, 1687 bp, Cannabis sativa
gggtggggttgttatggacaccggaaccgccgtgacaaggtttcccacggcggcttacgaggcttttcgcgacgcttttattgaacaaaccgggaacctgccacggtcgtctggggtatcgatatttgacacgtgttatgacttgtatgggttcgtttcggttcgggtacccaccatatcattttacttgtccagtgggcccatcttgaccttgccagctaggaattttttgatcccggtggatgactcgggcactttctgtttcgcatttgctccaacaccagctgaattatccattatagggaatattcagcaagagggtattcaaatttccttcgatggagctaatgggtttgtgggatttggtcccaatgtgtgttagagtaagtataactataactataaatatataaattttgttagttttagttaaattaaatcctcatatattattactattttttgttttagctagtttactatattcttaggtgtatttccttgaatatataataattaagggttctttcttgattgtaattatggattaaagtagttctttttcacttgatgagaaagtaatgtaaaagaaatattatgtaactattatgatatatcatgactttgagatggaaataaagcaaagtttaaagcttaaccaaagggaaggaggcatcgtgtaaaattttaaaagagtcaaaccttacctgagaaaattaagaacggtcaaaagaatcacaaaaaaggtgaagaaataataataataataaaagtaagtatttagaacaaccttttttttccagtaacacgaggatccaagagaacccttttatcactaagtagaaatattttccatgactctgtctgacaatacacatttgttcattgcccaataaacttctttattcttttgaaataaatttaaataaaaacaaaataatctcttttttttattacttcatatttatcctcaacaaggaagagaatatctctctctttatctactctagggggccactgtggggtttgaatcattagagaagggagccaccaccattgtagacatgtgaagccatcagtaatggtgtcttggtcttggcttggcatgacctaagttggagtgcgttcaagcaatgacttttaacaaaggcctgtttttgctttttgtttttccctcttttgatagattttgatatttagaagggttacaggttacttcccttttccattttgtataattgtttttcatggtgatgttttttaaacttacaacattaattatcttttgtaaatttttaatagattacaaatagtttactacattaaaaatgagtttaaatttttttaaattggcatcataaattaaaatattaaaactctatgtaaatattgtaattattatgaattttttaaaaaaattcatcttttatttcataaaactataacaaaaaacattttaaaaaatattataaaaaatatattatggtatgtattttcagataaagaagttgaaattagagattgacaataacattttcttgaaaagattatagtatattatttgataaaagagtactatttaattttctttattattttgagttcttcccttagtttactgctgtgttaagtcacagttagtctcaagggtttcaatttcattagcactttttctggcccacaaaag

SEQ ID NO: 99480 - DNA, 2531 bp, Cannabis sativa
tttccaaaattcctgtaataaacataaatctttgttaaaagtttagacagaaaaatcatacaatacaaaatttaaataaaatttaaatttttatttaattttttttcttttggtattataaaggtttttgttttagagaaatgatgggttctcttcttccatttcaagatcttaatcttcttcctgagagttcctccgccgtggcagccatggcagccaccactaccgccgccgccgccgtcacctctgctgctactgctactactactactccaaacatccctttgaaagttcctaaactcgaacctaagcacgaaccgtttgaagaaacgttacagaatccttaccaacaacaacaacaacaacaaaccttgcaatttcttcctcaactacgagaaagtactcaagaacaaccgttcttctcttctttacctaattcatctccatctttatctccaaatccagtatctgattctcttcagctaaccccttacgtaccttttactgaccaaacccttgttgcgttttcgcaaaactcgggtgacgagagcaatgtgtattcggagtttcatcggatttcggagctttttaaaactgctttttcttctaatggtgatggggatagtcaggtgtttgatcccgattcgcgagcgattgttccgtttgctgaagaaaacaaccaggttgaggtcgcacctattgttgtttcgaggaagagggttcctcctcggtctgctgagcttgtgagggttacgaatttgggaatcgaagatgagacttattttcgtaacgttgtgaggcgtacgaggatggtattcgattcgcttcgggttctttctacggcggaggaggtaaggaaacacggtgtggggaatgcgagacgattgcgtggtgatttgagggcttcttcgttgatgagagatcgagagttgtggcttaatcgagataagaggattgtgggttcaattcctggggtttatgttggtgatttgtttttctttcgtatggagctttgtgtggttgggttacatggtcaggtccaggccggaatcgattatgttccggctagtcagagctccaacggtgagccaattgcgacgagtgtcattgtctctggtgggtatgaagatgacgaggacgctggagatgtggtaatctatactggtcatggtggacaggacaagttcaataagcaatgcgctcatcagaagcttgaaggtggtaatcttgcacttgaaaggagtatgcattatgggattgaagtgagggttatcagaggaatcaaacacccaggtagtgttgctagcaaagtatatgtatatgatggtttgtatcgaattatggattgttggtttgatgtgggcaagtctggttttggggtttataagtataagcttgttagaattgatggtcaatctgaaatgggtagcaccattcttaggtatgcagcatctctaagagctaagcccttgacagtgaggccggctggctaccttagtttagatatctcggcgcaaaaggagagccttccagttttgctttttaatgatattgacactgatcaggaaccattgttttatgactatcttgtgagaactgtgtttccaccatttgcttatcatcaatctgggactggtactggatgtgaatgcaatgggggttgtactgatgattgcttgtgtgctatgaagaatggaggtgagcttgcttatgatcataatgggattctcttgagaggcaagcctttagttttcgaatgtgggccattctgtcgctgtcccccacagtgccggaatcgggttacacagaatgggatgaaaagtagactggaagtgtttaggtcaagggaaacaggttggggagtaaggtctttggacttgatacaggctggtgcgtttatatgtgagtatacaggggttattctcacgagggaacaagcccatattgtttcaatgaatggtgatagcttagtttatccgcatcggttttctgatagatgggcagaatggggagaattgtctcaaatatatgatgattatgtaaggccatcgtacccggcagtgccaccgttggattttgcaatagatgtatcaaagatgaggaatgttgcctgttatatgacccacagttcaactcctaatgtaatggtacagtttgtgctttatgaccacaataacttaatgtttccacatctgatgttgtttgcaatggaaaacatccctcctctgagggagctcagccttgactatggagtggctgaggaagtgtcaccgaagctttctatctgtaactgagtaaaattttagggcatggtgtatttttgaatgatgcagtgaagttatggagacatgactaacgaggtacacacaactttctatctcagcaatagttgaattactttgttacagtcaaatctgtgtgcacttttcaccttctcattgttgaaacttccttgatggtttgtcttttgtattctttgttgtagctaaacttaaatgtaagttttgtgttctgtgtaacattcttttatg

SEQ ID NO: 99481 - DNA, 3542 bp, Cannabis sativa
tttccaggaagtagatgaaccattacaacttgacatgtctgagttatgtttaagtgatgatcttagacagggaaatagtggtaagcctggttgtagttatcctgtgtaagtgctagtcaacctcctattttaagtttccaacgtctactctcaaaaatacatactggatttttttttttacaattattttttcataatggtgttcgttgtagttacgacattcttcttataatttttttcaaaaaaactccttataatttatagtatcaaaaacaagtttggaagtttttgaacatgtggtgaaccgaaatatcaaaatttttgttgtcgttactgttaactatttaaaaaaattaaaagatttacagaaaggttgttgtaattacgaaacactgtcatgaaaaaaaaaaatactccggcatatatttttagggactgaggttgagaattaaaataggaggttatatcactcctaaaatatttttatacatttgagtagagtcattaaatgaaggcgttcaagtgatgattatgtgcaaggaaaagtgattgactgtttattttgattggattcttcttcatttgctccccccattttatttgttttttttctccattgaagaagattccccagacgaaccctttagagtcaggtacgaggttactgaagctccaatcaatctgccttctcagaagcctcctgttgataaacctaacccgaaacaaggaatcggtaagtctttgctttttcttgtttatactactttcactaagctgattgtttgacccccatttaaggcgaatgattgttccaatatttttagtaagataatacatttgcaattaaggaatgttaacttcaattcattagttgaagttttcatttaatgctgcattagcgatgtgtacttgaataccagccattatctaagttccaaatggaggttcccatataacatataagtggttttggaaaacaggtagacttgaagaatgagattttatgttggttcctcagatctggatcttttgataccttcaatacaaattgtttctcataagctgagcaacaaatttctactctatgtacttttttgactcatgatttatcaaacactatgcttgttcaagttttatagtttcttttaaaatgctaaattcaaatggtatgcttaatacaaatgctatgatcatatggctcaacctatcaagttttatcacccaggtcttttgtcatggagccatgatagccaatatatatgtacccgcaatgatagcatgcctaccattctctggatatgggacatttgccaccttgaacttgctgccattttagttcagaaagatccaatccgagcagcagcttgggaccctacatgcactcgtcttgtcctttgcaccgggagttctcatctgtatatgtggactccaggaggcgcttactgtgtaagtattccgcttccacagtttaccattattgatctgaaatggaattcagatgggagttgtcttttcttaaaagataaggagacattttgctgtgctgcagtacctgtacttgcagaatctagtgattatagctcagatgattaatgcattgtttttccaaaaccttgtttgctaaccaatgtagaacatatttctttgtgtgtttctcttgtataattgcatcatcgagattacatattctaaatctcttaatgaagaacctctctgatttattatttaactataaactatatcagtatattgtttagtgtgcttttccattcctggttctgttacctttcagtaaatcactccatcaaaaagcccttttttttatacagtgaggaagtgatcggtttttggaaattcatgaaatttatcaatttgatttgaaaatgatcatgtttattgattttattaaattataagaatgacttattaaacgtcgacttagtttgtcaacaaattccatggatcaatgagcattgaaacttaaaagccatcgtttatttaaggttatgtttggtaggtttggtattaagtgtatatgtggaaaaatggagagtgaaataaatatgaaaattattattttattatttttaatataattatatcttatttttttaagagtagaaaatatatttgatatatattttttttgtctttttcttcaattctctcgtgttaggagggattaaaaattgtgtttggagggagaccctctcgtttccttctctcctttcctatttcccttttgctaaacataagaattcttcaattcctctatccctctccctccctccctccttctctcccctctaccaaacatggtgtaaatttctcttatagaagagaagaatggaggtgctcttagcaaaatggctcaatattgaggttttctttttgcatttttttttttttgtaaaatccgatttagcaaaatggcttcattttgagattttcattttgcttaatcttgtaccaaaattggaagtatgtagatagatgcattaccattttttcaacttggtgtaccaaaagtctaaaaactgaatcatttgggtaagcaacaagcatgatagaaataggtatggatagatcttaataagactagatgttaaattggattaataacgatataataccgcaaattatattgagcacatttttttaatatttgtttggtaaggtagggatgattatgaagccaagattagatagtaagaggtgctaacatcgaaaaatgcatacaacaagccttcacgatggagattttagtgactaaaactctttttgtagtagtgtatgttaatttatggacattatctacgtgtaatgtgtaatgagttgtgagtccatatattatttttttttttgctaacacctattgacatttattttttaacattcaaccaaagtagttagactgtagatttctagacttgtaatttaatagtaccaatacttgtaattgttcaaaataaaagaggatgaagaaattgtatatctactagtatcaatttaagaatacactaatttgtttattccactaatattaatagaaaatgtacaaacaagatacgtattttttcaaaacttattaatttttttgtttatttaattaagaaaaaatccagtataataattatatttattgtgattgaaaactgaacatattaagaatattcatacttaccacatattaaattgtaatcaatacactcagtgattgattttgtatgaacatagataattttggaattgctaatgatccaagttgtcagattgcataattttggaattgctaatgatccaagttgtttgatttgtgggactaacaaggaagatggaaaccatctctttttctattgtcattttagtaatgcttgtctttttcaaattaaggcttcattaggttggaaaacaaaggttaataatttgctcattgtggtgccttggatagccaaagggcatggtctctcttaactgtggagaagggtgttgctgactgctaatatttgcaggttcttgtcttcttcgagcaaccataaaat

SEQ ID NO: 99482 - DNA, 2697 bp, Cannabis sativa
ctccatgcaaatatgataaattacctaaggaatgagtaccacttggatgttgccaccggagccactattctgctattgtggggagccatgtccaactttacacccatcataggggcttttctttctgattctcatttgggtcgttttcgaatgattgctctaggaactatcactaccctattggtaagtatatattaaaccattcaaaaaagaatgaatggaatggaagttattattaattcgtttggattttatatttttctcagggaatgatagtactatggttaacagctataatcccaacagcaaggcctgctcactgtgacattggtaaaccaggacagagttgttccaaagcaaccggtcctcaacttgtgttgcttctttactcttttattcttatgagtgttggagctggtgggattagaccttgttctttggctttcggagctgaccaacttgacaagcctgaaaatcccaataataagaggatcttacaaagctttttcaactggtattacgcttcggttggaatctcagtgatggtttcagtaactgccatagtttatctacaagagaaatgtggctggattgtggggtttggagttcctgcagggctaatgctagtctcaacatttctatttttcataggctcttctctttatgtaagggtgggcgctaataagaacatgttttcaggttttactcatgtgattgcagcagcttggaagaacagacacttggttttgcctcaagatgacaaattccatggctggtatcatctcaaaggttccaaacttgtcagaccaacagataagctaaggtagaactagaagccaccacaatcaattttactaaaccataacaaaaatgctatctttgcataatatcactaatttaatcaaagtaaaaacactacccattattctcaggttcttgaacaaggcttgtatgattagaaacccagataaggagataaccccagatggtttagcaataaatccatggagtttatgcacagtaaagcaagttgaagaactgaaagccattctcaaagtcctcccaatttggtcaaccggcattttcgtcgcagtagcaatgaaccaacacgcactctacctaatccaagcaaagaccacagaacgacacctcaccacccatttcgagatcccagaaggctcattcgtcgtcttctcaatcctcactctgttcctctgggtcgccatctacgacagagcactaatcccactcctctccagcttcaccgaacgacatcgtcaaggcctcagcttcaaacaaaggatgggaattggggtcgccatctcctgcatcgccacggccacggccgccgccgtggagttgaaacgacgaagattgggcgtcgtttatggcgaaacaatgtcgtgggtttggcttgttccgcagtactgtttgactggtttggctgaagcgtttaatgccattggacagattgaattctactactctcagtttcccaagaacatgaccagctttgccgtgggattgttcgctctgggaatggggtttgggaatctgattgcggctttgattctacgaatagccaacgaagcaagtgggaaaggcgggaatgtgagttgggttgctaatgatccaaacaagggtcactacgattactacttttgggttttgactttcttgggtttggtcaatttggtctactttttggtgtgtagttgggcttatgggcgttgtgaggagaaaaatatttgggattttggagaaggggaggaagaagaaggacaatgtttggagcttgagttaggtttggatcaaaaattcaataaggtagaagaagaagaagaagatcatggtttgaccgaatctaataaagaatattcttcattaaatgtttccaatgttgatccatttgggcaaattgacactttgaaacataatggttaaacagtttattgtgttggtggtgatatactactcgggatgagtttattcatattcatatgcaaatcatatcaataattaaacaattaacacgttacattagtatgcatttatgcaaccccactacttaattggattatacatggaataaaattcggtttggaaatcgtttaggaaaaatattggtagggataggagacagctggtggagccagaaattaaatgttgggataagttgaaaaataccacttttattaatcaatatttaatcaaatttacttataattttatctttaattgaaacatacttcttattgtacctaaaataccctgacatagaagaatcacatgaaaagtatcttgaagtgacaaggacaaaattagtacaatgtttaaaaaaaaaaaaaaaggaaaaaatgatagactttaaaaaagaagataaaaataaaagatgacaatataaaaatgatataaaatgtaatttcctcttaaatattaaggggaatttggtatggaggtttcatttcattttatagaattaaaattgtaatttctataaaaaggtatattatttaagattgagatacaaaataactctaaatttagaaacaaaattagtaaaatgtctccttttaaaaaaaaatctatatatattaatctatatctatctatctatctatctatatatatatataaaggagagacatgaggcggtgatgtagcactctacatttattctaaatgctcatatctatt

SEQ ID NO: 99483 - DNA, 1069 bp, Cannabis sativa
tattatattacttgtatatagtataaaatatatataaaatgtacgtatctataacatatatttaatcaatttttaattttaatctttattaatatattttaattttcttttattataataaattctctaacacaagactgccaaaactcatattattgatggctgatatctcaaagttttctgcttaacattgcgaatatatatagtgaaacggtggaggtataaatgtatatatttgttgaccaaacatcacacgtactcaactaataactataaacactacatgtacattatatatgtataaatatatatacacataaggcactaataaattagtgtataacttgtatatattatagaagactcgggtgttatgtatatatctcaatcaagaacagtgattattttacagagacgagagacagcatatatttgatctagtgatggtgtatgtaataatgtgaaatacacttctacgtgtgatcctttctatgtctttaggtgcattatatatatgtttatatgcaaccccactgtgatatgatatctgcatatcactttttctaatttatgttgtagagttgtttgtctttatgtcttcaataatatatcataatcgataacaattgatttcggaatcactttattatatagggtcatgatcaagtggagggaacaaagtgcatgtatagaagccatacatgaaatattttcctgccactattaataaatagagaaccttatttctcctttttgtcggtcaagtaataaacttgtggtcattttccctactcacatttgcatggttctcaattcccgtcaattcgtacaattttattatatatcccatgtgcacatggtactatataggtgtgtgcagaaagtcatctaatccaatcccaaccgatccaatagaatcggatatccaatcataattggatcggatcgtattaaatttttaaaatccaattgtaaccgataggatgttggatgagacatccgatccaatggataaccgaaccgatccaatccaatatcattcaatgtccatccaatcatatttaatatt

SEQ ID NO: 99484 - DNA, 1486 bp, Cannabis sativa
agttcctggtaaaataacttccaacagtttcatcacagtatcaatttcgtactccttcactgcattactttccttctgtgatttcgtaacaccttcttctagtccagaatcaagtttctcatatatcaatcatcatcttcacctttcatagattgaagtctcctaattcatcaaacctttccagatcaaatcttccagaagatgaagccatgttcgagtcaagaatgagttctccttctcaaaattccaagctctaatactactgttgtaatttaacagcacagaacccaagccaaagaacattcaaaccaattaaaaccaattacaacaagattaacaatcaagcaatcaaaatcaaaaaataaaccagataaaaaaatgcaaaaatgtaaagaattgagacacaaaatctttatataggttcaaccaaactaaggacctacttcttgttattcccgatagttatcttctccattaaactgataaattataagtttgagttgttgagtgcatcctagaaaataattatggaaagaatccactaaaactctgctcgagtttcagctccaagaacactggacctggtccagttttcccaactctcttctctctgcttttctctttctgtatctctctcccactctatctcacgctctctcaattcaatatgaattgtttcttacgttacaagaatgactaaagcctttaaataggcaatggtgacacacttaaaaccaactaaatagaatgccacagtattttgactaattatatctgaaccaatattgtagcatttgactaacataacagttgttatttaaaactgttacaatctaattttatttctactgttaattaccaaataacaataccatgtattattttaatatgaacaatttttatatataaacatatagggattgtctactgtggggccgactctttctaccctacagtataaggattttttctccaccagttatcaagcatgattttgagtttcactttaatacaatgcatttcattgtaggaaattattttatttattttattatattaataaatttttgtttactattcttttaaagttcttttttaataaataaattgtttttttttttgaaacttaataaataaattgttagactaaacaagatgaaaaaaaaaatacaattcttaaatgtgtgcctgattgtataatattttctttttttcatgttttgtttttaattttaaacatttaaatataaaaaaaatatgttattaattttttttagaaattaaaaaagggattattttatacacccaaaaataacaaaaaaatttacatttttatggatctaaaattattttatattttacgaatttaagtttcttttttaaatactgagagttattttcacattattacaacaggaaaacaacgtgaaaataatatttctttctaaaaaaaaaacaaagaaaaatcttttaaaaaataaaattc

SEQ ID NO: 99485 - DNA, 1279 bp, Cannabis sativa
gatctgacttttaaccattcgaatgggatttacttcaagccttatgttattcaacgtttaaagcaacaacgaacagacactctcttcctcccccgacgagagactttagataagacttctcccgaatttcatgaatgaagcttagaaggaccagtagccgaatgactaaatttatcggtatgcagggttacaaatcaaaaagctcgctcgtccccaaatttttacaggaccgatcgtagcaagataaccttttcagacttgctaccgtgggaaagggcctgctacatgtgtatagttttttccttttaataaagctcattgggaaaaagagccatttgtatagtgctcattttgactattcaaaaggtcattttctcttcacataagtaaaatggatcttgtactggatataacatgcataccattgataaagcttggtttagaataatgaaagtttcttaagggaattacagcattttttcaagggccaaataaacaaggatttgaaaaacacccttttttcactttaagaaatggatgaaaaaatgaaccgatacacaattgaagagaatttcttttaatattctctaggtgcaattcatggataaatgcttatgccaaaactagaatttaacttaattctctggattgatcttatgccttagaaatttatttttttttttttaaaaaaaaagggttcaggaaagccaaaacaaacaactaaactttatcattaatctatgttctaatgattgttttctcctgcagaaaactaaagagcacataaatttgcagttcaagcaatcctcccaagaaaccacaaggaagcaaagcaaagtaaattcaccaatttgtataagatgtaataatacatcaatttatccacaattgaacatggaaaatttattctccaaaaaatccaacatctaagctcatagcaaggttcaagagccaaatgcaagaaagggtaaaatgattacaaacagtcagataagaaaatcataagagagaaacagctaacatttactcttcctgcaccacaacaccgatctcacccttctcgagcaagtcataaaaagtcctcacttttctctgctcattccagtgatgcattttccagaggctacctgcagccaaagcaagaaccgatccaatgcataactccttgacaacactcggtcctttcaggacagcatgagcaaccttgtgtccagccatttcggttaatctacagaagaaacaacagacaactttgattccactttcttcattaaataca

SEQ ID NO: 99486 - DNA, 2682 bp, Cannabis sativa
aaaaaaatgttaaatataatgcttaacaatgatattctttctattttctcttttttttttttttttaaaaaaaaaatttcattatcattttgttattaagtaaaaaaatttagtcatttaatatatattacgtaataatataatattattttaatagtctagatgtgcttattattggaacttactgaaaccttttagaataaataaatgttcaaaataatgtagaagtgaaaaaataaaaaaaaaataatttttttttttaagtaatgtaaaataaagcttttttcaagtaatgtaaaattttttcactctattacatttataattaatgagctataaaggtatatattcatagacgaattatgtgctctattttaattagtgaagatagacctacttggtcaggcaggacaggcgtgctttattggatccatcgccccaataaaagcaagtagggaaactttgtatatcaaaagcatccctaatattgttattttctgtactcaacaaaaatttaaaacagaaaagctatatagcatcttatttttatatatatatatatatttcttaggaaaaaagaatagtagtactgaaattcaccaaattaagtttcgtcgtctttgtttcttttaaaaaactttattaatagtctttcacttaattaattaataataatggacctaaaaaatgatagtattagaacatggattttttaagtgttcaactacaactgctacctgaaaagaaaagatgagtcgtcttaaaatatgatattcttttcctttttagaacaaagttgttgcacgatattcattaatcaattaattaattaagtcttcatcatttgactaacaactatagatcttatattatcttttcttattaaccatatcattattatcatttatcccttaatcatgacacaattaattattgttttccttttatctcatatgtatgacaaaaaaaacctagcaatagaatattattatatatatatatataatatacatgatacactactaatttatattattcattatgtatgtatatataataaaataaaggtgaataatggagaggatgatgatgatgagaaggcaaaagagctaaagagtagagggctgtgtctggttccagtgtctttcaccgaacacgttggaagtgataatggagctgattattgggctccggcggcttacggaagtgggttctgatcactgcattatatgcctaattaattaataaacctatctataccactaataatattattaattattaattaatagggcattatattgcttattattatattattattaattagtcatctcatattgttataacatcatgagcggtcactctgttgtaatttaaggttgagtgctcatgatgctatatgcatgcatttatatatatatttcttgatcaaatatcatatatatatatataattaatgtaagatcttaagtgcttatatatatagtattaattgatcgtatttttcttattaagtccaagcaagtcccgcttattaattaaatgatgtttcatgcctgcctttattttgattattcgattcttccatttttattttaattattttgaatggtgtatagtaaacgcgaagaaataaaatataatggacttatcttttagaatattgtgttagcattcttattatatgtagaaatctactatttttatagatgatgatatatatggtagctagggtgaaatattgtgtaattaattaacattttcagcatagtactataatatatagcacatattaaaataaaaataaaaaaaatctccgcactcatcatcatagtgatgctggcagagctaagttctatatagctttctcagtatgaccccattctttgtttcttaaccgtggtcccctacgctccccatataaatatttgtacataatatattatacacacattacacgagcacagggataatgcacacaaacgttatcgtgacgtttgtaattgcgtcataaataattttccatacataaataaaaaagagaattatataaataaaacaaggaaaatttaattaatatttatgcatttggataaaattagtatattaagtgtatcaatattaaacctaagaccctatcaactatcgcgcctccaattgaggatcaccaatcgaccaaagactacaaatccaacacttaggatctccgaaccacagttttctatttcattttattatattttgtgtaatttaaggttaaaatgtatagttttatttatagttttaatgatttaggaataaattgtataattaatgtctgttaatagtgaattgatataaagatttagggtaaaaaaacaatcagatctcaactttgggcaaaaacttgatttttttaccaggcccgatcgatggtagtttgacgatggcttgatgccttcttgttgtggaaatgagtaaaagttaaagacgaaagtctgatggtggcccgatgccagatatggtccgatggtagtctgatggtggtccgatggtagcccaatgccttcttgacgagtttaatgaatgaagcttaatatctcactacaaaaaatattacttttagtcacaacaaaattcgtgactaaaagtaaaaaattgtgactaattataaattacaatttttatgttgtgactaaa

SEQ ID NO: 99487 - DNA, 2505 bp, Cannabis sativa
gtttacccgcataaatttaagttgtgggagtttagtgaaaccaaaacgaaagtattggagattttgccgccatttatccaaatatatagccgtacaggcgtggtgactgttgaaattaatttgcccatggtttttttaagaaaaattaaaatttgagcatggtttaattagatgagtattaagggccaatcttataagttaatttgggtccaaagaaaatcaatgtcatttggggcctttattataaaataaataaaatttttaaaaatgattaaaaaaaatatatgtatttattataagttttttatttgtttgggttttgattgagagtgggtcttaggtgcgggtctaacctatcttaatttaggactaatcctgtgagtattattgctatttgaattagtttatagaaaaaatacgtgtggtgttttaattggttagtgaattttatattatttattaatttaaaatatgtaagattcgatattaaaatacacgcataacataacagtttgacatatattttggtttttctcatcttaaagtgtctcttaatacttctcttaattagctactcgtgatatagagagtattagctaaaataaaaacaattcctacttatatgaaagttgaattttggtgaagaaatacgaaaaaatgtaagaagtaaataaaattaaaaaacaataataataataataaaaaaaaactttgattttaaccaaaattttcataccaaatatataaaaaaaaaaatcttattctccacactttttcttgttccctacatttccaaacttttcacatttttctcacaatgtatcattttcaatataattattgtcgtttatcatatgtaatgtcgttttctcaatttatagttttttttgactaatatcgtttttcatgtttatgtcgtttcattcagtttatgtcgttgtttcaagtttcatgtcattttttctccaaaatatatatgtagtttttgctttgcaaacaacagccaaaagctaaattgcacagtagaagccaccaacaacccacaaaaaaagctaaattgatttgtaattatttgttcttttagaagtaagaatcatatatttcattgcatcaaaccacaattacaaattcatatacaaacgaaaaagctatccaacctttaagaagtataccctttgaaccccacccaattcctaaacgctattacaaatgaaatcaaaccaatctttatgttcaatttttattttcttaggcatgacaccaaaaattccctgttaaacctatttaacatcactaataataacgtatgttagaatttaagataagatgaatgagattttatctcaaaactaattaataatgagaggagtagaccgcttctcttatatattctattatctttccacacatttccacttatatattctattatctttccacacattagcaatgtaagactaattaacattccccctcaagatagtaagctattttatttgctgaccatcttggacaactcgatcataagcggttctattttgactcactatctctgatcacaagtgatttttttgctctattttttggatcggtattttttggtggctcttttttggctcactatccttgagcacaagtggttctttttgctcttctttttggatcggtattttttttgtggctctttttattttttggctcttttgttttactttttggatcggtattattttgtagcttaatttttttggattttcagtggctcttttttgttttttgctctacttctatcgatttattttttgttagggttggatagtaattagaaggttttttgtttgtttttgctctgataccatattagaatttagggataagatgaatgaatttctatctcaaaaccaattgatgatggaagagtagctcattcatcttatatattctattatcttctacacattaacaatgtaggactctctaacaatatatgagtaatctacacactttttgagacccaaaaatatttcttacactccacaaatgataaatcaatgaaaacttacttcttaaaacgactttttcttttggctttatgaacccattgaagaaaaccattaagtctatgagaatgagtatttcatccaagctatgttttcattctgttgagacagtttgcactatatgcacaattaaaaaataaataatgcacacactcatctctatcaccataaagcaaacactacatctttttaatactgtaattaaatttggattacaaagttttagtgcaaaatttctcatgggctgtcaactaaaaactaaatctatgttttaacatacccaatctgctccatgcttcattgctttcagaaactttattaggtagagaatagagaatataataacctccattgatattataatttggattacaaagttttagtgcaaaatttctcttttttttttttttgcaattattgcccaaacatatttacccacatctat

SEQ ID NO: 99488 - DNA, 2137 bp, Cannabis sativa
cccaatcaaattttttctaattctcaatatttttttttccatgtactcattcccttgccaaaatttaacccttctagacttttcaacatactctattatttacacttggactaccatatggctttcatacaccttccccgccccaccccaccccgagatagctttaaatatttatagttcaattatgaaaaagtctactatacttttcataggtttcaaaatttgaaatttcatgtttatttatatttatatataaatttttaaaatttagtgtaataatatttacaattaaaataaataatatattaaataacaatgtaaggaactacaataatattcttgaagagtacttattattaaagtatttttagaagtatcaaaaatgacgtgtaatagaaaaaataaaataaagagtactaccgtcaatctctatactcattaacatatgccgaaatatattttttaattttttttatagcggtgttcgttatactcacaatatcgtccctataaattttttaaaattttcaaatagtttataataccaaaaatagatttaaagttttttgaatacgcatggtaaactagaatatctgaaactttgttgtcaatactgtaaactattcaaatttttgtaaaaatttacatgaatgatgttataaaaaaattaaaaaattatttcggaaagtgatttcgagcgtgaaaattgactaagagattgtaataagaagttaatcaagagattgtaataggatactataattagcactcaaaaaaaatattttattcttaaataatgtaaattttttggcaatttcaaagaatattataattaaaaatgttttattgaagaaattaaatattaaatttcacataatttattataataatttttataagatattaactaataaaaatattactaggcactacccaatactcaaaaataatatggtttgcccattcatgttccatcttttctatccctatacttgtatgtagactagtactagtatactactaacaatattttaacgaaacaaattaagcatagggatattttgtgatatgtttatgagaggaaaatgaaaactgacaaaataagatccaacggctagggttgattattggatattggaaaagttaagtagaagcaatgtgtctcaatcccaatgagattgtattgggacccaaatagtcctcaaaataaaaaataaatatataaaaaaaaaaaaacacagctgaaaaatagccaattgattacaagcttaaataaattatttaataactataatttttttattaaaaaaaagtcaaaaaaaagaagagaaaataaagtgaaacaaagacagacagctttaaacgtaggcaaaacacagttgttgattgctgctgccgaagtggatttaagtgaatgctttaggctgagcggttgcagttgctggacactgctgctgctgcagcggcagtactgcatggcatgcactttccttatgtgtatttaattttggtttcgatattcatgttgaaatttttttataaataactttcttttttcaagattttaatttaaattatagatggaaaacaactttctttctttctaaaagaaaaaagggtagaagaaaggatctatgtaaagtcagttccattttatgagtcatttatattatcatgatatacatattgtaacacatagttattgttttgtacttaccttttgatggttcacgcataaagtccctgcaaaaagaaaatcaaagtatttattttagggaaaatggtcaaataagaaggactaagtaataagtatgacttatgatattgaacggtagcagaatatcactacttgcaatgataatcttataatgaaggcgatatggttttatgtaacaatatgatcgtattaatatatttttttttcttttgatcaacaatatacttaatatggttatttttcttttttaaagaaatagatatgattaattatgtagtcaaaacttctaaaaaaaaattatgtagtgaaaagaagacatttttttttttgactaatgatagggctaaatattaggtgggttgaccgcattcaggttcccaggttttaggttcaaagaattatagtcggacccaatccgtg

SEQ ID NO: 99489 - DNA, 4067 bp, Cannabis sativa
ccaattgaaattcgaaattcgaaaaaagcacttagatacaaatgaaccccccaattgaaaccaatttcatcagttttggattcaaaaaagttcataagtaaaaaaaacattaggttgaaaccaccaaaacttcgaacttttttcttaaaaagaatattttatgagaattgtgtttattaccacccctaaaacagccaactttgttggaattgaatataatatctttgtccaacatgttctagtgccgtcaaaaagcagggatatgtaagatatatgatgatgattctcagactgttcactggtttcaaaataaatggaaaatctcatttatcaattaaattatgttgagtcacgattcccagagtaagaaaatactaacctcaggagccatccaacggtaagttccagtttctgcagtcatcatctcagtcactgtttcttctcttgcaaggccaaaatctgcaagcttcacagacttctgatttgccgtaagcaacaaattatctgcataatcaaattttcaactctgtatttattgaaaagtacaataatttttgcaatttccatataagatataaatgatctgctaaaaatcaatttgaatataacttgagcaagaatgatgtataaaaaattagaaaaccgaagaaagcaatgtgtagcttatgaagatgtcgtttggtttttatatattatcctcttacacatgtgttgcttaacagttgaattatctaatcaagtgaaaagcacaaatctgaaccaaatattattctgccagatatttaaatttaatcagaaagaaatactattgttgtccttggtattaattgataagataagatattatcattagcagcaagttacagaaaacattacttaaagttaaaccatttgtacttcagaacaatttgaagaggaagaaaactacagcttgctgattccgacaagagtgtaggagtaactagtaaatcatctatatttaattaagctatcatacaaatgtaatatacattaacaatcagattatgaatatatagtcaaagctatcatacatctgttgcatacactaacaatcaaaacctatatttcattatctaggaatagcaggctcaacaatgaaatactacttaaactagcgctacagtaccaggttttagatccctatggataatcccattggcatgtagacattccattgctcgagctatgtccatagcaaactttatcgccacgtgaaggtctaatgtttggggccgaacaccaactaaatactttcgaagtgacatcccaggtaatagttcagtaactataaccattaaaggatctttacaagctccaataaactgcagaagatttagatacaaacataacagttaaaaaaaactaattaataagataaaacttccatatacttgtgaaactcactcaccttgaccaggttctcatgtttaactctagacatcatattaacttcacgggcaaaacgatcctcgagtgaagctttttcttcagaagtgctcccacgatgaagaactttaacagctacaattcggtcaccatacctagaaccaaattaaatgaatactttaaaataaatccaaccaaagatagaggctttgtctcattttttaagttcttgaacaattttaacagactaaaaattaactacaagtaactctatgtcgtccccttcctttttccctaataaaaatgccaacaggaaacaactaatggggccaattatgataagtattcaaatataaagaacaaaccatattcaaaatcattccaattagtacaaataaatcgcaggatttcaggtatttaatttgtactttgttagtaaataaattcacagccaaattgaactcatacaaaacgtacacatacatatacatacaactaaccttccttcatagactttcccatgagctccctcaccaatttttgacccgataaacagtaacttcgggtcaaccagcaaattctcatcgatcgtaaactgagcagcagtaatcgaaccgttctgcgatacagaattgggctctagctcaccagacctctgcaaagctaggttttcatgtctttttctatcgtcttctccggcggctcctactccgttcctatcgctgctgcaactcatgttgcaacaccctcaaatttcacccgagctccccattcagccctctctctctcttgatttctctccctatcttcctctctctttctctctccctctctctctctcaaatatttacaaaattgccatcatcatcttctccaatccgattactggtcaactttcacaaatcatttgattcaatttcaacaacagcttcctcaaactaccaaacaaattgtatctaattcctctcaacactgaaactgaaactaaaactttctcctcctccagattaaacatccagaaccacttcaacgacctttctcactaaaacaaactccgtttgaatttgaaacttatgtgaactttgcttcaactcgaagcctcgctttttgtgcattaaacttttaattcttaatacatatatatatatatatattcctgtcaaagaaaatcactccactccacgcaaagctaagcttctttttctggagaaaattttcccgtagaaaaagtaaaaacaatcacaatcttcttctgaatacacaaattttccaattctgttgtgtgaaaattacgaaagttttgaaaatggaaaaccctagagagtccaagagtcttcctcctgttttgtctttctctctctagaaatctctctttctctctctacccactgagctgagcttgacagaaactctccgatggaaaagggaagagagatattcggagtatctgttccgacgagggttttaaaaatgtgggaaggaacaaaaaggccaaacctaactaaccaataatatgctgacacgtgtataggacgcagaatatgtaaagcgaattttgaaagctctttggctccctcctcaagacttaaaaagcactcgaaagtagagactaatcttctatataatgggtccaaaaaaatataaattttaatctaatacaacactatatttatttactaataaatatttaaaattttaaaattaataaaaaagtaaagtacgagttcaattcatataaaaaaaaaaataaattgacccatttataaaaattgagttggcactaatccgagtatagcataaaaatatgagtttacgagttgtgttggacttagtttttaaaatattaacacagcttagcacgatccatattttttctacgtcggtatgatactatctatttattttattgccgaattttcataatatggattaagttagcacgatacgtacatagttatagttatgcttgaaagtagtgttataaatacatgtcaaattttttttatacgatacgaatttggaaggcaggagttcaaaagatgtgatacaaaatgatatgacacaaaaagaaaaatatgagttcaaacacaatacaaaatgacaaatccaaaaatctaacagatgtgaaaaaattctataatttgataataataattattataaatatttatttatcaagtaaattaacaaaaatattcgaatttaataatttaattattttttatataattatatgtacttattatataaaataaaaaataattaaaattatataaaaagaatacaaatattttagtaattagttcattaattaatataacaacataaaaacgtggatcataaattaaactcgtatgacaaaatagactggtatattcaaataagacgaataaagtacatcatgaatcttagtataacataaaaatattagacctacaagtcgtgttgagcttatttataaaattatttctaccatatgatatgacccatatttttatacccaatgcgattcatatttttacatgcttttcaagatatagactgactagtatagcacacacatatttaccactctaaagtcgaattagatcgggttctattgtgagggacggacacactaatagtagtataggggctaggggtgtttataaaatagccga

SEQ ID NO: 99490 - DNA, 3146 bp, Cannabis sativa
atatattagatatttttaataaaagaaatgttaaaaaatattgttggtgtttagcattctttcagagtgatacttttattggtgttttaatcattagagcgtcatcttttttttttcacatggagttttcaaaaagagtgatgttcctattgagttagaattttacgtattggctaatttggtaaaaaaaatatcaagtttaatataacttaagaaaatatcttcactaataatgaggcgtcacttatagaaagtgttaagccccattctctttgtatgactatatagcaatgtatgtgtaataatttaagttaattaatttaaatcattaatatatcatggccgatttatttgtagattataatttcacagttttattttttattttttgcgaaatgaatgctgttttaattattaattgtttgtatgactagcaatgtatgtgtaatttaagttaattaatttcaatcattaatatatcatggctgatttatttgtgtggattacaatttcacagttttattttatatttttgtgaaatgaaaattgtctaacagaagttttgtatggattttttattttttttttaaatgaacgaaaatatataatatatatacccgtcattatttatagcactcttttttctctgaccgtgttggcatcctcacacacaaaaaaagtaacttaacaaccacggcatttccagaacttaaaatggaacataatcattaattgaaaagaaagaaaaaagaaactgatgaataaaaaaatccataaacaatcattcatgataataaataccacgaatcataattgggcgcatacatggaacagctcatcaaacagattattattactcgtaaaccaaaacgatttacaatcaatcgaactagctacgtaagtacgtataaaaacgtacgtacgtaacgtactagacataaaaatcaatgcacataattaaaacaaacaaacaaaaattaaaaaaaatcaataagcttaattagccggacccaccaagaacagacttgagcttcttgatttgagcaaggtcgaggaaagttgtagcccccaccaaagaagatggcaaattattggcaaacaaagcaaaatcaaggatttgaagaccagggttagggctgttaaagctaacaaaagcattagcatgagttttaccagtattcaactgaaaatggagtaacccttgtgggaaaaccatgatatctcctttcctaagtgtcttcacgtaaaccgtgttggccgatgatgacacgaagccagccgtgatagcacctctcaacaccacaagtatctccgaagcagcagggtgagtgtggaacgggatgactcctttgggagccaagtcgagcctagccatggacaagccgagaccgttcagaccagggaactgagccacgaatgctggtgttactgcggcgctgataatgttggttgtgtttccggacattttgaggccatcgaacacgaaatcgtcgactgtgacatcagcggcgttcttgcatggaaagcctgctggggtgtctgaggctttcacgtcagccacgcaaaagtcctgagtcagagcgtttgaggtggagaataagatagaaactacaaggaagataatgtgaatcatcttcataatataactagatatgctatattaatgatgattctgatcagcttttgttggtatgagtaataagctaggtgtggtgtgtgtatatatataataattatatgcattatttgggcaacttgatgatgatgaggccattcgatcgatccacaatggaatgaaagatagccacaagtatataattagaaagatatagcaagagcatattattttggtgccccatgctagtttggatcctcgtgatcatttaagaggaagtttctaatcatgatcacgacatgcaaaggtcccaaaggacgatcattattacatatataatcaagcttattgcatgttttaattaaatgatcattgcccaactgtatgaggaaaacgaaagataaacatattatacggtgtgaaattatatatatatggtgtattaatgaataatacatcgaggatatggaaattgtggtccaatatggtcacatgggaagagatttgagacttatataagcagacaaagtgacagctaaaatcatagtgggaaccatttccttactttttttagtcactttcaaagtatttcgatggatttcgtatgtgtggactatagaggttcccttccggtaaggtttgataaaaatggaatattagagcgcatgccacgtacgtggtggcatatatatttatatatcgtatatattacatgtcataaaagaccttagctagcatattaaatatatacaattcagatttaacttgggaaatgttcatatgaattaataaatatatcacgatatagatatcgtcacgcacgtacaaacatatattatatggctttataattaatcgcattaatcgttacactgtttctagaataagacaggctgagagcgttaataataaaatgttactattgacacatttcaatatatgtctgtgagtttttgttttgaaatttataattaatatagtagataacttatagtaccttattaactatgagtctagctagctaaaaaatcaggggcattcgtactttcttctgagtgaagtttttctttgttataagataattataacttgactccattaattggaatatgtcctagtactgaaatatgccagtccatttgtgggttggttccctttcaaagctgcaccctaagattccagaaccaaagtagtcattaacttgtagccaaataatccctttactctcaaatggatcagtccactttttctgtggatcgagtttccctttaatatattagctgcaaagagtttatataattaatcaacatatgtaatcagaatgatatatatatatatatatataaatgatggtgagcttaattaaaatgattcaccatatcatctggtaatttttactcgttttttcatttctactaaattgtgtattatatatgctttttaacttgagcaacaaaaagaaagaaaaaaaacgtttaaaactcattgataaatattaattatcatgtatatatatcttttcaaattaata

SEQ ID NO: 99491 - DNA, 2747 bp, Cannabis sativa
tattaaggttgctacaagcatacatgaattggctgtgcttttcatccataactccccacatctcaataatctcttgtgttctttggtaaacaattcctgaggctcacagtttttgttgttcttttccttaaaaaaaagaggttgcacattctctttgacttcctgtatatatgtaggtacatataattttgtaaaatttgactcaaataaacttctaaaactttttttgtgataagatgaattatatgaaaaaaaaaaaaaagaaatattggaatatacttattttctatcttgtattatatattatatttgattaatgaaattcaacccatttgaccaaattactctcaaattatatgtgactaaataattattgaatataataaaaaagtttttattaatgaaatttttgttgaggtcgttactattttaaaatacatatactatgatatattttagtttgatatacgtacctcaaaccataataactcttgctgcatttgtagagcagctcctgagacagtgttgagtcgttccggagggggtaacttagcagctaaatgcaacacattatttccttgtttatctataaaagtagaaaaaagtgttttgattgagccaaactctcctactaagttgtagatattggcatgacgatacattacagcataatgaatcatggttcgattttggtcatcagtttcattgattaattcagggtaagagttgagaagagcagctaaaaactcgaagtttcctaatttggttgcatcgaaaagtagttgtgaaggatgtttgattagtttcattgcactttccttcccaagatccaaaacagaattccagagacaattgactagctcaagggctgtagattgcttcgtatttcttctaaatccaaacttgaaacctagaaaacattattaactaaacaacataagaaaaagagaaaatttaattaatcttattagttaagtttgtatctaataatttacatgcagatttgatgagtttactccacccttcagggcttttgttatcaaatgctgaaggtgtttgagccaaaagatgcaaagctgtcctttcatttatatctcgctttgtagccagcgaaagatccgattttaatatttcaagggctatatctgcaaaataaccaccaattgtttgtagtgttgactactttttctcactctctcttcttcgcattgatattatgtattattctatagaaaaacatgcaattaaattacaataattcataaacagaaaacatgagtagattatatttattagaatttgttttaggtaactcctataatagaggaattttgtttacagtacgtagagaaatgactttcccatttatgactttgtattttataattaattataatattgatatatttcactaatttttggaaaattcttaataattaattatggttttagaaataaagttcaaaataatataaatattatttatacataaaaaaacatccatgcaactaactgtgaaatttatttttgagattataaattatttattctgaaatttatgaggagaaataaaatgctactatattaaaaaacttgagttataagttctccatataccaaaagtaaaaacttataaaactaaaaagtaacgttaataaatagatactcaaagtctcaatacatatatataggtatataattctgccataaataaactatattatttgactgctaatttaactaataaaatgaaattatagttcaaacaatatatcattagtgtaaattatttaattattaatatatataatacttaccataaagacgagtgttgatgcaagcaaagaaaatgtgaattttgttatccttgtctaaacaacattttgtttcattgtacaaaaaccaggccatttcggaacgtccaaacaaggcagccatgaagagtggtgtcatacctttagcaccaacaatagttgccaaattttcgtttttcttatacataagatcagcaatagctttttcaccccacacagcgaagcagaaggctgtgttttgattatcgtcacggatttctaaatctttattatctgtgatcttggccagcaatttttccatgaagtggacatgttttgttcctgcagcgagatgcaacacagtttggcctccgtgtgtgatacttgttgttaaaaggcttggattttgtttgaggatgccttcagcactttcccagtcccctcttaatgcagctttataaagattcacaccatcaataaacaatttctttcgttcttctttgtctgcaattacaaatataaattaatatgcatatacgcacaagttgctctctgattggggcctttagaaaaagtgtcctttaatttttccttatttttgaattatttattcactagggcatagatccgccctaataattttttatatataaaaaaataatttattaattactaatgaaatttcaaacctaatatattttttcattttttatgaatagtataaaattatataaaatttgtataatttaatttatcttgtgattagcacaaatattaaggaaaattaaagtgcatcctacatgagttatttgtaataattaaaagtaattaaaaatataatttctttaaatgaattaaattaattgtaattaaaaatatattattttttttatttattttttaagataagttaaagtgaacgaaataatgatcaacaacaacaacaataataat

SEQ ID NO: 99492 - DNA, 1535 bp, Cannabis sativa
tatttcttcactttgtttttttttctaaatatatttctttcacttatcgctaataatactttaaaaatctatatataatgtagtttttattggagatcttaagaaaattaaaatattacaatataaacaaaaattaataaagaaattaaataaatgttataatatataatatatattatatatacactttagatagttaagaaaggtagaagaagatatatataaatatatgtatacactcactcacaactttaagtgtattactatgacttaaataatgtattacacctttgtccaaaagtttattttccctatctctaagcactaagggaactctcatggaaatagctttgagaattattaagccttttaggttttctaacaaagtgatttcttgatagaaaacttgatatcactcaaatgagcaccaaagacctctttttataaaaatatttaggtgatcacacttagaattcaaaatacgcaacactttatttcgactaattaagatttttactttctaaactttgatatgtatcgaattatatctcataaactttgatatatattaaattgcatcttctgaactttgacatgaacctaactatgtcccctgaacttccatctatgttaggattccattagtaaaaatgaacagaagtccttaaaatctaataatttcaataatttggaaattcatgctcaacagtaaaataataggttgctacttgattttcttcgaaaacaaactatattaaataagaatttattaatttgtttaataaagtaaaaattcaatcaatttaggtaaagatgctatcaatgtgagaaagtcccacattaatatatgtgtgagacattaatactatatgtacacaattaaaataagatctatataattcattctataaaagaaatcacttgataaaattgaaataaaccgcatgtaataaggatcacattatgtttaaaatagagaaaatgaagaggacaagcgatttatgactattcatgatatatgacttatagttgaattaaaatcttgtatgaaagtgtattaaatactgaacacaatttctaaaaaagaaaatagaaagagatatataataattttaacaaactctaattatcattatataacttttataactaagattgaaaaacaactcaattcaaccattatctctaacattctatcattcaatttaagaccaaaacagttgcttgattttttggtcaatacatataaagaaaacatatacaatgacaaacaaaacaaccacatattaatgtcaatttatcacaagctttatcattgaataatattgatttttatgtatcttttttgtttagaaaataatattattgtgcataaaattataaaactaaatattatgcaaatttatatgcttaatttaatgtacagaaaaaattacataaaatttgagttttttttcttaaaaaaaaaaacaagaaaaaaaattaacgagttgatcgggtcaattcgttaatccagccaacccgaagccatggac

SEQ ID NO: 99493 - DNA, 1592 bp, Cannabis sativa
gattttgtaggagaaaaaaattaaaaagcttaaaaaaaatgttattttaataattaaaggcatgttctattatgtgtttgataatttctaatttagtgggctatcaaaaagataattatattttccatatttatctgtaacaatcatccttacgtgtgatctaaacatttttcttcataaaatcaaaatcatattatacaataaatttatatatacatatatgtaagccttatcctaataagtaaatagttcatacaattaaagaaaagaacatgtgatttcttcccctatttaatgttgtcatttttgaatagtttaatgctgactttgactaaattcccattactatgttttatcatcaatgtggcttcattacatgtatgtattatatatgtacacacacatatagatatattcatcactgtgtggaatctcataaagggtctttgtttagcatttcagaaaacaaaaaacaaaaatgaatgctttagtagcaaccaataggaatttcaagctagctgcaaggcttctggggttagattcaaaacttgagaagagtttactcataccctttagagaaatcaaggtattaaactcaattaaagtctttgattttgaaaaattcaagatgggtttgattttttgttgatgtttttgtctttctcaggttgagtgtaccatacctaaagatgatggtactttggcctcatttgttggtttcagggtacaacatgacaatgccagaggccccatgaaaggaggaataagatatcatccagaggtaggtttgtttgtttgtttgttcctatgttgttgttgttgttgttttgttcttgagtaattttatgatataggttgacccagatgaagtcaatgctttagctcagctaatgacttggaaaacagcagtggctaatataccatatggtggtgctaaaggaggaataggatgtaatccaggggacttgagtttatctgaattggaaagacttaccagagttttcactcagaaaatacatgatctgatcggtattcacaccgatgttcctgccccggatatggggacaggtccacaggttcatcctcatcatcatcatcatcatcctagcattttctttttaaattggaatgacaaaatggggttttgaattttgttacttttttttagactatggcttggattttggatgagtactcaaaatttcatggacattctcctgctgttgtgactggaaaacctattgtaagtatattctgagtccaatgtgcctaaagaaaattattataactctctaacacttaattgttgttgttaggatcttggtggatctcttggaagagatgcagctactggaagaggagtactattcgcgacagaggctttgcttaacgagcatgggaaaagcatagccgggcagcgctttgttatacaggtattgtattaaactaaaattcaatggaagaacaaagcagtaaaattagaaaagtaaagaaaagagaacaaagaatttatccttgttcggatctcaatttgagtcttactccagctctccccaaagagttttctccttagttctgactcttaaaatgaa

SEQ ID NO: 99494 - DNA, 2250 bp, Cannabis sativa
  modified_base (2091)..(2115): a, c, t, g, unknown or other
gtcgaggttgtgcaacaggttgtcgcgtagtattgtctctagtgacatttgaaaccggaggaatgatcggaggattgagtggagcatcaggaatgttggaagagttgttcggcaatggagtttggccggagcttcctgaaccagtagctcgagttctcgccattgaagatggtgaaagaagtaattacagagagagaatcagagtgttgaatttgcctgataccatattagtgtaatcaaatctttattatgttgaataattatggaaataaagtatttatatagaggactgatacaagctggcaattagttagttctaactaactataacagtaatcctaactaacattaacaaaatgtgatgtggacatcctaatacaaagatgtatccattacaataaatttaaaagttcgggataagaaaattgcaattccccattcaaatttgcttattaaaccatatttagctagagaaatttaataaatcatgcttaaatgtgttgtatggtctattaatataccattttattaaacatcaaacaaaatgtgctacttattatttttagtaccaattatactcttcatgtaatgattgtcgtaattagatatgggattagtaagacacttaatactaattaattatattatgtgggatatgtgtattttattttttatagacttatttttatggaataggtgttatgattattatttctcaatttcagagattttattgaattctaggtgcgatatacatgatatgtatgaaattttatatttttatacacagtagtagtggaaatgggtcggacgccaatttaagtcacatggatacgattttgtatcaattaatttatggggaaatattattggatattttagaatatcagggtttagcggggtaatttaattagactattttatcctagggttatgaggtaacttagcgagaaagtaagggcattttagttttttggcccaaggattagtcacccattttgatgtgactcattctaagattaaaaaataaaattaaacaaaacctaagtcaaaggagattaaaaagttaaaaacctagattaccttcatcctccttcttctccttttcgtggccaccaaaaccagagaaatgccagagctctcctccatttttgaagcttccttctacatggaatttctcatagatcctgggtaaccgtagttttatttattggttattatagggttttcatggttttgggtggttattcttagtacgattggttaggggattccacgaaggttaggggatgttttctaaggttatttaagagtgtataaatctagtttggagtattttgggtggctgtagtggttgttatgcaagtttgagttcaaggaactcaaacttcaatcaatcatgacacaattgagtctattgagatttggcttgtgatttcttcttgaaatatgctcattatgttgtgtttaaaagttttggacaatttggaaagccttgggttagaattgagggtgaaaatcatgtttgtttcctgctgtaaaaatagttaagggatctaaaaattcggtctgccggttttagtatttttgtgaggattacaatttatattttggccttagcttttcatccgggtgttcgttttagacattgtatataccattttgaagcttgcgacaagctctacaatatggtatacattttagagccaaagtataagttttattttagggtgtttttactacgtagttcagtagaaaaccctagattctttttgggaatcaggaagtgttctggagcaaacacttattggttattttgtaaatgtgacttaagacctctgatcattagtagttatttccacttaggttgactggcacacttaaatcagtataaaggtaagactagtataacacatacatatgtacatgtttatattgcaacatatatgacatatcagttataatgatagctgttgtacacaagcatgcatctagatatcgtgattatatgtgtttggcaattcaagaagttagcgaagctcgaagaattaatcgtttcagttctacatacttatagaagctatagattcnnnnnnnnnnnnnnnnnnnnnnnnncaattgtactatcatgttcccatgatgtgagtattgggccgatcctttggtcagctttaacgaacaactccaataacataaataacacagttgagatcgaacataaccatatcaggattaagatctattgaccta

SEQ ID NO: 99495 - DNA, 1616 bp, Cannabis sativa
attaattatttaaatggtataatagaaatatgtaaagtaaaataaataaaatagaattttaatgaaatattttaagaggtgagagagaagctagtacttttaatagtacaaattataacaaaatctaagggagttgaaatagtacgtacggttataatttattttctgagacgaacaagtctaacatgcccatggttctcgtttaactaaagaattgagtcaaaataatattgggctttagttctttcaaatggaaaacaactcgttacacataattattaaacaaagtacactttttgcttctcagaaatatttatggtgagatgttcaaattcaattaactttgtttaaaatttgagcaagtccaaagtataatcgtacgaagtgacgaggaaggagaactttaaagggaaccaaattgtactgacatcttcgaagtgagataatatttttaaaaataaagaaaagtttgaaaagattgacataaagggagttcatatttagggattgcttgaagagatctattagtaccaaattagtgctatgataccaaaaatggagatttcttaaagaaaacaaaagatttccaaatctgcaacatataactttaaccatatttgaaagtaggaagactctctctatatatatatatctgatactgagagacaaatgataatactaaatagattgacaaaaacaagacaatggtttttggtttttagttttcttctgacacagattttgcgtcgccctaacaaaaccaaacacacagccaaagtcacgtagtagtacagagaaaagaaagaataaaaatatcatgaaaaggtaaggagagagagagaagtgaagatccgctagctaacctgaaactttgaagctttccgtagttcacgcctacgtttatctgcagtgcaaacccatcagtgagatgggatttgacatatgataatctgacaaactgtttctgtcatactacactactgcattacctagggttatcatcatcgtcatgttgaaattcatgatatgctcaaaatacaataatcatattttaatagtttttttttttcaaaaataaaatcttggtttgtaagagcaagcaccgctcaaagtagtcttaacattttctacaactctataacataatattttacttttcatttcaatcacattattattatttttttttttttgctatttattattaaaaaaaatgctccaattcttaactctaaaagttgtcagtagaattccacacattattgtttaatttatatttcattttgcttcaattaataatttttatttgacaaaaaagggtcaccgttgctccaatcaagttaggatacatgtccaaccaattttctccaatgtaatagctacagtgaaatgtagccaatcatccttttataacattgctctattaaagacaacctgttgaaagaataatatttctatttgtccaattaagtatcataccccatattttaaaaatttcaataacacacttataaaggattttttcgataaaacttttgccagtttcaacatttaagaaaactttttaatctaattttttttttcattattgctgcgtacattgtagctatttaaga

SEQ ID NO: 99496 - DNA, 2646 bp, Cannabis sativa
catgttcttatatatggctcaattctctaccatttattccatgtgggacattgtccacaataacgtgaaatttgaaattatttggtaccctgagtccaaatttagtaacaaaatttaataatatgactaatctgccttttatatgtaatttagttattaaactttaaagtttggtcatatttataaatttcattgattaaatttgggtacaaagtactcagtttgtaattgtgataaaacttaaaaatagagtattaagtcagtatcttgataaaacccaatgagcatttgcttgatctttagacattataccagtcattggccccaaagaatgctaagtcaaactatttgcaaaacttttgtttcatgatagaagtcattatttcatttttaataaataaaattttaatgttgaatacttgttgtttacaataaataattgcgattcgtaattaatgtaattcaatatcattcaattgtgttcgtgtaaatgttttcagaatttgccgcatggaatgttacccccttggaaagatccatccttattggaagtgtgaaactcacctgaagatcgtccaacacagttcttactcggttcaagctttaattaatgcagtagaagtaggctgtgattaacatatagctttttttagtgacaaaattatgctagtttcatataatagcatggtttagaacagattgatctaactttggctagtttcctcttgtcaatctcttttgggcaatatgaaaaagaaaattgtaaatttgtaattatgtggaggtaaaatcttatgtgggcggaatatatataatgtttacactgtttctgacaagaaaattttaactgcaagaaacacaggtttgcaaaatatgaagaaccttgaaacctttcccattcacatgtgcttcaacagtttcatcaaaattgcatttgggaaaggagccactactttgttcatcattgttaattttctttttacaaattggcttattgctatttatatttttttgtgttcatcttactcatttataacttttttagatcaattgacgtaaaattaataatgtaatcacttatttctgattttcaaaagataatttttgcaagaataaaaaacaaatgaaaaaaacaaactgaaaccttatattgggagtaagggcaatttgatgtgtaattgtggacgtgaaaattgtcaagccggtcgattgcctatttgatatcaaggatcttgctgtaaagggtattctttatttcaccatggagttagttgcatatattcctataccaaaatagcttcttttggtcatcacacagccagtgagtaacaaataaattttgttacctattacaaattacagaaagaatattggtggcaaaactactttaattatacgatttgtcacacttaaccacatagattgatttttttaaggtaaaatccttcaaaccttacttctattatttatttgcccattccatttacaaggctagtgtcatagtggactgtcttagtgtacccaagtatacatgtgtcaaattttaagtggtccacataattttaattatttaaatattataaaaaataatttaaaaatatgaaaaattaataaaatttaattttttttttctttttcttttttctgttcttctctttctttttttctttttcctgtaaccctaatccttctaagccccgagatccaaccctaatacccaacaccattcagtgacctcatcctgtgaaccccaattatagccaccgcctgcgactgcgagctccaaccaaaccatccctttagaattatcatcatgaatagattaaactaaagaaaacaactcacaaattttagtaaaaagtaatttttttttaaaaaaaaaaagaaaaaaaagagaaacaaaatatcatatggttatagtctatattaaacaatattttacgtaaaattagtcttaaaaattaaaccacattacatatgttgctaaaagaccacttcaatgggcaataggagagtctttcttatgactataatcatgttaacgttgctctcaagctcttccacgattaaaatttttaattttgttagagcacactattctttaaaataagtcactaaaatcttacttgttattttatctcatacttttacttaatatttcaccatacaccaatttctttatatttttatatagatcactaaaataatatatttttaatacataaaaatattatattatacattatatataattgtaaaaagttaataaactgtagtaataaaaaaaaaattagctgatgatgatggaagggttaaaataagttttgagctaaagattttaacttttaactattacacactgatgggagtgctcttactaatgggtttttaagaaacgtatcaactccgtaatgtttcaataattgcttctcttgccatgaaaaaggaccatcaggtccagatatggagaaattctcaccagccagcatataattatatccagttaacataagggataataaataaaatattaaataattatgtactatatttctttttaagtaaaaaaaaattaaaatagcagtggctatattaacaaattattatataagagacatgtgatttgttaacaaaaaaatatgaaat

SEQ ID NO: 99497 - DNA, 2309 bp, Cannabis sativa
taggagcgttgtttaaagatgttatagctttattgtctaaattttcggggacatgctcgctctaagaatttagcgggtcatagtttgacaaagcttgctctgcggttagacaatgaaccatcctggttcgaggaggttccagcgccggttacggatatctgcgtcgtaaatttatgattgattccaatcacttcgtcaaaaaaaaaagtctctcttttatataaataaatataaaatatttctatccaatatgataataattattgaattattactttcctagattattaatattattaattatttttttttttatttttaaaccacatactgatattttaacctttttttttttacttttttatgaattttttcaaaaaatattatattatttttcaaaaataatgtataaattttatactgtgtattgtgttaagctttcaaaattgttccagattattttttagttgttccactgttgttttaattgttctattttgtagttttacggttgttttataaaaaatcaatatttttgtaaaaaattctgtgtgacaataaaattgtaaatttttacttaaaatctaatatttttgttaaaaaatgatttttttttttgaaagaatccataacccaaaacaattaacagattgaaactaacagatgctatacataaacgttaataaaaagaaaaataaacagccatcaaattttcattgggggacagtgtgagggaatttgggacagagaatttttgttcttcttccatcacctaaattttaggtaaatgccagatataataattgtcaattccgacgacttttttgtgacgtaattccagtaattttttcgacatgctctccgggtgaattttttcggcaccgacaacactctaaaaaactatcagaattgacattgttgccagaaaaatcactaggaaaagcactaaaaaactagtttcttcatcaatgtcttttggatacatatattgctgttatgtacaaataattttctaaatacatccacaggggcgaaagaagaacaaacaacaaaatggggagagaaagcttttataaagtctcagatgcaaataagtttgatttgattttatgtttatttttgttgaaatgcaattggatacctccttgttgatcacagtggctgcctcgttacccaacacccaaaaaaacagaaaacaaaaacaagcttgtcccaatttgataagctacaaagcagactcttcagaggataaaggttgtaaagcacggattcgaatatcatactttctccgttttgaaacttcatgaccatggcctgaagatgaaccagtaacatctgaagcaccagattgagaagatgtataatcatcatatgctactccaatatatttattgcatttgcgacaatgaagcttgattcttcggcggaacaaaccccacgaattcttggagaaatgaggtacgcactgaatctcgtcaacctgagagaatctgctatcgtcaacggataggaacgatatgatcccccgctttatagacttcccatattttgaaccaactgttgagatgttccggttggaggagcttaggtttaggccataaccacatgaaccgcaactgtgggaagataaaaacaagaaatattttagtatacttaattcatatgtcgatccaaaaaccaaaatataacaaattgcatgaaaaacataattaattgtttgaaaactgtcagaaacctcatcactctttattggaagagtagaattggattttggttgaactttcacatttgtaactcagtctaccatgttattagaacaaggtgttacaagtacacgaagtaagacatttaacactgtattggttaaacaatgctatacaaaatctcaaggaaagttcaaaagaaaatcctttaaaagaatcataagaacctagaaaaattctttattttccaacccttttccataatgacaaaacatagcacaaaccgatcatttaatgttgtgggaatcaaattcatcattaatcatcaatgagctttcccaacaatccagctgtatatggaatttaaccacaacaatgaaatgaagagcacttcatctaacaaaagctgaaaggtacccagaaaagaataaagaaaaagacaaccagcaaacctacaattatagagtaagcagaggcctattattgtccctcttttttttttttttttttgataaacgataccattgagcacttgattcaaagtggctgtaaaaggattttaaaaaagagaaatactgcaatagtatttgataatacaaagccaac

SEQ ID NO: 99498 - DNA, 2051 bp, Cannabis sativa
  modified_base (1884)..(1886): a, c, t, g, unknown or other
tagcaaaacgggtcagatatgataacacgattcgaaatttgtacgaaaattagtgagtttggatttgccttaacgagttcgagtcgtatttagattgactggtctaacccgtttaataaacgggctgtgtttggggttgatacagctaactcgaaactgactcgttaatgacctatttaaaattattttagtgctttgatgggtcataaacgttattggttgacatgtttaaacaaaatatatttataaacgagttacacggatcgtatcgtattaacatgtttataacgggtcatgttcgaattttattttctaacacgattattaaacagaccgtattcgaatcaagtatatacttgttatacatggatctcgacacaacatgaattgtcacccctacaagctcaccaaaagtatccacaaaagaatagatgtggaatgtcattataaaaaaacgataaaaacaacgctattaccatggtccgtcctaacatatttagcacctgagacgacgaaattaaattttaagactctatacaaatagtttaattttgataaattgttccaatattaaattctctataaacacacttttaatatttctaaaagtgtaaagattggaaattgaatcattaacctctcttaatacaaaatgatattttatcactatactaaagattattttactaaaaaattttgtgctccctcacctcaaacccaactctgaccactactagcttagaggattaaaaccacctctaaagacaaatacacgtacataaattacatatacaaattactttgatgacactcgagtccctcacttcttttacgaagaagaggtggacacaccacaccgccacacccgtcaagtgttgtgtgtaccataagagatgaaaggtaaattgcgaattaatggaatggttgtgtgggcgttgtcaagtttagattatgtgagatatagaccgttcttcttcttactttacaaatcacctcaaactttagctacgacaatgttattatcattgagtgttgcaagacaaaatttttctatccaactcagttccagtgcaaaagctaattctatggttgtatatattgccttttttagtattgaaatctacttaagtagctaagttgctcatactaattctaaataggtgtttagttcccaaacaaagtaaggtattggaagtggatactatgtggtgatcacagtttatatttgatattgttattttttaaaacataaataaataaatcaataaaaaattcataagtgtatccaataactcagttgtttttttttttttaacaaatttaaagtttcattagaaaaaaataagtacaaagctaacaagttttacaaagaaagtaaagatccattctaaattaactttttatccagtactagacctaacttagctagattatgagctgtaatattcaagtccctgctaacataagcaatctcaagtttaagactaaaggataaaacactgagaagcaaatcatcaagaatattattatttcaattacaacaattaagcttatctactaaaattttacaatcaattctaacaacattaacatgcaacttaaccatctgaatccaattcaccacaagaaggactgccttcactttagcaatagcaagatgaacaatactaatgaaggttctaacaacgcctgcaataatctgattggaatcattaagcaccactatacccagactatatttcttccttttggaatcgatggccgcatctgtgaaaacctgaaaacatcctgctgaacaatccaatcaacatagagtcatgatacaaagtctcgttttccagtttcaaaatggaaactataacctagtctatccaaaatagatannnagatcaaattcctcctaatagagggtaaataagtaacatcacgcaactcaaaaaatgccagtattcagttgtaaattaacagtcccaaaaagttcaactctgactttagtatcatctcccatgtacacatactcctccaacctactcggtcttcttcgacttgtc

SEQ ID NO: 99499 - DNA, 1799 bp, Cannabis sativa
taaatttatttatttaaaaaatatataatttttatttttaaatatatataataatattataaaactaaaaataatattcagttaattaatagcatattctgttaaaatgaatgtaaaaatttaaaaaagtatcgttaaattgaaaattatgttagattagctacactttacatagaataaatagatatggtaattttattatttcgttgtttagcataaatattactaaagagtatgttaatttactaattaaactaacttctttgtgctgaaaatctataattattttgaccgtcgtaagtgttgtaaaatatatatgtacactcgtcattaatattcatgctgtgaaatcattcatcttattcatagatgacatacaaaaaataaaaattagaaaaaaaaaacaatttaattaggtgttggcttcttatatagctagcacatgcatgtccataagtatggactctagagacttgtacaaatatatgtaatatatatatttatatataattatatgggtttgaatctcacgtgcacaaaactacaaagttaaaggaggcattttctcagtgatgacataagataagaaaccctaagaagctgaccaagaccagtcaaaggaacaaattataaataaataaaaatatcatggagacaaatattcctgcaagtggataatattatttgctcatttgttttgttcttttataatacaactttcatgtctagctttatttccatcttatatattatatattctctgctccacaatttttcttttcagaggaattaatactactcttctggttcataagtataattttacacaactcataatcaatataaggacatttagtactaatgattatacaaaaacttgctagaaatatatatgttataaaaaaaataatattttcttttttatggatgcatatatatatatatatatttgtgctgatctctagcttagttaattgtaattattaattactctcttattaagaggtattaagtagtggttgaattagaatcaaatttgtagtgtttatcaacagcaattaaaacatcccaagtgcaactaagtcccttaggaatgataacaagatctcctgctccaaactctacaaaatcattattatctgttgatattgatgagccttttggatacaccttaacctttcctttcaccaaataacatgtctctagggcatcaaatttcagtgtatacttccccggtggacatccccatctacatatatataattttaattataaatattacgatataatatttaattcattataaaacatatatatttttatatatatatactcacttgggccatgagttgatacccagttctgataagcgggaaggagggatattgctttcaactatgatctttaggtcatcattagaagatggagtaatgatatcagattgtgatgatgtggaagctgcagccatggaattaataagaagataaaaataaaaagattgaaaatgaagggttgttatgagtagaagaagagagagaaagaagaagaagaagaagaagaagaaagagattgaaagagactgagtagtagagagagagggaggattgaggaaatgagagttataaggagtagttggcctactctacctatatataatgaacttaaatttagttggggggacccctagagaagagagaaggaatctttccatgacaagccaaaatatatttaattatgacgagaagagcaacaacaacaaaatatatcatatatatagaagaataaaaaaaggatctttt

SEQ ID NO: 99500 - DNA, 2026 bp, Cannabis sativa
aacaacaacaacaacatggctgccggaaccttcttctccgcaagaccgacgaccctcaacaataatatgattcctcctcctcctattcctactactactactgctgctagtactattaataccaacatttcatcatcagctccactgtcgtttgatcataacgaccaccattttggcggcggaggaggcggaggagagttttacttatcagccactgccttgttgcagaaggcagcccaaatgggagcaaccacggtaagctccgctagctcggccatggctccctccatctatgctactactaatttggatcatgaccaattattcatcgataataataacaatagtaataataacaagaataatgtaggcctttttagtggactactttgtggtgttgatggtggtggtggtggtgatagtattagtagtagtacatttctgaaagagatggagctgagtatgaaaaacgacaatactaagaatgccgttttgcatggtggtgggaataataatacttctagtagtagtttgactaatactactactactggtggtggagatgtgatgactgttgactttttggggattggatcaagatcagctagcagcaggcaaggaaactttattcaccatagtatgcagactactctgactcagcttcagcaacatgcagcgttgatggaaaagcatgcttgggaggtttaagaggcagaatcttcgtgatgctggaataatatgttgcttttatttaattttttttttttcgaattttgtatcgatgtttattgttattatagttcaattggtccctttcagttttagatttcaaaattttcagttactataagagttaaattagttccgctctataaacaacacgtcgtcgtttaagtagagtgtgtgtcgttgtcggcgagttaaacgcggtcgtttagtggatgtttgatgtgatttggtacatggaaaaacgtgaaccaccaacaacagataagcattatcactatgagttaggaaaagagagctcgagtactctactttttcatgattaataataaacccaacgcaaaagtaatgaaagaaataaaaaataaaaatgaagtgacttatcaccattctcctttacagaatctcttgccattataagatacccattacacatgcaattattaatgtaaatacaaaaaatatatgcttattattattaagtgaaaaaaattctttttagctggaaaacatattattagagaataatagtactacaagcatgctttcttatgattttgtatgagaaccatgtaatgccaatatttagccagaaaaagcttacaaattgttattatgggatgtgattctcatatagttatcaaaattgttattggattaaatttaaggtaaaaaattgataattatgtagttcattgtaggcgtcttaaaaaaaattgaggtgtaatttttagaagattactaaattttttaattttgttattcataatttggctaaatagatttttaaattaaaatgtaacttgtaagattgaagcttcctaataccaaataatattgtttgtaatagttaagaggcctaatttattacatctatataattatgtttcttttagaaaataaaatgtcaatgtgtcaatagttttattttaacccttcgtcgtaaaactaaattacaattaattaacaaaacgacttgttttcatggaattacttcaacttaacaaaagttaatagtaatacattgtaatcattataagttatgttttgtagtgaccagatagcctaattttttttttttttttttgagagttcacaattcaattttacttttgggatcctaatccttataataatgtatattgaactgagtcagcatataaagtctcctctaatataataacagcatataatgcgaaatctaacccttcaaataaataaataaagagaacttttaattccagcaaaaaaaaaaaaagaaagaggataatgtgcctatgaatgaacgacataaaggcag

SEQ ID NO: 99501 - DNA, 1132 bp, Cannabis sativa
gtaaccactcgacctttgttactaaatttgtactgaaaaaattatagttcactaaaagagtaaaaagataacaaacttattgtataacctggattatttttaccaaaaatcctgacaagagcaacttccattcttaaaatggtgaaatctatttgtatccctcacaatgatctccctccttacaaaacttgatgtgaacttcataaatgaatggcaatctccacagatcctaagattcttcataattcgaataggtgcactgggaggcaaacacattagtccaaaagtgacagcaagcttctcactgtggtgcctcaaaagctcatgttttgtactctcttcaactttgtgaagctcatcttcaccctttgctaggtaacccaatttcttcaattcttcaaccaaatcgtctaacttcgagtaaatatcagcaattctaggatggtttctttctccaaccatgaatgagtgaaccgtgttcttaacttcgatccaacttttacctctctccttcttcacctcactttccttaagattctttcttgttcttgcaacatcctcccacttattgtttgctgcataaatgttagaaagcagaatgtgatttcctgcattatcaggctccatttcaaataaatggtcagcagctacctccgctagctgaagattgccatggatcctgcaagaagccaagagtgatccccacatggaagcagtagcagagaatggcatgttctcaatcaagttatgagcatcaacaatcaaccctgttcggccaagaatatcaaccatggttgaatagtgcacaacatttggtgaaacattgtgttcttttctcataagttcaaaatactttcttccattttcaaccaatcccatatgactacaagcagataacacagaaatataagtcacttcatttgggaacataccactctgttgcattttctcaaataatatcatcacctcaagagaacaagcatgtctagcaaaccctgaaatcattgcattccacaagacaatatttctttcttctgtacattgaaacacagtgtatgcttcttcaatgctaccacattttgcgtacatgtctataagcgacgaagcaataaatatatttgatccgaatccc

SEQ ID NO: 99502 - DNA, 1213 bp, Cannabis sativa
tggacaatgataatgcattgtagttacctgcaaacccaaggccttcaaatgatgctcattctggagttcacgcatccgaccactcacagccaaaagagctttagatggcacacatcccctgtttacacaagttccgcccacaacatctccctctacgatggcagttttgagaccctgcaattgttatattacgaattaactcagttaacactaaaagaccaataatataatttgaacagcagcagacctaagaatatcaattcaacccaaccgaataaccctcttaagggaaaaattatataaagctgtttaatttaatcaaagcaaatgactttacagtatttgccatcgtcatcgtaataggatgtcataacaaagaagtatactgaagccaaatcaaatttctaacccataagaccacgatctgagctaaattatctagttcactgtgaattaacatcaaaaccacatttgccaaacaaactgaatcaaaacgagggagagagatagagagagagcatatgtcataccttctcaacggcatgaagcgcggcaccatggccaccgacgccagctccaataatgagcaagtcgtaatcgaatgacttggaagcccttccattatcagacgaagaagccgcggctacaactaagttcccggagcgcggcgcacgtgtggtggagattcgaagtgtgtgggaggcggattgtttgagagaagagaatccaaacacctccctcctgagaccacagaatcggaggttaataataggcttggagggaaccaaaccggaggagtgagagaagtgagttgatccagcaatggctggagctgtggaaagagaaagcgaatactgcattttggagagatctacggagagagagagagttgttatggaaatgaaggaagaaacaatgcaattggaattggaaatggaaatggcttcgaataatccgttatatgagaaagaaagagaaagagagagttgagttgagttagctgtagttacaaaattgggcggagttatcaaagaccagctgataaaccactccccttattttctatgacaattattattgttattgttacttctcacttgtcacttgttgttgttgtcccactttgaatttttttttttcctttttttttttcacacaaaagtttcatgaattttaattataaaaaaaattgcaccataaatactattttttt

SEQ ID NO: 99503 - DNA, 2681 bp, Cannabis sativa
  modified_base (31)..(43): a, c, t, g, unknown or other
aactagcaatacgtggctcggcacgtacatnnnnnnnnnnnnnatatatatatatatgtgtgtttatcaataacgtatactagtccaaacaaaaaaaaaatatgggaatcgcaaagcaatattaattatatataaaaatattaatattcttgatattttcaaagacattaatcataattaatataggtggaatggatggcttgaattgtaaaagagctcaaaagttgcattggaaatgtgtatgtttaagcaacgcaatcgtctaattataattaagctgcagtatagcataattaatctttttcaattcccattgataagtatttttatttctattttggaaaggcaaaagatacaaattatctttatatattatgactaaccacatgaccaggcatgcaaacaaagataattaatgtagcggttgagcaatatatgatgtaataaagtagccatatatattaagaaaattaaaaaaaaaaaaaacattataaaaacactcaagtaaaaagagaaacaatgataccataatttaaaagaaaaaagtacaactccaagaaaatagattaaaaacccaaacaaacaacttcccaaagacacatatctgaaatgtcatttcattactgctgatcaaaaaggaattggcatttctttctcagagtggtgaaaaggtagtccaacaaccttcaaagaagagaaattgtcaaacattttgtgacaatctttggtcagaaaggtcctacaatcaaaaatattcaaatattgaagttgagtgcaattgttgattattttgagcacaccttcattagtaacaaacatattaaaagaaatttcaaggtgctttagctttggcattgtggaagctatggcaaaagcctcttcatcactagtgacttcatcagttataatgaagttcctatccaatctttgtagattcttgcagttaataccaaatgccctaatacctgaggctcctattcctttgcaaatacttatatccaaatgaatcaaggatgggagtttttcagctacactttcaaatagtgtatttggttgatttgataaatcagttgatggcatcttcaatgtcctaagtgattgaccactacaaaaataacaaaataaattattataaataaaaaaaaggaataattgaaaagaaaatgtatagatatatttatagactaggtaaataaaaattttatttttagactcaaattaattaaaattaattataataatggagcaattaaaataaatgtaattaccatattacataatataacaattgaaatctcctcattatatatatattttttgaaagtttgctataatttttaaatgtcaatataaataacttttaatagtaaatatacatatacatatatatatatatatatattatttagaaagtttagaaattaaaaatatatagctcaaattctaacttctaaaaaattatttcattgtatgtataatataagagggcattcattagtaataaaagtaaaaaaacaaagaatatttgaatgaaaatataaccatatatttataagattatatatctaaatatagatagttatacttacaagtgtgcaacaagaagtaaggtgttggagttaagtaaaccacgagcagaaaatgagtgaagtttccctaaagatcttgtaatcaacaatttaagtaacttgaagaactgagaagaccgcctcttaataaagattttgaagtcttgatattcaaagtttggattagtataatcatatttatcaggaaacaagtcattgaatttgtcaaaatctaagtgatgccaacaatcagtgcctttaacaactttgctccatggcttacaaacaagggcaaatgttgggctaagtttgtcttttaatggtaactaatttgtgaagatcaatacaagtgcttctggtatcagctcagcccatgaagggtaatcatattcatcatcttccatcatatatatcactgagacaaaacatattattataacaaattaagttaatataattgatttaaatatatgaatatatatatatatatgtaatagacattcacatatacatacctaaaaaatgaacaaagagaagaataatggtaatatgtatatgtatgtagccctattatttatagtatactacttataacttcaaacaaaggaacctttataagagtcgcaaagcatttatatatataatcttcttggtaatttgataaagatttttttatttttttgaaaggagatattgatcttaatttcaattacaaaatttaacgtttaattattggctggctattaattagattaaaaataatcttggaaatgataattaaaaatgcatatatattattttatgtgcatgcatgcctagtataataaatattatttcgatgagatgatattaatttttgacggttgcgaaactcgaagaagaaagattaaacgacatgatcgatatcataaactataaaagcatatcatattatgttatattatattttgttaatattaattaaacgtaagattaataatgcaaccgtctaaatatatttaaaagttgcatgcatgcagctaccatcatatattatcatattttttttttcaattccaatactaatcaatctgttttagtctttaattattgtgactagatttttatattaat

SEQ ID NO: 99504 - DNA, 1803 bp, Cannabis sativa
  modified_base (1728)..(1732): a, c, t, g, unknown or other
tttatatgtgtttatttcatatctttttagaagttcatatttaggatgttaaacaaaatacttgttagtaaatctaagatcctggtaaaatattttcaacaggaagatcatgaatgctagataaagagatccttgtacggattgaaacaatcaccaaggcaatggtacaagaagtttgatgagattgtattcagaaatggtttcaagaggagctcttatgacagttgtgtttatgtcaaaaacaacaaagctactgtttatctcttattgtatgctgatgacatgcttattgcatgcaaagacatacaagagataaacaaaataaaagttatgctgaacaaggaatttgaaatgaaagaccttggttaagcataaaggctttcagacattgatatcattagagacagatccaagagaattcttaaactgtctcaaaatggttacatatctaaaatcattgacagatttggtttcaatcaagctaaacctgtcaaaaatccctgcccaccactgttcaaattgtccaaatcacaggcccctatagatgatgaagatgcaaattacatgaacagggtgccgtactctagtgtggtggggagtctcatgtatctcatgatttgcaccatacctaatatcagttatggtgtcagcatggtgagcaagtttatgggacaacttggcaaggagcactgaaatgtagtaaaatggatcatgaggtatctacaaggcacaaaacaacttggactggtctatgggataaattcagaaacagtcaacatagcagggtttgtggattctgactatgcaggtgaccttgaaaatagaagatcacaattagggtatgtattttagtcaagtggatgctcaatttgctggaaatcgaatctataatccattcttgccctgtctacaacagaagcagagtacattgcatgtattgaagcagtgaaagaagccttgtggcttaagggcatctccatggaatttggcttagaccagagatgcataattgtacaatgtgacagtcaaagtgctttgcacttgagcaagaaccaagtattccatgagagaacaaaacatatagatgtgaggcttcattttcagagatgttttaattggaggaaaggtgaaactggagaaggtgtccactgagaacattgtagtagagattttaactaaagccctacctacatccaagttctaccattgtttaaagctactgaatgtaatggatgtttagcaatcaaattgcaatactgctgttatgtttatatgtgtatattacttgtcaaggtggagaattgttagatttggtgtgactatgtaatatgccacataagcaactattttaactaactaatcaagttagttaaaaccaatacacatttcgatttagttagttgtaacacgtgtagattaagtctataaatagcaatgtacttgtatatgaaaggttaaaccttttacttgtaaattcagattcatatcaataaagaaagtgttattacatttctgtctaagttcttaagtgtggttctttggctttcctgttggtttcggttaggtgctttagtggagtgttcttgaatgtgtattgaactcccatggtgtgtgagattgagtcttgaatctccaacataaactatcatagttttatttttcctctccaaacttattagtcatagcctcattcttcttcatggttgctctgttgggttttatgccctnnnnnaaactccatttcaatgtaatccaatttattcaatatcaataaaaaaaaacaacagaagtatttttcattca

SEQ ID NO: 99505 - DNA, 1385 bp, Cannabis sativa
acgaacgtattggaggctttctctgttgcctcttgatgatacttctctgtattttttgtactaaattgaccagggacactgattgcatgtaccaaatacagtctactaaacaccattcccttatactccctccatttgtgtgtgaaacaattgacatttcaacattgtcttcatcactctctggggcttgaactgttataaaatgtcgtcttaaagggagacaactcttgtagctcaatgtatttacctttgaagaaccttttctacacgagtactttggagccaagatggcttttatcatgccaatttcttctgatgttgaagccaactttcctctctgcaagtctcatattagttatataaatatttcttttaggctctccatctaatcctacaataaatcgcaattagaaagttatagtagcggatatgtaagtatctaagagggacttgaaattaagatctcatgggagtaaattatatgtgccatttgagctactttttttgggtatttatttcatcaccacaattctgaatttgaacttagcatttgagtactattcaaaacttcacttttgcttcactaccaacataaccctttctcgtttttttttaattagcatgtacacaatcgtcagttgcactcagagctctaaatacaggccaaccttttagggtttataggctatattaggcctactttttaaaatataagtcgacatgacatgaccgacatttaaaaagataaaaaaaaaattagcacaattcaatacaaatttttggaggtacataaatgtaggtcgtgtcgggtccacctgactcacatttacacccctagttgcacttggtaaactgcatttttatcacgaattgattgaacaattttttttggataatgttgacaattcccaacaaccattgtacactataaatagtgaagttcttatgaaagcataccaatcaaacttaacactacaagagtaatttgcggcataatctccataagtccctaggtttttgcaattaaccttctaaaattttagtggtaaaaccacataaatctcaataccgttagcaaaaacactcccctatctaacttaccccattttctgtttatgtggctcggcagcccaagtgccaagtggacttgcaagtgccaagtcaccaaaataccaattaggtggcattatccattgaaaacctagaaatataacttacaattaaaattaattaataatgttacctaaattaaaacaaaccccattaaaattaaaagaaatccacaaaactagaataagaaccccaaacccagatctcacacccattttcgttttaaatcaaaggaaatcgagagaagggggtcgaaatcaaagaagaagagtaag

SEQ ID NO: 99506 - DNA, 1287 bp, Cannabis sativa
attactaactaaatcaaaacatttaagatccgatattaattaaattacattattgtttgtcgtgtttgaacaattctcaaaatattatgtaacatttcaaagtttgatatttaagttgcaataatagtgggtgactactttcaatgcttttaattgcacttttattgtaaacaagtatagtttagctgtataatcttaatacttaataaatattcataaatacgtataaacacggtctatacttatactaccatatatgtacaaatttcatcaataattaactacgacaacaatctttaaccactaatttcaacataatttaaaattttccaaaaaaaaaaaaaaattcattgctgactataaattttatttattctactttcttattaataaaagaaataaagacaaaatctaattagaaaaaagttacacataataaagagagagctatttatcttaaaattgtaacactatggttaatttgttgggtgtgaacatttgcttaggatcacaatgttgttaccatttaattgcaaaattttcaaaaagcactttttttcgttgatttttttctttttagctatagaaatgctgcaaatatcacactctctagttacatttgctcatttctttaaataatctattgatgtagcactaataataacgtgatgttaatctgacctagttcatgaatctaaacaaaaataataaacacataacatagcaattttaacaataaattatgagaatatgaatatgtatttttagagccaacacttgtatatttaaaactaataaacttaatttcaagtagcttaaaattattaagtagaccatcatacaactattactataaggtatgagcacataagcaaatcatttaataaaaaaaaaaaaaaagtaaaatattactgtagtatagtttctctaaatgaaaaagtctccgcaatcgtcatttttgaaaagttgttcactcgcgattgtcagtcccacaaggagtcctgcggaataatagtcgagtctgaaagggtgttcctagatgattatcatgttcactccgggttcagtcttcaggataactagcccttccctgaaaaagagttctaagctgactagttatcactcctggagtgtatatgcgggtagttgactacatcagactcaatcttatccagaagcgtcatcaacgagtatccttggtttgtgaatccagaagctcatatatatttttggagactctgatacttaaactgacatggagatttcgctcaaagaggagttggttaa

SEQ ID NO: 99507 - DNA, 2873 bp, Cannabis sativa
  modified_base (56)..(60): a, c, t, g, unknown or other
atgtttttgaaatatattttcacttttctacttttaaaaacaaaaaactgattaannnnntgttaccaaacgacaccttagtaatttttgtattacaattgaaacaatctattaatacgaaacatttgttatgacatgtattaaatttagggccgtctttgatttaatttggaccttaaaaaaataatttttttgactttttttaattaatgatatttttaaaaattattaaaatatatatatttattatttttttatttgggtttctaataagcctaaaaccttaagaaacctattgcaatggtttttagttatgtcgttgtcataggtttttcttggtgtgacacaaaaaggaagactaatcttttgttgtatcttatatactaaacacaaagaccaagaatagtcacaaaatttaaaattttggaaaaaatatatatatttatatatatagatcctttcattcatgaaatgcaaaaatagtagtaatcttaatcttataatcatttctttaatggcctcatgtcctcatcgtgacattgcttgtatatgaaaagtactttattccctataatatggctttatatatatatatatatatacacgttaataaagttataattttccaataatagtcattgtttcgataaaaaaatattccatatatatatatatatgaaataataatttgttgtataaatataagttgaatttttaattataaataaatatttaaatttaatttttaacggtaataatatttaagttataattttataactttatttataaatatttgactattaattattaagtaaattaacacgtgacaatctataattgatatagattattaacttttatttttaaaaagaataaaaaaaaaaaataacacgtaaataatgattgacatttaacggctaagtacttacgaaagttaccgaaatataatttaagtactattaccgtcaaaaattaaactcaaatatttatttacaactgaaaattaaacttaaatatttatttacaactgaaaattaaacttaaatatttataccgaaaatatttccataaatatatattataagagttttgatgtatatatatgttaaaaagtgttgtaaaaactagtgttggtggggttcatataagatatagtatagattatgaagtttatagatttggttcaagttcgtttcaccttatgattgaactttcactatcaagccgccaacttgtttaacccattacaacttttattgctcacaaaattcttttctttctatatttataatatatattaatgataaaaaaaaattcaaaaaaaaacaatgataaaaatcaaaaggttcttttcccctcgtggggttttaatttagacaacatgcaccaatatcattaattcttgcaagaagtacttattaatattaataaaaaccactcactcactcactcactaccaaaaaagcataacataaaagtcacaaacaaaacaaaattgaaagtaaaaattctacaaagaaatgtattcagtatttttacaactaattcattctttattgttcaagtgttaaatttgaatgatataatacacatattatgttaatgttgttcctaattaataattttaattaatttaatatttatattataaaaattgatcaatttgttttagtgagagaaatgtattcagttttttgttttatgtagaatgaataattaattatgttcactaatgtcaatatcatgagttgtttttcttacacctcacatgttatttctgattattggtaatgttttgttggtgagatattatttactttcaatagtaagaatatattcaatatcttaataataatgaatatatattcttacttatatatatgactagcttgttttataagtcaggctgaattttttttgcaattattgaaaaatataaaattagatagagtaatttgcggcataaatacttaagttttatgtcgagtagcagataaatacctaagtcgtatttttggcagtaaaaataccttccgtcactagtatggaacttccgtaggtacctgaccgttatgtgccaagttagtgtccacgtatcactatgtgattagtccaaatcatataattttattttttatttataaatcaatttaaaatattaaaaataaaacaaaaaaatagtttaaaatcaaaataaaataataaatatttaatattaatattttcattaaattaaaataaaataaattattaattaaaacctaaaaactaaaactaacaaataaatgctaaaaagaaaataagaatgcctcttcgtcatcctcttcttcaacctgcacttctttttgctgctgaaaatatccatatacattttcctcattattcagttgcagcaaaacaaaaaagggccaaaagacacaaacacaaagaaacccactcactcaaaatcactattgcgagcatctgagaaccccccaatgttggttttccctcgcgttcttcactctctctccatctctttctcgacttttatcttctcagagccaaatggaggttcgcaacccttgaaaacctctagatctagatctgcttcactctgtctccctcctcgcagtgtccctctctctgtttctctttgcttgatgccagacggagcatctcgacggagatctaggagagaatttcatgggacgcctggtcgcagagatctgggcaacgtcgtcattctcggcatagtgaagaccggtttagaaaaaactctttccttcatcgtacatgtgagttaatttttgttgatggtatttcaatttttttctgggtttttgatattttttttggggtttttttaatattatacctaaaattgattt

SEQ ID NO: 99508 - DNA, 3163 bp, Cannabis sativa
attttttaaaacaaaaaacagaaaataataccaaacatactcttagtgttcaaatctcaacaacctcacttttttattgtgctccattttttatatttgcctaagacccaaattagcataggaccaaccctgggctgacacattacatccacctagtataattctaatattatattgtctctcttaaaatccatttagtatctattgcttaattaatatcattttaaattttaagagcttatgtaggattaaatttgacattatatatcttcaccaattttaataaataattgtttgataaaagtaattaaaaataaatttgtaaattattccattcaaattctttttaaatttaaactatatttataaaatttaataaaaaaatgatataaaaattatacttgaaattatttatttcacactactggatgagattaattaaattagttattcatactttcagtatgttcaaatgctaattattgtacttttgggtcatttggtacatataatttgtcaagatctgttttagaacatgttgaaagtatgaataactgatctaattaatctcatccagcaatgtgagataaataattttatgtgtaatttttttaatattttaaatttaaaaagaatttgaatgaaataatttacaattcttttatcaaataattatttattaaaattggtaaaaatttagaagaattatcccatatactatacttttaattttttttttttcaaatttacagtttgagtttttaaagtggttacaacgctagttgcaataggattttctattcgatttttttgttgcaatttagaaattgttttaaagtgtaaaaacaaaaaaaccccaaaaatttataaagtcaaatttaactgtacataagctcttaaaatttaagataatattaattacataattaatactcaatacataaataaatatttaatcaaaatgaataaataaataaataaaagccctagataaactaggcaacgcttcttcttcgcttctatcctcctaaatgagagggggtatctctagtctctacttacacatttcgttctgaccaatcctccaccttcttcttacgccacgtgtacatcgtttttataaacaaatgtcttgattttgacagaaccctttaatctaatcttacacacctttgtactcatctttcctcacagcaacatcctcaccgtcaaataagtttaagaaaaccttacgatttattatccagtttcaatatttgacgaccgctctgttatcttatcacaacccaagatgctcactgcttaccactgattgattgacacgtgtcaaattctattcacttttcaaccgtcgatcttcgcccgtctcgcgaaattgaaatcgaaacgccccgatttattttttggttagtttggggaattataatttgattattttattgagtttaccaaactcagaaattggatcatgaaaacgaacacgcaaaatacgaaaaagggaaaaaaaataatttaaaaaaaaaaacctggaaaaaggcactgtcgaagtattcactctcacacgcgctcactctctttctctctctacatttctcaaccttcgtcgtcgtttccaactctgtttttccccctagagtcgctgattcgccggaaccctaattcgatccgggagatactcaaagtcttcggtatgtttgctaaaggcggtcactttgttctgttagtttttccctatctctctaatattttcccccttatttattctattaggtaacattggttttggggttaaattagagctagttttgattttttttctgttgaagcagtagatgagtgtatgtttgggaagcagctgagagacgaaacgggctggatttcgtcaccggatggagggaggtagcgtctctagacttacttcttctggtactgttcatttcctctattttttttttttggttatattaaagttttaggggttttttttattattatgtaattagggttaagattttcctcggtttgctttttgcaatgacgagtttactttttgaaggagtaggatttattttttttgatcttgaaactgttaagaagaaatgtatattttacctagcggttgtttgtgacaacagcttggtgttatagatgcaatctctctgtttttttttgggatacatgtctgctcaatcagctagaatcggagattaagttaattgtaagaggtcgattcagttgtgaatgttctgtttggaagaaattcatggttttaattttgtagcgtgaatctttagagtatatattaagtatccagtctctaatgcgtttgccgattttagccttgagttttattttgtttaatatggtcaaaatattatctgttttagtaaaatttttaaaagatgaagctttcgaattttgttttgcagctttagaccctactgttcaattttatgaagagcaaatatactctagtgtatgggtgccttggtttactgtcgtagtggttagtgtaatagctactgaagaactgaaatttattgtgataatactttttctattatatttatttattttgggtttggatgtaagatgcatttataaatttaagctagagaaatatctgattttggcacttaacaagtttttattcttttttcatgacacaatgtcatttagcaatataatagtgattttggatactgttttcttttacacacagctggggtggtgttggctaggtctgggctttaatctttaaccttccgttctctcttatttgtagtggatttattgtaggcatctaggttttttcttaccacctctattttttcttctcttgctctactttttggtttcattccttttttcaaccacatgttttaaaaaaaagataatttattggtaaaaatcgcatcctaaactgatttgaatgtcaatgcggagttcagattagggctgtacatcggtcggtttagtcggtttatggtacatattttctaacccaacgtaaagatcggtttgtaaaattctgcatacaatctacccagttaaaaaaaaataatcttaacctgaccgacggtttgggcaggttaacctgcccgaaccgagataagagggttttttttttttttattatttttaactaaaataaaaattaacc

SEQ ID NO: 99509 - DNA, 1701 bp, Cannabis sativa
tggcatcaatccttgatcttttatgagaatattgatcctaattttaatatcacaattaattaactaataagggctacatagatagttgcacataattatttgaggtatagttacttttgagcaaaagaatcaattttgctaggttggctagcttaaatggtattatgtgagggtgtggacggagaggaatgagtagttttgatctccattgtataaacgtatatgagaatcagacaaattttatggtgtactctctaaaataggtatatcgatgtactttttcgtacgtatttttgatacctgaaaaattatattttattacttgtgtatattgtagtagttacttattaattaagatatatatttttttttaactttttgagaaatttatttagaatactttatcatggtgaaaataagattcaaacactttattgcaagtatgtgtgcctcttttattttatatacgtgtgaaataaattgtttgaaccatgctttgttttttgcaaaattagcttaattatattcatcacaaaatatgtaacttaatcaggaccaacaatgttgattcaaatgttgttttttaatggactcaaagcttaatcaaatttatatggagagtatttggagacgcttggggtttgttattggtgctttaggctatgtagggggcttacgtgattgctggaaggaatgagtccttttagaggtctcccctcctttctttctttgattaaaattaaatacattgagattttgaatggcatggcttgcctgtcgtactgcattcatgctcttccagttcgcttcgataggggaatttctgggataatcttaaactggaggttcaagcttctaagtgttcttgaatagttcttggagatttgaatatggtggtagatcaatctgaaaagtttggaggtaactttgtggaataggctgatgctaaaggtcttaaggattttatttctttcactggtggtgtcgatttaagttgtgttggaactttttatacttggacaaatggttgagactttggaaatttgattcgtgacagattgaatcgtgtgatttgtgatctagaatgggtggtggcattttccaagtctggtgttttctctcttgcgataaaggattctgaacatgcccctgttgttcataatttgttgttcgatagagagagtttccatgttccgtttctcttccttgatgcttggacccgggatccagattgtagtaaaataatatgggagacatggaatatttaaagttcagggagttaaaagttttcaacttatttctaagattgtttagacaagaaaaagcttagctaaatggaacaaagagcactttggatactataaagataaacttaatatgttgaataatttgttgattgaggtctagaagtgtcaacccactcaagcttccttgaagttggaggcagatgtccttaaggacattgaggaggttgaagctagacaaggtgaaatttggtgacaaaaatctcgagagttgtggctttgggatgggatagaaacactaaatttttccatgcttcgaatatcatcaagcgaaaacacatttttatcgaggcagtttcagaaaatggcactaattggatctatggaagacaagctatttgtaatatcccgataagtctaatggtaaataattagggtttatatttatattatgtgt

SEQ ID NO: 99510 - DNA, 2076 bp, Cannabis sativa
taccctgcaaatcaaaagagtcttggctgccataaaacccggacatgttcttccgctgaatgaggcacccataactcttgcaagtataaggatcccaaatgatgctgctgtctggcgggattgaccagaggctgtctggaaatggggttggctccttgtaaccagcaggggacttgggatggcatcttcgtcgaggaaggggctcacagcccttaagcatgagtgtttgagcaaaaacatcatccacaggacactcccctccaatttcatatgttaagtagcgagccagatcctcttgtaggctcaggcagcctgctccaactgcagagtaaatgtcatccaatccggtagtagaagaggatttcccaagtgggagcttgtgtggcccaatagctagcttaagctcattattaccattctgattcatgaactcccatatttcatcactacttgaagcctcattttttctagccaactcaacaagcagtgcctgaacaagtaagttagtggagttaagtttctcgttgagctcaacaaccaaggactgactggtcctatcgagttgttctattgttgaaacatggtcatggaagagtttgttggtgtaaccagaaatggagttcttgacatggagagaaggccctgcgacgatgtaaagggtgagaaggttagtgaaaacgacaacaataagcatctgaaggttgtgctttctgctgctgatatgagtttggtttaaatgctttcttgggtagaaatcttcctcaacaggtgcagctcccatcttttttactcttccttaatgttactataatcactaggctttgggtttttcctctgagtagaatgaaagagtgagtgaacaaagaaagattgcagaagccaacactactaaacagcatagaatcgacatgtaaaggcaattgtaagttgtgttattatatattaacccctcaatgcaatggagaagtcatatataaattaaacgtttgccaaatcttatgatatctgcccaaaaaaaattataataattataataatagaggttcataatatatagaaaaatactaaaattatccaaaaagaaaaaaaaaaaaaaacaaaggctaaaacaatttagcatgaatagtttttcttttcttgaaaaaaaaattaaaaaaatagatcttcaggctataaatcagccataaacatgtgtagaaagaaccgtgatatacagtccaccaaatatgtatatatattgttattgttcatagagagtgtcattttagcaagagcatgagctatctttctaaaactataattaaattatatctcagcaaaactattagaagtcatcaaaatatcttataaatttactccacaccaagaaccattgcgaagcaacctaacagctttaatagaaactgaatgacttaatcgctaaacagcttttatataaagttaaatatagtacttttgactgtattcctaataaaagtttcctcgttcagtgttactcggcggagtgggcgttgaagaagtacagtgtgagattaattaatgattctgaagatatactgatataatcacaattcttaattctgcttgtggaactatctcatacgtactttgtgccatgtggtgtagcaccatcaaaacagatcacaacatgtgctcatcacttattattcattttctcgaaaaaaatgaaagcaaagcatataatgtgagtgagagtcaatacaataaatttgctcaaaaccatcttgtacggatatgtcacaactcaaaatttaatcttaagtaatagcacacaaactgcagtagtgaaaatattaactacgctcataattaatcttgtacattgcctgtcccaattgcatgtcgtattgcctgtcccaataatcaaaaactgatacttgtcttcttttttgaagaaagtaatcgaactttattaaacttcaaattctgcaaccaacaaaggaagcatattagttgggacatcccccatactgaaaatacgatcagggtaagaaatagcagctttagcaattgtatgagctactaaatttgctgaccgttttacaaaagaaatag

SEQ ID NO: 99511 - DNA, 1068 bp, Cannabis sativa
ttaaaataaaaaaaaaataataatttaatattaaaaagtaattaattcaaaataatcaatccaatcagtacttttgcggattagattggattggattggatttaagctattatgtgaattgaattagatccaatatatgaaatccgctcttagtgtggattagatgcactatgaacaaaatagtgcggctttaattgaataaacatccttgaacattacatataatgcaaaataaatcattaaatttaattgaaaaataaacaattaacatttcatttcgaataattattactctttgaattattatatatgttcaattttttgatatatataattttatgtgagttgttttgtattttgtttaattatagatattatttattatttttgtaattattttactaaattttgcctcaaatttttaattttctttaatgaaagatgtaactttatttaatcaattttgaaacaattacatcggaaactattctaaaattttgtctcaaatttttaatttttagtttaggtataaaaataatctaaagatataaaagtaatttcaatatagtaagaatgtgaaaattaataaagtcatatagaagtcatatgctaggaaagagaaaatgcattgtgtcacttaaaaagaaagcagagattacaagaagagtggagttgagttcaacatagcttgaggaatagagcttggtaagtaaagcaaaggagaaagcgcacaaaggaataaggtatcagagccacgtgggccaattcgaagagagaatagagaatacgtggcactaattctcgcctataaatagagaactccaacattcaaacgggggacagattattgacgacactagccaaatcgtcattctgctaaattgctccttcgagaagtattctttcctcaaatcaaagatcaccgaccgaagatgaaccactcactatttaggagaaattgagaaataaagtaaagtgtaatctttgattgggataatcctagtgtgaagaattcgagtgttaatacaaatttattgttgagttaattcttagaatcaacagttagtg

SEQ ID NO: 99512 - DNA, 1471 bp, Cannabis sativa
ccccattctttttgttggtgaagtgtacagtgaaaactacatttatatgacaattccacattgtgtatggttgtatatactattcatcatctgtgtcaagctcaaggccctccaaagctaaaagctggctaataacctttcttttctcttcctcagctttccttcgcatcaagtctcttttctttaaaacaagtgtgtgcctcttaagtgtactgtggtaatactctgctgatgccttcttctctctagccaaaattctcttctcttcttctggatcaacctgaaccaaaaatgacccaaatacgaaatgatgatgtctagtagaaacatgttgatagatcatagatacatttgacaaacacagctggaaactgacatatacagcaagaaatgttctttagaaaatgttcaataacaaaaccttagagcgagagagacgacgagctcgaagattcaactcccgctgttgctgttcagcccaagctgctattgccatgtctccacgctgatcaaaagctttcctcttctttataagccattccatccaagcttgagatgcctgattaaataaacagtgaaaacgaataagtggatttcagttgaatagcatagtaaatagtataactaagtggttggtcatgtgattaccttcattgggttaactcggttatctttatcatattgcattcttttctcttcatctaccaatagctcatacgcagcttgaatctttataaatctagactcagcagtttccccctcctcaagtgttcctctgccattgtagactagaggcaagaaagactcaacgaattcagacgcaccactatgctactttactactcaagtgtaataaaagtatataccataattgtgattaacaaaactttagaaaagctaaggacaaaccatcaggatggtaaaatttggccaagcgtctataagcaacctttatttgctcctcatcagcatccctctctaattctgccataaattcgaaagctcctatatttatttattcagtctcaaacacaaaagcataaattttgagagggaagttaagttaccaagagtttcataaggagatttgtggtcgctccaattggcaactttaaccaaagtcctcctctgattgggacgaaaccagggtttagaggcaatagaagaagcagaggaagggggtagtagagaatagggagggttgttattagggtttcgaaaggaaaccctagatcgaaattggtgtctgcaacctatgaaggtggagacggagaagaagaagcaatgaggtcggcaaattgttctgagattactactactactcatcatgtttctctttgtttcccttggatgaattccaatccaagggggaatctttgtgtaatagtaatagaaattcaaagcttggtttggtgggtttggaaggaagacgtgtagtgtaggaaggaattgataaattttatgagaatct

SEQ ID NO: 99513 - DNA, 1939 bp, Cannabis sativa
tcattgggcgggttacgattaaattttgcaacccgatatttatattgggttaataaaaatatgctataacccgactaaaccgaccgacgtacacccctaggctggagtacctacctgaccagacttctggcactctttgcaagaccttcgaggagaaggagggcgtccttctaggttgcgcaccacgggctagttggtcggaggagcataaggaggtggcgaaggaagactcgaagtggtagagctaaacccttccttctaggcagctttagaatggggattcttccccgggagcgcctataggctttctcttggtgaattgccccaacttggaaacgatatctgcaaaaacaaaacacaaagtattggtcaaagattgatttcaatgaatagtatttcagcataaagtaaagaaattataccattggcctgctcggaggcatcaccccgatagttgttaacgtaatatagagattaggaataaaagtttgatacatacgttacttgttgcttaaaatttatagcatgaaaaagtacattttaatcaataattatagtatttgatcatgccctaaacatcaaaataagattgtggaaaagctatacaagcgtcgtgctgctaggggcaagcttccgatgtgtgacaaaaagcacaagccccattgaccattcatggtgaaaaaaattaacgagtaagtgatgttatttaaatgttattattgttattagtcattttgatgatttataatgctatttagatgtatgatttggttttctttgtgctttttgctatttttttttggtaatcgagttttggtgaaattgtattttctgagttttttgtgatttttttgtaaattcttaatagagtacatacaatagagtatgatgggaagttgaatattaacttaatataaaggttatggataaaagtttgacatatacaataattgttgcttaaaatttatagcatgacaaaatgctttttaagcaataactataatatttgatcatgctctaaacatcaaaataagattgtgtaaaagctcataagttagagaaaccaaatcaagatacaatttttttaatacatgtaaatctattcgaattttcatttcaatatcattcattatttaataatattttacaaaacaattatataacaatcaccacaactataatatatagaataattaacacattaaaacataacttttccagcaacttataaaataaataaaataataattaataattaataaatacatacaaattaaatactttttaattctcttatattaataaataataaaataatttctgtatatatacaataatttatatttttagttttttaatcattaaagtaacaaaataaaaaatattcaatttgcatcaatttaattttaataatatgatgaaactatgaaaggactacattattattaaggataagagacacaacttaatagtgtaaaggggcaaaaaggctgattgaataccaataacactggtgcacagccccagtgtagtgtaccagcgtctgagcaaaagagaaataaacatccttcaatataaattatacatcatattgatttgttaacctctcaaatcactactatctacttgcataaaattttatataaaatcaagactaaaaatcaataagttttcccaatctcaaagcaacaatggccaatggaacacagtaagtaattaactccaattccaccacacaacaaagtcagaatttcaattatacattagtttcaaaaagaaaagagaaaatagaaagaaagaaaaaaaagacagctttaacgttataatgcctggttaggctcttcttaactctgtagaagtaactgtgtcttcgtatgtctgaaatgcagcgctgaactatcgaaccccgccattgcaacgctgtctggcagcacaagtt

SEQ ID NO: 99514 - DNA, 1660 bp, Cannabis sativa
aaaaaacattagattataattaacagaaacactcctatcagtatggtaccgaaaaagatatccctacaacacaaccaacaaaaaatgttatatatatagagatgtaataagttgttgtttttattatcctaatgggcggtgtcttgctttattcttatggcttataataactgtcaccattgctcattagggttttttccctttatacaaaggagctttctatgttttttttttcttttctttttcttttttggttattttatttattataataaataaaaataataagagaagaagaataagggcagacaatgtaaggtcagccttagtaaaaactgatgaggatggtctaagtatttgacatcagctaacgtggtgcacatgcagccctaataccttttcagaccccactcactcacattcacatcattatatattatcataatttaattaattttatttcttttttattctaatcttttttgtaccatttgcaccaatatatataataaagattagaaaagaaaagagaaaaaaaaaagaccttattatataattattagctagataacaaattgtctatatgtataataagaaagtaattagaagaagaacttccaccaaaaaaaaaagaataagggaatttaagatcttatttattttgtttattaattagttaattttttaatgtgtgtttattgtgttattgtggtttgtttgttgtttgtaattttgctagaatgatgtttaatactaactgttttactgttgttattagtataattatcgagttttatataattaggacaactattggattaagatggggtaggtctaaagacactgacggagctacttataaaagtaggagacctattcaaaaagattgagcattgctattaggcaccagcagtggtgcctaacactttttcgagttgttgtcgcgttgcgatgactagcgatattccctaaaaggtattatattaaattatatgggtcccgatacttaattggaccaataacgatattgagacgtaagaaaatgctagataccactggtacccttaatttagcatttctttttttatatgtatttttctatatgttacattacattaaatacatttttataaataatttttagaaacatatcacatgtcttataaataagagctcatcaataattataatttttcctagagtccataaaattttagagttggttctaatatatattaatttaataattttattattattattatatatatatataaaattactaactattcataaaatactatattgtaatagcattaatagataatactaaatactaatttacaatagcaatatttaagtgacatttagttagaagaaatgaaatgaaatggaatagaatagaaataacttttgttctgttactttgtttagttttattttaaaatattagaatgttatttttattctagctatattttcattctttctaactaaacgtcatctaatagggtgtttgttatgtgaatttgagttgaagagtgtaaagttaaagggagtaaacttagagggaatatgaacccatgcatttgagagaattaatattattaccattttagtttaaaaagtgaaacctattcttggaaacacaaatcttttg

SEQ ID NO: 99515 - DNA, 2859 bp, Cannabis sativa
ttcaattggctgtgtttagttgcttagaaaatgatgattagcattgaaggaaaactattagttccatgttaaattacagctattagtgacatgaccttgaaacaaagtccgttctttatgcacagtaacgtagttctagattttggatgaactgggtaggtttctattttatatttagtgggtatattaatattttatgatttttgaaatttgatcaattttctatttattatgttactcaaaggttataagctcttacagtatatgtttattgattgaagaaatatatcacgatataagatagtgagaacatgaaggccaccttcaataagaggtaaaagaaaaagaaattgtgtgagaacattatccttttagtggttcatgcagtgaatgaaggactgttttcaaaatcaatataagtagaagcccataacaaagccagaaaagtcatctatatagcatactagagaggtttagaaatacaacacctgtgtgcaattgtaatacccatggcccttggattcgtgattttttcttatagatgtgaaacagaaattatattacatgagacgattggttatcagctttcttacagtccttttgagccacggaaaaaaaagttcagatagtatataaactgtgaactatcacagaaactatcacacatatcagtcacaaatagtattccttaaaaagtctttattattgagggtccattaagctactgcttaaaagtctttccaaaataaatcccacaatctcttctacattgttgaaggttctattgttcatctctagccatgttgcggaaagaacagcgagacaaccgcattccacaatatcgtctttctttggctcaatgctatccatgacgccctacactctcttcatgttgcattatttcctaacaagaagattctggtcacatctaatcaaataccatctgttgtaggaatttaacccaaatttcccctataaacgttcatcaatgtagaaatatgtggtcactggaaagtttcttttacacaatacatgctgattgggcaagaccttttaagaaaaagttccacctttgtaagttcttagagtattcatcttgttcaaagctactacccatccattttttttttgttttttttttcttagctccaacttaatgaatactgtgaattggaaagacttaaattgagcacaccatcctctttggctaacttctcgaagttgatttggatgagaaagcctcaaaatccgtagcgtgtataagtttgtaatgctgtagtcaatgctaaaactttgcatttttctattgtttaagttatgaaggatcttaatgttccaagggaatgattctatttgctcttaactattatgtgaattgacaattatgtattccacccaattggagtcatttcgtaataatattactcttgattaccttaagccgcaaggtgtctttttccgtcaagaattgctataaccatttcacaagtaaggctttattacggctttacgatattgccaatttctcaaatcttcaaattccttaggtttacttctcccatccaaccgggtgatcacatccttccctatcacactcttcccataagaatcttttcattctatgccgtcgataatgttgacaaaaagaattctatcaatgtgaaattacccctatatataggaagcctctttcaactcatttagcttttactaattttatccatcatcggactacatgaatcactttttattaggatcgcttctaaagtatgaccaaatatcttataggccactcccttgagcatgacaatgtgtttgccaattgttgtacaaaatcctctaaatttatttactaccaatatttagctcattgaacaagcccaatgccttagctttgcccactagtcttctaagtctatgacccactatagtcaaaagaaagggtggtacaaatcaccttgttgcattcctcttgatcctctaaactagtctcgtggtctattgttgctcaaaattgagaaggttgctaatgattagcaatcattgatccatcttcgccatttccttttgaatcctctttttctcttccaatataagtttcaataattaaaaaaagccactttctaaaccttataaatccattttcaacattgcagttgtgtcgcatgcattttgttttcttttacaacattgttcactattagagccacattacttatttgtcttgtagctgtgaaacgtccttggacatttgatattgttaatgaattgtcttctcaatattttggatagaactttaaacatgacctcatataggatttttcttatcatcattagtattttgcttatcgtgatcttatataggctagttatcatacacaagtttccttggtgcgcacgttgatggtgcgatcactgtaaaattccttgaagacctccatgatatcctctcttagatcctcccaactttgctgaaatagcttcatagtaatcccatcacatcttgcaactttcattccattacaatctaactctgattctttggtctcttttttttctttttctaattggtcttatcagtcagtcttgtaacatttctacgataggagcccaatttaccccttgaaatcctttgaatccaccattgtttgatttttgaaatcattgtataataaaataaatttttaattgtcttctccgtaaccagtagatccaccttccccaactttgaaataaaattcgtggacattttggcatgaataagtctaagcaacaatttagagttggcctccccatcatttgccccattggaacatatatttttgttcattgccatttcttccaataaactcaactctt

SEQ ID NO: 99516 - DNA, 4463 bp, Cannabis sativa
gagagagagagagagaaatggggtctatctaagtgcccaagcactaataggacaagatcaatctgtttaatactactactgcttcaagcttttctccatgtatcacattccatacaagttgcaaacatgtgcgtataaatcaagggagaaaaaagaaatgcaggatagttatttatgattgatcaggttactgtgacatgtgattatcagggcccataaaagattcagacaagagcaaatacctatttgacctcttctgaaaatggcgtccaatgttgagtggctcaccagcactgcaagtgggagggaccctagtcccagatatatgttgctatcattggcctcaagatggtggccaatcaaacaagtgaacggactcttcctgtatattaggtttgtccttggagaataattcaatcatgcatgactaactacagtacaataatagaaacatcatgtgggtattttcttcatcccacttagcttttcccgttagcagcaacctttattgctttagagctctggggtcaacctcattgtgtaccaaccataggaaaaaaatgaaacaagaaattaaaaaggtaggaccctttattactcaaatctaagggatataaagacaaacagtgatattaatatcagcattgcactatcaagatataatggtaaggacaaaacgagaaaagggtcattgagttttaatacatatgaagaaattaaagtacctaacagctcgggtactactagcgacctctaataacaagagagacttatatctacgccttaagattgaaacatgtaaagaaacaaaccaatgaactatttattacactaaaatgtcttgcctcttctttgaaaacgaaggtcagttcaatgtttggaaatatacacgtgacagaaacagaaagacactttggtttccttgagctcaaaggctatcaaggccatcaattgatttaataaaggtaaggtgatagtattagtggtcataatcttggatcctcaatcttaccatgtctccttgggagacataaagccagaaccctgtacttgaaaagatatggatcgttgttgtgaattgtggccattggttccaatagctatcacaaaagaaagccctgataatagccacataaaataaaaaaatatattctcaaaaatagtaagcttgatggtacctgatgatcattttccccaggcaacagtgcaagcattccttaagaagtaattttctgcagtcaagagaaaagacctttatcaacccaaaaaaagcaaaaggagaaattattaggtcctgtttaccttccacgtatgcaagtcgtgctcagtttaacatgaagttttaccttgcattttatgtcacaagtggtcgaccaaatccacgtgcatctttttcaaaagcaaaagacatttgtctgtttcaatctcatacagatggtggtctaattcagaagaaattacagtaaaagaaaattatatcactgaaaatccagacagctagattcacagggactcaaagaaagagaaataatgctactgcaagcttaatgtcacataatatcttactctaaattacatgttccagaaagatttgaaattgaataaagactactcatcaactaacatgctagggtaactttacagaatgcttattacagctactgaaccaaccttgcagcaaaaaattgcatttcttgcttttcactcctaatattttcatcagaaaccatttataatcacccaggataaactgaagaaacatctgaaaatctcctgatcttattagacaaaataagagagcaacaaattctaaagccatgttaaaacgcagaaatgaaaaagtaaagttcagtatgacagaggattattctacaaaacaaaatatatatgatgtctaagatattcacatttgacaggaatgatattgtcattcttacaaaaagagcattttgttgcgaaactctagacaaaagtatgtgcttgagcttatagcggtaacatctattccctcttgccaaataattttaagtagaattattgcttttatcgctttccttttgagactgggataactttttttccataatctggtgaatgccctcttgatacccttctatgaaacttttcaaagcatctttatacgcagaagcccttgtcatgtaaacccgctgcaaaacaggctttaaagtctccatgcctcctctagctgccacagctgttaatttatttcaaaacaaaaatatcagaaggtatacaaaaattagaaaaagtaatgtgaacaataaggtttcacaggaattaaaaaataattttaggaggagaataagtggaaggagttaggcgagcttctatagacaaagtttgagtgaatacaaactgattcaacatgagcgggaaattgatatgttcccgaattcttcccatcaaaaagcccaaacataatataatatgaaaacatgctttaaaagaaagagaaataacaaaatgcatctgttcaattcataaaatgcatttagtctcaaatcaaatgaaattgacattgccatgaaaggaaaaaaactgtctttaccaagatcttccaatgtagagggctctttctcctttttcaaaccactagcttcattcggcttatcttcatcctcttcagtcttcttataatcatttggccgtaattcaggacctatattcctcacccagctagcaccataaagcctagaagcctctttcaacacctaaaaaaaacacagtaagaatcgtgaaccattctcacaaatcattgaatgagtaccaagatgcaagatttagtccatcaaatcatagttctaaaacagagaagactaagcacaaaaattaccaaatctaactgaaaaggacaaagaaccatctcaacaagcacaaggattttagtttcaaaaaagggcttatttcaaaaaacctatccacttcaagtcgaaatattatggtcatgttgaccaatgtgccatggaacgcaaagggaatgtgaaaaaaaaaaagtgatgatctttctcattcattaatgagttcacttacacatttgggacacatattttgaggaacccttcaaaccctttccctttacaagccttttcatttgtaagagttcacataccctatacgcattactaaggatacaaataataacctcaatttaccaagaaaaaaacctattcagttaaagctataacccataaggtagctcaaaaacctcctaaaacttgaagaaacttgtatgcagaatgcagaaatttcaagctaagcttatcatccaaaacctaacctcactcaaaagaagtaataccaaataactagtacccacaacttcaaatcaaccataacaatctaatatgaatttacttatagaaaagaagaattggataacatacttgaaaacgctcagcccaggtgagctttctacgtttttttatatgaggagggtctggcaatgaggatggaaaagctatctctttaagatcatagcgaacataatcatataactttcgacatactaccttcaccttcatcactggcactgtcactgcaagaaattacaaaagttgaaagaaaaaaagaaaaacaaaacaattgtttaaagaaaaggaaaaagtgttaaaggggaagacgaagcatgaggagtaacattggagacttaccttcaataataatgatatcatttttctttcttcaaaacatttaatcaaacaccttaactacatggccaatatcaagagataaataacaaatacagtccaataaaatcaatcaaacaccttaactacataacaaatagatcaatatacatacatgaccgaaactacagtatcaaatacaagatttcaaatgcaaaactagctcagtgaacagaactaaaacaaacactcagttcaaaaatggatactaaaattaatattaggaatggcaataatatttgatatgggaaggaataccaaatagaaatgggaggcactgtttctcggccgtggatgggtgaagtcaaccgtggtggcacaggtgaaacgcagccgccgatgactgctgcttttgtttttgttactattttttttttggaaattactactacggtgtcatcatcagccttccttatcttagatgcaaaagagtaaggtcgtgtttggatgaaattgaataaaatttaaaatgtaaattgaaaattgtaataaaaatgatattaaattatttattatcttgcaaacatgaaatgtatttctttttatttcaaaatggtagaaatgttattcaattggaatgttatttcttaaaaaaaaaaagattgatgaataggaaaaaaaaattatgttgtttgcttgacaggaataagaattgaaataaataatatttgcgtgtttacattattttggaatcgaatcaattattctaagttacaaaaatattttttttatcaagaaaataaaatttctattaat

SEQ ID NO: 99517 - DNA, 2883 bp, Cannabis sativa
aattcctaagatgtaagtatgagccagtcctacaagtaagctggtaacgaacgagtcaaaaaacccgtatagtacaattaagctagaacttaaccatcttaggattgagatatactgacctatgatcaactaaataatattgacttagaaaagatataccggtaagtttatgatatattttccactgtcaatattagtctagttcgatgtatagttgatacatctgatacaagttcactttgttaatgtcctagaaaggatatttcacttatacaaacgtaagtaaaccacatcgttgattatcacgtcaatctaaatccagtgcgctgataaatcatgaaactaaatagtttgaagtatataatcatgtttattttctactgtgtagaaaattttataatcatgagtaactatatgtttacgatttaataaaatttatatactaaacatatataatcatgaagtaacatgtgaaccaagcaacataaaatgatttttgatcttttattaattaataaataagattatattgaaatgagttttatttagggcataaaatccaatataagttgcctagacaaaggagtgtatacatgggtggcatacattgtgccaaccaggaaggaagtctctaacacctaggtgacatgcctttccttcccaagtggattttcaggagaaattcatcgattccaagtcacctcttgcataagtggtttgatactccccgcaggtagtgtatggtgaagtttggagtgcttgaatgtagagcacaaacataggcgacatatgtagctttaccacctaggcagcatactcttgcttcccgagtggtttttgggttgtagttttctgatatcaagttatcttctgcatcaccgatctgagatcttttaaatgaagatctaatgagaacattaaattaagtatttcaacaccttgcagatttcctccccaggtatacacttgggcagcatacaacctccccccgagtgtagacctgaatggcgtacagtcggggtatgaaggaaaaaatatctcaactacacttgtaaccccgtagagcaacccttgcgcataggattggcttaagagacaagacaatgcctcacaagaagtaaaagagacaacacaatatcatcttgggagtacaggtactccctaggtgacatacacttgggtgtcccctggttgcaaagaccaaatagaggtcttcattcaattatgaagatcctaaaagattcgatcttatccaattctacaaatttaggaaattgagtggggtgcgaatttgagcaattaatactgattaattctccctcccaataaatactaactttctatcaccttggaagggatacataatagcagaaactctatagaaaaatatttgtaatcagtgtagaactaaagataaattcaactaaagggggagtaaactactactgtagaaatcggggctaaacctcctataagaatctagtgtcagttttgttatcatctttgctgtctttttatttgtcattttattgttatttttgtgactcctcgtgagttgatcattttttggatcattaatgttatgtatgtaattattatgatacggcaatgttatggtaatgaacatgattattttatagtatatatgtggttctgctatgagtatgatattggagtgataatctctatatatgtgtagtgtgaatagttagcatggacatatatgataatctctatatatgatttattaatagttataagataaggtatatgatattgttagaatttaattagtacatattaatgatatacattattatatgtatggtatattgtatgaaaaacatttttttttattgggcttttagctcgcccttttacttttcccgaagtgtagtgtgtatagtgagcagagtcaattctagtatgtatactgtgtgagattacgaatgggaaaacaatctagaacagtagtgttgccttagttttatttatagcaattgattattctaaatacaatagaaatgtattatttaaaatcatttatttattatatatttttttttttttttataaatgaaggatcattttatgtttttgtaacccatcattatatttcaagtagttttgaatcttttcaaattgttaaaggatctttttgtaaaggcaaaaaattgaggcgttgtacttttattttttattttttccgaaagtagtagtatcatgaatgttagaagaaattattaaaaaaaattgagtaattatgttcaaaaacataagtctatcaataaaagaaatgcatttttttattaataattatttagtaatataaaattatctagggccaggtccaccatatgtcatgacatatccaaaatatggcttatatccccaattttctacttgataaaagtcaacatcactagaaaaactttctgtacttttagcatcttctaagttgtgggcctcatttataattgataattgtcgacaatatgtatcataacgagcatcatgttttaaaaataaaccagaacccatcggaggaccaggttgaccaattggactataagtttctcctccccagtcaacatacgtagccaaatctttcaagtcagtaaatatgcttgatggccaatacccaatttgaatatctccaaactcaagccaccaatttccagtaatttgatcctatatataaagttgaaaatatgcacaacccagtaagataattaaattacataaaggtaattttattaaaattaaaatagtcaatactaaattggaagaagtaagataactttaatattaaattttttttacccgataaatagtgatttggaattcccttacaggaacagtacccgggtgtctttcatctag

SEQ ID NO: 99518 - DNA, 1486 bp, Cannabis sativa
attgattatgtaaaattctactttgagctattaggtttaatattttggccggataaacgctgctcttgagttaaaactctcaaacttaaaataagattactttttgtcatagttaattaatgttgtactcttgttctttcaggacagtaccttttcttcactatggaagatcataattgtttatttatgacattcaacttttccttaaaatcgttctctttttctttatatataccacttgtcctgaaattgtgcgactaataatgatcacttagataatttgggtatgtagtatattatataatataaaaaaagtttgaacttgatgatagcacatgatgccggcttacacataatatacacatttatatatagtagttatgaaatgtgctctgaggttgaaggattaatggaaattttagttattattaattttgatataataatatttaagttggtccatttcttttggagttggagagttatgaaggatacacaattaagtcttctgaggtcccatttgagaattgagattagctagaaaattagccgagaaagctgattctggataaaggatgacttgttaaatctttaattaatttgaaggaggagaaagagagtactgagaagtgacatgtaattatagatattattaaatggagtggggtgcatggttggtataggagaggaggatctcattttcatcattaatacccagatattacgtggacatctgttaaccctattgctagctatatattatatacatatataatttttttttttttttttaaccatgcatgccctaaactatattgaaaacatggaccttaaatttgaggttctactcgtgccatgcatgtccgggccccagtacgtgtacccatttttttgtcctttgctttgatgtaagtaaaccttagccttggccattctcttttcatgagtttttgtcagaaatagagtttatttctattcatttcttaatcacagatctactgatcatatatatacgtactacctatcatatctatcatttttattgtcttgtttcacaatttttttttcttatatactggaattggaccacattcacaaaacaaatacatgtcatatttgtaataaatcatttaatcattacgaaaattaaatagttacctgatcatgttttcttccggcccctggcctctctctcgaaaaatacattaaattggttgcaggattatgcatatatggccatccttgatatttgtagtattaattttggcgcacattttaaattatgttgtgtacactgtatcttaatcaattataactaaagatttaatagatcttagtgaaaatgagataatttggtgttggtttttttcttctctcttcagaattattgaaccaacttctttggttcaagggaaccctaataataatgagtaaccctaccatatgcaaatagctagtgcgcatagtgaaagaaaagaaataaata

SEQ ID NO: 99519 - DNA, 1940 bp, Cannabis sativa
ggttaaatttaccataatatctatatagggattatctaaatagttctaaatgaattgagtgtattattgttatattatattttatataaaaccttactacaaaattagacctttattaattaaattatcgttagccttcaatatttttgctagtaaaatgtgtagtgagaaccaaatgatcttagattcatagattgggtctgtttttttcttttttttttgagaaatggatcaatttggttagtaatgtaaaagttgatgaataattaaataatgaattatccaaattatggtgaatgagtaatgtggaggaatgaatgcccataacaaaagcatatgcattgaattgatatgacaaagctagatgagtgagtggggaccactaatcttttccttgcatgaaaccttcctttatcatatttattattaaatttctaactaccaaaccaatcagctttgcctccctattcatttcttccttgctgtttaatatgccaaaagaaaaatgatacccagaaaaataaaaattatatatatagatagtatactcactaaaattatagaaatttgtagttaacaagttgttgaaaaaaaaaaaaaaacattttcgcagtaagtgatacaccaagatgaaaagtgaatacttggacttatccccaaaaaaagcaaacactgaaaaactattcaaatcataaatggatccatacatattccataaaggagccacaaaaaatattgtatctaaaaccataaaaattaaaaagagaaattacatagtttttctccaaagaaacttacccaaaacacctaaaagtacagtaaaaactacaataagagagagagagagagagagagagagagagaacctgctaaagtatccagaagagtggattttccagagcccgatgggcccataattgccgtaattctaccgggctcagcatatcccttgagcccgttgagaagccttttggtcggcccatcaccaaagttaggcaaaacaacgtttagatcttcccaaactaagtaagtccctctctccctcccaccaccaccacaaacaccaccacttccttcatccatatctctgtcactagaaccaacaccaccgccgtgggtcccactcgccgccgacgcttctatctccatctactgatattctttctataataatatctttgttttttttttattttatgaagaaaacagaaaaagaatgaacaaaaaagaattcttaaggtctagagttctgaaaaatataaaagagagctagaaatagaatgaagagaagtgggacaatatggtaattttagtgtgttggcccaataacgaacaccaaataactaactataatataaatataaatgctatattgagaaggtgaaggtggtggttgatgtgcctaataaatacatgtccccaactctcatcaataccatgttataaatgctttgtctctttctttctctaatatatttttttttttgcagctttcacctttttcatcatctttattacgcttacttccttctaactagaaaccatattttaatatctaattattcatagtacatacagacctggcccaattaccaaaataatatcttcattctttagtgtagaattaatactaagagtaagagtaagggtgatataattcttattattttactcatagtgtttaatttgtattttatattttggattcaatttaatttacatagtaactcaaattcaattcaattaaatctacaaaaatacagatttgtcagttattttagattaattactttttaatattaaattatttgatatttatttaaaaaattcacacaactaacaacaaaataaaataaattatggttgttttatgtctttaacaataaatctacatatataggaaaaatacgaggcaataatcattgtaaatacctattttt

SEQ ID NO: 99520 - DNA, 2122 bp, Cannabis sativa
ctgatcctgacaatttcaatgattgtattcaatccgcattactgcgaaatttgttatatttgaaagttgatgtttataaagggagaaagaagagaactgaaattgaaatgattaggtgaattaatattgaagattaggaggacaccattaacccagtatgagaaatttagagatgaaaatggtggaaatgaaataaggtgatgaattagtctttgttatatatttgtgctttgttctatgttggccaacactttagcttgataagaagaattgaaattatctggctgaaatagttgtacgagtcttggagattattggatttctttagttgcaatattttagtattacattttgcaagatcacattcaattgtgcagcttatgtttgatcagcctaaatgtttatttcatttaacctagtttgttgtgtagcaaataaaatcataactctgaaaaccattgaatatgtgatctttgtataactaaattcgacttagaagaataattaactagcagatttgattgaaaagttctatctgagttctggtttgaaatgataccttgccagttaccgttgttcttttgcctttttcttaaaaagtttatcagttgccttgattgctttagaatgagttatatcaatgtctgattataatatgttctgttgttgaccgatctttacaatttaaaattctaatacgcaaggaaatttaagttttaagattagcttagtactactgtatcatgttgaaaagttttcagtccatttaatagttcaataacagttagtggtggtgattgttttttgttgttgctgtaattccgtactggctttgcagagtgggatccctggggtgttccagatgactatgaatgcgaggtgattgagaatgatgcaccagttccaaaacatgtacctctacatcgacccggtcctcttccagaagacttctacaaaacactggagtcccttcaagaatcttcgacaaggatgccacctccacctgtatctccacctgcagccacctctagtgagtcactaccaaaggagtaaagtaatagcagcatgtatgtccaagaatcttcaacatcttgtttgtgttctcttttgagtttaaattgctggacataaagcttgagtttttaataatctattacttgaaatggcctttcatcatcttatttttctttcattgctgatttccgccattgcattgtacccaaaacaagaaatgcgatgcaagatttgctcgcttttaccatattttcgtaccctaaacaagtatgcggccaggacaaggattctttatatcttgaatttatattgtggatgtagagagggagagaggagatgcaccttcaagcttggtattttttagctagctaatttatctaaaagccattccggtatatttttatttgcctcattaattgacttttgatatctttcaaggagtacaataagaataaatttttcatatatgaaagtaaattactttgtgataaattttatagttaactaagttatgagataaatgtgtaatttggtctttttcattaaatagatatttgcttcatggaataatttagggaaattagttagttgaaaattgcagtgaagttgtactaagctgccttggtttttgatcactgagaagggagaaggctgagtggaaaaaagtgataacatcaaagcctattcagtatttttcttttttgtttaaagttcgaacaagcgtaggtgaaataatcgaagtgtagcatattgtcttctttgttatattaattcactaaaaattgtaataattcattctttgttgttaagtcaaatgtaaaaattgttacaaataatgttaaataattaagtaactagtaaatctcaaactttaacaaaaaaaaaaaaaaaaaactatagtacttaatcttgacattaagaaaaaattagtaaaaaaataaattaaatattaaaatggatatgcaataattatatgtgcattattttttcttagtttttttttttctaaccgaaaaatttcaatgaaaaggaaaaaaaaaaaaagtcactaattttttcacttttttttttttgattttttaaaaaaaaaatgaaaaaattttttttt

SEQ ID NO: 99521 - DNA, 2892 bp, Cannabis sativa
  modified_base (2461)..(2476): a, c, t, g, unknown or other
ttttttttttttttttgttgcagagagctctctttgttgtggattagctacgtagatggagttttgtagagagagaggaatcgtgagaaggttgttgatgattgtagggaagagagagcataactttggtgtgtatatatatgactatttcttttttaattttatatgtctttattttttcttacataatataaaattataataagattgataaaagttgtgagttgggtgcatggaggagttacaagtgtgataggaaagtttagggatcacatgagaaaattttagaaaaaatgaaatagtgataagtggaactgtataaatttaaattaatatcttgtttgaattaatttttgttatattttttttgataatgagttcatatttacctttctaatgaaatagtgataagtggaactaaaagaagcatggagttccatctcaaaaggatgaaaacttggtatgtatatggctctgatatcatatttaaaaatatgggattccatctcaaaattaattgatgatgagtggagtagttcatgttcttatatataactcaatatttttatatttaatctatgttctctaatatttttaatcatcaaattattatttgtttaatattttataattttatcatttttattaaatgtcatttgctcttttatgttttacttttttttttaaatatactacaaagttatttttttatataaaacttagttagaatataaatattttaaataaaaatatattacattaattttataaaaatattagataatattaattttatttatttatatattcatatttatatatattatctatataaatagggacgggcccacttgtgttaatgtggggctataactcccactaacaaaattattaccttttaaaaaattaaattaaattttttttaatttgataattatagactaaaatagtaaaaaagtccccacaaaattaaataaatctagtaagaatgattataatatatgtataaatattttttaataataaaaagctcccacaaagaaaaaattctagatctatcaccgtatataaatgtatgcatttgagagtacttaataatacaactctcaactagtttttgtttattataaacttttagcaatttaaaagaataaaagtattaccaagataatgagtatatatttacctttcttttagtacatatatttttgagttgatgtataagtgaattttagttgtttcaagtttgttttatttttttcatcaaaagaaaaagtttattttattttttgaggttattatttaattgttcgtttgatattatttagttcttcaaacaaggaaaaaaaattatatttatttttcatgggtacatacatttttagaattttgtagttcaatttaattattactcaaattacttttattcctagttgcctaatctctggcaatatcatggtggcttttgaaatcatgcattatcttaagaggaagactaaaggcatgaaagattttatggcctttaaattatgtatgagcaaggtgtatgatcgtgttgaatggtcgtatttgagggttgttatgcaacgattgggctttactgattggtcattggtggattagtttgatccttcattgtgttacttttgtgaggtataacgtgattaatagtggtcatcttctgaggcctattgtgcctaatcgcagtattagaaaaggtgaccactctccatttatttattcattatctgtgcagaaggattcttaaactttacttgaaaatatgaagctaatcgtttgttgcaaggttgccgagttgcccaaggagcccgtaatgttactcatatgttattcgcagattatagctaccttttttgtcaatcttctcctcattcagccagacgtgtgctaaatctcctacgttctttcgagaaggcttcaggtcaaaaggtgaatcttgataaatttttaattttcttcagctccaacactgttgcagattgttgagttgctatctgcgaagcacttaatatgcttgaagcttttgaaaacaacatgtatctcggcttgccaaacactatgagcaggaacaaaaaaatcaattcttggttttctcaaaaataagactcaaaacagaatttttaatttgaatgggaagcttttgtcacgatctggtaactaaactcttcttaaatcgatggttcagtctctatcttcttatgctatgagcatatttttgctccctgttagcacgtgttctgatatagaaaggttaatggcccaattttggtggaagacaagctcctccataggaaatggtaatatttggatgaattaggaccatatgccttatcatatgtaacatccccgcttcaagcctctggactcacccacggactcatggctcttatgcacgagtacgctaccctggttgctacctagattgatgactgaccctacnnnnnnnnnnnnnnnnttccagcgtgctttgtcctcattcacacgcttcttgggaaaacttcccaagaggtcacccatcttcaaattaccctaagtcaagcacgcttaactttagagttctttcgtgatgggctaccgaaaaacaagatgcatcttattgatataggtagtaccaatcaatccatttaagcctctaaaactgtgtagtcccatacctacacagtctcagaatcatcctacttgaccttccccaagcgatgcgggattgcgcagcttacctggtgtttccctttacgaatcacgggactactgactgtcacaatcaccctgcctaacggggtctgacatcctcgtcgaccacacttccagctgggtcaaggctctgatactatttgtaacatccccgcttcaagtcttcattgggcctttaca

SEQ ID NO: 99522 - DNA, 1230 bp, Cannabis sativa
  modified_base (597)..(617): a, c, t, g, unknown or other
attattaatatttataataataattaatttgaatcaaatttatttatgagtagttttattttcacccacaaaatctctttttgaattaatttataaattttttttaaaatttttttactaaaaatctcttttcatatgtattagtttcgatagatacatatgaagtttttggaagaaattttatcacaattcaaagttccccaaaagtgagatttattttgcaaacgattttactttgtttcactactaagatgaattttcgtggtaagaaaattcttattgacaagaataccctttctttccatatctttaaattgggatacccgaactcatactatcctcatgtacccgtactcgtataaaaacttgtgaagatactaaataataaaattcccaaacccattttattattagaataattatataaaacacgtaaaaattttacattacgtttaattttttacatttttacagtgttttataaaaacaaaacgaaaacaaaaaaactacataaaaataataagaaaataagatctaaacaacattcaaacaatagcaaatacaaaatcattatataaaatactattttttgtaaannnnnnnnnnnnnnnnnnnnntaaagatttttttttatatttttatagtattctataaaaacaacaaaaaaaaccacataaaaatacaaaaaaataacatataaacaacaataaaacaataataaaaaataacatacacaaataacaaaaaattaacaagactaatacaacataaaaatacattaaaaacccatattttctataaacaaaatcataaaaaaaacacaaaaatatttaaaattccataatatttttgtaatttttttattatttgagagataacccttgcgaaaacactaacaacattacacaacacatacatacattacaccactctcttgtgttatgtcacactcataacacacacaaacaacatacactatttaagagtctccaacttctgagccgtattctaatcctgactttcccttacaaatcaaccgaacaataaataaggcgccgagccctacaacagcagccgcaccaaaaccggccacggctgccaccaacaccgcaactagggctaacgaaagagggccgaataggaacacaaatagtggtgaggtaacaagtaaaatgacaagtgatgccatgaaactcaaccctgccattgccaaaagaggccctccaatca

SEQ ID NO: 99523 - DNA, 1204 bp, Cannabis sativa
gctgggagagtatcccaaaatatttttatgcttaacagctgtagtttaattcactcaaattacagtaatattgaacacgttaaggatatattaattgttaggactactttaaaaataatcaataaaaaattattcaaaagtatcagaaagtcaaagtgcttattatttatacaactctccaaatccaatcatataatcatatgaagaattaagacatcaaagcaagaggctagagaagtacttaaactttttatttgatgaacaagcatcaaagctaataagtgattaaataacttatagtactaaaatcaaactgatcacagtgcttcttttgttgttctatatcaaaagtaattatttgatcctgctaatttgttttaatgaagctaattcaacttaaccaaaacaataataaaagtaaaaaatgataatataattattataataagatagcttctgaccataagaaaacaagaaacctcgcatattattctcattatacttaggttttgcaccaagcaaaataatactattctataacaaaattatgtttcaacatcaacaaatgatataaatgaaaacatacctgtttttgaataagtctttgccttggatcttaaatgatttgcaagatcatccagatgtgttggtgagacaatatagggtataatttggagaagtttctgcatgaaaacataagtagctagatagatatataatcatgatggatcatgatgaagatatatatgttgaaataaatattaatgttgatgagtatgaagagagaagctagctagatgggtatgtaggtatagtcaaagttgtaaagagataataatcacttggttggagtgggtaggtttaataccagaaagtccaaaacatcaccagataaagggtaagaggctattattattagggcatcgtcagattacaatactaaatttaatgttttagtatattcagatcaagatagggccccatatctcacaaaacaaaaaacaaatatatactgtggggattaatttatatttattaaatatagagtttttagcctctaaaccatcccggttttgtttatgtatatattcttgtatacatttccattagtaaaatctaatttataaaaattataaaaataaaaaataaaatatttaaaataaaaaatattataaattttgaaatagtttttatattttaaaat

SEQ ID NO: 99524 - DNA, 1687 bp, Cannabis sativa
ttttgtaggaagtttttggcactgttattagggactgcgttagctaatattaaagtagttgaattttattctaatttggtttttcttttcaatttcattaattctatcagtttcaactttttctcatctcatgttaaggtagtttatgcgatgttagggacctaccgtaagagtgtttgttgatcttaaaattcagaagactagtaagctgaatagaaagaagaagaaattgaaaaaagctattgagaaagagagaaggattaaagttggagaagaaatgatggatcctttgaatggtaacaatggggtgaggtagtaaagcaagctaatggtcagaatcaaccagccggaagtttgagagactatgtattgcctactataacaagggttcaatcttgcattagactacttgttgttgatgctaataactttgatatcaagcccgctatttttcagatagtttaatccattgtccaatctaggggactacctactaaacatttaaacttgcatcttcctaatttcatgtagctctgtcaaatatttaagatgaacgaggttaatgatgatgctattaaactcaaattattctcattttctttaagggagcaagctaatggatgatctgacactaaagttcttctccaagttctttcctacagctaaagaaactaagttgagagggaagatcaataatttttaccagttagataatgagtcactttctgaagcttgggagagattcaaagatttgataaggaagtgtctttggaacatgtttttattaggatctttttactaccatgtatgtttgattataaacataataatctaacatcctaaaccatgatttactactaggatctatttactaccaggaagctattcatgttcatcacttgacaataccctgctataaaaagagaatcaaggattagagtggttgaatggaaggattcactaatttttgctccagctaatgcgagaatcctaaactatttgtgttatttgatcgttttgttaattttatattttaggatgttagactataatgtatataatcaacatacttgttagtaaattaagatcctgataaaataaatctcaacacaacagatattgaacaagctttacaagaggaccaaaatttgaaattaacgaaaaagcaatcaagactagaaatgaattatcaataagaataagaaaacaaaaaaccacttaggcataatctatccactcttccaaaaaaaaaaaacacataccttatggattcatctacaaaatacttaacaagcctagaaaaataaaaatggtgaagatgtaccaaaatgaagatcaaataaacagtgagatttaaggcttgacacagcaaaactaagaaaacacctccaaaattgatgcattgtctgacccgatctgtctcattgcatagctctattgacaaaactattcattgagttatatttagctcagaaaaatataaatatatatttagtctatcgtaacataaaaaataatttaagaactttaacaaaaaaaaatttacttgactagagactcgtgctaataacatattttatattatgctaattgggattttttttcctgccgaactttgacatgtaccaaatcatgctccttgaacttttttggccgttaaaaattatccctgaactattgagattgt

SEQ ID NO: 99525 - DNA, 2293 bp, Cannabis sativa
tgacagttgaatcttcgatcacctcacaagaattcaaccttccaaaaactgttcaatttgccaccagaagagtttcttattagtgattttacatgccagttgaaaagaaaaatgccattacaggttctagctataatttctagtccaatactagacataattttcctactctttataacaggattgaaagcttacaagtttctcaatacgattctttgttgcagggtcggcttttcctatctgcgagaattgtggggttctattccaatttgttcggttacaaaaccaagtttttctttctttgggaggatatcgaagatatccaggtacttcccccatctatatcatcagtcggtagtcctatactagtcataatcttgaagaaagatcgaggtcttgatgccaagcacggagcaaagtctcaagacgaagaaggcagacttagattttgttttcaatcatttgtgtcattcaatgtggctagcaggtgctatatagtcttaaacaaatatgcttcacttatggacaaaaatcttcttcaatttgtattaatagataaggtaaatcaattcattttcagaacaataatggcaatgaggagaagtagaattctaacaccagatcagagagctcacattgctgaagagcaggaggatcaagaagaaaagcccatcatggttgaagaatctgattttgtgttggaagctgaaaatgtcaccatgtcaaaaatctatgcttccgagcttcccataaatgtaagtgtgagactagatcacctttgagcatttttgaactaacatgtcatagaaaattgccattttcatcaactttgcaatggattaaaaatcttaaaccttgttgggaaatggcacagctaagcttgctgatggaaatgtttgatggaggaaagttggagctaaaagtaatggaaaagtctggttgtctttactactcaacaactccatgggaaccctttaaggatgacattcttgaaagaaaactttcatacagattcaatcgttatatctcagtctttggtggagaaatcacttgcacacaacaaaaattccctatccgaaatagccaaggctggattttgaatgaagtcatgacctttcacaatgttcctttctgtgatcactatcgtgtatgtatcaatttttttacaattcaaaacactaataaaaagcattatctcgtcgtctacattagtgtatgatactctcaacactcgtcgaaaatcgcatgatttcggttataacttctttttttttatgtttggtgcttatgcaggttcacttcaggtaccagattgagaaatctgtgattgcccaaaatgtaagcaaatgtgatgttgacatgggaataacatggctaaagagcacaaagtttcagcaaaggattactcaaaacattacagatacgttcagaaaacgattcaaagaaatattttccttagtggagaaagagattctcttagctactcaagttcagcacacaattacatcatgattcacttacattcaccatatcttttgttttgtacctttattcaattttttttcatttattttattaaagaaattattgtaaagaaaaaaaaaaagaaaaatttcataatggaaaagtcttttgttgaccttcggttgtgttgttgtttagcattaatctaaataatacattatagtcgtcatcaactgattaatcatttaagtttaaccaacaagaaaagaaatttggtactttttaagtccaataaccaagaatttgctaatttatgcctatatgtagaaaacaaaaaatagaatcattaaacttggttttgtaataaaaacttcctttattcagaaaattgtaataaagactttcaatatacaatagtctactttaaaaaaaaaaataaacaaataaatatatgagagtctacgagtaatttttatactttaaattagtttttttaaagaaaattcacatagtaatttacatagcaactaataaagtaatttaaattgtaataaaattcacatagcaactcacataataattaaaacaatcatcgaagcaacttaaactgtaaatttttaaaaaaataataaaatatgaaataattctaaaaaaaatatttatatataacttggttttgtaataaaaactttcttttttaaaaaaaaaaattgtaataaaaaactttcaatataccagagtctacttttcaaaaaaacaataataaataaatgggaaaaaacagaaaaatacaaaaaaaaaaatacaaaaatattatgggccgacccat

SEQ ID NO: 99526 - DNA, 2257 bp, Cannabis sativa
  modified_base (1461)..(1463): a, c, t, g, unknown or other
  modified_base (1828)..(1831): a, c, t, g, unknown or other
agtataaatgttgtttttgccgtggaacagtataaatgtaataaaatgggaaaaatcagtagtgggtgtaaatttcccaaagtatataccttacatcataataaccacaaaatttaaaatcaatagtcaaaaaaaaaattcgtagaaacttttactaagtcctaccataatattaccctatatttatatcactcttattaatctaatatttagacacaattagatggatcataatatatagcgagcggccgggcattagattaccttttcatgttgcccaaaaggcccaagtaatcacaaaattgttacacgtgtcagttagctacctggtcattagtcaactcaaatatatgtatcttaaagatgatgtcgtgaaagatatatagagaaatgataagtggggactaatatccatttctttctcatgttcttatattgataagtatcagattttacgttaattaaataattaatttaataatttttaaaaaatattgccatcaaatcagaacggattacctctaaaaattaagtatgaattattgaatattgttttcatatttgatatattaaaaaaaacaaagtccatgctaccaatcaaattcacacacttgcgtgggaataataatagtaatcctgttatatattatttatttttcgctgaattcttatgtatattatgtgataatgcaaatctcactaataaattaagataataatctattcacgatatacttatttaattttgtatctatattgtaatttacaatagtatagtatattgttgtcaaatgggcataataataagaaaagtgcataattttttctacagtctacatagagagatatacaaagatcatcttatctcttttttctgtatatatatgtcgataagcattgtattatttgtatattaatataaaattatagtacatgatatgcattgtatgtataattaataatataaaaatgcgttgttcccattcagtattacagatacagaccatactatataatatatgcttacgtacttaaggagattgaagtatatatattagttattaattactttaatgaaaataaaaaatgagataaagcaattttttatatatctatcttaattaaagaagcttattacctcattcggagtcattatctcacataaattgacaattatattaaaagagtatttatttagttgggttgaaaggatacaaaaggaagtgattgtcttgggtagtggagggtgttgactgatgaaaggaaccaaattgtaaattgtgaaccataaaattaatttattggacgtaaatatcatgtcccacatcagtgcaggtctttttaatgtttgttgagtatacatgcagggctgatattatatgactgtatgtatataaataaatgagtaattttcagtataaatatttcagtttaatttttagttacaaataaatatttaannntaatttttagcggtaataatataagttatatttttgaaactctgtaggtacataaccgttaaatgttaagtcattatccacatattatttttttattggtatatttaaactatttttttaaaataaaaatttaatgacttggaccaatcatagattgtcatgtaacaatttacttaacacttaattaccaaatacttaattcaaaaaagaaaaaattgccaagtacttacaaaaattttaaaattataacttatgtatgcccgccacaaatattagggggcaatttttttttttttttatataaaaattacatttataaaaaaatattatttttattataaaaaaaatataaattttatagagannnnagtagatatatgagaataaatatgaaaatattattgtttttttatgtatgtatatcaactatttaatgagaatgaatatttacttgaagtgcaaatgagttattctgtagtaaaaatattttgtgtaagtattatttatagaatgataaattataaattcacatgtatatatagttctgtaatgttcaaaatatgaaggaaaaattgcatagtacattgagttttttccattttttacatttatacggctagatagtatttttttttccttttatactgtataatttttaatattttatacggcagtatactgcattttattaaaaaaaaattattgtcattttttggcttccacgtgtcttccaaagattatacctttataaaatttaaatttttttatatagtgttaaaaaatttaaagtttgg

SEQ ID NO: 99527 - DNA, 1652 bp, Cannabis sativa
gtattgctattctccttgtacaaattcgttatgaagatttagtgaaagaattgatctgtattacgctaattcttatgattactaaaagacagtgtacgcagttttcttagtggttgctgcagtttcacattactggaaactaaaagtacgtgaactgctaaaaatgcagacctaaatcacgtgcaactaacaggaacagaaaatagacttttgtccaagaaaacttgtcctgtattggtagttgttcaaggcaatagatacgatttaagtaatgagttttgacaatttcaatgatgatattaatatcttgatttgaaaattgtataagaccaaacttttaggaacatcacgtgtggataccaaatttaggactgaaatactaactcctcatgtgcaatgataggaaacttttgaaaagtgttatggagttctcttacagtttataatatctgacaaagatagtggtttatttatctttctgtgtgtgtgtgtgcacaaaaagaagttgctacgagcttacacgtgttattgctaaaagcttacaggcctgaaaaagaagcctgttaccttgacatggaaagataacaattgctctacggtggaagtatctggacttgatattggatggggtcaggtaattattttgttctagagacaccctttttgacctttatgcttattgtggaagtttgatttaatgttgtgcctggggattggggaaattagatatagctgccataaatttgcatgcctaaattgcacacagtaatgaaaatggaatggaaccatggttggaatattatgtctttaaatattattcttccacttgtcttctgataattttcagagaatacctctaaactttgatgaggaacaaggtctgtggactctaaagaaggaactgttcgtaagtaaccttccactatctatgtctaaattatatcaatttgcataatgacccctccctagtaaggcaaaagtaccttattttaccctttattcaacaggaaggtcgatacgagtataagtacattatcgatggcgaatggacaaccaaccaacatgaacaaatcactactcccaacaaggatggccatgttaacaattatgttcaagtaagctctacacagtggttctgtgcatgaaaagcattgatctcttaaaagggttttcttgatgtcatgtagtaactggttcttaaaaattggttcgcaggtttttgacgatgattcaaatagtgctagtgcatccctacgaacgaggctgtttgaggattctgatcttacaacagaggaaagagagaatataaagaagttcttggaaacttttcctgctgatgaatagaataaatacgaatctgatcaaccctgcatcatgtagagtactaataatttcagatcttcccattcacaacatcatcatatttgtagtttttttctttttatttataatttttggtgggaagtaattaagaatatagattttgtatgtagcataattggaataagcatgttcaactccaaaagtaaaggaatgatctcgtagaataatatataataaagaccagtgttactaatttttgtagtgcttgcaacttttggaatgcaagaaatatctgagtaataagctacttgtttaagaaaagtgaagtt

SEQ ID NO: 99528 - DNA, 1226 bp, Cannabis sativa
caatgccttgcttataggtgcctagttagaggtaaaggtctgaagaaagaaatttagaccaagaaagataaattgaacttgcaagagttaaatgtaacctatgagagaaacttcaagaagcttcacgctgatgttgagaggaatttgaggaaagaagctcagttctaagatgccaatggcctcaaggctaaaactatattggggtccatgcctaggtatggttgtacttcttttaggcttattaaggatgcaattgaggccggcgtgaaattacaggctgtagtaagagctcatgcaaagaagattcaccttcagtctttatatatagccttcgtggttacacttcataagttgtcatagaaagactccacaattttgaggcttcttaggatgaggagctggagtacacaaacaaggtggcaaccatggaggttggcacttatgttgacacttatggcattaacattgatgaatcatacgaggaatccaaagaagaacaattgactagagtcgtagggctttccctagaatctaaggtcccacctggccagccttgactttatcttttctttttcctcatttatttcatttgattttgggggcttttggccccctttttcctgttgcggagataattcctttaggacataaccatgaggctttgtctaattgattaagacaaattttttcctagttttacatttatgtcatgttgatctctattttctactagtttattagccatttgataggttgcttttaggatgtttaagattttaagatctaatggctagaattttagaccttatatccgttttatcactaactttaagcaatcaattgagctttagaaactttctgggagccagtcccatctctagacgtcaacacattagatggcttaaggccttatcatggagcgcataaatgttggccagttaatcattaagtagcataaaagggttgtagtcttgctcctaaacacttaaaggatcatcgggcttaactcctttttgttctttttaaattaactagttgagcagattactagatttacatgcactagtaaagtggctatttcacagaaggttaggcttcaatgttttaggcataactttattcttttcgtaaatatttgataccattatgctcacacatcaaggtttgtgatttaatatttgtaagaaaaaggttgaaagtgcaatgggattcatgcaatgttttgt

SEQ ID NO: 99529 - DNA, 3595 bp, Cannabis sativa
tttaaactcaaattctatgctatattgattcttcacattacaattggaatttatccaatgatcattatcgaagaacacatgataacaaaaacacatattatactaatttatctgaggtagatttcattttactaccttatcattgttaaaacctatgtgaaaacaaaaattgatcttacaatagtgaacactaaagatctcatattcctattgccaccaaaaagcaatgaaaggtcaaaactactactaaccccctaaaagaagagctcttgcttgatggaacatgcacaattttttttttttgtatgatcgagtattttgcgaccaaatcccttcatgtttcaatttttatacacttaactcctgctattttttttagtgacaattctttaactttatatttctatttacaaatttgagcgtaagttaaattttaccttaaatgtcaactagggctaccaaatttactatggcaatactcccgtaacagaagtaaaattaagggagtactactgccacccaaaataggcgtcatgtacacaatagcgatctcatttgacatataacggttaaattgaacaaatacctcaaatttgaaaacagaagtgaaattaatggagtactataaaaaaaaaactatataaaaatagtaaatagcgacataagtacttaaagtaagtggcataaactcaatgtctatttttaacgatataagtactcaatgtttgtaaaaatataatttttctctaattttatcagtacagactttgatattatcttaaacatgactcatataaaggctaaattctagatcattgggtctaagcaaaaatatgaagtatcaattacttccaaaatattcttttaataaattcaaaacagagtctgtagtgacaaaggaaaattacagttttataaccattgaatacttatgccgctaaaaataaacattgagtttataccgcttagaaattactctttaagattacatacaaaagaaaccagatttttaaatctacagtacaaggatatcaatgggtttggaatgtttttgaacaaataacctaactctctctctggctttgtctaactcctgtgttttgacatttagccatggactttccttcaaacatggatgtctaacatcaatagtaaccttttcaagtgacactgcaatatcaaccaaccttagccaaagctcagccatatgtatatttctatggtcagaaaaaccatacaactccacctccttaacactttgatgagtaaacaacactgcttctcttaattttcttatctgatcttcatttaacaacaactatcacatgtataacaaattaaattaacatcataattgttaagctcagacagtagaagcatatacttaaaaatgttttctttattacctgatcatctctatcatataagtcttgatctgtacacttgaacatcatctgtcacaagattatgatcagtcatggaaaacagaatcccgtttaggtaagcttctacttttagttttggcttatttcttctgtttggataactaaagaaaagttcttttgaagttatttcgggtgaagctagatccaaacacgactttagtaatcctaaaagctaaaaaagaacttatagaacaaagccaaacggggtcgaacttatggactattataagacagaacaaatataatatgttatgatgttaagaaccattgttaaaccttaaaatgattgaaatgtctacatttttttaagagaaaagcataagcttttagttgttcatgagtttgcttaagcaacaaggaaggacatggtagtaactaaccttcattgaaaacctatgcaagagaggagcagcctttatcatcaaacaaggccaaatgatacattgatcacagtaagccattatagacagttccaattgctcaagattacttaattcaggaacttgagtatcaaaagctctggccacatgattgaagttatagacctaattaacattaaagaagaacacaacaacatatgagaaataagtgaaagtacaaaagtagttgtttttaaggtaaaggagtttctttcatttctttcaaatactaaccgaactagacatgtccaacttgagtatcttcaacatagaaaaatacccgaaaagctctttagatcgattagccaaggaaatagtattatttcctccaaaatacacctcagatagatttggaactttattgaatggcatatcaatcaatggtccatcatacccaaatgaaacaagatttggtgttgagatcttaacaacttttatgagtggacactctaaaatctttaagctcttcaaattgaaaccttcacattcagaaacttcaactttgatcaaagaattagaacccttgatgcataaattcacaagattgtgacatttatccaagaaatactcaacaacatcatcattgacatcaacaaaactcagattcagatcagtcaatgaacaaaaagcatcacttctaagttttccccaaattttattgcacaaaactgaaatatgcaaacaataagggtttctcaacattcctccccatcgacctggaaaccctaaatcaagcttctttacctcttttacagcagcaaattcaacccatttgttaatatccaaacagtaactattatcaagatcgaaacaaattttcaattcctcgagcttcaaagacctatgctttcccataactcgattgacccaattcgcataccttggtctctcgaagcttcgctctttccttaaccatctcatatcctccattgtcttgctcgcatcgaattccaatgttcctgaaattagggtccagagattcttccatcgccgagaaagtaagcttgttcttgctgagtctcttaaagataagaaattgagtaccaaaaccagaatatcatcaggtaatttactgattagatcttcgtgatgatgatgatgatgatgatccattgttgatattttgccctaattgaaccatttccttttagaattttcttacttagttttcttgggaaacaaacaatcaaattcaaagtaaaaaaaaaaattataataaaaagatttacctttatttgcatacgcttcttgtgaggaagcatattagttttttttttttttttttttaattattaagaaaatcaaaatcaaaattgtttcttgaaattgataaacatatgagtgagattgaatcagatgtagaacaagagagtgtaatgtattacaaagtattaagattttttgttgtgtgttttttttaagaaagaaaattaatttgattgtcttactcgtatttaggattaatatgttttctttttctgtttttattatttattttaaaatataataatttgacaaatttgtgattacaagcaacactactattttgactattatactagaattttttttttttaaaaatttgaagatgtactgaattaactttttagtgttatttttagtgttatcattttatatccacatctatataagaaaatgaaaaataatgaatatttaaatttaatttttagcggtaataatatctaagttatatttctgtaactttgtagg

SEQ ID NO: 99530 - DNA, 3578 bp, Cannabis sativa
  modified_base (3258)..(3272): a, c, t, g, unknown or other
ttttttttttttttgttaaaagaaaaatgaataaataattttcatccgaacacgtgtaaagttttaggtttgatatattggttaagaagtactaaaattattgaaagggagcactctcaccaaacaaataggcaaaagggaggttaatagtttatagcgtcactagttgcgtcatcccaaagcaaccccatccacctaaacagttccgaattgttggtagtattataaagtgatcatttgacatttgctaagttctctcacacatggctaataaaataatatgatcactatttgattttcactgtgtaattttctgcttgcaaaattttgattaatattaaactttatttaatttgttaattctaattaaatatatattttcgaattttaaatcattatttatttttaaattgcactcataatgaaattggagtattgatactagggggtgcaactataactccccaaaaaattaaataaattaaagtagggtttagtaatactctttttaatcaattttatgttttttcaattcaaaaagtgaaaaattttaataaaacaatttttataaaattattttcacttttaaattttttaattgagaatcaaaattttaaaatttttaaaaacaaaaaagtcactcatgttcacaaagaaggaaataaagaaagcttttttttagtatcccgaacgctaaatctcctggcccaaattgttatggggccggtttttttaagaaaatgtggccagagttgggagctgatttcactcaagtagtggagagtttcttcatcacaggttctatgcctcaagagcttcatgctacaatgctcactctcattcctaagattgaaaaaacaactaaggcagtggaatacaagcttatagcttgctgtacaacagtgtataaatgtgtctccaagctgttatgtataagactttctcaagtgcttcctttgattatcaaccagaatcaaggagcgtgtgttcaagggagatcaatagcgcataatgttatgattcttcaagacattttgaagaactacaatagaaagaatatatctccaagatgtactcttaaggtggatataagtaaagtgtacgacacggtgaactgggagtttttagaagctctcttgaatgcttacaaaattccagccagatttatattgtggataatgtcttgtctgagagctaactacctactcaatcttgatgaatggaagagtgcaaggaagtttcaaaggcaagaaaggcctaaggcaaggtgaccccctctcccctctcccctctgttatttgttctgaatatggagtatttgactaggcgtctgcatatggctgccaatcaatcgaattttaagtatcaccctatgtgtaagagtctcaagataataagtctatgttttgcggatgatctgatgttgttttgtaacgggaacttaagctccatacaggtgttgaagagtattttagatgagtttagttcctcttcagggctagcaatcaatgttaacaaatctcaactctattttggaggggtgaaagaagaggaaaaataggctatgttgcgagaaatgactcttttagaaggtatgtttcctctcatgtacccgggggtgcctctaagaccaacaaaatggaaagcgaaagattgtggtgtgataattaagaaaatcaaacagagactccatacttgggtaactagacatctttcgtttgctggcagggctcaactcattcattcagttttgttagggcttcacaactagatgagtattttcatcttgccgcatagtatcacaagggagatggagaagctatgtagaggttttctttggggttggaatggaaatagaagtaagcttcatgtggcatcatgggaaaaagtttgtcttcctaagtataatgggggattaggattcaaagatggggtcaaatgaaatcaagctgtccttgccaaatatatttgggccatttcatccaaaagtgacttactttgggttaaatgggttaataatatatacagggccggccctgaaaatatatggacccaagacgaattacattttggggccctaaaaaatatttaaaaaaaaaatacaagaagagtgtcatgggatttgaacccataactttagacattattccatccacctcaaccaactaagctataaatatttgttgcttataatacacttaaattttccttaaataaaagcctaataaattattttatttttttattttgggcccccgaaaagtgtgggctctaggcacgggcctagcccgtctatgcctagggccggctctgaatataaacctcaagaacaatttcatttggacctatgacctaaaaaatgatactagttggtattggaggaaactttgtcatttgagggacaagtttactcaaaatgatatagcaattgcaggggctgctatgggtcgattcaacactaagctgctgtataaccgaaagttgctgcaatctgaatttgatattagcaacaatgtttggagcaactacaatatgccaaagcacagattccttttctgggaagcggccaataaccaactgttaacaagggacaaacttgctcaattcaaaatcacccttgacaatattttatgtccgctttgtggtgctgaagctgagacaaacaaccatttgttctttgcttactgtctttgcagcaggtgttaactcagctgtgtgtttggcttggaatgagaaaatggccaactgattttcaaggttggcaaagatggctagtgcaaaacaagaatgataagaagcagagaatctataccagtgttatggcagcattgatttacaatttatggagcaacaggaacaattgcatttttaacaatttctcgagtacagctttgaaaattgtactggatattaaaggtatagtgttctataggttacaagttgcaaaaaaagggagcttaaaaacttatgagaggaaatgtatagggggattatactgtaattagtttttttgggttgtgctgccagttttggttaggttgtaattgcttgtggttaatgaagttcattccttcttgattaaaaaaaaaaaaaaagtcactcccaaaattttttaaacagattcttttttcttattcaatattttagactctcaccagacctagacctggacactgtggcgaactcagaatttaaagtgagggggggcataatttttttttctgtaaaatcagggagggcaaaaataaatttaaaaannnnnnnnnnnnnnnagttagtgggatttgaacttttactctctatcatatttgtaatctaccttaaccattataccaaggttactattatgtctataaatatcatcttttaatacaaatatatgttttaactaactaaaatacatatacagtttttcccaatttttttttcaggggggcgactgccccctctcgctacaatctgggtcagcccccgcttggacacagtggcatacccagaatttaaagtgagaaggggtgtaatttttttttttaaaagcagggagggcaaaaattaatttaaaaagaaaaaataaagtg

SEQ ID NO: 99531 - DNA, 3477 bp, Cannabis sativa
tgttagatttatttttggataattttagatgacattaaatctttatgtaaacattaatttcaatgttgcgtgttttagtcattgctccaaaattgttaatgtagtaactgattctcttactaaatttgttttataactgctgctagcacagtttgatggagtaaattatattctatttgtatcaaaaactatatcctagctaatctcatttattaatgaatctcccaagctctcaatccatttgagtttcatgttctttggtcgtgttctttgaaattatttttcaaaaataaataaataaataaattaaatgctaaattaaatgctaaaatatacacatcattacaaaattaaagcacatgatttagctgtaattccaatcccaaatggcatatttctattaaccatagataaaccaacttaataaaaaaaaaatcattttttagtagtattaagtgcaataataattaataatacaaaaattcattagactaccaaactaataaattgtgagtgtaggagtaagggcacgtgttttaactaggcaattaatttatgataacaaggtaagagtaaaatgtctatgcaaaattgtctttttaaataaataaaataaaataaaagtcaaatatttcccacttcccttgtaatattgattattatttatgaaatgcatcatgcatgtaaaaagaaaaacaaataagaaaaacactatataataaaagtcttaatattgctgctgaattaatttcttatttcttattattattatttgtttaacacgagcctatattaagtgttggtgtggaattaataatgtctgaattatactatttgcaaatggcttatattagcgtagaggaataaccaccacaattagtgacagactaataaattttatttatcataaaaaaatatttatagctacattataatcactcttactaaatttatctaattttgtggggttattctaccattttgatctataattattaaattaaaaaatttatatttaattttttaaaaaacactatttttagcctccacatcaatgttaatgggtctgtccctcaccgcaatcatcttcatttctataaaatcacttctaataaaaataaataaacaataataaatgtactatataagtcaaatgtgtctgtttcaagggatgtttcttcttaatctgtacaaaatattattgtttttatttgtgattgcgttgtgtgacttgtgtcaatatatacattgtatattgcttaaatttgaatcccatgcaaattaattaattttaatatagtattctctctttgcgaaatttaatacaggcttgtttttaatcaccaattattagtcaattaatctttagtttctatttatctaaacaaaactttaaatttttgtaacgaattaaggaaataaaaaacttaagaataataagaacaaaaaattagcaagagaattgaaaatgaaaaaaacaataaaatttaaaaattttaataagaagaaaattaggacagttgaattcctcttctacccttttaattcccaatgcaattccataattcatcttcttcctatttcaattaacaaaatcaatttataataatatatattatgaattataaactcaattctaaatgaaatttttctatatttctatggcaaaattaattacaactaagcattaagtatttcaactcagaaaaatatacaattaattaaaatacttttgttctaaattatacaattgtgtcctaacaatcaaagtattatcaaattacacttttcaatttttgattcgaaaacatatagatattgatcaataatgatggccaatcaataatcaagaaataataaacttagattgataggaagtgaaacaagagtgaagaagaacatgaaattgcattagatcataaacaagaattcaagagattcatttaacaactctaaagaaagatttagcctataattgtcattctaaacataaaatattctgaaattaacacaaaaatagataaagaaaagataaaaactcttggaaagtagtgtgtttgacctcagcctccaaaaatcgcatctcctctcctctcccttctaagaaagaaataaatttaaagaagaagagaaaataatttttacgtgatttgagtattaataaactctagttcacgagtcaatattatatagagctagaaaagcttaaagatatttttacacaagtgtttttgaggaaccttaattcttagttcttgatcttagaaatcactctcccaaaaatctaaccctcaatcccttagcatgaagggatcctattttatttgcagggtaaatcgggtatggatatactcggacctagtaggcttctaagttatcaactaggtccactgatggggtaaaatataatatatactgactttttgccaattgagtgaagtccaattcacgaggtaacgatcgttcgcatgagtggggaccatttgaggatgtcatgtgtcgtgcgcaaccatatctgtatcaagaatgttagagaatgtgtcgttaaataaaaaggtgatctccttttggtagtgtgcgcactccacgagtctggcgtaggagataaacccttgatgtagtgaggccttgtgtttggtagacatcacgggaggtgacatccaggaaccatccagatgtatcttcaactgcccacgtccggattagcccatgagggtatctgggttagtcctggagtactttttgtcttttgatccagacaacctccctcggactagagtggttcgaccttgttatgtgtgtaattgggcttgcatccagatctagagccatagccttgactctgcttatgagctgagttattaacctgactgggcccatgaatgggtttgccttcgctgatagtgggctttggaagtgattacgtaacgactctgaaaacacaaataataggatttaaaaccttttttttttgttggagggaggcgggcctcaacttaacccatgtcgcgacccattatatatttttatagaaaattttaccccaatgtcgctgatctccttagccatgctgcgacctatgtctggacttcaaaacaacgtttttgtatagggcctagcattagctctccttaacccacgtcgcaacccttagtggcttattcaatttttgcatttttaatcccaaaattttaccaaggcctccaaatcgtatagggatctatcttatgttgagaataacaccaaaacttgaattttcttctctttttgattcaatttcttccaaaagatcaatcattcctctttattcactacaattgcaaaatgaacaaatacaagcgtaaaattgtactaaataaaataaaaacaacataaaagactaattaaaacaccacttaatcatgacataaactaactcaacaacaaattaatacatatatttttgtagggatatgattttgtcccgtgatgtacttt

SEQ ID NO: 99532 - DNA, 1766 bp, Cannabis sativa
tttattgtatcactttcaaataacatagaaaaaaactaacataaaatttagtatacgtgcctcgcacgtaatttttgctagtacataaaaaaacggaaataattgaaaaaaagaaattccgggtgggggagggcagaggttaggaatgtacaagactacaaaaagcatttgtctttggatattggaatcttcaacccttctgtggcaaggaaaatgaaaggaaataaggagaataattttttttttgaaagcataggagaataatttttttattgtatatgattcagcaaaaaataacaaaatagaaaaatcagcaatatatacattatataactttattatattgtatgcgaaaaatatttatttacaaataactgtatatttttttaattatgagaaacatattcttattttaatatacaaattaaattatatatagtaacaaatttgtatacgctaattaccgcaaaccaagtagaagtgtgccctgatgggtctgtagcagttttggttttttaactattttttttttgggtttttaacagttttttgaaattttcctttccccatttttttcttgcttttagttttcatcaacctcacagtgtgtttatgcgataactgctattattgatctggtttttttttgcttgcttcattcttgtcgtgatggatcctcttctacactccttagattctgcattaactcttacagaagaagaaagttttgttgctattttgcctgctgaagtcgcccttgcttcaactgttacctcgagccacatccttatagcacgggttctcactgataactatgttcataaacctactttctataatcaaatgtttggccattggaagggaagatttcctgccacaatctctaacaatggagatagtttattcaaaatttctttcggttgtgcaggagataaattttgagttttgaacaaggaaccttggtactttcagaaccatcttgtagtcttttgctcctttgatactctgcagaatttcacagccaaacacttgatgaccactcttttttgggtttaaatttaccgtttgcccttccttagcaagtcgaaaatgcttgcgactgccttggagaacatcattggggaatttattgatgtccatgaagactctcttgatgaaggatgggggcctttcttaaggattcgtgttagacaagctgtggacaaaccactacttagaggtcgaatgatcagtttgccaaggattaaagatgattttcggattaatttcagatatgaacgagtgccagaattttgcttttgatgtggtatgcttggacatccttttgaaaaatgtgtggctttcatggaaagaatggaaaatcgtaatgatgatgatctcttgtatggtccttggatgaaaggtgcgaagttaccaactattggttacaacaagtatcggacagatttctccaagggtcatgcctagccactcttggcacgcctcgctcgaaaatctctagtttcttcaatcccaaaactgggtatcagatcacagacttaaccacagattctttttcaaggagaatcatctgctgttgtgtcaaacatgtctatgaataatagtgttaacgctgatttttgttaaccagatatgagcctaaacagcgataaacttgcataaaaaaataaaaacagtaataaaaaaaaagtatgaacacaacggattttttacgtagttttgtagttaaaattctgcatagtctacgagtcaatcttattagattt

SEQ ID NO: 99533 - DNA, 1685 bp, Cannabis sativa
tatttataaacaaaaattgacaatgttgaatagaatggaccttttggcatttacactatatcagcaagagtgatttttcctctgttgccatgttgtaacgaatcaaattctttgcatatctgagtaatatcagtctctgctatctttcccatctctctaagcttgaatatgatgtactcagatttactgtgtaggaatttatgaactagatgtgaatttgatgagtacataaagtctgatataacttatacaaaaattaaagaaaatatgtacctaatggctccatcataatctaagtctgctgcagctaaatccacagctttaatcttcttatgaagaataatttttgcagtctcgcgatgcctcttgtcgattcttaattcggctaagaagagaaaagactgaccaactgctaatgtgctgatggagagccaaacaatggcaaaaattctgccttgaaatgttgtaaatgagaagtctccataaccaactgtagtaacagaagtaacagacacataaaagctatcaatccaactgagtttctctatgtaatgaagcccaaatatcccaatagctatacacaaggcaacagctaacagagcaaagcaaacccttgttctaatcctcattctcctcttttcaatatccataatgtatgtcttgatgagtttcttgaaccatttctctttgttgggtgccttttcagccaatttcttgaattgggttttttccatgaaccccaagagaagagcatgttgggaatcgaaaatgtgggagacccaagagttgaatgcatagtctacaaacccgaaaccaatcaagatgaagaaacaggtgaagagctttgtcaatacagtgttcgggacaatgtcaccatagccaattgtgcaaagagtaacaacaatgtagtacattgcatccactggtttgatagtgaaatgtcccttgaaacctttggtggttaagaaaacagtggccattccaatgatggccatgagaagaagaacaagagtagcacaatggtatgtgcaaaagtttgatttagggaatgaattgtggatttgggtggctgcgtggtgtcggtgtagttccccgaaatttccaatgaaaatcgatggagcagagggcaaccgacggcttgtgagacttggtcttttgttgaagttggaaagctcaaaaagaggagctatttcgggatcgtttaggaagctccgatcgtgtaagggatcctcaagtggtggttgttttgtggtgatctctcttggttgttggtttgtttcatatagaagagactcatccatggatatcaaagtcttcaaggagaagttttggacctcaaaatgtgagttttttcatatatttctttaaagtgaaatgagattggagaaaagagagaattgtaaactactagtcaaatatttgttggatcactttgaatagtttttcagtatggccaaatggtggtagttggaaatttagttatgtgtgttgtgttttgatcagttggttaacagttgcatattgttaatcaatattatattgtgagagactggcggaaataatgaaatttctaaaaaagtataagaattggttctgtactaataaaataaataaatattctaatcgtaaaaattaaaatacaggaaaccccatgtagcgatgcaattttaagaaatttaaaaaaa

SEQ ID NO: 99534 - DNA, 3365 bp, Cannabis sativa
ctccaaagcctcaacctccacaatcggccccgtaggcggcagagcatgcatgccatctgagattttggccttgtggaccgccgatagcacgaccaccctcatacggacttgcatcctttttgcctccaaacgccccttcatggccctgctcaccttcctctccttctgcatgatgagggggtcaaatggaatagcctttatggggaaggcgaaccccaccaggggtattcttggcaagattaagaattgagatcgaggcaggcccagcctccgtaggggattgtggcactaggggtggaccctcgttctagaggctgacccctcaagcttctacttcttcctagtagtatgccattcgctacttcggaggaacctgttcttttcattgcatgcttaatgcaactaccaaaagttgaaaccatagaaaaatgagttagcgcattacgtgactccagaattctcaaagatggcagtcatggaaccagtgttcctaaggcaaatgcaccctcacaactccctcaaaactcaataacaaataaacaatgagaaaacttaccagttgtcaagagaaatccgtggctggtgatcttggtgcaatgttctcgtcgatagaatttgtgtcagactatgaaggtattggaaaagcttcataagataggggaagaactggaattaaggaactctgacttgaccgacgggtaaaacgaaatgagcggaacaattgctaagggtatttaatgagcatctggaagaggcactttccacgagaagcgaatagtttgacgtttggataagtgggaagttgagaagatgtatcacctccaaccagacggcttctgtcatagcaagcatcataaaaagcactcgacaattgggaattcgagtcaaatccaatcatcgtcattttgggcatcccaccaaacacacgcctagcactcatgtaaaattaaaaaattagcatttaaaacccttacaagaaaatagaagtaatcatgccttctgaataatgataccatagattggcgtctaatgaaatcacgaagaaaagagcatgtcataattcccacgtgcttaagatctcttcgaggtaaatactacaagctcctaaaccgtggcatgccccgaaagcttagggagtaaatattatctatattttcgtaaaaatgacacgtggacttcaataaaaaataagataagaagttgttagctggatcaactttctcaattaatgatttgggaaggtaaaggcaccaactttgcaagaagaggttccgtgaagaggagttccctgactgctgccacacgaaaaggatccatgaaaaaaggtctccctcacccccaggagccaacaccatgcattactgcgaagagtggggattttccaagaagggccaagacattttgagaatgcctccgtctcggatacgcatttggcttgcacgagaattgtccacgcttgtcaagctacgaacatagtgactaggctttttcatgtacaatgtcagaggttgtctcccatgacacgctatcgtacagagcatgcgtatccttttgtattgagctaaataatccaatgactagggataagagaaattcaaataagagaagccccagagtgtcacgcgtccaaggacaagcttgtccagtcagtacgatctgacagcctcaaatgccatatggaaaatatgccacctacctatccaacggtgggatttcatccctacaaagattcatccaaggcagcgtatacatgaagccggcctataaatatctccaaaaaagaacaagagagggaggacctttttttggggggatagaggaaccattcttcatcatcctaggcaacaacatttttgttaccctacgatttaccctagaatattcctactaagcttcctcttcttcaagagtaacacgatggaatcgagtaaatgtccaattcatttgtatttgtataaaaaatcaccagccaatgagcctaataaaatagactcagggactaaggataattaacacctgaaccacgtaaaaatctcttatttgttatttcactatttatgccattattactttctcaaattctaaaaatatttgattgccaaaatactcggtaaatagttgttatgtaaatgttgcatcatgccatattatgattcaaatttggatcaacttttacaatttgacaattcattgtaatgtaaattttatatcaggcaatattgtgaatttgtgatcaaaatttagatcaactcttggcacacaatttgagcaaactttttacaaggtgatttatatttgggcaatagatcatcaatttgcatatccattggagatgttctaccattttccatgagagaagtaaaaattgtgctatattaacacaaataataattttgtgatacattttcataaatttttgtattattatattattaaaaatgacaaaatttatatatatgtatacataattgaaagctataatattatataggaagaaaaaagtaattaatatatgaaaaataagtggggtactatagacaatgttatatataagatagattttagagttgggttggaataaatttagtgcataaactttcacaaatttaactttttagagtttcattggagatggcctaataagcaaatttataagaaaaataaaataataactaatgtaaatttatgaaaaaaaaaaaaagaagaataacaatacaaaaaagattaatatcatatatatatatatatatatatgctcgtttagtcttttacactatcatatatttactaataaaaaaataagaagaaaaacaaaaaaattaataagcgagtaaaattcattaaaaaaaaatatgggagaaaatagatggttaaaaagtgtacaaaagacttagaaaacgtatttaaaaaaagtaaatggagtaaaaaattagagattttttaagaaaaatgaaaaagaaaaggtgagagataaaaaaaaaagagagaggaaaaagacaaaaatactaataattggtacaaacaaaacaaacacataactcaaaatatggcaaactaaaaaaatcaaattactaagataatcttattaagtttgtgaaaatataaaaagagcaagtgtaacgccctaatgctaaggcacgctacagtgcttttttatttacagtgctatctttgctaatcaaagaattttctcgaaaaaacgtgtcagatcagtactacaaatatcagaattcgcgacggtcttaaaaatgattcttttcggggatcgttgctaaaaaaattaagtaattatttaaaaccgtcggtaaaaatttagtattcccgacagtttaaaattgtagtaaacaaaataggcaacgtttttt

SEQ ID NO: 99535 - DNA, 1560 bp, Cannabis sativa
atcagtaaacttatgtccctctccggggctcgggccggccttaattcctccaagtgtcttggcattagtaaacttatgtccctcaccaggactcggcccagaatccttgatacctccaagtgtcttggcattagtaaatttatgtccctccccgggacttggaccggccttgatacctccaagtgtcttagcatgagtaaacttatgtccttcaccaggactaggaccagaatctttgataccaccaagtgtccgaccatcaatgaccttattaccctcacctgggcttggcccagattgcttaatggacccaagataaagcccatcaaagaatccaacaatccctctacgaacaagatcatttttccagtaatacttcttctcattattcaagatccgaccctctgttccattaataacagaattattaatcaacagaaccaataaaaacaaactaacaaagcatttgggcactatagtattattattattattcataatcatgtttggaaagtgagaaaaagaaaacaatgagagagaaaaatgagaaaaccccagaaagaaaaaaagtttattattttatttttctcaagtgtttatgtctaaagagaagtgtagctatagagctatttatataagttttactatatataatacacaaggaattaatttgtggattttcaaaacgtgaagaaactaaatttcagagaaaggaaatatctaggatggttcatatgggagactacaaaatggaacaaattaattaaatggagtccaagtaagaagattcatatatagaaaaaattaatacaatatataattttgaatctatttatttaaataaatagaaaaaatgaaaagggatttgccggcggctttattgagagatgtttttgtataaatttgatatgtttgtgttggtgatgagtgaccaaagacaatgcgtaaatgagagtttgaattccaaattttagtaaaagagacggctataaaatgaggcattggtatagtgtcataacttgattatttttcttctttgaggccattatgactagtcaacaataatgagttgggttattactattggtctatcttggactcaatataggtcatatatgactttcttggttttgtatctcatatatagaaaaaggaattcattattactctcatctagagttgtaggttaggaatttcgaacccgttttataggcgcgacacgaaattagaatgagctaggaggtacgagtacaatacaaaacatatgaatttggttatgatataaaaaattattcatattttaactttgcatacagattcatatttaagcctgacataaatgatttaagcttatgagttgggtaaggccttgcctttaaaatatgattccgacataatacaacctatatttttatatgagctagacctttatatttataacgaactatattaaactttactcttaaccactttatctctatatttaattattatatccctaacttttagcttccaccttttctagaatgctaaactttcaattaatataattttaagtat

SEQ ID NO: 99536 - DNA, 1612 bp, Cannabis sativa
attcaggtttgaattctacaacaatatttaatataatgttttgcaagcattccagtttgtagcttactttgatcaatccgaatgttattgatacagagcctaaaccacctgagctcatgtatctctataacatcacaaaagcctacccgagtttgaaagctttgtttaagtatctcagaagatgattaagacttcaccaattcaatccctcccctaaacgacattcattaccacatgaagctcaacactgaagctctggtaacaagttaaaagatagtaaaaggagttttcctaattctttatttttattttgtacggacgcgtttgatcctacctcctactgtgaaaaacaacatccatctaatttcaccacacgattgccgcaagaacaaaaaaaaatctaaagaaacggagtataaaatcatttaaagcaaacggcctctgccataaccaagtcacttccagaacaaatacagcgaaactcagaagtcagaaccaaataaacgtctcaaatcaatttttttttcaaatgaaaaataaaaaatctaacctctcaaccaataatcaaaacaaacacaatacacaccttcggttccaaatccgaaccaccacgcgactgatccaaggcaacctggctacgttcaagatcaagaaccgctttcaccgatgatgctctcctcctgcctacagattgatgatgatgaacactagtcggacgattcaccgaagctcccaatttcctccgagtcccgttcgatttgcagtacaagccaacgaaatcgacgagaaacattccatttttgagcgaaggatgattaggctgagtggcatagcatccactagagtgaagcaactgagaaatagaagacaccgattgcgccgccatggcaggcggcagatagctagagagagaaagtgaaagtcagagagatagagatagagaaaatagaaatgcggaggtgagtgagataaaatgacgatgatgatatgagtagaagaagaagataataaaagaaagagagcctctcactggtctgctctctctggcctcttgctaagttactaacattactattattaatatttctccatttcagtcagactcttccactgacccatgggtttcactcctctgcttcgcggatccattattattaacttttaccgttgatataaattgacggtcttgattttccagtaatctcggagggtccattgaagtacacgtggactaaaatgtgtgacaagcacaaactttaaatttccgacacaaatatacgctcataattttaatttccttcttgatttggctacgtacgtgagtcactttgcctattaataataaaaaaaatattttggggttgaaaatgatggtcggtggtggtcccaataatcgtatataatcgggtgtgacaatctctattgtatgtaccgtgtgcttttgattgtaggggtataagggtgtttatatagggctcgtttggtacgtcgtattgtattatattgtgttgtattcggggtcggctctgaaaatatatgggtccacgaattaaattttgggacccttaaaaatatataaaaaaaaatatcaaaaaaagagtgttatgggatt

SEQ ID NO: 99537 - DNA, 7586 bp, Cannabis sativa
tagtccaaactgcaaaaactgcattgcaccgtattattttttgcagtatggtttctatagtttttaagtttcgcggtgcgagtacgatttgggaaattagaaaaactacatgtgcgggttggtttgagaaaatggtcaaaaaccgcaccacttgcactgcgaacacccctactacaacgtggtacgatgttttcatttataaatagaaatcagatatattggaggaaaacttgatgattgtgcttgctactttctttgaaagcatgtttttgaatcacgtcgtattggagtgtggtgcgaaagaactaaaatggagaaggattatttgctttattaaattatgggttgtcatagtgtgtaatagccaataattgaagcatatagttaataatagtatgtcttggcctttgaattggaagtttagattataatacaaggggaaattttttatactaactcctagggtgtttgtggtgcagacatggatgatatagtttgaaactatttaactaaatcgcactccagcgtagtacgatatttgcatttgtaatagaaatcagataaaataactaaattggagaaaacctttgatgattgtgcttgctactttctttgaaagggtgtttttgaatcatgtcatattgcagtgtggtgtgttttttgtgtttgcgaactaaaatggagaccctccaatgaataaattgtataagaaaaacaatcgtttaatcgagattgtagctgcgacaaaaattagacgaatatattgaaaaaacaacacaaaatattgtatgcatgataaaattagggatttttatacaatacccaaaatcgtattttttacattactacgatttttttttaatatacgttcatggatattttttaatatttttcctttcactttgcaacaacatagtataatatagtagtaacgttaaaataacgttaaaataaatgttcatagtttgtaaaacaaagtttacattcataaaaatattaattcaactataaatctgtattttttggggggtatttttttgtcattctttatatttatttgagaaaaggaaaaaaaaaacatgagcaaataaaattttaaaatatacacataaagatgctgtgtggtgcgtttgaactacacttgtaaacttttaaatcaacatcacacttcaccacacaattaggaagagaataagcatggttgggtgatttatagggttgtcaattcgtgttatcatatcgtattcatgttcatatgtttatgacacgatatttttatggtaaacacaaacacgatgtaattataaatcgtgtctagatcctaaacacgagtgtgacaattttttgaaagtcacaatacgttgataacatatttaataaatctcgttgtgtgacacaacctaactgacactgatacgtttaacacatgttaaaataaaatacaaaattgatacaattaacatacaaaaatatttacacttaagattcatagtattaatctttttataaagagaatgagaaaaaaaaaaaactttttaagagatttttgttataatcgtgtataatcatgttattttcggataagcgtcttaacacgattgtaacatcttaaaagttaaaacttctattttaacttcaaaaaccattttctaattgccttaggcatctaaagctttgatagttgatgcagaattgttatacaaaacaaaactaaaaaactttgggaaacatgtctcagaattaaaaatgataatcatcgcaatgtactggaaaacaagtctcaaaattaacatcactcaaatacaaatcgacgaatcaacgtaaaaatacatgtgaacaagagaaaccaagcacaacacaaggctggggttttctatatatataagcggccaaataggcaaaaagaatatgacaacacaagatgagagataaaaaaattatttacttttggaaaccgccgtactgatactgttgaccactgaggctcgaaaaaaagtcatcagctcctattgcctgcgaagatgaaatcccagatcgtccagaccctgaacccatagctttgcccatgttaaatgaagttgagggtcctttgttaatttcatcgaatccatcgcctaatccacccacgacaccgacgtccacgagagatacttttttggctgcaaatgcattcatagaacagaagaattacactctcccatgtaaaagcaagcatctatgtaataaaatgaatgcagaaacttgaacttttcgtttcatttatctaataagggaggcctccaaatttccatcatcattccgattaatgccattttaagacaaaaacccagtacccatgttgatttagtttggagggacagaagggataaggaaaggaaaagtgacacaataagtaggaaaaggtaaaacttacgagcagatatattaagatcgattaaaccgcggcttagtgagtctgcccaaattccagatttcacttggaaattattcttcttggctgatgactgtgagtccaatgaacgatttccactcaactgactttgactgctgttattgacaaaattttgggaaggttccgacggtgctgaatcagaatgagaggtgaatgcaccaaaaggatcagaatcatcaaaattgttaagaggaactgcagcaaaaggatccacaatgtttgattttgttggggcagcattagtggacttagtttctggctgaggaactgtgtcaaaggctgcaaaattctccactgtggaagaagctgaagaagacatggttggttgtgccccaaaaagatcaacatcgatctgtaccataatgaaactagttcattagagcagaaatggaaatttaaacatcaaataatattaaaaaaataaacagaaaaataataatagcacaagcttcttaaaaagattagctacactgcattttgatcaaatcatggctaaactaaaacaattcgcagtgtatagtctatagaggactcatttccattgtgcaccatccctgaattaaagctaaatacaaataataattttggacaggaggatcctaaataatgccacgtgaaatatcaagtaaattcttaaaagtaatatgcaatggtaaaagccagaaatatacatttcaaaaccttggactcaccttagtttgagaagttgttccagtttcagcctgaattggggctgatacaaaggttgcatcagcaaacagatcaacctaaccaaaatgatacaatattaaagacccagttaattgccaacaatcaatttcaaatgtaaaatcataaggagccagcaactgcatttctgaaaggagaaaaccaaatattctcacctcagtttgagaacttgctttagttggtgctgagacaaaagttgcatcagcaaacatatcaacctccgatgaactgctatgcatagcagaattttctgatggagcagctgtaggagcatctatgaggtctcccatcaaactgtccccaaacagatccgcctggtaagagcttccagcagactctgtaaaattatatatataatgaattaccatcaacaggaagaaaaaaaaaactttataggaataaaacattagtgtcaactttaatatgaataacataatcacacagatatttaaaacattctacacaatcggaaacagtcaccacatcagtgtaaacatatcaatagttattcaaacatcttggcgtaaacaaaatttatcaacttaatatgacaagatataaaacgtaattaccgcagggcataaataaatatttaactgccaattaattaaaattaagtttaataccatataggaatataaacaaaattttgcaaagtgctctacaacactattggatacaacaccatgtaggtaagaaattcttagtagtctaatctaataatagaaaaggaaatatgtatcaactgagaagggtgttagtataaccaaatgaatgttctcaatacaatggttccatgaacaaaaaccataaagcaaccaagaccactatcagtgaatcataatatccacaaaagaggccatgccacataacataaccttcacaaatgtgtgcaacaatcctatttattacgcgtccattatcaatgagggacagtctacaacaagtgttatttcctgtactaatttgaattaaaattgtatctcttggactagactacttacttgtagtggaagtcccacgtggatcaaagtcatcaaaatcatcctcagcattgcttggaggctggcttgagcttttttttgcaggaattgaactgtgcttatcaaaataattgatttagtgtctgacattattttaatctttactgctagaaaaacattttaaaaatggtgaaatgtaaaagtaaacagacagtatgttgtgtgagcaacatgtgtggctgtagtgatagaaggaaatcagaaaagggaaaagaaatacaaatatctgctatgaaaaccaaacaataatatcatgagactcaagaggtaagcctgaataaagatgttactttggtagcattttgatgttcatcaatgtaattagcatgcaaacccaaacaaccgctggagtcataaactaatgaagcaaaaagaccacgacaccaagatacattgactaaaaaacattttaataatcatgccaaaagaaatattattcatcaaaagattgcctattcttcagtgccagtattacaaatgagacatgtaaaactagaatacggagcttgcagccactaatttcctgtcaaaatacattttgagttgaaattcttacttcaagtcccacttgttagtaaggaaaactcagaaattaaaacatctattaccatcagtaacgaaaactatacctgccatattcttttgaacccttcttcaaggtgcttccttgtttctcagtagtagacccacggcgtgtcctactataagtatccttatcatacttttcttcttcatactgatctttgtctctatagctatccttgaacttatctccgctaagacctccatagcggtcactactttggtagctgccactaccgtaagaagttgaacttgacttgtaagatattccagtagatgaaaggccaatgaacctaataacagcagttagtcaacaactgaaataaatacaaatagattttatacaaattgaagcaaagccatataatgcttctttcttacttgtcacggtttgcagcagctttgtttctaacttcttgtattttatctttattattcaaaaggccaacgatggtttctgccttctttctcacatttattcctgaatccttcccatttggctcaacatattcgaaacttgataatgacttcaccaattaaagtgcaaaataagagaatgaagtgaaataaaacaacaaacatacttttcaaatatcttagaaaatatcactcaccgaaatttgaaaagtgtgctcaataatgtcatcaacagcgcgttcagaaccatgtgctaccaaatactcgatcacagttaacgcctaatacaaaacaatgatttttaagacattgaaagcatgaaaaggctcagtgcttaactagattttccacacacaactaaaactctaactttctgtttcatgttctattaataatgtaataacaaatacagtcaccttatagacatagcgccaatctttgccagtttcagctaatcttgtccacaacacattcataaccatctgacactccgcactggaacatcaaagctcattcaaatttagaccatgataagagtgtgagcttccctttctcaaaaacacagtaatagtacagagatttcatattaaaaaattcaattaaaaataatggaaacacatacaacttcttagtggcttgcgcaatctcagctagtgcagagccatgaggaccccaaggttcattgtccgttgcatccaatacctgtatcaataattagaatattacctaaaccaaacaaaaaagatcataaaccaatccaaaagaaaaataaaagcagtaaataccactgttaaactataatctatgaatattcgattgtattttactgaattaccttctgttcaatctccggaaccttcaagaccttcaaattaacttccctctttctgcaaatttcaaaattaatcaaatttaattcaactcagattctaacattgggagaaattaaaaagaacatcgggaataataaaaataaaataattgcaaaaatcggaaaggtgagaagagaaagctgacatttcgcgaactgtctggtcaaaaaccttcatgaaatccattgttggatctgcaaaattgagaaaatgtgtgttcaaatcgaaacaattgtgccggatctgagcacagatttcttttgaagtaaaaaaaaaaaatcttaagaggtagatttagagggagaggactcagatcttacggtgtggattgcgaaaggaagatgtgacagatgtagcccggtgatatgctcctcagtcagtagatgcacatttctcatctctaagacatcgttgtttaatggttttttaaaaattaacaaccttaaattaattttaaatatttaaatttagatttcacgttaattcaattaattaattatattttataataaatttattaattatattatttaaaatatttaaacttatttattttattgtttaataaaattagttatatatttttttacataaatttaaaactaaattaaattttatatatttaaaatttttaattaaattatattagatttaactttattattatataaattaataattagataataacaactctaagcaaattattgacttagaatctggttaactgacagcagagccttatttattgttgataatcactatgtgtaaataatagggaaatttgcggcaaaagttcccaaaaagttcatgttgatgcagattagtccccaagttccaaaaatagcggcaatagtacctaagctggactttcgtgtttgtctgttcataccacattcgttagtatgactaacggtacacgtgtacgcataagatttaatcgctttatttttatttatttcttttcaaaattgaaaaaaaataaaatatttttccaaattaaaaatttaaacaatttaattttttaactaaattacaaaataaaattaaaaactgaaactaaaaaactaaaataagaaaaccccatcaccctgaatccaaaatccctaatcacgattctttctcgcgaggtacccaaaaatcgaaaggaggtctctgtaaatcgagagagagcttcaaagattcattcgtggaaggtgaaaatggacggggagggttcttacagtagttccactcgtcgaaggtcgaaaggagtggttagttctgcttatcgaagggatcctcaaaattgttactgtggcattccgtggatcgttagaacatcatggacggaagcaaaccaaggacgttgttttaggaaatgcaggctagcatatgtaagccattgttttttcccttttattttgtttttgaatattattgtttatgttaagttattcaaggtgaaaagtttgaaatttattcacgggaggatggtagagggtgtaagtt

SEQ ID NO: 99538 - DNA, 774 bp, Cannabis sativa
tgaaagaaaattcaaatgctatcatattaaggacctgtgcagtcactaaattaactaccaaatcaataaaattacaattcagaaggatacggggatttccataaacattggaagagagatctttaaagattgcttccatttgcaactcagagtacaaagtagctccagcatgatccaaatatacaagacctagcattccaaaaagaaaaaaaacaccaattaaacaaaagaaatcaattaaaaaaactgaattttctttccaatttaatcataagtaagaagaagaaaatgtaatcatgaaaaagtagatgaggagtgagtgaccatctaatcgtttgaagtgggtagctcggatttcgtcaatggtattgggagagttggggtaaccatagaggtccttgaagtctttgagaaaggaatccttgtgggaatccataggtgtagttgtacaacaaattcagagtgagaagagataagaggagaaatgggaacttaggagagtgagtttggttacgtgaaataaattacatatccaaaccaaagtgttatatatatatatattagaagaagaagatgatgatgacaggacatgacacgtgtgttttgtttacatagccacgtgtatcatatcaatttttaagagaagtgtataattcctcctctctaaaatttttgactttcgataatatgattttttttttcacactcaattatctacttacttacatttcattttctaaatttaattggtagtggtaaaatcctctaaattat

SEQ ID NO: 99539 - DNA, 1457 bp, Cannabis sativa
tttttgaacactggtagtaaagtggaatatcaataattctctttttggtactgtaaattatttagatttttttaaaatttagagaaatgatattataaatataataaatatcgctataaaaaaattaaagaaatatattctagtatatgatatggagcgtgtaaattgattaaaaaataagtaacttgcagcataaatacttaaattatatttctgaaattttataagtatttagttgttaagtgttaagtaaattgacacgtgtcaatccctgattggttcacaccattacatttttatttttttttaaaaaaaattagtttaagtatatcaataagaaaataatacgtgataataatttcacatttaacagtcaactatctatggagtaacaaaaatataacttaagtattattactactaaaaattaaacttaaatatttatttacagtagaaaattaaacttaagtatttataccacaaattaatcttaaaaaatcataattaaaaattataattaacactccacttatgcacatatgaattcatatgcaatgtatatatatttataatcataaaataaactgcatatattacttatcttgggtagagaataacagtattgatattacttaagcatctcatgtgctcttgtaatggacaagaaaaatacagcaggtattaataagtcatattcttaaatcattttaaggctttttgcagtatttattcatgtatttgtcttattttagaaaccaaatactttgtagttttcaattttgctatcctaaaattcaaaaatacacctccaaaaatagtgtcatatatgggaatattttcctactagcttaactaaatctctatagattcttgtatgtaaaggaagcttatggattacatgcaatgcaagactaagtaaaaaacccaaaaagaaaagaaaaaactttcttatataacttgaatgtaatataacatggctaagagttaaggaggaaactccaaaacaggatttcttaaaacttagaagggtatatgaaatctggcaagtcccaatattctttttagagtttttgtcttcaaaaaacagaaagaaaaacttcaaatatatgaaaaagaccttgttggagctttggaagactgctctttcacagtaaatttaaacaaataaacatatgccggctgattccaaaaaaagagtgagacataaagccatccatttgtcattaaaagtagcaatgaatctctcaattatatcattaacaaatcattgaagttacctaagtgtctaaagtcactttaaaaatcattatgtgcaatacaatgggataattctattctaggaatagctgtgggatgatgaggcttgttttaggtaattattaggattttattgtatttttatcaagtagttagtagttattgtaactatgggaaagaaaagtggtggtctgtttagg

SEQ ID NO: 99540 - DNA, 1259 bp, Cannabis sativa
tccccttttgtgattcccaactatgttttctttaattgaatgaacatcttttctctcaaaaaaaaaatataagaaaataagttggtctatttaagaaaaacgggtcggtttgaataaagcacgacataaattcgatcacaacacgacattattaaatttgcaggtcatgcagaaactattctataaaattattgtacggcacgacacgactcataattttatgacccactatagtacgatctatattttgataggctctaaaattatgggactagcacgacacgtatcgcaagttagagaaatatggttgtgggatgtctttagaaggatcagttgaggtttagaatgagaaatttggtatatcaagttggaagaagtttttttttctttttcccatgaagatcttcaatagagccaccaattctaaataactgcaacaactatcaataaaacaaaacacacattaaattgtaacaagtggggaatgaaagaaaagaaaaatctgaagtaaagtgataaaccaaaccaagcaaataataaaattagtttaattgcaagaaaaaaataataatagtaaaatttagaaaataaaaacaaaaaacaatccacgtatattaaacaaaacaactgattaagactctgtataaggtgacatttttttttggaagagttcctttttttttaaaaaaaaaaagaaatacaaaacttaataattttagtttgtttttatctattttcaaaagttagagagaccattaaaaaaatgaaagaggataagttttttgtctatattttttaactttaaatttcattcaattgaattaattcagccttaacaatattaataacatcaaaaaaggaagattatacaatctttaacaacacaccactaaaaatgaataacaaaacattcaaatttctgacaagttataacacttttttaaaaaagtaaaaaaaaaaaattaagttttctacatttgtcaatacagaacaaactttttatatttctctaataattacaatatgatttttagaaaagaaaaataagtttagtgtatagaaatactctgtgatgcttgtgatgctttcttgacccctgtggaggagaatgttgtatctcctccacaggagccatgagaggggtggcttggaactgtagagggttggggcagacctctacagttctggagttgaaagccctaattcggtcgtgcgatcctgacttcatattcattaccgaattaaaagtggatgctaca

SEQ ID NO: 99541 - DNA, 829 bp, Cannabis sativa
gttctctcttaccacaaatcttaagctactgtgcatagggaataaagcttttctcagatactgaggggtttcgaggtacttcaagattcttataagaaaatctgcaccactttcattctcatccgagttatctggatttgtatagtagctagaatcattttcagagttactcttgttgtcaaatattaccacctgcatagtaatcatacttatcaatttttcactcaccataaattccaacagcatatatactaattccaacaaatccattctaaaattaatcatcttttctgctcaataagcaataaaatatcagatggaataactaatacagaaatgaaacctcgtcaattcgaaaaatagttgcggcacgagcaatctgaccagccaactgcggtttgagggaaaaaagagagaaagaaaatcaccataacgaacagaaatattcgaattaatatattcccagaaactaaacagaaacaggaaaaggaatactccatactcgggtggcgagttcgtaggactgtgtgttgtctattatagaacccggcaaggctatggtgactgtaggtatgtccttgggttggagcccttctccttgcttatcccttttcttctttttcttcttttggtaagaatctccattgggaagctcgacctgcttagcttcagttttttcctcttcatcaacttctgcttctcgtttattcttcttccccattgtcaagggttttgcgagttggagggtgccctctcagggtttttcttttctactctctcttaggaatatttacaacataaatactataagtttttagttttatacact

SEQ ID NO: 99542 - DNA, 2229 bp, Cannabis sativa
tgacatgcaattgaatttgaaagtacttctatagtactttgattctgttcacttataactaatacattattttatataggtgtgcttagcatatattcttcaatctttcgaaatttagtatctcagatgtttttttgctgatgtatgcacgtaatgatgtaacataaggggaatcggctgtttaattttctctgctcaaattgttgaaaatttactgtggctgactaagttgtagtttgggtgatgatacatcatctcttctgttattaattcaacttatgtttcatatatattttttggttgtaaatgcacaaagtttgacctttgagtgcgtgcttttctaaagttcatgttatgtttcatgtcaacagaaacaagatgaatcacttttagaagatctctggacgcttttgagagctggtaaacttgaagaagcatgtaacctttgtagatctgcaggacaagtaagcagagttattaaattcatgaagttattaccttaattatgctttcagtttctcttttgatttatgatgacttttttgcagccttggagagcggcaactttgtgcccatttggggggcgagaccaatttccttctgttgaagctctcttaaaaaatgggaaggatagaactctacaagccatcgaactagaaagtggtattggtcaccagtggcgtctttggaaatgggcatcttattgtgcctcagaggtagagttcaaagttttattgtctagcagagcaagttacacgtgttctatatttgaatatttctctgcccatgtatctgtactcattggtaaattggatatgcatttttctgctgtagctcttcaaaattttgaaattacttttattttggatgtcgatatgatcaattcccttgcgtatgtttccttgttcagtttcttttctccgtgttatatgtgggggtgtgccttttatcggtgattataataagtgcttctgtcattctttggtgaattaatgtaacttttcttatctatcatggaagaaaatatctcatcaagatggtgggaagtttgaagcagctatatatgcagcccaatgtagcaacttgcaacgcatgcttcctatttgcacagactgggaggtaatctttttcctatattcagactgataaaaatcggtagctggtgcattttattaaaggatctcctattgaggatttatttgttatttgcattaattttttctttacttttaggtttgtatttcgttctaattttttgaatatattgataggtgtatcatcttttgtaataattatatcaataacaacttcgtttactttatgtatataattataataaatggagaagagagaatcaacttcaaatattttgacatactattttaatagcacagctttcagaactcttgtttgtattgtcttgacaaaacatgtcatttatgtaaatagatgaatatcttgatcataaattttctaatgtgaaagcttttattgttcaaaaaaaatgaaagcttttgttgtcacttgttagaaaaaaaatatactgatgcttttgttcgcccgtgaatgtttgagaaacttttctgtagtttactattgtaatgcccgattggtttctatgcatcaaatcacatttggctccgttcataaatctttgattttgattgcttttattacatgtcgtgagttttgcatatatgccaatccttcatcttgatacgttggtttggaaactaataaatcaatgtaactcatgggaaataattatctcgtgtatcatataggtataaaatgatatacgctattaagccactaggttggtgtggtctgttggtgagggtgtttgggaaatgggagagaccctggctcaagctgggatctcttaatattgatgttcttaggcctcaattaggcaccaagtgtgccaagatagaaaaaattattatatttgcaatttattatttcatcaaggcgtcttaagctaagcacaaaagaatacatcagacctgatattcattttaaatggttaattaacttgtaagttgcgcagtattcatctccaagtgtgtttttcttttcttttttttttctttctcaatgaggttcatcttcaagtggtatgttgatgaagtttgtgtatatggtaaaaaattatgcagtattaaagttcttttacatggttttgtttgggaattatatatgtacaaatttctatgtatacatatatat

SEQ ID NO: 99543 - DNA, 4743 bp, Cannabis sativa
  modified_base (1237)..(1237): a, c, t, g, unknown or other
  modified_base (4598)..(4640): a, c, t, g, unknown or other
caattattcataattatctaattaggtttttgctaatctatttcataactctagggtattacacgcctgcttacaaaacctctcatataaaggttccatacagttgctaacaacaggttgttctactggcactgctcgaaccaaagtagttggtactttcggtggatgcactgtaggaggaccctggtgtcttagcctgaaaatttttgtgtgttgttggagaatccgcgcttacatttatacaaacctttgctccaaaatcgaaggagcttggggtggattttcatatccaccaccctgaaactttccacgacctctgccgcgttcacagggatttaggggattttgacctcctcgaccaccttcagacttgaccatgttaccttgactccttatatttcgctggccgtccatataatatgacttagcatgcgaacccataagtcaggttggccatacaattatcacatatactttatatatcatacttatggattttaaggcaacgcgttaaaatataatcataaaactattatgcttcctaacatgcatttctaatcacataaattactaaacaagtaaaggcttactgagtcgagcttttctctaacgatgattgtacatgtcttaatgatcttctgtagacaacctagcggctctgataccaaaattgcaacgctctaatacttaggcacgctacagttactttctaaattcagtgcacacctttgctaatcaaaggttttcttgacaatcgtgataatttaaaactttgatttaattttcaaacttttataaacatatacacatattcacataatactaggatcctatttttaaactttacatacatatttaaaataacttttacagatatgttgcacatcgactacaaaataaagcccaagttgtccaaaggccgaacactccagattgcaccgtctcgacacgtacaatcatcccttgagctctgaactcattgatgttcaactttggcctttcctttaccgacacatgaaagtaatatctatgagtcaacaaactcaacaaggaaaacatataacatacaatatactactaacttgtatctaggtgcccatacacctatccacatgacttaacagatgagtaagaacgttctttaactaaggcacgaccactgtacaatatgcactatgtaccgatattgtaatagtgttgttagggtttgcactgtacctcgagtaccactaagtgntgtaccacatacactacgtacttatccgtactagcgttggtaacgctctattgtactaattgaacatcatacactgtaccaatgcactcagtaccactaccgtactagtgttggtagcatacaaatcacaaatagcatgcatatattacacatacacatattcatatatatatatatatatacattctatgctagttttaccttgtttctgaattcaaatgtgccaatcgacttgaacagaaaaccacgtgctggatggatgccctatgtcacattaacgtaaataggtaaacaacttgctaaaaccctttttggggacctaaacttcaaattaaaagttttcctatcgataaatagcgtgctaataccttaaatatcaagaaagcaccgaaactaaggttctaaaaaaggcccaaaccagtaaaccagatttttggggtcttgccaagtgaaacggttatccaattctacaacacatgcagaactggttaaccagttcataatagaaatctccaaaatcttcataactcactcaaataaaacacaaactccaccaaactttctagaatacatatactaacactcaacaacagaattcacacacgaaaaacaacaaaatcgcaccaaaactaaaaataccattgttgagaaaagttttagttttccaactaaaacttgctcaaccacacaccaaaccagtaaaaccagctcaaacaagcatataacaccaatactatacaacagaaaacaacctcaaacaaaatcccaacaaccagagcctaatttaacatttcatgcaaacctaagagaaacttataaggctttaaaaggattaattctagggtataccttaattatcctttcaaaagcttttgatttccacccttgaatttccagcaagaatcaattagaacaaaaagagatgaaccctaggttcttggttcctccttggttcgaaaaagagagagaaaagataaattttatttctaatttgttttttgtgttttcttgaataaaagttaatgtaattaaactaagtttatctatactaacctaagctaaaataacattccaccaaaatccatcaaagaaaattctctccaaattggcaaaattacaattttacccgtacttcctacttaagtaacttatatgcctaggcgtaaaatggtccacaaccataaccccacttaaacccgatatctcaagtatctcttatgttttgtccctttaagaattaggttctaaacattaccatgtgactctaatggccatctatgacatttactatcgtcaccgagcaaaaatcataaaaattgtatattacatatttagcataaataatacccttagagtttaataaaatctctggatttgagaaattataactctaatgtccatttctaaaaatagaacccacaataaatataaaatcatatataaatataaaatgttaataattaattataattcttttactaatccataatctcatcatgcgatcattacataactataattcttaattagagtaaaattagttaaactaaataatgtgttcaaaacatacaacgaaattactaaattactaattagtaagtaactatagtatactaaatataatttgtagctaactagtaactaatctcactctagattactagctatattataaccgtcattcctcatgcatccataatttatccataacaaaaatcaactaaaaaaattataacaaccaagtttaagagaaacttaaatcaaataatcttatcctaattctacaaaaatttcgccaacataacaaatataattgaaaattcccaagataaaataagcgataattaatcatcattgcattcgccattaatgttttactttaatttttatgagtcaagtgtgttctaggataatagaatttaggattagaaacataattatctttactttagtttaagttttatgagacatctttgttatgtttgaattttatatcacatttcatggtatgttatttttatgagatattttatggtatgtttgaaatttctgttacattttattcatccttaagtgttctaaaatattatttcaatataatttatgaggcttacatctgaaacacctcgaggcttacgaaattactaactagtaactaattatcgtatattaaattattaactagtaattaattatagtatactaaattacaaactagtaactaggtctaactctaccaaaattttggaagtgtaacatttataattgaacattcccaaaaaatttaaagctattagtaataacaaaatacaatccacaataatataaaataatcacaacaacatttagcaatacaaaaatttgccacccatctgaccgaagtacatgtattcgcagaacctacttcactacggatgaatgtttaagatattcaaactcttctaagcattcataatttaattaataataaaagttaggaaatatataccttaagctaactagaaaccgattaacaccaaataagtaagattcttacaaattgacctcacaacctacaacatatagaaatactacaaaattaaaatttaaatatttaactacttactagttatataatttatgagtaccaatttaataactaattaagttagtagcttattactaactagttactaatgagtaaatagttagtaaaattagtaactagttagtaataacatatgaatatgaataaaaattagtaactagttactaatagtaactaactagtaaaaaaaataaaaacacatgaataaatgaaaaaaaataaaagaattaataattaacatattcaatatacaaaacaatataccttaaaactaaaacacccaacaactaaaatttacctgtctcaccccaaaatactacactaaacactacctgtttatctccatttatatgttcttatatgtttgaatatttatacatacccaaataacccgaatatgtatagttaagtgttatattaccatttcaatccaatccaaaaaaaaatataacaaaactattaaggtttagattcttaccttattatcaaaattcgaccattaatatcgacaaaaattcgggtaccacgtacaaccacaagaccacaatcttaacaatctaggaataccctaaaaaatttataaaataaaaaatcaagaaatttatattaatgaaattattagagatcagatttataccttaatggacattgagattcaacgatttctccactaaaagttgcggctggagctacaaccaccacaaccaccatctctaagctcagtataccctaacaaactaaatataagagaatcatgttggaaattattttacnnnnnnnnnnnnnnnnnnnnnnnnnnnnnnnnnnnnnnnnnnnatatgaattctaaaacaatgaacataaacacatataaagttagaaaaccttacagtgggtgcagcgggaataatatgactccttctttgatgcagaatttcca

SEQ ID NO: 99544 - DNA, 2245 bp, Cannabis sativa
ttttaaaaaaaaaaaaaaaagtcttcctttcgtgtgctttttttgggatatttgtaggccagcttctttgcatgggccgtcttgggtactgtagggatgaaatcctaccgttggattggtaggtggcatattcttatatgacatttaagggtgttagatcatacgagctgggcctcggatgcgtgtcacctcagggcttctcccttttgaatttcccttatctctattcattggatcatttggtctagtacacaaggacatgcatgctctgtatgatggcgtgtcattggagacaacctctgacattgtactcaaaaaagcctggtccctaggtccgtgctctgacacgtatgggtgaagcttccgcaggtcaagagcataacccggctccccgtgtttcagaatgccttggacgctctgggcaatccatgctcctcgcccaggttgactgccataacttctagaagggaggggaattttggttcacggatcctcttcgtgtggctagcagtcggggaactccccttcatggagactctttccgcgaggttgatgcctttaccttcccagaacatcagttgagggattggggtagctaatgactcttttgaccttccttgattggaatccacgtgtcagtctaaagaaaatgcggataacaatagtcaaaaattattttgaagcttcatacttaattttcaatcacaaaggagtgtatagattatccaaaacgttctattttaagcaattatatcttacaactcccaaatccattaaatttatcttatcacatgtttcttcttatttaaactcatatgatgtacttaactattaaaaatcggaaacaagaagaaaataagcataactctacacaaaataaacataattaactaaaatacacatctaaaccacttcataaaatgcaccagaaactagcctatcagcggggcaatccaataacagatacaactaagtgatctttgttagatagaagagaggaagcataatctgaaaaagaaaagctgagaaataggtttcgaaatgttgttgcttaccaaattatttctcatcattcaaatggtgtcaattataaaggatacatagaaagacacttcctcaatcttcaccccatgattacgcagccctcacagaaatttaacccaatccaatatgtaacaagttccattatcctgaataagaaaagatgaccattacaagtatcacattataataaagaaaaaagtgttccatgttctcctcccacccgggggcaagtagtatgttcaatttgaattctagaacccagtacaccccaaactaaaaaatcatttgaaataatactcttaactgaataatagagtttgaagtagataggcggatttagtggagagacggccactattctctttaaccatactcaccaatctcctccgtggccacaagatttgtcacttcaaaagatagcagcaatagtgtcacaatcataagattaacatattagttaaccattatctttagccacaaggtttgccattcttactcaccagacacggtcactgtccttggccacaaggtttgcgattcttacttaattattgactatgaaattattggcattaagtgtcaagtactatacattaaaaccaaacactattatttgtgcaatttaattttgagtcctacgtacatttattaactatgtgcattatttatttgttttgcaaaaggactaatataattatactaattagtactctgtacgtagtgcgcaagtccaaccagaagactcttggaaacatgtacaataataattaataagctataaattatgacaagacgcacgacattaaaaaaaaagaaagaaagaaattccaacaaacaatataattttgtaagaaataataattaaataaatattccactacattaattaattaattaatataattagtacaacagtcccagatatgtcatattctccagcataaaagctctgaaatattgattatttgattaatatatagattaatcattaaattcatgcaccatgtacaactaatgattagtataccacccaattaataattaagttgttattaccaaaatgttttaaatctttttacaaaattcaggatattatcatattagtgcggtggtgttgatcagtttgagcatcttgtacaaagcaaaagacaaaccaaacaccatcacttgatatattattaataaattttaagttttacat

SEQ ID NO: 99545 - DNA, 1478 bp, Cannabis sativa
ttttgcagagttctttctattactctatgcaaacagccaggttgagagttatgcttatcattacattgtcagaacttatgtctgatgtgcaagtgactcagatgaatcctgatgggacactagaagagagcagtgaaactcggcgtcttagaaaatcattggaagaaatgtcagatgaagataagagccccggtctgttgagggagtgtggtctttctgagagtgctctattggctctcccagaaaagatgacagagagtaagtggtcctggccaaatgtgaaatatctgtcagaaagtcttcctcttgtccttgattgtaatttggaacattcacttttggtaagtacacttagcgacgtctgcattgattgaggcatgtgtttgtagttggatttgctttaaatttagttatacaattccaccctttatgatgtatcattgaataaaccttttatgaactattcctgtagaactaaattggtttcaacctttttcagggatctatgatcactatggacagatatgcagctgctgaaagcttttataaatttgctatggcatttgcctctgttcctgatcttcacataaagtggttacttcgtttatgcgttgcacatcaggagattcaatcttgggccgaagctgcccaatgtgctgtggctgttgctggggttgtaattaaggtaaggacacattatatcttgtaatgttagatcttgtatgttgctagcttaggctctaatggtgattttttacaaataacttgaattttgttacattttgttacttagggagaaaacgaaaggaagaactttttagctatttggtagtggcatggtccaatcgtttttaccgttcctagtagtttgatatttgaactttgagctatatcattgttcttttcaatggggattgatctcttgctttctgattaatttggtcatatcatatttctaaaacaacttttaatttttttaggcccttgtggctagaaatgatggtgtgtggagcaaggatcatataactgctctttgtaaaatatgcccaatgattagtagtgagatctcttccgaggccactgcagctgatttagacggatatggtacttcaaagctcacagttgactctgccgtgaaatatctacaacttgcgagtaagcttttctctcgagctgagctctttcatttcagtgcaagcatttgggaactggtcattccttttcataaaagcaggagggcgtatggtcagcttgccaattgtctcaatgtacttgcgagtatctataaatcgattcccgagcaggaatcaagtccaattgcattcgctgatgctacctactatagggtgggattttatggtgatagatttgggaagctagacagaaaggaatatgtatacagagagcctcgtggtgtgcggttaggtgacatgatgaagaaggtaagccgtatgtatgagtctaggatggatgggaac

SEQ ID NO: 99546 - DNA, 915 bp, Cannabis sativa
ttattttatttgggtttttctttttttacttgttttgattatttcatcgctagcttttattctatctaatttgcttgatggtttatttgtaaacaatcaagtaacatgtgattgttaggttaggttgatgtttttattttatttcttttagttttgagtgagtttactgtgttcatgtacttttttggtgcttcctattctgggtttcatattcttatcattattattatggtgtttgtcgaaattcttgaaacttgatcactactgcaataattattagtgatggctgagaatggttttgcatttttcagatttggttctacctattttttacttgttatctctgtctttgtcttgttcttagaatttggtattttttgtgtggtttactgaaatatgaatttaatgtttgtgctttattttagtattttcattttgtcctttgttgcccacaatatgctcgttaaaatgccacatagaggccgatattaaatgagtttgaattgggtttcgattgagttctgaaagaaaaaataaaataaataagggtatctagttattatgggaaatgcagatgtttaagttgtcgactgaaaattttggttgctctggcctgctcttttctcttctgttcattattgctaaattatcataatgataatttaaaaggaaattggtttctctatagcctttagcttttgtgcatttctttttccctactgttcttggttttaactgttaatgttaaaatgtttgtcgtttgttttttttttcttgtttatattatagtgtctaattttcaagatcggaagagcgtcgggtagggaaagagtgtagatctcggtggtcgccgtatcattaaaaaaaaacaaaattttcagtgcaaaaacaactgcggccaattctaaatcatga

SEQ ID NO: 99547 - DNA, 4983 bp, Cannabis sativa
ttactattagtcagaggcatgaaacacaagcagatgaagaaaatctagtcaattatatctcttttgaagaaagtctagttgtaaaagataaaggctcaagctcaaacattttagatgattttataaacattgttcaatcgacaccgcaagagctcgaagatggaggacaagcaacaatggatgatttaatagagatcaacctcgggaccaatgatgattcaaagcatgtattttttagtgctttattaaccgaagaggaacacattacatacaagttctttgtggatacaaagatgtatttgcttggggatatcaagacattttaggattggatataaaaatcgttgtacacaagttagcagtatcgaaagactttacccctataaaacaatctcaaagaaaaattcgaccagaactaattcccaaagttgagccagaaattgacaagttaagaaattattaagggggaagacatacaccatcacttacagaaaaaataatccaattggagtgtatggtaagaactctaactgataatttaatggtgcataatgtgaagtgctttaaggacaatgacttaaaaccaaggttaagagagttgtttgaataaagtagaagcaccattagttgagtcaaaagaagaaattgagcctacaattgaagagcaagacccctttaaagtggtactaactcaaaatttaactaaattagatttttacttaacaaatcatgaatatagtgtggtgaatgaagtaaatttcttccatgatcttgaaattattgaatatgaacttacaagcaaagttaaagagagccaagtaaagagtgagcaacagtaagaagagttatttgataaaggtgaagaaaatgtgatattggaggatgaggaagcacctaatattattgatttgaattcatcaatgatattgaactataaaccaccaatggatccatatttttcatcaatactaccttcaccgtattacatcctctacgagctaccaaaagtttctccctaagctcatccttcaaaatcatgtgttattagttctaaacatggtacaaactcataatgtgccaatctaagggtattggcaatggaaactttgaagtggttatgcatgacgcttattatgggcatcaactgcacattgatgtggagtgtatttgaggtaagttctctctctttgtttttattgtcacattggagacaatctgaatctttagtttggggaacggacttataattattagttagttatttttttgttgtttgtttatttgtgttagtgtttattattatcatttctttaaaaacaattgttgttaagccattgtttttgtctatattgcgttgctcttcttgtgaaaaagaaattgctaataactgtgtgattggttcaaatgtttgagttttgtgggaaatctttaatatgtttgacaaatgtgatatcttggattttttattatatatgcttgactagggttggtggtacgatagtttctttttttttttttttttgaatttgataaaacttgcattgtttagcctttgagatgaaattcttgaatctcgatgatttatgctttaaaaaattatttaggcaatttctttagaacgtttctttaaaacgattgttatttttttttttattatacttaatctaaaaaaaagttcactcatttattatttttctttgttcatgtttttgaataaatttggggaattgtaattaggtattgtattctctgaagttaaaagcttaatgagaaagttgtaatatgttgcaatcttttttttcaatatgaaaaaataaataaataaaaagaagaaaaaagaaaaataaaatgaatagtaaataattcttcatgtgaattataaattaaaaaaaaatctattttgcattgtattaaatggggaatgagatagttttgtaatgaagttgagattttctgaatgtaaaaaatttatgatatagtcgagcctaaatgacatatgagatatgttttcatttggacaattagttatgatcaattttatttacttcctcctttaattaagcatctaatgttatacatttaaattagaatcaaagtcaattgtattgcatgaattcatactaacattcatggtacaagaccaaccacctttctgaattctatctttttcttattcacatacaaaaaatcattttcttgctgatacacatggcaaggaaagatcaaatccaaacctcatcaaaatctaaagttaataagtttgatgatccaaatgatcctctttaaacagaacccacttcaacaaaagcatgtttaaattaataacaaaagctaaagttaagcttagaagataataacattaagagaaactaaatataagtatcatcaataagaactcactatacttttaataatggagactttgagcaaggctggcttcctagacagaaactcgaaaacacatgcatctccagtgtttacagagttagcgtctagaaaggcagcccatcccttggagaaaaagaagccactcttgcaatttagaagtttcacatcccatttcttagtcccaactttaagagatatgaactgagtctttgatccaagatgactctcaacgaaactatctggtagacgctgcagcaaaaacagaagaagaactaatggttttagctgtctcaaaactcaaaaatcatacagataagtttataaagaaaaatttataaacaatatgtgagcttaatttactactcaccagattataacgacgtttgcctttaactcttataattcttttgaataaaggatttcttgaatagactttgctagcttctttgtaagcattagtatctttgtacatattgtatggcccttcatacctcttcttcctctgcttcatcttcttcggtgtgtcatcttcaatttcttcactaattttggacttgcctacatttgaaaacataagcaataaagtatttaacatactctatttctcatttcatttcatatttaagatgtttcaagttcacctacctttacaggccgagttagaatccaagtcagaatctgaataagaagagagctcctcgcttgatgctagacaaatcacaggtgctttgccattcttcttcccatcagaatggaaaggaaagtgactgtaatcaatctcgcatgaactttcatctgttatggaaacatcaaactttgaattccctctataatcaaatatcagtagatatctatttgtaattatcccgtaatgttgaacaaattttggccactttttttgtagaaatatcttgttatcacgtctaaccaaaccaatcttccatgtatggccacatggaagaataagggatgcacaactggccaatgaatctctatacaactctacaaacttgactggaagaacctacatgaatgacaccggtatagttagtattattgcctatttaatatatagcaaaactaaaggaggaaaaacctgaaattaactctatagatataactataagaatgcttaccagttgaatctttgagtgttcactcccaacaaccctgacaaatttaaagctagtcatatccctttgtcttgcttcttttgggtctgcacacaagaatagaccaggttggaaaagaaatatcccagagaaaatgcaatattcatatatttgataaatactctgcactgaaatgctggatcaaacttgacctatacatatatcattggggactaaaatggctggtcacaaaaggaagaaaacattcatgcatatataatatatttctgtacaagctagtcattaatatataagctagcaagttatggctttgctactaaaaaattctttctttattatgaaacaatggattaagtccatataagatattcaagatgttccataaatggtattactcgaagtcaaccatacacaagacaaaaataacaatggattaagtcccataaaatgcaaaagcattcactacaactttctggtatcactattaatatacatatcttctatatactaaaatttgtacagcatgtatctcatcaagagtgaagaggaaaactaactaatatgtgtactagccactagcaaaacttctatcatatacccaacattcacgtatgaaaactttgtacaacactaaaacctattcctgctttaactttttcaacacatagcaccacttaaactgcaaaaaagtaattagaaaatcagatagcaccactcaaatgtgttctaaaactaagaaaatcagagcaaaatgccatgtaataattagaataagccaaatatagaatcatttaacgtaacccaaaacttgtaattctttgtagtgagtttcccattacattaattcaaataaaaatcttaaactaattactgatttttccaagagctctttaaatatacctagttattatgtatataatatatgaatatgatttcaatcatatatttcatgtcaacttagagagagaaaatttatattgtctggcctgtttgtactgaactaatggttagaaactgacgtataaggctggtcttctggttcgccactatctaatgccaaaacaggggtcaatggagggaagtagaaaaaagtattaggcaatatcaacgagtggcgccaacagaataaactaacaacaaaatggtagagtttacatacatgtataacatagaactacaaagctagacagaaatgggatgggttttaggtgagttttattataagaagagccaagaaagaaacatgtgaataaaattatactctacaatattttagagtttttgagctgagtttttttagaagaaagagttattacgagtgattaaaaaccaagcagaataacaaactagagtgcacatacaacaccatccctattcactcctattgggctcaaattttgattttccctaaaaaaaaatctgcagaaaattgatatgatttgtagggattatttgtggcatg

SEQ ID NO: 99548 - DNA, 2047 bp, Cannabis sativa
  modified_base (904)..(914): a, c, t, g, unknown or other
taatttatagtattaatctaaaatcactttttttttttaaaaaaaaaaaaaagaataatgtagaatattaattacactagttcaatttgcatatgaattgtaattattaattcacacaaaataaacctacaattaataatatcgaactatatatataataataaaaacttgaatttgtagaggatctttaatattgtattatttttgtttaaaccacatccaatgtgaaatttttgaaacgtacgttcatatatcatatttggatatgaactatatatttcttaagcttaattggtaattaaccattcttctctcaattaattagtctctttaattagaaagttgtatttataaaaatcctatatatatataggacaattcttttataggagtgtgaaaaaaagattctatagattaaaaaataagatttttttttaataattcagatctatgaacttataatgatgcagttgactttattaaaaaaatgacaataaaaaatgatcctctgcattgcacatacgttgtttagtagctaatcatattgtgatgaagtcattaagtaaatattattggcaggagattattatagtttttgtttttttttttaaaaaaaaatgataataattctctattttgtagatgaaatttttaagatttcttccacgcatttcaccaatgatttctcttcagatatcccttccaaatggactcagaattggtgtgaacacactataaatacaaacactatagaagatcttacttttagtcacaacaaaatttgtgactaattattaattatcattcctatgtagtgattaaaagatccgtgactaaagatattagtcacaaaatttgttgtgaataaatgtagtttttagtaaattagtgacaacttgtatcnnnnnnnnnnnttttagtcacaagtaacttttgttatgactaagagtcacatttagccacaaaaaatttatattgtgattaaaaacttatcactaaaatgtaactgttttttgtaatgaaaaattttcctttgcaataaatcgaaaatggcataatcaccatttgttgaagattgttggagaagtactgcagtcgcgaactaaagagccctaaaaattttgacgaaaatcaattagttccaacgatttgaaaaataagatttttttttttttaataattcaaatctatgaacttatgatgatgcagttgactttactaaaaaaataacaataaaaaatgatcctctgcattgcacataggggtgtgcataaatcgatccaatttaataagaattgacggtcaaatattgaatgttcaattgtgatcgcattggattggatgttattttttaatatctaattgtatcggatcgggtgttggatggggtgtcaaaaaattcaatacatccaacatccaatcgaattaactagtattttcatttagtttggatgagtaattagatttcatattgttataagtaaaaatatatatggatatataaaaattaacattaaagttttactcttttttttattgaattggatggatccaatctaattcaatgcatattggacctaaaatattagatagatccgatctgatcaaaaaaatattaggtctaaaatattgaataaacccaaattaaactaataatatatatgaaatgcatccaacggatagaaccgatccaatccaacatccaataaatgtaagatcgattggatgactgaaattaattggatcggatcagatggtgaaatctaccatccaatatataattggatcggatctagataggcctaaaaatattagatgtggttcaatgaacacccatattttacacataatcctaaacaataaaaaatcttacttaatttgatcactaacgtataaaatagtttatagtaaaatggattaaaatcacatcgtaattagtttgcaggcttagaaaaataaaaacagagtatcatacaattaaactaattaattgatgataatacatatttctttaaagttcactaagtttaagttatattgagtttgg

SEQ ID NO: 99549 - DNA, 3015 bp, Cannabis sativa
tgggaccttgacaaataactatccttatgaggtggagaaggttatgcatgttgtggtccacgatcctttggatccagtcctgggtgaacattgttatcctgggagacagtgcaccatctttcccatccatgtcccctaggttgagggctacggaaagcatagttctcttgtgagttctctctcctgtctcaaggaggttgaggtaagtctttatttggggggtgacttggaggttccccctaggttaggaccttcgtctctacactagttgtcgtggtggtgttttgttagcacaaggaggctcatgataccttatttgtgataaagggaacctgattggagatggagggttccgcccatgatcccttcctctctatctacgatattatccctaaaagcaggggatggttgagaaggtggaaccatgttattgcgtgttgtgcctcgttcctcgcgagatttctctgatggaggaggtggaatgttcttttaaggggaagcatgctcttgcatgtccatccgggtttgatgttgcataggaggaggtgcattgttctttctattctcacgacctggggtggttgcctgttgacgtttttatgatggaggacactcattcctcctgccatgggcattgttctcacgagaaggtcgttgtggtacggtattacgactagtatctcacctttgggtcgttattgtttgtgacctagacctttcttagcttttaacagggtaatgagtcgagtgacgcccacgaggttatgtccttcttttcgtaccaagatgcctctcaacataggctctgcggcatggttgtcccaaaaccttttgggcctcatgcctttcttgccactctttgttgagtctaagagtctcttctaggcgtcgacgcaacacctcattctccatgaacacctcacgaacattagcggctcattgtacaccatgggacagtgactacaaactgttaacatctcggacttgaccttcatcgtcgggcatgggctgtttacttagattctgagaggtcccttcaccagcgggctcaacatgttgaaatactttttggtggtccatggtgttttattcattcaaggggaccttaatgtcctattcttcatagtatgttcgtcccgtactcaccatggtcgcgattggtgattgactcttgtgttcactgctctcaatgaaagcactaagctgttgacgtagttttttatcaacgggtctgagaagatcgtaaatgagcaagatgaacacaagtgaatgtcaaacaaaagtaaaccaattaataaaaaagaaaattaacgatgatgaataataaaattttatagtggtttaccccctttcagcgataataagctagtccacttgtagttttattgatctcaatgctcaagaatagttctctagagttatgttctcaagagttgagtcctcaagtgaatttttaaatagcgtaaattagagagagttagagtgtccctttacaattgacttcataacctttatataggtttgcattgtagggtttaaggtttcttaacccgacatatttttgttcctaactatagttgagttaagttgaaaatataaaataatattccaaaacaattacctccaaaaaatgataattcttgtagatattcttagactagctctgatggtacatgcctagcacgaaagtgtctcttcacgtagactcaagtttgtatgagttacttagacttcagaggtaggcccaacgttgagcaccgaaggtcgttggtcacgtgtcctcacaactctaattctgaaggtcgttgatcacgtatcctcacgactctagctctaaaggtcgttggtcattttttctcatgtgtcctcatgaatctagctttgaaggtcgttggtcacgtgtcctcatggctctagctctaaaggttgttggtcatgtgtcccacgattctagctctaaaggtcattggtcacatgtcctttgtgtcctcacaactatagcttagaaggtcgttggtcacgtgtcctcacgactctggtcatgagtggtcctccactttggacataactccactttggtcatgagtggacctgagtggactcgtcatggtacccgggaaacttggtcatggcacatggggaacttcttcatagtatacgaggaactttgtcatggcacctgaggaactttttcatggcacttgaggaacctcatcatggtaccccgaggaatttggtcatggcacccgattaactttgtcatggtacttggagaacttcgtcatagtacctagagaacttctactttggttatgagtgaacctccaccttggacataactctactttggtcatgcgtgaacctgagtagaccctgaggtttgcttgagtggacttcacttctatattttctatgtctagacaactaaccaactgaaatgttagttaagagagttgcagaagtcactagacttgacacaagtgaatatattaaaaacaatataattatataatttatataaacttgtaataaataagatgactcaaaataataaacatttaaaagcttgaattactcaaataacttataaaagttcatgccaaagggtaaaggtggaaaagagagaaacttctccctttctaagatttcgatcctctaaactataaaaattcaattagaatgagattctaatccaacaccttttaaaaatttgaaaaagttgaacgcataaatagaaattttgtaactttttttagaatttaaagtgaattgcatactattctcttcatgcatcatatctaataattaaataataaataattaattcctacctagaaaatttaaaattttatatatattacaagttataattttattcttattagcactagaatacgtgtcttaaaattaattgggacctgaatttgttagggtttaattagtactacatatattcagatatcataccgtatattttcaagaaagaaaaaaaaatattacaacaaaaaaatattt

SEQ ID NO: 99550 - DNA, 4760 bp, Cannabis sativa
ttatgatgttgatccacatattagcctagatacttgttttctactttggatcaatcaaaaaaagtacacaattgtaaaacttcattatataaagaagaaaacaaaaatatagaaaagtaagcatgataaactaataaacacaaagtaaacaaaacaacacaacactactagaattaagagaaataaagtctaacttagaaagatactctcagcataagttgcaaagttgggcttggagcctcgctctcctttgcctacatgttggatagtcttactcttgggatcataaatggaagtataccggtcttttcttagctctccaacacttgttgattcaagtaagaggttaccattctgtgatacacctaatggaaaagatttcactagttggttacctaagtccacagatatatatttagcccaagaatcactcataccatacttcttcatgacccatatgtcaatacatgatgatggacctggtgttgtgatcaaagataggcagccactcaagttacaaatacttgtattccaaattcttttatcatttaaagttgaagggggtgtaatgagcttaaattcctcactacttagatcaaacgcaactatcccaagcttctctacagaagaagaacgtctttgttcgaaagagattagccaatgaatagagccactaacaacaacagacaccatgtaacatacagatgtaaataacttggtatcgcctttgtcaccatcatgttgatcgatagagaataaatcaggcataaccaaacttttccatgagttgtttttcaaactatatactgcaatttgttcacctcttataaagaacttctgaaacacccaaagttttctatcatccaacaaaatgtggttaccttcacatgaacgcgcagccaccactttgaaatcattgaaatcattggttagtgtggttagtggttcgtatggttcgtatccaaatccaaacaaagtctgagacttacaaatacccttaagaggatgagattcggggagttttttatgatttccaattgcagggttccaaaggtaaacatgagtaaaattgtctaccaaacaaaccacaccatgatcacaacccacaaaggccatgtgtggattctccatcttatacttgtcattagggaatatgtttgatgaaatctgatcaaagtgtttcgagctatgagatgagcacaccattcctccaaatcttccaacagcctggatggtatgagttacttgtcgtttgtggtggtttttcatgaagattgggttgcttattagggataaccaagatttgcaaacgcacttgaaccgtaccacagattttgcctgtgatcttaacagtatgctttcaattatttccattggaaaattgatttcaattttgacttccgaattacagatcaccatagccatcaagtatcaacctacacaaagataacaaaaccctagctgctattaccattcaccaccaatgtatcaaactcataactcaaaaggcaaaacagtaaaattaaacatacctttgatgaactgagcaagattaccacctgtactaactgatgcaaaacagcaaatcaaccaattaataatcaataattaatcaataaatttacttaatgcataaatataaattcatggtgccaatgattttttcttggatgtaatgtaaaaatgaaaaggaaagtagtaccaagacaatatatttaacgaaatgaaagaactttttggatgtaaaaatgacatgtttgaagagatctttcgtttttggatatgattgtgtattattagtatatatcaatcttaattttaaatggctgatccaaaaacaaaggaaaaatttatgcatattatacatttcaattaatatcaccacacaaccctaaaaacttagcattactctatatattgcgtaaaactcaatgcacaactccaaaataatcttataaaaaattttattagcaaaataatttagtatgatcggagaaacgattataaataatattgtgcgaccataaacaactgttataatcgcatagagtaaattaagtgagattattttacaataaattttaataattcacattgttattttgataaatttcaggtaaaatggtgaaaaataaatgaaagagtgtaaatacctgaaagagagagacacctcaaatcaaatacatgaaacttgggagagagatgaaattggaagctgaaagagaagaagaagagttgtggttagagtgtgttttaacttgttttgtgtgctttttccttttacaatataatacttgtaactttaacctttttttatcttttaatggaaacatgtaatgtaaccttaagttatcttttgtattaataataattatatgtgcagtgtgtacagtcacatgcaccgaaagcataatattttgcgtgcatatgacaggggcataaattgttcaccaaatgtttttaagagttttttttttttacgacattttacacagaaatccggataacaaattactggagcaatccaaaccataattattttgtaaaaaaaaatttaaaaaataatatatagaataatttcccatatttttcattctgtatttttttgaaaatttgttacattgtaagaaattactttcttttttttttaattttaaatactaaaaataataaaattaaatatatttttgataataccacattatttaattagaatgtttattatagtgttcaatcaaacatcataatatcattttattatattaccattcatattatcaatactattctaattatattacatcaaagcaaacatcaccaactttagagtattgttatagtaccgagagtgtctagcaatataatggccaactatttactgatcgtttaacaaaaagtaaataaatatttagtagagaagaaaataaagttttacaattattaataatcaaaccaaagacagagaacatttgctgattactacgtattgcttgaacgacaagcatgctatcagtttcaatctctacatccttccacttcttgtgtttgatccaacttagagtttctttgatgcccatagcttcgacaacttctgtcgagtagagatctccatggtactcggcttcaatgcgtaaaagtcttctaaagctatctcgagctacaacccctaaactatataagttttctttctcgaaaaaggcaacatccatattaatcttgatgtgattagtgaatgttttatccaaagctcagtttgatcatcaatgtctccaagaaataaagatgatagaatagatttatcttgagcttttctccaacgatcaagagttgtgctagccgatacaagtacctcgtcaacaaaagatgatttctgtttctaaacttttttatttatggctttccacaaggcccaacacaccatagtcaccctacagatagtttcagtatctacctttgaaatagattctccaaccaagtaccaatcgtgagaaaagagcttgggccaatagtaccaaaattcagccagcaagaggtagcaaaaggacaatcaaagagagcatgggaagttgtttcaggatggtcttgacaaataggacaaagatggaaaatactcacatgtttagtaatatgattaaggcaagtcgggaggcattcggtcacaacacgccaaaggaaatttttagcctttggagggatcttaagttgccacaaatctattatcttttctactttggattaatgacacattcttacaaacaaaaatatagaaatgtaagcatgaaccagtttaatgaaccaagaatctaataaaaacttaaatagaagccataataaagtaatgaactatatacaaaataccaggcaccagaaaagcagtactagaattaaggtaaaaactttgtgactctttcgtgttagcttagaaagatactctctgcataagtagcaaagttggagcccctctcttgtctgcctatatattggaccctcctactcttgggatcataaaaggacaaagtacgaaagtctgtagaaggagaagactcatcaagacttggctcatcaacaattcgcttgctaagtaagaggttaccattatgtgatacacctaatggccagatttggaagagatttatttgagaagatcccaacgaaagatgtttagtccaagaatcccacacaccatattccttcatcacccatatctcaattttagttgaatagttgaaagtgagcagagataggcagtcacgcatgttaaaaatctgtggaaagggagagtctttatacttgaaagatgaagggagtttaatgagcttgaattcttcactacttagatcaaaagcaactaccccataataataatctaccccttcatatctacggctataatatattgaccaatgaatagagccactaacaaccacactctccttttcaacagtaaacaccttaggacaattatcatcattatcactatcattatgagcataggaagtaaatatgtcagacatgagcatagttttccatgaattgtttttcaaactatacacggcaacttgctcacctctttgaaagaatgaacaacattgtttatctccatatgatgcagccaccactttgaaatcattgtcaatccttcgtacccaaatccatacaaagtatggattgaatacttacgacctcgagatggagcatatggagaaggagggagtttcttatgctttcccatttctattgcagggttccaaaggtaaacc

SEQ ID NO: 99551 - DNA, 1974 bp, Cannabis sativa
ttttaactttgaactttcatattattcttaaataataatttcaggcatgagaagaagggtcagaacgagttggatacagaacctaggaaccaatcggcacatggaaagagaagggaaaataaagatggccctagcacgaatggaaaatcaatgagaggtcgatttgatagaagtaataaatttagtaaaggaaaatttgatcagaagagaaaattcgatcaagggcggcctccaagtggtcagaagagaaaatttgatcaagggcctcaaagtggtcaaaagagaaaatttgatcaaggaacacaaagaggtcagaagagaaaatttgaagggcctccaagtggccaaaagagaaatacgaacatgggaaagaatggaggttttaaaaaagcctctcctggttccatggccaaacgcggtaagtttgtgaaaaatggagatagaaaagaagtatagaagagttttatacaaaaagcgacattgtttgtttggcaagctaatcctggttcgttctgttatgatctcgactgatcggtaagtaagacttgtgtttctgctcaatatttttattagcaaaaagagtggagcatagattagaggagttgataaagttggttgttgcaggagtcataatctacttcaccatttgtgtatggaggaggagcttatgaagcaagttacttagtcctgttcattgttaacatatcagctaggaatggctattaaggccaaatgcaaattttgaccccatttagagcatttttttgtattttattttttattggcattgtaatcttttttaatgtggcacggtttttagtggaaattttaattaaaatccagaaaaaaaaattatatattttctaaataagtgttagattatctatactgaaaataaatagtactaataatggtatatttggcaattgacatagattcagatttattttttgacaaaaatggctgtagcttggctgggttcattagtaggcaggtgaagaagattgtcaaagctagagctcagctttacaatgtttttagtttgtctagaatctgaatttgtgagttgtttggtgcatgtgctatataaaacatacagttgaagaggtttagtaattttctttgttatgcttaagggcaagactatggtaggatctatagcaaaagttttttaccggtagagaatttttttttttacattaattttagattatatggttattataatgtaaggtgtatactcttacgataggactgcttgtataccattgaaattttatacatattataataatatttaatgatatatttttttaaaaaataaaataatgaacagaacttaacttgtttctcctaaactcttttttggcttttcataaaccttaaaagcatatgaaagcaaagtataattgtagtatgtttgtagtattaattaattaagtcggttaaatattgtttcaaaaaaaaaagaaaactaagtgggttaaatataatttttcttgcaaaaaaaaaagagtttaggagaagcaagttgttacggtaccaattgaagaacatttaaaatctttcaagtgatcctacattagaggaattttttaaaataaatacttatataaaaataatttaaattaactttagaaaaaaataataattaaaaataaaaattaataaaattaataaatttttttaattattaatattattttattttttaaaaataaatatatcattaaatatgtataaagctttaatttttattttattttatttttattgtatcattaaaaatatataccttacattataataactgcaagatctaaaattaatagtaaaaaaaaagtttcctagggaattttgctaggtcctgccatagtattaccatttttatttataattaatctttaatattattaattgtaggttcaacttacaaattccaaacttaactccaaacttaatgtttttatcttt

SEQ ID NO: 99552 - DNA, 1321 bp, Cannabis sativa
ttacaaaaagaggcgtagttctctagcccccaatgaaactccttcccatttagcatattgataaccaacctagagtcgctatctacaataataaacttgcacccgatgtccttagctactttcaaagccaagaagcaagcagtcgcttacccacacaaagcatctgaaaactctaaatgtgtcatatgaacccaaatcaccataccatgatggtttctcgctactactgtagtacacatgcttttcaatcctactttaacatcacaattcaatttgagccactctcgaggaggaggtgccaaacatccaacaaccttagagtaggaggaggaaaaagagaaacatgattatctgcataaaagatatgaataaagccaatacattatttcacattatctagcttattagtgtgtttgttgttttggaccagctagatggtgtccacaacaatcgaagcataaagaaacactccatctgcattaatgccttggaattttaagtcccaaataaatttgactcaatcccacaaacgaattttagttccacagattggaaagatgtcctatggtgaagactgccataaataaaagaccaaattacaggctagaaacaagtactttatagattccttctcaaccccacaaagagaacatccccgcatcctcaatatggaacctcttgttgagcacagagcgaactgggaacacgttagacagaatacaccaccaaatgaccttgtggcgctccaaagtcttactaatccacaacttattccagatagaaggagcaacttcacagtgaggagataaggtaggccgatttgcaagagaagcgacaattacttttcaaagtctaaacccatttatctcttccttggccaaagggtctacctccttttaagatagcagagagtctctctatcaaacagactatttaacttttgggtatcccaatcaccactatctgacaaaagatcaactactttgctaaaaccaatggatgaagaaccattagatttcgggtaaaattttttactatgagagacctaagggcccttccagatactagtagggaaacttacaaaaatactgacttttagcttaatctttacaaaaatactgccacacagcagaaattacttttatactggattggacttttttttttcttttatgctgtagacacagtaaattaataccaatgacttcatcttcgtccctcacacatagaacctgcccgacaacaccaaaacacctggaaaataccaattaattccggtaaaattgagaaaaaaggcaaatcaacgatagatgaaaaccca

SEQ ID NO: 99553 - DNA, 3759 bp, Cannabis sativa
  modified_base (1500)..(1507): a, c, t, g, unknown or other
  modified_base (3704)..(3708): a, c, t, g, unknown or other
taataaccctaatctcggttattatttactcacatatatcatttccaatataagtgccaccgcacataactctacgtgctaactaccgtcttacctaatgtcccacaatggtagagattccaaatccccgggtgctcctaaccaagtgccagtaatcctagtcacaattccaggatttacacaaatagggttaacccctgattccacatttataaagtatatacatggcattcaaaaatacagataatcacatagagctcggaacgagctttctaacgatatataaaactcccgaaacagagttcggatcacagagttatgcattttttaagtttgcattcgaatctgcctagaaacacgaggacgggccgcgacactcaaaagctgtgtcgcgacacctgggttaaattcccaggtcacaaaataggggcaggtcgtggcatgcaaaagttgtgtcgcggcacctgggttccaaacccagaaaaccagcaacgaaactttgagtttcaaccccaaaaacacctccaaactaacccaaatcataaccaaaacttaaaaccatcaaatagatttttaataactaaatagagaatttaaaatacaatttcatgcattaaaatccaactataaaactctcaaaactcagattgaacaacataaagcataagctctaacattgagctataatccaaccaattccaccttcaaatactcacatgatcaagtcaagaactcatgtattagacaattaatttcagagacaataaacagaatataaacactacaaaaatccctaaaattctctctaatctcaatctaaaacaaaacccaaaaagctccaatcacaaatcatgctcccaacaactagaacaatcaattatcaaccacatgcatttcaagagtattcaatatattttcatactttaaatcataaaaactcagcaacaatcttaagtaaaagaacaacaagaatgctacctcaagttcaaactaaaattaagcttcacacctccaaacttcaagcttgaactccaagcaatcaccacaatttcgatcaagattgtaaaatgtaaggaagagggggaagggtcggctagggcaaaacaaagcagaaaatgatttctaacataccaaaaatcccatttttttgctaataatccaaatgcctaaaaagacaaaaatgcccttatagccattaagcacactcataaacattcgagggtaaaatggtcattccacataacaccaatacactcaaataaaatcagattattttcacataaatcaaatgccaataaatcatctaaaattgcatttcagcctcgaacccagttcggctcgaaatacccggttgtgactatactgcgccaacttgtcataacacacctgaaaaagacaacacaaacacactatataataatatagttccataagcacgtaaatatattaatttcattattttacccttatcaggtcaaaattactaaaatgcccctagcnnnnnnnnggggtcttaacatgtcatatttcatattaattctcatatattaaattaaataataatataatttcacaataatacacaactaactagttagggttttgctaatccattctcttaaacctagggtattacacttactgttggtctttctttacatgttgttgagtttgattgtttagcagttgtaaatgtatttctaaatgctctttcatcctcaatgaacttggttccttgttagaggatttaacaagtttgatgtctagttttttggagtgtccttaattcatgtacgtcgaacaactaatgtggttgcacatagattagctcggcatgctcttaggatggatagagaacttatatggtttgatgagatttcttgttggggtttcttaatacttaaagttgtatgatattatgatttattttttcaataaagttattcattgttaaaaaaaaactaaatcttatttcttaacacgtatttaattttagtaattaaaaaattattaaatatactaaagaaaatagtgtagctaaaaaatgaaaatatgcggacttaaatgtagacattataagaacaagaattttagcagcaataatcatataaaataaaggacaaaagtaaaagattaagaatttttttaactaaaaataaataaaaattattacaaggtaactttagatgaaacaaaagagttgggccattacaattgtcttggacacaaccaaattgttgagttgggccaactatttcatggtctcattccgattcatcaaataataatgagaaacattaatgtatgggctatttacaaattacgggaaaaattagaatcatttataaaaaaatatatttatagggcaagattataataggacctagtaaaagttccttgtcggtatggaaattttttttaaccattaattttagatcttgtggttattatgatgtaggtgtatactcttactataaaactgtttgtatacaattaaaattttatacatattataatatttaatgatatatttatttttaaaaaataaaataatattaataattaaaaaaaattattaatttttaattttaattattatttttattttctaaaattaatttaaattatttttatataggtatttatttaaaaaaaataatcacttacaaaaattttgttatcaattattttatgtaattaatataaactttgaatttttaaaaaataaatggtttactataaaaaaaaaaatatatatgaagatagagctaacacacatttgaatttttgataacataataagaaaaatatataaaataacaagagttggaaccaacaattaaattattttgttatatatgtaagagaaatttgtgactaaaaccctttatgtttctatttgtatacacgtaacttctttatcttttattttggtggcaatgctccctttactttagttctgtgagcaaattaaaggtaatagttatattttctagttaaatgccaattgagacgccacctaaaattgtcactgtgtatatttatgattcttttattggaaccactaattttaattattttaatcatttttcaaaattatttaaatggtaaaaaataaataaaatttaataatattataaataaattaaaaaaatagactaaataaataaataaaaacctaaaatctaaatctatgaatttatttcctcctgacgttcttttgtcttccctccatcgtcttcttcgcaggtgattggaaatccgactgcagaggatggtggaggacaacggaggtaacatggggaagagatgggatcgagatttttgggtcttgggggaagtcggtgctgctccgttcatctcttgacggagtcgcgacggggagaacaagacggagtcagacaactctaagagggatgatttgaattctgggatggggtttaagtgctaagaggccattcgtggtctctgtttgctcgccagcaccgagaaacgtctgggcttgtttggacagaggttcatcggcgccgagaaacgtttgggcttatctgttcgtcggcacaaatgactatttcttccatttctatttgttttttcatttattaattgtttgagatttgagattctggaattttttttcttgctttgaatctgagatttaattttaattttggataaatggcggcaaaacccccaatactttnnnnntggtttcactaaacccccaaaacccaaatttgtgcgggtaaacccccaaaa

SEQ ID NO: 99554 - DNA, 2008 bp, Cannabis sativa
caggctgcggctgctgtgattcagttaactgcggtagccaatgaaggagggaatgacattgcagttgaagaggccgcagccataaaaattcaatcttatttccgctcttatctggtatgagaatagaaattcatgtcttttaaaggtagaatgtgaatacatgatgttagagattgataggaactattttattggtggcatcacaggcaagaaaagcattgtgtgcattgaaaggattggtgaagttgcaggcattggtgagaggtcatcttgtaaggaaacaagctaaggctactctccggtgtatgcaagccttggtaacagcccaagcacgagctcgagctcagaggatccgaatgaatgatgatacaaaatctatcactaatcatagaccttctactgcacacagaaaatcagtacaggacaattggctcaggactaatccatataatgtaagagtaatcaatctctttctcaatcttcaaagaacttttatttaataatttttgtaacagatagaaataaacccttttcatatttccttaaaataatgatgaatttttcattgcgggattctttcaaacaggacacagacataggcatggaagaaaacatcaagatagtagagatggatctcggcggatcaaagggatcaacaaagagcagaagcagctattcaattcaatcacaaacagaaaataagcaattttcatctaataatcgacaaagctcaagacaagaaaattacaaccaccaccagcaggtgtcaccagcaccatcagcactaacagacatgagtccaagagcttgcagtggacatttcgaagactacacatttggcacagctcaaagtagtcctcattactactgcgcaatttccaaacctgacccatcaaagctaccatttgcctttccaaggccagactatgaagaagaagaagacgaagaatcactctcttatcatcatgactacccattgtatccaaattacatgtcaaacacaaaatcttcaattgccaaggtcaggtcacagagtgcaccaaagcagaggccagagacactggaaaggccacccagcagccggcgcaggacatctatagaaggaaggaatgtgccaagagctgtgaggatgcaaaggtcatcttcacatgttggtgcagcctctcaaaactaccaatatccatggtcaatcaagcttgacaggtcctttgtttctcttaaggacagtgagtgtggctcaactagtacactgctcactaacacaacaaattactactgcaaatctgttgtggcctatgatgtgagtattgttactattaccacttaaaatttatgtgattatagatattagagtctcatcatattcaatggttatttttatttatttatttatttatttaccttttttgtgtggctgcagtctcatggaaataggtactaattgcccaacaataccaacaagaagaaatatgcagattttttattattgttttttcatgacaatgtggtcaaaatcttgacgcagcttaatttctgactcaacccatctccgagtttcttttttttttttttcttaaaaaaaaaaataagaaaatacatatatttttttttcattgtaattgcagaataattgtgtatcccgaagtgtactttgtagagtttgtttcattttggatggtttataatgcaatttggcaaaaatgttctgaagtaaattgtaataggaggtaaaagtttaggaaatttagctctcatgtgtagaaattaatctttgtaatttcagcaaatcacactaaaataaataaaagttaaattaaaataaaaaaatcaagaacaaaaaactagcaaacacattaaattagaaaaaatataacacagatgaatctaaatagctttgagacacaacaacacacgagatttatactaattccaatcataagttcattgtgaacttgggtatactccaatttaaaagcattgtcacccatctttattgataatgagaatt

SEQ ID NO: 99555 - DNA, 770 bp, Cannabis sativa
atttttgccgcaatagttaagaagtaagttcagcgaaattggaacattaagattgatgcccaaaatattagccttaagggcagtacaaacacacacagctgcttcgagatcaaccaaatctccaataagactgcaacaaggagttttgggtggagtcccaacaacaacgtgtactaactcattcaacaactttgcacacactccaagctttagggtgtccaaaggacacttagccttagagttaagagttgggatagttggtattaatgggatactagtggagctaaccatagtgaagaacaccaaattaagggagagaaggagagcagtgtatgcttgagccctaaaagccattttttctcaaaatatattatgcaaataagtgaagaagatgatttacacttcgatatggatgagaaatattgaaagtacagcttctgtatttatagatgctaattcaagttttaagaaaagaaataatataaagtatatatattaattgatctattattagtgggcatgtgaagatgtaggacatgggaacaatacccaacatgaacatctattcatgttagagcaagaataattaagtgtatgcatctataggattgttaagttggagattttgcgcgccttaacttaatttctcttctaatattatctagtttaactcatgtagtgtatattttgtaaaatatgttttttactttgtgaatctaagtgttgagtgacaaatatgtacgtcaagcccactaaaattaatagatata

SEQ ID NO: 99556 - DNA, 1500 bp, Cannabis sativa
aaaaaaaaaaaaaaaaaccagttgtccttgttaataataaaccaccattttttgtttttttgaagcaaataaaccactattcttattatttttaaataaaatagactcaaatcatgtgttaagtttaaaagctttatattaataacatatataggaataataggagcaaaataagaagaaccttcactgtgtaattacttaatttatgtagtgtactccattcaggtttgataataataattgcatgttttattacaagtactgtttattaatgacttttgttatcatatatatgtaaatgctctttatctaattaatatattatattaaagaagcttaacaaaatgagtaaaaatgacagctgttaaacgttatttaataagtatgtgcacatctttaattgttatttattagtggtaaaaataaataatcataatttaatttaattgcttttgaaaccaattaattaaatattttttttttgaaagaaaattcattaattcaattaatagttacaggcaagtcattcataatcccatgagtacaagaggtacaaccccaatccatataactctaattttggatttcaatacttaagcagaacctttgtgtcacatatatttttaattatatattttagatgttgggtgacatttttttttaacttttaaaatttatatttggagaagtatgtttgaggctaaggagttagttggggctgggattcggcggttggtgggtgatggttctaccgtaaatattttgtctgagccttgacttactgatgagatgaaccctttcattaaatctgtccatctaggtcttgtgggaaagtcggtcgactctttaatgaaagtcgagcgggttgaatgggatggggaagtattagctgatctactcactgctagagatcgagctttggtgtggaagattccgctcagtagtcatatgagtactgatttgtggtactggttacatgatgcatcaggagttttcactgttaggagtgcatattctctgcttcaatcaatgaaacccagcagagatattccagaaagctctggaatttggcggctcttatggcagttgcagctccctccaaaggttcttaattttatgtggagagcttctaccaacagtctcccaactcggtttaatctttccacaaaacatgttccaattgctgcaacgtgtctgttctgccttgctgctcctgagacgattctgcatgtgctggtgcagtgctcttttgctcaaagttgctggagtaaggttccaatttctgttgtggcgcttgatgcaatgatgttctcgagttggttcgaagcgggtttggtatcgtggaactcggtcgaggctcttgaggctggtatggtctgttggtcagtttggactcatcagagcgagttagtttggaactccaagcaccctgatgcgagtgaggtagtggcaatggcaaagttaaattatgttgaatggtttaatgctcaaaaagttaat

SEQ ID NO: 99557 - DNA, 1274 bp, Cannabis sativa
tgtcaaaccctgtgagtggtattaatttacttaagggtaagtgaatctgtaacaacatatagttattaacgagttccatcggctagctccaataatcacatggtgtcatctccaatttgtgtcctactaataatctttgtcaacttggacgagaaacgaattagtctcgggtagcaagactctctagtagtgctcctctctcaacacctcgcatgcacttcttggctaaacaaataatttaagttatacatatatttgtgtatatacatcgaattctgtatattatacattttgattaggcaccgttttgttagctaagtcttagaaaagtattgaggtatagtgttaagttttgctatatatttgacatttgtatatcaaaattttcaaagaaaaagaaggcgtgtgcgggcttacaaatatgactataataagtattaaattatgtttactgaatatttcaaacccttaaaaattctttcaaaatattgagatggttaaatttaattataatttttgttcaattctattcaattttctataatgcagtgattgttcatatactaaattgtacccctaaactttaatcgatgtaccaaatcatacccccgaattttgacatatatcaaatcgtcgtactctttgaacttttcccacgttaagcttctgttagtaaaattggacaaaaattttaaatttaacaatcttaataatttgaaaaaacttttaacggtctaaaaagtttagacaaaaattttaattagcttttttatatttttattggttttgtatattttttactatataattaatttttcaaacttatttcttttaacaaagtattaaataacctcctaacctaattttaatcaaaatatgactacaaatagttattattattttttgaataatgaataaccatgagatattacaaagtttcttattgacagaataactttaaacagaaaattattgaaaaatatagtattctttcaataaatttttttagaaaataatatatgatcgacaagaatattatatatattaatgtatcataattattagcattactataataaacctttcgtcctcatctttgaaattgaaggaccggagtagtacttccatcttttgattgtactatcaacctgcccagtttcatacaataaaataattttatatattgaaccaaagacacaataattaattagcttttttaatatataaatatatatatatatactagcaaaaattacgtgcgaggcacgtatact

SEQ ID NO: 99558 - DNA, 2908 bp, Cannabis sativa
ttttttttttattttaaattatttattttgtggttgatttagttagaagtaatttcttttaaacaatattaatcttttaacaaatatttatacaacatataaatataggaataataataacaaatttacgataataataattcaattaaataatatgacttaatattttaacatattaagattataatttttagtattttttttataatatattaacatattaattaactaataattttttcaatatatataatataaattttatttttacaaggtaaataaaaagtttttagtaaaaagtttttacaacatattaattaactaataaaaagtttttagtatcgttacctagtaacataataaaaatgaaagtaagggcaggtggctcttttaattggatcactgtggagatatttggtatgtgtgtcaaaggcaaatgttagttttagttgttttgtttacgtgccctaattttgatttgatttgatttgggaactcttacgctcaagagaatcagtagtaagaaaatgaagaaatcagaagaagaagaagaagaaaaatgtggtttcatattcatgtgcaatggctcgaccaaaccccaatgctttctttaccgtgttttcgggctacccatggctcaacaactagcagtccttcagattaaagccggtgccaagctttttctttacgactttgatgtgaagcttctttatggtgtctacgaggccacttcagttggtgctctcaacttggaacccactgcctttcatggaaaattccctgcccaggtacctcccctcttcttcgtcttcttctttaagggtcggttttgttttgattccttgttcgtttgttcaggtcaagttcaagattttcaaggaatgtttacctcttcccgagagggttttcaaagctgcaattattgacaattaccagggttcaaggtttaaacaactacttagtagtgcacaggtaaagctactacttgatttgtaatctcgtttatcattattattaattgagtttatttctttctcaattcaattcaatgaaggtgaatgctctcatctcattgttcccccctcttcattccataccacctacttataatgggccaccatttctttccaatgcggcaacaccccaagaaaggttccacttccaccaccaactaaccactccgcctcgcttacctggggttgcagtgcaccacgttcctcagtcccaaatacctgctgataatagacttgaacatgtagttgcacctccgctgcatcctcaatatgtaccccaaataacccttcgaactccaatgcatcaacaaagacacgtgatggagcagcctgctctgcctcataatgcagcgttatatcaacaaagacaagagtcatacttgcctcaaaattcttcctcaaatttgcaagatccatatctaaggtaatttcccttttatcatcttggtaaaattcttttgccccctttgtagggtagctcaaatggtcaaatggtcagacatgtggattattataatttctagtctccaaatattttgtagggctaggcggggattaggtaaaaatattattattttgccctacttaagaattaaacgagttttcttggggttgtttgatcttggtattgtgtggattgatggtttatgtttgattgaagaagttgattcctgtcatttatagtcttttagcctcaagcttaccatgaagttttaatccaatctacaaacttttaattttgtcccgcccatttgaccagatatattcgcgaatttgagatggtgcataggccttctgctgtagaatatgcaagtggctacgcaattcctcagttaccacagcagggagagaacgaggatatccctaaatctaattatgtggctgaatatggtggtcaacatttgccaactacgacctcacatatttctttctactcgcattctttgccccaatcgatcacaccatcacttcctcctgctcatggacaagttgagttgccagtgtttcacgaaccttattatcctacatcaatccgtgataatccgagccagatctataatgatcctctgcaaaggctcttacctggaagttctcgggcaaatgctgcagccccttctcatgtttcatttgttggagcagcaccgacataccgttgagtggaaattggatattataactgacctggtattgtttttttattttttttttgcttgtatgattcacacaacacacacctcatgcatccatttatgtacatcttggtaggcatgcctatgctcaaagccattttttattctagctggaaagcaaacttcaagcttccatgacctgttttttgtgtgtaagcatacacttgctgcaactgtgtatagctatgacctatgtaaactttggcctcgtgatcctaagaaatgtggtacagaccatatagacatcgtggttgatgattttagttctttatacctgtatctacatctttgatggtgtttagtaagagttcgattatgttaactaatgattagataaattataccagaatgaattctcttttgtcctgttgttgtatctctacaggttcctgtttttatatttcaattacagtggtcttaagttgactcattaaattatttacatgtaactaaatattatgtagattagagaaattttagtgttaaaaattgcagatgcatttcatcatgctgttcaccctcacctacacacacatgattcaattgaagagggtgagcaactagagtgcaagcaaagcaaagaacaaaaatgaaatctttgtagcagcagcatcttatgggctggactcatctcatggacctctaggctcaaaatgtgctctttcctcttaggcctaacattattaggggtatcagaataaaatc

SEQ ID NO: 99559 - DNA, 1721 bp, Cannabis sativa
  modified_base (34)..(66): a, c, t, g, unknown or other
ttatcgttttaggaagttcatatttagggtgttnnnnnnnnnnnnnnnnnnnnnnnnnnnnnnnnnggtaaaataaattccaacaaaggcctgcctccccgaccaatggaaaatccttcttttccatagttgatttaagaacaatttctaccttccccaacatttgcatccaaaataagagaaattgaactagaaagctctaggaattgttcacctattggattatcattgtctggttgaatttggtattccacagacatacccaatgtatcatcaaagtaaccattgtccttttcaaaggcaacaaggctcatcgacttatgtgatcgcttcttacataggtgcggtctggcaatctcttgggatctgagatcctcactaatcacttgcacattccctgtcgagacctccccttccatgtaattgacctgataacatttcctttttttttactttagtcccctacaaggtcatcaacattttccacttcaagaggactgcaatctcgaacacaggtcaccttttgttggacgagatgcctaattaaaatagtacttctcttcgcgaaacatcttcaaagccactaccattcaccaaatctaaacctaggttatccccttgaaaattattactagtaggagaatgagagaattctttctcttcgatccaatcttgtccaaaacctactcaagaacaataccctgatagttttcaagaggtatacattctaaacttactattttatattttgatttaatgtacacacatctggagatccattgaaatacaatacattaataatcaacaatatgaaacccttccgttgtgtatttgatttagtaccacaaaaaccaacattaacaactagcactttgaagcttagttgcactttgtaagtgtatcccattattatttgatattaaacaattaagatagtatcaatttgtattaagatattaaactattccagtgatcacatctaaatttgtgtacaactttctagtctcagaattaacacttaaagcgaaccagcatttgatccattaggaaagtcaggattctataattgtagattatgttcccagccatccacattatatattagattcccaaaatagaaattgtaagaatcatcttctctgataaattttaacgagtgaattaaataaattaataatgtaggaatgcgcacttgtatccctacacaactcacacattaattctcaaggtcaattctgacctttcttttactgaatgaatgagcacactaatgacacgtattagttttacttttattgttttactttaactttgccttaccaattttagctttgtctgaacaaatctttaaaggaaaaacaaattagggcaaaacatgttgcaagtgataggttagagatgagagaaccagctcacttcttgagctggtttcaaagagataatcaccccaaaaatgaacaaaaacaagtaagtaaaaagattagggtaagagagagcaaacacagagagattttacaaggttcaccaccagaaattggggctacgtccttggtgagctgccttaaagaagatcagccacaattcactatcaagatcaatgattacatcaagttcttgagctccaagatacatgcatcgtctggtagctcatttcttcaactaaggtatgtacaactctctcaatctctcttcttttctttctctcacgatcgaaccgatcc

SEQ ID NO: 99560 - DNA, 689 bp, Cannabis sativa
ttttttttgatagatgtttaattcaattatcaaaaccttaatgcttagtaatataaattgcacaaattactcacatgaacaataacaatgtggacaaatacacataaattggattaatgctatgggtgtggttgaattctgcttattcagttgatcaaattgttgagcttttcaaggcaatgaatttgatatttatatccaattagacatataaaatttaattgataataatgtcaaactacaattgatttgttttctttcttttgttttcatgcggctttaactagatatatgagaagttgtaggaatctctcatctccatttgtacatttctcaacttccacacattttagaaacaaaaaaaggagacttactattttataatatttatttgacatctacctttatgaatgttggagtaaaaagctatcgtgttgaaatattttagtctacctcttcaatacctaagggtgtctttattatccagctcgagattgcttctggtcaacgaagccattttcagtatcttaattgtcaactatcccactttatatacattttaataatattcaatctcaattaaacacccctacctatcccatcccatttgtacttaagatcttcattctcatccccaaagaaataaatgattttaatttaattaatgttcaaacttcagatttaatagc

SEQ ID NO: 99561 - DNA, 841 bp, Cannabis sativa
ttcatatttttataataaatgagtcccctcaaaataaaaaatcgtgttgaatacacgtgcggagcacgtgtgcctccgactagtgtaattatatatattaacaatttattttctatcctatatcatatgtttcgaaaaaaatggtaaggaaaaaaaccttcgcaaatttaatgaaattaagatgtaaattaaataccatttaatagttctaccatatgtagttttgtcacattttacaattatggtagcaatcagcaaaaatagagttaaaatttaaaaaaaaaaaaaaaaagaagctagatggtaatgatgaaaataggcaccacacaagaatcaagataatagctgcctttagcaaaaacaaaagatgataatagctgccaagtaagacaaataattgcatgggaaatgagaagagaaaaaaagatgtcaatgtaaatacttagaatgcaaggaaacaacaatttgatcatcctaacttcatcaacttaaatattatacttgttaagtaaaaatcttacttaacaaattgcctagccaagaccaaacaacagctttgcaacagctgatctaaaagaaaatgttctttttttatatatacaatgccaggtgaatcagctttgcaattgtaacacatcatatacatatatataatgtgtatttgcaaatgtacggttataaacagtgaaagttaattatatacacgctaacattttcttattcttttggcattacaacataagtaaatacattaccttgaagtcaatgccaaagggttgaaatctttggtaattacctgaccgtagctggagtaacaccttctttgaagagaatatttgca

SEQ ID NO: 99562 - DNA, 1422 bp, Cannabis sativa
atacacacatctaaatgttatattttagattatataactcaataaatataatatatatttatataatttacaaaagttgggttatatcgcgcaaagcgcggcttagttccctagtttaaaataatgtgaatagttctgaaaagttcctgagcaaaaatcattatagtctctctttttttttttacttgtgaagtgattcaagttaaacaatctcgctgtacattttggtgacatcctgtgaaatttccaggaaattgttatcactgtcttttagacgagccaatttccagtagtggtctcttgtttcagatttaagaccattttttaaaacaaaataactcagaccattttaccttgctcattatttttttcaataatgaagaaagtggttaggacatttgaagtagaagaagttgctttcttttcattaacttattatgctacattcgtctacagagtatgctgatgacaggcaatccaactgtgcaacctcaatgaggggaaaggaatcaaaggaaaccctcccatcattccatggcattaccagaacttctgtcataaacccacctcctaaagaaaggtaattagctcaaaattaacacaaccaagcaatgcccacgaatccttgattgtcaaggcaaatacccatttacagattctaatttcgaactccaattataactccttaacaacgttttgtcccacaattcgttctggcatttcatcgaacagtttgtaattctgcagtaaattgagaggaaacgacaaaaaaataaataattttactaaattcactctctccctttatagttttagtgggagagtagatgaaaataaaaatgaatcgagtaaatttgggtgtatggatatgggtgttgctggtcttggcaatgggttggtctatgacagtctcatcagctgctttctttgagagtagacatagaaggaaatctatgtatccacccccggcgacctcctcgcaattggagttcaatcgaagaggatcctcgatcgtgttccctatccatggaaatgtatatcctattgggtacgttttctcttgctaccttccatctttcttggaataatctctcttgaagcttttatttgtatatcgcatagaaaacctcccaatatattagccatgttgataaaatcttacccgtgtctctttcttcttgaatcagtctttatttattttattttttacatcatgttgaagtggacacttttcagaaaaatcagttttctttttgtattactttttggagctcttctggatttcttttcataaagaaagtcatttttcaatatgttaagcttttttgaggacataacacttaagattttttttttctctttacacttaaaaaaggactctgaagaaacgaatgtgcctattgtaatttgtaagttgtaatt

SEQ ID NO: 99563 - DNA, 2109 bp, Cannabis sativa
tttaaaacgtcgaacattttgctagatgaggacttcagtgcaaaactttcagactttggactagcaagacaggggcctcctgaaggaactagtcatgtttccacatcagtaagttgctttacagaaaaagtttgttggatccaatactttattggtaaaaattaaatgatcatgtgattggacgggtcagagttctgcttcttgtcagaagctgtttgaattattttgtccatagttaaagatggtagtaccatcttttaaagttggtcctgataaattacctgtttctgaattcttgtttttggcatcacacattttctgacgattttgtttgtatgaacgctgctcacaattaatacttttttctcaaggttgtgggcacggtaggctatgcagctccagagtatgttcagacggggaaattgactgctaagagtgatgtgtggagctttggtgtggttctttacgagctcatcacaggaaggcgggctgtggagagaaaccttccccggagtgaacaaaaacttctagaatgggtgaaaccttatgtttcagactcaaagaaattttaccttattattgaccctcgacttgaaggagactattgcattaaatcagctcagaaacttgcttcattagcgaataagtgtttactaaagcagccaaagtctcgccctaaaatgagtgaggtggttgagattcttggaaacattataaacgaaactacatctcaagaagtagaaattgctgctcaagaagttgttgccccacaagtcatcagcgaaactgaagaaccagaagaagaaaccacagtggaatctgaacctgtgtccaccaaacaaggaaacaattatctaaagaaagtgtttgatataagagaaatggtcaacttaagaaccaaatccattagcaagttggattggcgaaattggactcctgggttggtaagaacttcataaaatctcaagcacaacctggggcagtgaaggagaaaagaagtaatacagccatttctctttccatgcaatggtacatcacacacatgtatccattaatatggtgtatgtgaaagaaatgaatgtgtagatatgtgctattcctcaaaaactcattgaagatgtcttctttctgtcccttactctttgcctatagggttatgtagtctttgtagatattcatatatatgtgacctgtgagcgacttgttttgtttttttgccttaaagagtaatgatatatgcacctaaaatatacataaaagaattacacacagtaacatggtagtgttttctaatgagaatccatgttttatagaacatcaacaagaataatgttttggtacactttttttttcagccatgcaaatacgccttagtagtcgagttgcagttgcggattggttcaattgtacttatagcagatgtagtttactatacagttgatgagtaaacactcagggagcaatgtcgcggagaaacttaattggagttagaatttttagtcccaacagtcctatactataacatggattttataatcgactgttgttcgtgctctgtttttgtctgtaggatcacaagattaggtaggaccatgacgatcttttatcttcccatgtaggatttgaggagattaaatatatttcacaatttttaggttttggttgggaaatttgactttttatgcttacaaatacctaataattttttcctaaacacataacatgtaatattcgtgggatatgacacaatttacaatattcctaaaataccctccatttacattatcccctctcttcttctctttcttcatatccatcgaaccctcatcagggtccccatcggacctgtcggacccaattggggtccccatcagacccatcggactcccatttacagcacatgcatcagaccccaatcggggtccccatcggacccaaaaactatatttttcgcacatacatcgaatctcatcgggccattgtcttccccaaactgcgatttccccaaatcgcagatctgaaccttggacattgttaagcatcgttcgggtctcctccgtgacgtggtgatgagggtcggaatgttgggtgtgggtctcggtcggggtg

SEQ ID NO: 99564 - DNA, 1193 bp, Cannabis sativa
caaatatcagcccatcttttggtaacttgttcctcattgcttgatgaagccattggaacaaagagatacagaaatgcagaaacaaaacagaatctctaacggaacagactaaaaacaatagcagaacagatcaatactctcgatcaagagagacaaaacactctctaccaggagagactaattagactaaaataattgttcggaattttatttaagtatagttagtaattgaattagttagttaaataatattatgattagaattaaaattgaactaatcttacctcctctttttaacacctagcgtaaaattactatcattatcattcatttattattgataaacaataccaacatatatcatattctcatctttctcgcttacaaatccaaaataaagaaactgtgtcacaacaattatctatctttatttttcttcctctatcctctattgaagctctaaattaagcttgagtattgaagattttgaaaaagattatctcctagggctaccatgaagaacctttaataagtattttaataatttttgttatagttattgggtacttttggaatatcattaaattttggaagatcttaggagggatttactataaatgttttaagttaaaatttctataagtatattttggatttgaattgtttttactcaagagattttcaaaccctctttagcatattttatgaaattatgtttgaattagtgttgtttgtagattaattgaagtgttgagctactatttggactatatataatttgagaaatagttttgggcagtaagaatggcttttaataggtttttgggatttaaaagttagaaaattcaaagttttggttcctacctataaactgaaatttcggttagcaaaaatcagacttccggttggtttgggacatccgaactactggttcttacatgccagaattccagttggcttctaatttcagagttccaatttgtaattttggacatacgattaaaattttttagggttgtctccgtttgcatgttttgattttctagggtatttccaccacatttatcaaaaaagaaattttagattttgatttttgataaatgttagtgttttggataaacacttttcaattttactgcttatgtgacttagggatattggacgctaaactgtattacacttaagttggctag

SEQ ID NO: 99565 - DNA, 2930 bp, Cannabis sativa
gatcgtattttcagtgagagtaatactcctgctgatcttttatctattgtaatggttgaaagttcattctaataaagtttaccattttccttcaaaaaacaatataatagtcgccatccatgtcaattctcaaatatccaccattagtattatcgtgatattttgtatcatttataatattattaggagtgacctccactactaaacaatcatattaaaaatttaatgaaaaaaaaattataaaattactaataccatctttaaaacttatttttcgtaaatatacacttaaagtataataaaacttataaacaatacacaataattaatttgtttataaaagaccaaatttgaaaaactaatcattttttttaattagaagaaataataataattttcaaaagaagatgatgcttaccaataatgattataaaaatatacatcaaattagccaaaagattctcagaaagaaaaaccaacatttgaatccgaatgcttgaaaagattttttaacgtgatctctcgaacaaattttagtaagaatcctttagaaaaactccttgatcagtgagagcttcttaagttttttgagaaaaatagtttgagaattgagagggaaaatgagaagttggtttcgtattgaaagagtttatataggggtagactcattcattgagattatgacatgtggcattcaaaaaccaaatgtcatttaatccaacaattaccccaagttatgtctccacaaaccccaaaggtctgataatgtggcaccttaaaaaaataagtataataaatgttaccatccttttgaaactctcgataggacaactaaaggtcaccatgatgtgacgatacaactcaccttgtccctcggaaatagttttgttgattgacaaagtgtcatcgtaaaattaggggcatgtgctacgagtccaatctcgtggaaaggagacctgtgtacttatgtcccaaaagaaaatgatgacgtgtcaatagtatggttctcgtagaatcaacctcgcatgatcaaaacttacgaaaaggtgcaaccgagacaacatttagtcatgcgctatgcccagcatagccaaaagataggtaggaccaagaagagttaatactggtcgtgcatatcgattatatgcgatgagcaagtacatctctccagcgacgagtaaagaccgcttctttacataagtttggtccaaataactaatgcattaaacgactcgctaagaactcgcatgttgtaagttgtcaatgcaaggaatgtccaaatatgcgatcaagggtgatcacagacatttaatttattaagcccaaatacatattatgcaagtacaacaccacagagcccatgagctcgcgtgatgggatatgaatagacaaactgcaacttagtaagttgcacacattgctgcaattaagacaagaatggacgaagttgttcttatatttattctttaaacgtttctatcaattaaactgtgcaattatagtaataacggtcctgcctaaccgattgtgtaatctcaacggccacttgttttttatataaagaggtgatctaaatttaataaactaagctgagaactattactaaagatggactaagcaaatcaagtcctaactgaactactataattttgttgtctcctttatatttttgtttatattttgtctattttgaagcctaaaatttgagtactcacagaattaagtgagtattcgcataagtactagtgagtgttcatgtgtaacttgaatactctctttttttcggtgtaatctatataattataaagaaaactaggaaacaataccgcgctttgcgcggattttataacatttgagaattaaattttatattttgtttgtaaattttatatatttttttaaaaatatttttcaatttttattttaaaagaaacatatattatacttgaagttataatcctcattattactatttaaaatttaaagtgctacaacttattataaaaataaatagctaccttttcatctgaattataacccaaaaaattatgtttctcaactattaatgatgataaacattcccaaactattctcactttctatcctatataagaaatttaatttgacatatttacaataatttacatatcatattctttttttatttattttaatataaggattttaatttgtatttattttcaaagttatttttctcaatcataaaatttataaaataaattatatagtaaaaagaactatataaaatatacatatttttttaaaaaaaaaaaaagtcatttaaccaaaaattacataaaaggggtaaaattttatataataactcattattatcagtatttttttttaattatttgaaaacaaaatattattaaacgattgtgattaatttaaaattttactaaaaataattaataaattacatgatactaacatgattttatttattttttaaaataaaaaaattataaatattaatttctaaaaaagttttattaaaagattaatttattttaagtatataattaatttaagtctaaaaataaaaattttacatgttagtaacctattatagcaggttataaaaaaatataaccatcatggttacaattttactattttactgtaaccatcacggttatatagataaaataatttttaaccatcacggttatatagataaaataatttttttaagcattttttttttaaaaaaaaaaactctcataatttttaagcattttaaaaaagaagtcataacttatttaattttcatattttccatattaattgtagagatatgtgagaagatacatttggtgtgttgatggaccaattaaatttaataaattcctctatattattaaaacatacaaactttttatatttgatagttttcttagttaaag

SEQ ID NO: 99566 - DNA, 3184 bp, Cannabis sativa
tatggagttgacaacaagagaggtttcctccggcccaataaacgcgagataggcccaataagcttaatttaattaatcttggaaaattctaccatgaagcaaccatacaagactataaaaaaaatagattaattttctttttaaatgccaaaatcgatacacccatttattttatgagaatgcattgtaggaacaaccaatatcattttacttatacatattattactcgataaattctacactaaagactggtagggacaactctactattagtattatgagaaattataactcaaaatttcttttataactttgtatattgtaattatggcagacactcctcttattttcgataaatttaaaataatttattgtatcaaaaacaaagttcaaacttttagttgcaaacataaattattgtagggcaactgaatatttaaactctattttcaacatcgtttaacaaatcatgcttcaaaggacaatgattgttgtttaacaatccaagtcaagtgaaccaagtttacaatcatagaaaacaatgttatttataagacaagaaatcaaataaagtatcttcagaaatctcctggtttattccttatgaaaaacaagtacaaccatcacttcttcaatgagcacaaaattgagcaattgtattacagaccagaaaggcttattacatacaatactaaaactcttacatccataaccaatttagtcaagatggccctgcatcaaacaagagaaaaataatcatgagattgatcatcaaacaaacaaaaaatggattatttcataattaggggagggcaattaaccaagtaaccaacattatcaactctcttttcaaatagattgacttgataagacataaaacagggaaaggtaaagataggcctaaaataaccaaaagaaccatgattaagcaaaatgacacttgggttgggttcagtaagtaataagtttacacctacatattcaatcaatgcccaaaatgattaatgtctcatattagctggtgatatatactcgaatcagtgagggcaatcctcctttaaaaaatcggttttgttagattgatttattcatagttgtttgacataatctacactgttagctagtgataaatactcgatccactaggatatatttagttaagcctaattactttcctaataagctagtttggtgtaagactaagaacatcagatattgtaaatgtttgtattagtgagtcatatagctaaacacatagttataaacctcagaggaaaaatcttgatcttgtatgaaccatagacattcactgatacctaccaagtaaccatatatcatcaactctattttcaaaaagattgatttgataaagacataaaacgggaaaggtaaagataggcctaaaataaccacaagaacaatagttaagcaaaatgacacttggggttggatttagtaagtattaataagcttatatctacagattcaaccaatgtcaagaatggttaattgtcaattgtatgaaaatggcatatcagcttattagttaattgttagtatttttcttagattatcagtgaaaatgaaatgaatgagaattgggggttttcctattgaagattggtactactactactacaattattgcatgactaagcaaatcaaacattatagttgtttgtatatgtgagtcttatagctaaaaagacataattataaacctcaaaagagaaagcttgatcttttatcgtatgaccaaagacaatcatgaatgaataaatcgcatagttgcttaaataacataacaattgtctcaaattggatcaatacaaaacaaaatcctaatcctggaaaatgaaaaacagcaaaaatagacgaaatcgaaatctcacagaaatctatttgctgggtttggggttgttgttggagtagtagacgaaatcggggggcgagtatacgagagcggcgatcatggcgccaggtaaaacggcgtacttagataccaaggccagctttcttatcagtggttctcccttcaaaaacgacatcttttctccaaaccctaattcgaatccttcgtattcgtcttcgtcttcgtcttcttcttttcttcgctttgtcactgataaacgttggagtacatttcagaaaggcaacgtgggctttggtattgggctcacgatcccattacacatgggcccactaccatctttctaaatgggcctgtgatcataatacatggctagtctattattagcccattgtcgttttcatcaattaaaatttagaggtttataaattttgggtaaaagtttacaattttcctgtcaaacggaattttttacaaaaatactgttattttataaaacaaccataaatcaacaaaatataacaattaaaacaacactgaaataattaaaaataactgtacaataactgtgaaaatttaacacagtacactgtataaaacttatatacatcatttttgaaaatgaaacacagtatttttgaaaaaaaaaatttcgccccacagtaaaaaaaataaaaaaattagaaattttaatatatggtgtaaaaactccaaatttaagcaaagtacttttattaaaaacaaaatacatttttatgtttaaatattttttttcaatatatttacgatattttataaaaacaacaagaaaattacatgaaaataatagaaaaacaacattaaaataatatacaaataataaaaaattaacaacaaaataataaaacataaaaataaaataaaaacatcaaaagaccatattttctgtaaaaaaaaatttaaaaattcataaaaatcttttagatttcgtacaatcgtattttttttttttttagtcattttatgtatttctgaaataatctcataataatatagtctattgttggcccaatctctattactcaaacataattcactcatttagcttagaggttatcttacttcatagccacaacaaatatatatggcttatgtgtgtgtgaatgtgtgtaaatgcataataagataggtaaaatgatcaaccaaccaaaaagggcaaatatatataatgggaaaatatacataaattatatatgagatttataaaaaattaaaacacattaattgctatatctaaagtgagttaggtcagaacaagcaaatgcacatgtata

SEQ ID NO: 99567 - DNA, 3181 bp, Cannabis sativa
gataacaacattatatatatatgttcaaaattttgactatgaatttttaatttctaccatgatttagtggtggacttatccgggaaagacttgatagagcgctgtgttctcctgattggattttgacttacgaaaatgcgggtgtccgtaacttgcctattaccgtttctgatcatggtcctatcatactcgatactcatctgttcgctgccagggattatatcccattccgctttttcgaagcctggtcttgggaagtctcgtgcaaggaagagatcgccaaggtatggtccatggatggagtagatgctactgctatgttcattcgaaatattgacaagtcgaggaaagctctgcaagcttggaaaagaagaacccatgaggtgaacgaaggagaaattaaaaaactcgagcaacggttagaatggattcaatgtcaacccatctcagatgttctcaaggaagaggaatccattctacaatctcgaatccttttcagttggtctaaacttgagagtatgtggagacaaaagtctagagagacttggcttgctttgggggatagaaacactaaattttttcatgcgtccacagtcatacgaaaaagaagaaatagtatttgggctatcaaggataatgagggcagaatctggaaggaaaagaagaaaattgcaagtgttatcaatgattatttttcgaacttgttcacctcttctcaaccttgtctgaatgaggagttggatgggctgttcactaataaaattgatgatcaagccaatgatgaattggttaaaattcctacagaggaagaaattaaggatgtggttttttgtctccaccctttgaaggccccggggcctgatgggttctcaggatgtttttataggaagtattgggacttagtgagaaaagacttgtgtgctacggtgaaggagttctttgtcaaggggaggctcgatcctcggctcaacaatacgtttatttgtctcatccccaaggtggagtttcctttgagtatggatcactttcgccctataagtctttgtaatttctcttataaagtgattgcaaagatcttatccaacagactaagacctctcatgaatgatttggtctcgccctttcaatccgctttcatcccgggtcgatggattgctgagtcttcgattcttacccaagaaattatccataagattcggtgtaagaaaggccttggggggcttatggctttaaaacttgatatgcacaaggcatatgacaaaatggaatggagtttcttgaataaagttcttagtgcaaatggttttaatgataaaagccgtagtctcctcatggcttgtgtgacaagtgtttcgtatgcgattcttctgaatgggtgccctctcaaaaaactgatccctcaacgaggtcttcgacaaggagatcctctctctccattcttgtttcttctttgtcaagaagtcttatctaaactcatttcgaaagccgaagcccgaagtttaatacatggtattaagatcgctcattctacaataccagtgtcccaccttatgttcgcagatgacactatcctattctctagagccaacacaaaggaggcaagcaagctgatggagtgtatctcaacctatgagaaatggtcgggacaatcttgtagcaagcctaaatctagtgtcctcttttcaaaaaacatgagcaatggtttaaaggataatattctgggcattctcaacattgaactggttcgtggtaccgaaagacatttaggcaacccatttgtgttcaagagaagaaagaaagaggattacaaaagattgaaggagagtatgttcaacaagctcgaaggatggaaaatgaaactaatttctcatgctgggcgtctcactttaatcaaatcaatcacctctgcaatgccaatttatgccatgtccacaacgaagatccctttgtctacctgccgagagcttgatgccctcatgagaaaatattggtggctaggaaatgttgaaaagaatagattcttggccctaaaggcttgggattcgatttgtcaaccgaaagcttctggtggattaggtgtcagaagatgcgaagacatgaataaagccttattgacaaagttggcttggagtttggcaacacaggatcagaaaccgtgggtttcatgtctgctcaacaagtattgcaagtttgataattttctcaatgtcagcagcaagagtagtgactcttatcaatggaagtgcattttggatacaagaccaacaatcctccgaggatcaatctcagttgctgcgatgggaaacacaatcgacttttggcatcagccatggattccttggttagagtaccaagattttgtagatttaatgaatggactcaagaatagaggatacacaatcaaaacattggcagacatctcgataggtagcaactggaacgaagagatagtgctgcaaatatttgggagtgatatggggaaccgaatcttatccattcctaggctgcccattccttatcaagatcatatgttctggaaaagttctccacaaggtatgttttctgttaaggctgcttattgtgttgaccaattgtggagatttgcaccagtgaaaaacatttggaaatggatatgggaggtgggaatccatcctagaatctcggtgctgctgtggagaattttgaatgatgccattccagccaagaatagattgttttttttgaatgaaaaaacatgtgacctgtgtgaaaccgaagaggagaatcccctacatttgtttttcaactgtaactttgcaagagcagtctggtttgggggtactttgcctattagaattcaacatcaatcaggagaagacttgatatgtatggtggaaaagatggtgtctatattctcatcttctggttcggaggtaaatagatgtcttattcttaactatgttggatgtatttttgatgctatttggaaccagagaaataatttctatatcagaagtactcctgtaagtccttcccttgcattgataaaagctggaaaaaagttccttgatatccagaatttgcctcctacgaaagatttagacagaagtaaccccaaagatgcaaatgttaggacagatatgattcaaatccctgcgaacaaacaagtgcgccaggctattttcacggatgcatcatgggt

SEQ ID NO: 99568 - DNA, 879 bp, Cannabis sativa
tagttggactgacagacagttatacaacataaccaattaattcaattcactctttctcttttcttttttcctttcaaattttctacccggggagtatataactttaagtatagagtggaatgggggctgtcttgtcagcaaaggagagagagatagtagaatgtgggagacaaccaaaaacatttgaagcttagcaacagttgacataacgtctttttagggcccttagtaggccataccttagcacactcgattggtatagcccattaagtcatttcctctctgtatttataagtccctactcccttagagtttttcatcactttccttctttctcttctctctctcggtttctttagtgcaatatcatatagatagaagatagctaataagctaggcttacttttacatatacatatatagttaatatataaagattattattggttgatcatattgcagcctgcagcctcgtcccaaatggctgatttagcaggttcagcctccggaaggagatcatcaatgtggtgttcggtgccggaaaggctccagctgcatggagccatgttggccctgcaatttggatatgctgggtttcatgttgtttcaagagctgcccttaatatgggcattagtaagctcgtcttcccagtttacaggaacatcatagccctgcttttgctccttccctttgcctatttcttagagaagtaattaatcaaacaaagccactatattatacattcatgttaataactttttggtgatttaattaattagttatatgttttacaaaccaggaaggagaggcctgccatgagcctaaatttcactatacagtttttccttctcgcacttgttgggtacgtatatatatat

SEQ ID NO: 99569 - DNA, 1999 bp, Cannabis sativa
acttggaacctaaacaaaactagttgtgttccgatattggacaactactgaaactctgtctattgtacaatgaaacgttgcattgaccaaacatatcaatatctattattaaattatacatttttatccgtagaaatgattcaaatttcagatccctggccaaaagaacaaacgccaataaagccaaaacaattgatcgatgtagaaaacaagaaaaatatatttaaaaataatttcatatccatctttccccttttcgattaaaactatttgaattggactattccataaaaacatttctttacccactttgaaagtacctccttaaaatgtgtcatgaccagctgtagacatttttagaccattactacttgttttaattgcctctttattcccttacctcaaaattgagaggctaggctaataagctagatacctctctctcaaacctcacactactactactactaatctattattacatggctaaaaattacaacgatcaccgccgtgacgcggtgattgacatagcaaataaggctgtgaacttcactggtgggttagagttcagtgacttgacatacacggtaacgaagaaaaagaaggtagaaggaaaatgggagagccaagaagtagacttgttgcacgagatacgtggttatgcgcctaaggggtccatcaccgcggtgatggggccgagtggtgctggaaaatccacccttttggatggtctggcaggcagaatcgccagtgggagtctaatgggcagagtgtgtttagatggtgtagtaatgaacccaagcatgatcaaaaggacttcggcttatattatgcaagaagataggctgttcccaatgcttacagtcttcgagactttgatgttcgcagctgattttcgactcggctccatctctcgtaccgacaagaaacacagagtggaaaaacttatcgaacaacttggattaacagtaagtgataaattgataataatcatctctaacttataaagaatgaaagatttcttatttttaatcacatgtaaagtgtattgttataaagagaaatatgagcactctaaatcatacatgaatacattctagtaatacttaatattaaaaacataaagccacacacattatggtattacacaactgaaaataccaaataacaatattattaattttaacagtagtaccgatgtgcactaataatctttagcattaatctaatttttaatttgagtattgttattaagcactattggtgctaaataccttttagacgttagcttgagattgattagtgatattccctaaaagttattgcattaaactatatgagactcgataattaattagaccaataaaaatattgacatataaaatgctaagcatcactagtaccttttaattatcatttctcttttaattgccaccattatacatattgaaatgctgaagggtaccattagtaaaatttaatattcagtctacttatttaaatttaacttatagaaaatcgttaactaattataaaatagtataggatagatgttattaatcttggtgccccgtaatgatgctcatatttataagaaaaatactaagagtatttctaatggtaaaattttagagaatgtttggtaaggtgatatattatgtgacaaaatattgagatgttataccattgtagagaaaatgatttgcatggatgctatgttgtagcattgatgctatttattttttttaataaacaattgaagctaaaaagttattgtagctaaaaattagaatatatattaaataataatgagtgagattataaatataacattttaaagagtgttatacatttgagtatttttagaagtaagagtgttaaaaataatgtggaagagagataaaataaaatattatatttttaaataatatgtaaatttttaacatttttaaaaaatattaccactagagatactctaagagaacaccacaagataata

SEQ ID NO: 99570 - DNA, 1487 bp, Cannabis sativa
ttttttttttttatcttttaaaatacattattaaaatactatattatccattttacattaaatttttacatcatactatccaccaacttatctaaatttttctttttatatttgaatattatatttttatttattttaaatattttttcgaactattaataaaatctcatatttactaatatttagctatttaagattatatatcatattcattttaaattatcttatcatacacacacttttgtatgagcaaaaaataaaatataaattctaaatttaattttaaaaatatgtattctttataaaaaaaattaaaaatatatatttaatttttaaaatgtaaagtatatatatacatgtaaaatattgtcaattacatttatatacatgtagtaaaataaatatatgtcaattacatttattaactgtgttatagtttcaggatatgaaaagcacgaagaatgtagaagcattccatgatttttatgtctaaactttttctcttacaatttgagtttgtcaaattcttagtaagtggagaagagagattataatttataattattgaaataatgataatagacaattatattaagaaaatatttattatttttttaattattatatttattatacataattcattataatttttataatgttagtgttattataaccaatttcttttacaatgtggtattttttttcatccttagaacatctccaatccaatggtgcatcattcaattaattaaattggtgtggcattttcactcaaaggagatacacatatcatatactaaatgcactaaattttacaccattagtgctagattttgaatcaatatcaaattagtccataactttatattttcattctaactattcttttaatttatttagaaagtaatcataaattaattattaacaatataatgattatattataaattaattattatttgctataaatgtaaataataaaaaatataaaatcttttaaacaaaatatttttattaggtattatatttgacattaaatcattaaagttattacactaaaatagtaaaaaaaaaaaaaaaaaaaaatacaacagaatagtgcaaccattaagataatcttaaaaaagaaaaatcttgcatttacaatggcaaaaagcaatctaagaaatttccctttacacttttcttcattaggtgaatgtatttatttctgtcagaaaaactttagtgactgaacaagtttttttaggaataaatatattctttttttaatgataagctcaaaagggcattagataaaactttggtgataaaagagaaccattacaatgattgtttaaaaaaaaaaaaaaacaatgattgtttaaaccccacttagcaagaacatggaccaaaaatccttacaactcaaactctcttaaaccggaaatatagtctgaaatattgcatcaagtatttatgcatgaaatttaaccaaatcaata

SEQ ID NO: 99571 - DNA, 1082 bp, Cannabis sativa
tgtaaggttttctaaactctatatgtgtttattttattgttttagagaattcatattaagggtgctaattaaacatgcatgttagtaaatctagattctgataaaataagttccaacagagggtactccctaggatgcggcttgaccgtccgaccctttagggggtagtactcatctcggggtggtactcctgagacccttttattttactcctcgtgttgtgtttagtgcttagtagtatgtagtattgataatgagaggaggtattgcattaaccatgtcatatgtaggtggagtatggttcctaaatcacgaatgagagtgcacgaggtgatgggtatatcttgaaactaatctatcacccttaggtggatgactcaccctcagggtagaggtgattgcttaacccaccttgggggtagtcacctatctcacccttggggagtgtatactcaccctagggggtggttgctcaaacatacccataaggagtaattactcaatctcactccttacatggaatatatcccattagggataacaactttatacattcgtcattaattcaatcatgctattctcatgccacgtgttattatacttgccacatcatccacgccaaaatttaggtaaacattctccccctaagtttttagcagtatagccatacggtagaaacttgtctgtgtaccccccatttcgatcttgttgtcgatgacttagtggtatggtgccgagaatgttatgactttaccattacaatactataaacccaagaaatataaaatatccctttttcaaatttttacaagttcacctcaataataataattttcctatacaagaaaagaaaaataaattataaggaagaaaaaatcatttacaagaaaaaatactttaaatatttacaaatagaaataaaattattattcgtagtaaaataaatagaagagaaaaaatatgtggagaagtgtggaaataattagagaataagcaacatataggcttaagtgaagactcaaaatgatcaaaaccataaaaaaaactcaaaaattgccttttcctcttctctctattctcca

SEQ ID NO: 99572 - DNA, 5060 bp, Cannabis sativa
ataggtctatgcccaataaccgcttgaagtacactgtatgatgaatctccctactgtttctttctttttcttttttgtttttctattgattaaaatctgagggtgtgtttggaggggttttaattatactctccaattcggatggctcaattacactgtgtaatcattaaaaactccctatgataattcctatgtaattatcatttcttatccaaactcaccttgaatttcaaagtattgtgtaattactaggggactttcaaacacacactaaatgtagggtttttctttgcaggcgttaatggagattgttgagcttttaggaactgattctaataatgggacaaggctcaagaacatttatgacatttggattagaaaaaccgccaccttgaaaggaaagccggttgaagtatgtacactttttctctcatggaatgtttgcattttgttatattcttttcaagttgtatgaagggttttaattcttaacagttctatgtgcattcttgtatgattttgtgtggtgtttaattaatgcaaattttatcttttgagcagaatcgatacttggttcatatagagttcatcgttttttgtcttacacaagggaatattgaagatgcttaccaggctgctttatggtatgattttcgttcaatcttgtagtttgtcgctctcctcgatgttgaagcaactagcattgcatgttagagtaacttacgcataatatctactcaacgagatagacttgaacaactcatgtcatgtactgtgactattacatatatgaagtgaaagattcatatttgagaacttcatgtttgatttcaataattgtagtttccaaattggtttctggtattcttttgtctccagtttcaattatgttttccaaaatatcattattatgatataaatgcacacaagccaattccaagtcttttgtttctctgcactgcttattttgagtagcactgacattttatttttggcaattggcatcctttatttataagctctttcgtctatcctatgattttatttttctcttgtttttttgaacatattcgccaaattctatgtgaaaattagttgacatttacaatcacttctgagaagtaaaatgcataatggactactttagagaaaaccttgaccacatcttcatgactagcaaaacaattacactggcacaactctataagctgcacctatataatgtaggcatacttagtatcttcagtttcgttatttccaatattcatgttgttgggtaagatattatgatgattgactgcttgtaattgacatttgcaatgtattttgttcaaatgaaaacagtgtaaggttttgttgcttttgtggtacttttcaggctcatgcaagaaaatgattttggtacagagccagtttcaaatatgattgtaggattgacattctaccagttatggtactctactattccaaaggaaatgttgttgacagattctgaccaggtttattcccccgggcatacgaataaactttctttcacagaagggtgggataaagctgattctattcaagcctgtacagaatttcaatgtgattcgaactcctctatcaacaatgatcaaagaacacatattgatttggataagggcttacagatcgaaaactctgttggagtccatagtgttcagatagaaactctcccacagaactttcagtcccagggcttctatgcaaattcggctgataatacaggaagtggagctttagaacctggtcatagcaatcagatgacttccactttctctgatcttggtgggtacttaatttccttctggtttttattcttaaagtgtttaatagttttccctttttttaagcgagattctttttttcatggctacaaaaattggatgttcctttcgtaatttttatattccttgtatataaaattcaactattagaagatgtaattgttttactagtaaatacctattatttttagtctgtggattctcttacgatatgttttgtattttcagaaggcttgaattcagtattgttacctgtaaagttgtttaatgagaatggcgtgcatacggaaatgcttaatgactactacaaggaggcagtgaattgcttaagacgtgctctttgctcaactccaccagtattggcggccttacttcccttaatacaggtgcacatttatctataaaaaaaccgacatgcatctccacactattttgcttatgtgttttttttaagccactctaagaaatcctgaaaaataaataattgcaatgatttcacgtgcctttatgatttgctaaacatcccggtttaagtttaaaaatttgttcaagctggcttgtagatgtatctcagtaatccacactcaccgtcaggattcagaaatggtctcaatttttgttatttgttgagtaaaaaaccaacacgatgactggaagtaatttgttttaatgcttctttcttgtgacagctattactggttggaggtcaagttgatgaggccttaaatgagctcaacaaattctgctgtaattcaaactcaacacttccaatgcggtattcattttgttcgtatattttgctttactgtccgcttcttttgaattcggaagacaagtctaatacatattacttctgatggttttgtgcaactgattgtttttataattccaaaagttagatgaaatgataaccatatattgatcattaactttgctcaacgtgatgatgagattttcgttagcagacactttgcttgttgtgaagacacataaatactaaagcaggaatgttgtatattttatgcagattaagagctaccctcctggagcattttgagtataacaacataaatatttcttcccatttcgaagacatattaaataaggatcctacttgttgtgattcactggcgaagcttgttgtcatgcatcgaaatggtactacatacttctgaaacttacttcgctacatgatctagttatctctgcacacaatcgttgatatactagttcaacatataatattatatatatatttcacattttcacatgatatgctattatttcttgcaattaaagtgtgtgcactgctatctaagattttaagtaaatacgggaagcagcattgtgagttatttttaagtatgtttctgttgaggaacaagttttaactggagttatgtttttagtaattgttttcttctaatattatgcaggggagtatagttctgaatctttgttggaggtgatagcttctcatctcgatgctacatatgcagaccacaacacatggagagatttcgcttcatgtttcttgaaactttcacaatacgaagaagaccagatgtcagtgtgtcttaatgaaaacgatggcggggttaaacaacgttattcagtttccttaaataagactccgaatttatttagggagtctaaatctcgtaagaattggaggcttcgatgcagatggtggatgacacgtcactttagctcaaatatgcttgcatcagagattgcagcaggtaactttgttttatcaataagcaatggattttattaaacaacaatggtgcaattctattttattaggccacctttacgcctaacatattataggtggaacaaggctacaggggcaggaggattagagggttataagccttaggaatgtcttatcagtaagatattaaaatgaaacctttttgggcgtttaaagaccaactctgatgcttgtaattttgtcaaaatgaatatctttggacttgggaaacaattgtatagggccaatatgaataaataaagaccaacaaaccataactaaattttctctatagtttagggactgactgagagtattcttactgtgacagtttactatatcctttgttcactttgctacaggtgatttggagctcataacttataaagcagcaagtgcttctcacatgtttggacccaagtttgcttatgtaacaaaggcatattcttgtttggaggagaaaaatgaaatagactttctcggtacactgaaacttcacattagtaagtctgttggggtctattcaagctttgaacagaataataaacgataaaaatgtgaaagagtatcaaaaaagaaggcgggatgaatagcggtggctggcagcaggtagggtggcggtttgttactctcacagactgtgacaagaagttcactccatttcgggcaactccattccctttcagtccttcaagcttgatctacctgagacctgagttgcaaggcatgcctgaagagatctccaaagaaaaggctcgtttggttgccattcaggtgaatggggccagtgtcggttgaggatattctgcttcaatgcccttaagggtcttcctggtccatacatcaaaatcagtttatgccgcgtgttttcactttcgcccttgggcccagagctgaacaagaaccgcagttatttgcaaactaagctgaaagcacgatctgaactcgggcaacaccctaaattgcctcaaaatagttgcaagctctacctctccaaaggtaatgatatttcctaaatgcaagaaaatctaattgattagtttacttttagatccgctttggtatacaaaaatgttgacaaggaaataattttgtagagagaacataatcgattaagtatctgttctttgagcaggatctcgattaagcttaccgggtctttattggattaaacttctcaaagctattcttaatgcttccctgtatggattgatagcagtcttttgatgaatacttgtaccggtaatagtgcctgagtttggttcgagtgatggttttcggttttcaaaattgagtttcgatgatcaaaaacgaagatgtttagaatgtgcctttctctgatttatgtagagattagaaatgttttatgttttcttgttactccaatacatatacacattgtattattggtgatagtgatactattaatacaagttctatgagttatcaatctctgattatcaaagttttctaaaatcaaaatcagttcttgt

SEQ ID NO: 99573 - DNA, 2975 bp, Cannabis sativa
ttgctgcactagagtcaagctattgtttagagcttatgtagatgggtttgactaaattgcttgacactgatgctgagcatgaagcttaacttatttttcaattaaaaatgaaatactataatactcctttatttttttctattagctttcctagtttttggttaatattttattgtaattattttagtatttaaggaaatttgtatcatgataattgaaattttgagaagttatgctaaattattgtaatgttactgcatctgatcaatgatgatcaatgattggctccatatagagtgagatttgaattggtccctagttgcacatatctttttctttttcttctgcattcctttttcttaatatcctgattcctgaccttttgaatctttattctttcctctctttttataatgatatttaaaggcattttccataatgtattattttatcagaaacaattatgtcattgcaaaatcatactcttgaacaacgatatgtttataccttctggaaacatgtgtggtaggctaacattcttgtctatacctgatttggttcaggttcttgtggcgggaaaatgcgacttttgcaatatcaaggcattataggcgctatgatgtttttgaggaggcagaagccaataaagctgctggaaagtatactaatgcttcgattgataagcagattgagttttatagaaaagagggtttaaaaccctattccaaggctaaacttcctataactagtggtaggtttgtgtttcttatattcatgtgttgatattaagactaggcatatgaatgtatgtaagtgtctgcatgtattatgtttttttcctaatgtgattatctttccttgttgtctttgacattctgtagatgttcctgaaggttgtgcaattataagagagcacattcctatcaccaatttgtttacatgtctatggttcaacgaagttgatcgtttcacttctagggatcagttaagcttctccatggtgagggacaaaataatggcaaaagcggattggagcattaatatgtttgaggattgtgaaaggcgaaatttcgtaatacaggtgtgagttgttacaaattgtttatttattaggtgggcatttgctccaaatattttgtatgcttttccttcaagttttctttgtagacttgttcttatgaacgggttgtaaggctctgttacatcgctccatttaaccattggcactgtgcatataagttttttccatttttccttgagcttagaaaatggtgaaattggctccttttgctaaattacatttaaaattgcatgcattacaagatcttgcctgaatccttgccagagtgggatcgttatggctaataagatgtatttcatatcactaaatgttttaagtgaatttatctttttctcttctgcagacataccacagagacgtcctggagcaaatgcctcctcctcctcctccagcagtgaggctttttaaaccagtttccatgagagaaaatatagttaggacaccgataggaaagaaggcttctactcgacgtggaagagaaaggaaatctggatcaaagcgtcatcgaaaggtgaatgccggtggtagatacaacaactcattttaattgtttccatttattggttcccactcccctcatttgacccaaagaatatgtttttatattttctttctccactttatttcatttaaacctccctggtaggaacaccaggttaaaatctgtgcagaagggatgtaaaaatacggttctaatttttgtttcgggaattgtggatatatatatatatattcaattttgctgtaaataccctgattcttaataatttcaattcgagcttctgcaatttttcctcatgtttctcctttgtcatcttatgtttggaaagcatatacatctacataaaccattcataattaatgccataaatacgtcaaagtaagtaaataatgagatggtatattcagctaaaacagtgaaacagtagcggttcttttggtgagacattagactgtttagtgtttaggcaccaagcaaagattacatcatagaaagctcagcctctctctctctctctctctctctctctctctctctcaattaaatgatattttacaccaacaagcttcacaagtggggtggtgagtttagccaacagatgtgaaattatgataaaataaagttgatattcttcttgttttggaagaaacttgaaacgtgcatgagtgcatgtgattagttattgtgtgaaaatgtgagatgtgtgcttgatgaattcaaggcaacgatccaacagaagctcaagatttgggatgggactctcaaaacaggctgtaagtgcggtggtgttagtggtgaccttgcatttgttatgatgatgccttcctttcctctttgaaaccctcaacttaccttattatattattattcaatataaatttatataattttcttattggttggcgcacataacaaagctaatacagcttgttatatactaaagtttcctctatattattgctttatcattattattttccattggagttacatattggacccacgttcttaaacttcaataaaggattttgaaaaaataaaaaaggctagtttgaatttagagaaaattgtggagcaatgtttctacttttatttgctaagaaaatgagatctgtaaatttaatcttatgaaacttaaccccggtaaggtaccatcttgtatgaatcctattagattcggttttattatcttcattcatgaatatattacgtatctgatttgcatattcaattgaaatattctttttattttattttattttattcaaaagatatgacatccctgtctcactcaaaagaccctctctgtttaagtccttatttaatacttccaattatgtatcaactcaccctctctctagtctctataatgtacgtaacccctttttcttt

SEQ ID NO: 99574 - DNA, 3133 bp, Cannabis sativa
tacttgtgagtagatctaatatcttggtaaaataatttccaacacaaactccatgacagacttcactatcgaactttcgtgacagccaaccatgaccttccttctctctctagttctctctgttgcgtgaccaagacccacgaatctccttctctctctggttatatctagtgcgtggtcgatgacccgcgacccatagcccacaaccaccaccgttgaacggacagacaaacaatatggtttctttatatttattgtttattgtttggtaaaaattgagttttggtgaaatatgtattttttgttattctttttatatggtacgataggatacgatagttgtcaaatggtgggtacgataatcgtgtaatctggatgttaaggatgaaggtctgatggtggtctgatgcaggcccaatgccaatctgctattgaaatgagtaaaagttgaagatgtaggatatagtctgatggtggtctgatgcctttctgttgttgaaatgagtaaaggtcaaggcgtaggtccaatggtagcccaatgaacccatatttaatgtacaataacataaaaaagggtagcattaggccgctatcgaaccaacatttgacccacgtcttcaatctttactcatttcaacaacagaaaggcatcaggattttatcggacatggcgtaaaaatttgttttttgctcaaaacatagatttgaccaaattcaatcctaaatttagcataaactcatagattatagagattcatcatacattttaattctaaatcaataaactcatacattttaactcaaaaatataatgaaatgaaaaagagagtgcccaaaattttaccttcaatattgcgatggtgtggccatggtggtcgtggattgtagagagagtatgagattttgtgatggtcgtgggttgatgagaaagtttgagatgtttgatgttaggggttgtgtccgtggtagtgctttggttacagaagagagggagagaaagtagagaaagagagaggcgggagtgtgttgaaaaatgggaaaggtaatataagaaatagataaaaatcggcctaattggtcaatattaattggcattatcgatggatattttatcaaattttccatccggatttagtggccaacattacttatatgcatgcattcgatcagtctatttctctaccactttccacgtatttaagctcttttgtaatcatactcttataagtgccacatatcctatattggtatacaacatttcaataattaaagttaagggtccatacaacatctctcttcccatctaatttttattaaataaacatatgaaattccatattctttattgatcaaaatattaggtcagtattgcctcaaaaaaatattaggtaaatatgttagattaaatgttatttttttatttatttatggccactttaaattgattggtgagatgttaattatctcttggacttatttttactattcattcttctagaaggtttttttttcctttttttgtaaggtatttttaaaataaatagatttgctatatttttgcagctcgataaaggaaaagaaaaatagaaaataaaataaaaaataattgatcatttccgtcctcttgcagagtaattatttatgttaattaatgaatgttttttttttggttaaaaatgtatagtgtattattcttattgaattttataaacaatattgatcacacagtgagaaacattgtgacaattatttaagcaactttttttaaaaaaaaaaaattaataattttcttataaactattttcatttttcacctttgctttaaaaagaaatataagaattcaaattttgaaaaaaaaaaattaagtacttttaaaatttatttaaacaaatttttaatcattatgtagtttataaaaaatatctctttttataccacatcaaaaatacatttatattaaaaataattaattcaaactaaactttccttatttatctcaatcaattgaacaatcttaactcatttcatagcccatttaatatgaaaatgagagatattttgcaaaattaatataaaaactcaaattttgttaataattttcattcatttatataagttggtgcacttttcatatgataatatttttgatatagtgtaggaagatattttttttgatattttgtttaaataaatagctaaattaaacataaatatttaaatttcccttttattattcaccattggataaaaatataatggtaaaatatttttaaaattaatatttataattaaatttatttaataaccatcaatgtatattatcgattgagaatcgttccaattttatatataaaatatggatataaaacgatatttgttggtttcatagagagattttttttttatttgttagttttaacggagaggctacacggtacaattaacttttatactaagtaagttttacatttttactgtatttattttaactttaatttttaattatcttcaattgtcacgtcagtaacattgagttatttttcttctatgctacatgttaccaaataccaaatttatttatctttttcatcatacttaaaatatagtcagatgaaatttaaaaaaaaaaaaaaaatggggtttcactgcctatagtccaaatatatataatatttagtaaaagtcttgtcttgtgacatgtgtggtatgtttctttgtctctaaggttgattttcttttgtctctaaggttgtttgtcttttctgatggcgtcaagcagtcggggtgggtttgatctcaatgagcagtatgggcagatcagtttggaggatgaagaggaggaagtgttaattggtggtgatgaagacggagaggaggcgatttttgatgatagatggtgcttggtgggcaagtttcttactggccggacacttgattttgatgcaatgaggcatatgatggcgtccctttggcaacctgggaagggagtattcatcaaggagttggatactaaccggtatctctttcaattctaccatgaacttgatattcaagttgttattgatggaagtccatggactttcaacaaatgtccactggtttttcatagattgaaaaaaggcgaggatccga

SEQ ID NO: 99575 - DNA, 1955 bp, Cannabis sativa
gcccaggattttaagatcaaaaagataattttgtaaggaaagttaaatacacatataatggaaatagtcatcataaactaaagcaaggggactaacatgatcaatctgtcgagtggcgggtgtgacctttccctcaacagcctttaagagatcatcgtaatagctctcaggcacggtagacttcttcttggcagccccagataaagaaaaccacaccttaggcctaagcagtggtggaattcccttcctaataagcctcttcaaggtaatagcattggcaagagtggaaaacttaagagaagattttaaggcaatcccttcagatatggaaggctccagataccaatttgcacctttattggcttccaatgcccaccaaacccgaccttgcttccgcaccttctctctcacctcattcaacacattaacatcatcaacattcccttctactgtaaacatataaaggtcttggaacttcacagtgagattagccctcctagaatggatgctgggcctcaaaatcggtatctgggattgaaattctaaagcaaggtctcttttgctttgagtcccatacattttggcttctgggttattgtgatagatcaagagggataaaggaagagacgaatagatggagagagaaagaaagatagaacctttaggggtcagatgcccttgtcaagcaagaaagaaacaccagctaaaaacccatggaaacggtcgaatgttaaagtctaagaaacttaagtttgaaaaaagaaaaccaaagaagaagctctaattttaacagggtacctcaaaaatccatgaatgaagagttgcagacacaggatatcaccaaaatctcacattccaatggccatggttagttgggttttcctccaaaaagagaaaaagtccaaattgcgtttaatatatatatatgtgtgtgtgtgtgtttactccaccggaaaaggggaaaaatgtacctttttcctttttcctttttcaggtgggctcccaagtgaaaattcaaaacaaagaagatgaatttaaaagaaaaaattaaacaataaaagaaaagaaaaggaagaactcaggttaaagaatgaagagaaaggcaaaacccagaaatagatcaatgcaattacaaagagaaattggttagtgaaatggggtttttgattaaagaaagtgttaagatattgtctaattttaggcggaaaatgaaatgggaatggatgaataaaagaaaggggttacaaggatcaaggaaatccggatttggaggataatttaagcaaaagcggataggatgtaaaaataggaataggatgatctgattctgaagtggtctcctttttttggctgtagaacaaagaaaatcttggagagagagagagaaaggtaaggaagaggtccaaaatgcgaaaaggaaattttttaatatagtgggtctttttttattcaatttatttctataaatacattttttggaccgttataaatatatagacagaagaaactgagtggatattatggatagacgttaatagagatagagagagagagagagttaggtaggtttacaatttcaattgatggtaaagtttggaaaagtgatgccctccatgattattgatgaatgagattgaaaaattacactcccttatgtataattttttttttttttgaaaatcccttatgtataattaaatttttagtattgacattttagttgggaattaaaaaatatttttttttttaaaaaaaaaaaagtaagttcatagttaaaaaaaaacttctcaattattacatatttgacatatttgccgcagtaaaatatttttttttttttttgaaagggcggcagtaaaatatttaatgtttacaaaatgtaatacttaattatttataattttcttatggtagaaacattttaataactcttaaagagttaataaaaatatata

SEQ ID NO: 99576 - DNA, 2463 bp, Cannabis sativa
tgaaccacgtaaaaaatcgtgttactattatacataattcatgtatttatatataatttaattgagaaattaattattgaaagcctcaattattcttaacgaaattgagttaacagatgtatgaataatatattatattaatagattggaatatggagttttctctttctctcatttcttttaaaagtattttttaaataaataaaaaaataaaaaacctaaattcttaataagttgtgctaagagtattatttaaaaaataaataaataaataacttattcaaacaagttatatttattgattccaaaataggtcactctaaaatagaagagggatgaacaacataaattattaaagagtatttctagggtgcacggtaaaaaaaaaaaagtacaatatatcccttcatatttttaacattcagattattttaattttaatattttataagtgtgcaatatagttatttaaaatattttataaaattttgagatattcgaataatttacaatataaaaggtagagatcaaataatttatttcatatccatgtaaaataaaagagtgcaataaattaagattataacttttttaagatgtcaaaaagaccaatgaaccattattgattttgttcaaaaaaaaataataataaataaataaggataagaaacccaactgaaaacatgatccaaacacatcttaaaataatcatgattggtacgaagcattcaatgtgaataagtgagattttaactatgacaaggacccactactcatacgaataaaatataaagaataacagcaactagcatgaggaccaactcactccccacattcaattctttatttcatagcagatcaaagtattttgatgatttgccaaatactcaaatgggacaacaataatcacatactgatagatagatcagttgctggggtaacacatgcccttataattaagaacaataaagaaacacacctatcttcaatgaccactaataaaaaatttaaaaaaaatggtctatcaaagaagaaaaagaaaaaagaaatatttcttatggttgtgtcataataaaggcttactccaatgtgtaatgatttggatacaaaaccatgaatgttgtcagaagctatatttactaacgctggatattttgtttactagataatctcaatcaaaattaaaaaactgtgatttattgtcagagatcacgtgtaaacagaaaatttcaaacataagacaatatgatacaatgatcaacaaaaattctagaagaccgtccttaacatcttttttcgtatcatataattagcatcacttaccaacatatcactatttatgtaattaagaacaacctattaatatttgtatggtgccactttgtagtgcttctaatgtaatactaatagcatacaatactaaaatcagttaaagttagctcaaatgatcataaaagagtacgtatgtattaaaagttgtagtttgagtctccaaactatatattgtaatatataaatgtttattaaaaaaatagcacataatggtagttaaacaccttaagctgttacctcaaaatacatttgttttcctcattatgtgacttgacctgtatatttcccaagaggaaaagcaacttcaatgctatcacaataaagactgtcatgtctgttggtttgccagtctctttccactccttgattggtgcttgtattggtgtgaaacatttataaagtgtctctctcaactagagaaaagataaaatgaatcaagttactaataactactaactggttttccttaaaaaaaaaaaaaacaagaaactactaactggtttatgtttggaatgtacttatctacagtacattccatgcatatgctgagttatgtagtctattctattcttagacacatgaagaatcttactgctgagtcttttaggataatggttgaaacctctcatttccttcaagtagtaatagcagatgccatttttctattacgaggcacaagattcccttgtgattttgaagattttcctgtcaaaacggaaagtattacaatcatcttaatcagtcagaaacaccaacattcatattttagacacaaacacatatgaggtgaggctagactagaactgaccatcatttctttccattttctttcggctgcgccatagaatccggattggtgtgccaggaaatcctgcatccgtacgtagttgtttttccatgtaacgtcggtatgtctcgggaaaaagctttgcatcattaacaaagaaaacaaatgtaggtggccttattgcagcctgcaaatgaatatcaagtaaactaagttaactccactggataacaaacttacatgtcatgtttgtgtataaaaaaatatatatatatatttagtgcatatttgatatcataattaaaaaactgttttttgtgtttaaaaacaaaaaattatttttt

SEQ ID NO: 99577 - DNA, 2382 bp, Cannabis sativa
atgaatatatataaacatatatattatagtggctgcgatcgaatgttgctttcatgaaaactaagacttttccattgttaatgaggagaaggtgaagaacattctaatcccactcaaaccataattgcctttctcagtcatgtttatgcatcttatcaccactttctcagtctttctacttatcggtttttggttggaatcaaagtgtgaaacttcattgtgtttgatttgacaataatgcttaaaatctatcatatcattcttgcactgaaaccccataagactaccaatcagtggaatgaaatctttatttcccagccagcaaccacttatacaatgctatctccaaaatactaaatataaataaaaatagaagaaaactgaaagtctaaaacacaaattactaaaaaagaaaaggctaatcttttaaatggcaagccatataataagttccaccccacaaatcatacaatgttgatagataccaaattcaatcggataagaggtcttttcccacaaacaagaaaacccttgttttcataaaagttttattattttcactaatcagtaaaagggtattgctcatacctaattgcacaatcatgaagcacagctcgagccccaatacgattttgacatgagccaagcatggcagttttggcagcaccaagacaagcaacgcagtctgaactagttaggtttttgttacaagaaccgtgaccatacgcaaatgcattaggaaaaggagagatgttatacacatcatagttcttgtgttttggggtgtctcttagtaattcttcgataacataagcaagactggtagcaaaaggatcgccggctgtgtactgacccgagttgcacagcacggttgtgacctctgtgtttggaaggcttgtgaccataagattgccatacaagaatccaattgtgattattgcaacaaatgtcagatgttgaaaatccatttctcactctttctttctctgtttcccttcctctgtttttttttttctgattagaattcaggttttgatcaagattatcacgttgactcttttttattggttttcccttcacaatgcaataatttaagtttctttcttttgtcttattacttattcctcttcggcctgttttttcttagaagatttttcgattgaatcatacaagatatattatttttttttcccacttttatgtgattggttgaatttgtatagactgtaataataaaaggtacatatactccaaatagttgtaccagggaaaacaaattaagttcgaatatatttatagctcagaggacttcataaaattgtagtctccattttctgactggctacagtcagatagatttgttctacatgagtttagtcactatatatacaataataacaacatcaccaaaaaccttccttttcttttttgctttttttttttttttggtttttagtcatttacactaatgtaaattttcccaaccaaagaattatttacgccatatacgctcgagctgatcatcatgaccatttcatcatacaatttatatatatagtaataacatagtgaaaaattaagctcgggaaagctttctataattatataataatatgtataattatactaatggaaagcaagttgaccaaggtcttcaacctccttagccaaatcttcgaccttttcaattatctccattaaggagaaaacaagtgttgcaaccgcaagtccttcgacattctctaacttcccagctagctttgaattattaggactatcagaaatcactgagctaagctctattctcatggccttcagcttcggcaaaattacatcagctggctggcattttctcattttttttaagctttctccaagctcttttaagctccatccaagtgaacaccccactgcttcgcatggctctttaattaactgcctcaatgttggcgaaggctatatatataaacaaaacaattaatttcaatattaataagtaacagtacaattaattaataattaaaatgtaaattcagtttgatgttgtccaaaaataaaacacattagttgttgtaccttatactaatacataatttgatatgggtatataagtatgtccttatttgaaaaactatattgtaaatttatatatatttatgtaattaattaatgctcacgaagtatttgtatatgtatacctgtttagaggattggagacaacttgtcaaggaaatgatagaggaagccaattctctaaggtggtcaccaagttgaaggtactttccccatgggtaataaagcccaaattttccatgccaaggttcccattttgcaaaatttgtctgtagtagcatgaaaattatatattaattattaaattaa

SEQ ID NO: 99578 - DNA, 772 bp, Cannabis sativa
aagaattggtgtatttaattcaagaaacgaaaacccagaatttccttttaacaaattgcttagttgataaaatacaagacataacagacctttaaaattagcatagagtattgagaaccccttttaactgtattctatctaactttctttgcttttttattcttgtggaaactatccggagtccggctatccatcttgcgtttcatgcctccttgttttgaagcaccgccactgtatgttgcctttgctttcgcctttctggctgccaccgctggtcttttatctttacggctacgttcaaccactgctttcttagttgtcaagatgggcttctctggccttctggctttcgctactttcttttcgacaccagttttgctagcacgcagaccctggtacgatgtagaaacagttgaaaatacctttttactatcaaccgcagtctcgaaactccgaaacttcttggatggggagctacttttatctgcaggtgttgggttacttctcttagatggggtagcagtatctggtttcgcatgaaatagccttagctccctctcccgaagcttcaaatttcgtttcctaactactgcagctgcagcttcctgtaagcacaaagacaaagaagatgatcataaattttctgtgtgtgttaataacagcaacattaacaaagaaaactcagataatgtgatactgcaagtactttacaaaaattgcgagatccaattccatcagcgaaatcagtgttaaaaataaacaacgttccttt

SEQ ID NO: 99579 - DNA, 3515 bp, Cannabis sativa
ttaccaaacgccaccttaattaacgacaaaaatatatagacatatggacttggcccaagtcctaaatcttatgccatttcactgacactgttggatcactaaggccaatttttgtctatgcttgacgggtggatcttgcagtgaaactcactttcgcttttttactcgaagatcaatcttcatctagcaaaaagaaattgcatacacatatatcaaaatttcttttagtgtcgaaggattgcataaattaatagccctataaaaaatagaagaattataaatggaaaaaagaaacatcattatctttgagatatctaattgataaaaaaattactttttaaaagttgtatattggatcaagttttgagaagttcaaggagctcaagcatttagaaaaatatggtttgcaataatattttaattctttttcttttgtacatagaaaactttggtatagagagaaaaaaaaaagaatttgatggaaagaaagataggttagtggtgatactattattgtttgttgagatttatagacaatagttaaaaacgttacaacaaattaaacttttcaaatgagtttaacttataaaataatttttgttaaaaataacttaatgactccaaaacgtatcattataaaaatggtttaatataataataactatactatatatagaatgtgtatattaatgaatgaaaaaatgttttcagcacaaactccatttaataataataaagactacaataatgtacttaaatataagtaaatgaaggtatttgatcgtattaatcatcattttgagtattattataaaatagaaagctaaagaaaaatagaataaaatattaaataaacctaaaaaattaagataataaagattaggagaagaaactcatatagctcacgcttcgcgtattattgtctataatctttttagaatatattttatgaaaaaaaaatcaattaaatgttttttgatataatttttgttgaataattatgggaatattattgacatttgcacatggtaaagaaaaataaaaagagcatatttctgaaaattttaatatacttgaaacttcattactcattcatatgattatataacgtcattaagaatcacacatgtacattctctccattccccaatctttctctcacccacacaagcaatctcggtgtaatatagaggatgaaagaataaaacgccacatcatctaccctaatcacacatattaattgttattaataataatatatggtaactcatacattattattaattgatatttttttaagaaacggttttcagtttattttgaaagaaaataagtaggaaaaaagtaataataaataaaaaaattaaaaaaatcacaaataagataaaatagaagtttgagagaagagaacgccacatcatctaccctaaccacacataaattatcacacatattaattgttattaataataatagatgataactcatacattattattaattgatattttaaaaaaaaaaggttttcagtttatttgtaataatgtttgcattattgaaaaacataagaaggaagaaagtaataataaataaaaaaattgaaaaaaccataaattagataaaatagaagtttgagagaagagaacgccacatcatctaccctaacaacacaattatatatatagatagatagattatgtggaatttgatttgatttttttatgtgatttgtaaagtaactacaatgctacatgaataatacactataatacatttatattttgtaatgcaaatataaatgatatttctataaactaatataattactaaaataagagctcttccatttatctctattgagccaagctcgaaagaaattatcatttcactttgttatactcaaaatttggctaccaattcagtagaggacacgtgtcaaattaaggggaacatagatcgatgtgtgaaacggtaattattttttatggaataactcattaaatgcggaagtaatagagtatacttgcaactccctgactatagggtcttatgcaagataaagatatacaaactgttacctcaggtattaacgataaaccgtaatgcattggatgcataaggcgagacatcgactccgttacccttgggaaggcaaaaagcgatgcatattaactgtgaaaacacttaacgtataatatacaaactaagtatatgagtcgggcgggctcaagacctaataagcgaggcgcctatctcactataggaaggcacactcctgtgactttgaccaattaacttcagacatctttcagtgagacttatagtcttgatgagtcaaaagaagaatgtttgttgaggtactctttgtaaataagaattgcgattatcaaaatgaagcgttaaaccttcaaacgaagaagcaacaaggcatacattgtcgacctcgaaaagataggggaaaaagctctagctcgctatcaaggtcattggaaccgagttcctgtcgagacatcccagaacgttatgatttaagacgtgtttaaacacactatcattttgacccagtaaaagcggataaatcacagttgtgtgatattcaaataataaccacatttatactacgtgatatgtaatcaaaccccacgatttcaggggataaccgttgtaaaaattatagtcaactctgtaattaacgacctactatgtaattataaatagtggcaagttagattaaaaaaggggacgaaaaatcataagaaaaaggacctgaaaagctatcaaaaatctaacaagattgactcgtggactatgcaaaattttaactgcaaaaccacgtaaaaaaatcccttatgttcatgttttttcctttactggttttatttttctgtgagattatcactattaggctcaatttttggttaacgaaaatttgcgttaacagtttggttctttcattgagagccttcgtgaaaaagctcagaaaaaaccctcatattttaaagaaaaaccatctcctccatggctgaaaacccaaaaaacactaatacgccacacgaagaaactcatcaccgttttgggaaagagcccatgggctccagaaggtcttccaacccacagtctagacagaccactcgctctaggagaactcaacctgagggtggccccagcactcggaccactcgttctaggaggacccaacctgatgttggtcccagtacgcgaacaacacgttcgaggagaaatcatcgcaggaatgaccagaatcttggaataagggaagagggacccaatcgtggagatactcagcctatgggagagaacacttatgaaacggaaaagtgccgccttagacgccgcctggatgaggcacaacggcagaacgctgaactacagcgtgatgcagctgcagctagggcggtactggggactaacactcaaaatcaacctgaacctagaatgagaagaccacaaggcaggtgtaatgaccgctttagtaatttggattagtaaaggca

SEQ ID NO: 99580 - DNA, 1276 bp, Cannabis sativa
atataaccccacaaccacaactttgatttggattttgaataaaatatgcaaccatatagttcatattattgaaataaaaataggatccctttcaatttgttttttctttaatcatgcaaatatctcactttggatcagcatgtttttcaatgttgtaaattaaagttttattatcatttgacatggtgtttgtaccatataattatttcaaatgccatgaaaaacattataaaaactttgagtgatatataggaaaagaagaagaaacattctagaagggtgtagtattttacactaaaacataaaacatacattccatgattaacatttacctttaagttaattggttaaacttttataataataaatttcataaacaataataatcgtatactaactccgtatctagctaatagatctcttatcactaacttttttgatttataccctagggcctaagatcaagaaaagaaactactattgcttgatccttacgtaaagttttctcacattattaaatatttttgaacaataatttgaaaactgcgttgcattttttaattaaattatttcattttcctaccatttgccgagaaacatctaatcctaccaattatccaaaaaaaaatacatgtatgaaatagttttcattttcattataataacaatgggacagatgattctttcaaaaaataataataatgggacagatggcgcattttcccttcaactcaagtaaaatatatggttgtgtttgggttagtttctatgaaaataaatatggtgggtatcatatgtctaggacagattccaagggtacaagtccacagagaaaactggatctaactaagccccacgtatgaaaaaccaccaaccaataccacctccaatattaaaaaataaagtactttgaataaataataattaaaaaataaaagcccatctgtaagccttatccaaactctgttttaactccttcaccactccaagcaatgctatatatattcctaccaaattaacattgtttttcatcaagtgtaagaaaaataagtgtgacacaacagataaaaaaaaacacatttacttatatatatattgaagaagaagatgacagacattgctattcttgtagcagaggaattcgagagaagagtgagtcattcgagaaaggaaggaaaccaagaaattagtatggtctcatgtgtttcaatggtggctcaatctgtcgtggagaagattggacagcagaagatggagtttttgaagactttgttgg

SEQ ID NO: 99581 - DNA, 1707 bp, Cannabis sativa
aaataaaaaattaataataataatataattatataaaaatatatatttagtgattcaagttaaaaaaaaaaattaatttaattttctttagcataaaattaaaaatattttaatttttttaatttttattatatatataacaaactatatatacataaatgtatataagagcttaaaattattattttttcttacaattccagcttcaataatagcaaaacgggtcacagtgggtcgacacgaacacgacacgattttttacgggtcgggttacagttgagataattagacacgagtcaaaaaataggttgaaacacttgacacgaaatataaaagcgggtcacataaaatatgacacgaacacgatgacacgttttgacaccctaatcaaaattccactagcactttccatgcgttatatctaaatttttcttctattagattttcttattttgacaataatcaacaaacaaacaactaaaagagctatagaaacaaatacatacaacaagaaagcataactattctaactcatcacaaagctttgaaaccaattataactcaatccactccactactaattataacgtaaaactatatccgtacctcattatgataagaaagaaaaagaaaatcagtagtgacataatctaatcagctaagaaaagctcaaaaaatagaaagtaaaagttttaagattagtacccgctccacccattgacgagaaatatcagtgaattcgaaagctggatcttgaaggagctctgatttcaaaacggagtagacattcaagaacttggcctttagatccgccatggaagcgagtgatagagctcaaaatattacagagagagataagtaaaccgagtgtgcttatatgagagggaacgaagtgaggtagtttcagatttaaactcgattttcattcgtaaatgggtccactttccgcgttaattacaaacattaccattatagttaacacttaaccacgaagaaaagtttggcattttcatctggatcccatctgtgaagattattctattatttattcgaatgtatatatatgcagagttttgtgtttatcaaaagaatacatacacataagttgttctaatattatgggttagttattgtccttcctaatttttttgatgccatgttttccaattatttgcgttattttcgtaaatttgctcaactgtacaagtaattatgcaaaatggatattatcggtgaaaaggtgaggtgtaatctaaatcttggaacagaaaactgtagtcttctcagagatgggcagtcacatttaagattagatgcaagaaatagacgatcaggatttaactggtgacaggtgtaatccacttaatgggagattttcatatttcgattttgttacacaaagattctctttttattgtttttttttttcttttgaataaagagtttatatattacaaggactcgaatccaatacctccaacacacacgtattttcttatggtcccttgaggctacctcaagtgctagctcaagtgtttctttttttattgtttgattgattcttatctcccttctattgtcattttgtgacacccatgcaacttcaaacttttcacacgagtgacagaatccccctccaaaataaaagttaaaaactaggggtgggtatcatccaatcaaattcaattgaaccgaaccgatccaatc

SEQ ID NO: 99582 - DNA, 1784 bp, Cannabis sativa
actacctccaactatttagacaccaacaatatctaatatgaataggaaatatggtatatcctaagaatgcatcaaagatttgacaattattaaatacatagatggtttaaagagccatgtggtcaccaactactttctccacaaatgataataataatgtgaataataaaagattatgtctcaaatcaaaacaacaataatagaagattatttctcctccctttgaattaggcctctttatcgtccaagttcatttaggtttctagagcttctctattttgaatcagtcctctttatcgtctaacttcatttcatagtttttttcatgttgagaatttctgttaaataataaacaccataatttggcagcagtgagactagatatataggaagatggtatagaatgataatattcctatttaagtgtttcatctatgtacttgctttttttttttttactaagaaacaattattattattataataattattattaaattgtaattaagaaattgtactttttaaaagagtgatttgaaaataaatatttcaattttgtatgtacaaaattattttaaaaaatgtaattagttgtggtattatttaatatttttgagttttaaaaattgaatttgtaatttggtgagaatcttagaataaagtgtatatatattttaaaaaaattggattcaatgatttaaaaatattgaaaatataaattgttttttagcttaaaacttaaatatttatttgaattaatatttttaatataacaatgaatttaatttttgaaaacattctatcaataaaatattttatgtggatcaccacatatttaaattttcaaaaatataaaattattttgataattcatacaagtcaaatctcataccaatgaagttattactgatatcaataaatatattattgaccaatagtatttggaatatattattagagatattattaatttttgtaataagtttgttggtatttcttttgtttatattccttagctaatagtgtagtacattatttaatcaatggtattttgtggcacttttttttccttctgagaatttcctactaagtttactttagaggttttaaagacactatttttcataataaataaataagagtatatttaaagtaattgtgtaattattagaataataattggaatatattttaaaatactatattttagtaattaatattgaaaaataaatttttttttagtacgttcaattttgatgaaagagcctaattaaaaccatttaattattttcaattagacggtaattatacacataactctaaggtgatgtttggtttggtgggatgtaatagtgatggtaatggtaatggtaatagtaatgtaatggaataagaatagtaacgagaattgattaagatatttagtttgttattggaatgaatattgaaataaatgataaaatgacaaaattatctcctactttaatttttatatttatatataaaaaaaaaagcattagtgtcattttagctttacaaaagtaatcctcattactacatagcttttctaatgtaatgggaatttccttgtttaatgtaattatgattacaatgtaatcccattagatcacttttaaaaacaaaacaaacattgtaatggataatttgattctattaccattcctaccagaacaaactaaacattacccatccaatgactttccatgcactaaataattttttttttttcccaatttaacaatttttttttgggtaaatactat

SEQ ID NO: 99583 - DNA, 1388 bp, Cannabis sativa
cataataacaaatcataaatcatattctaatacataaagaatttaaatttatgctgataattaaacacatacaaaactatctaatttcattaccttaaatccagttgcttaatatttgttatctcgttataataagacatgagtcaaggccctaatattaaaattcatacttttacagtatagcagaaagaataccatttttgacagaaaactacaggaattcaatgaaagttgtcttcataaatattttagcaaatttaatctttctaatgatataaagatcattagaaatggatcattaaaaattcaattatttaatgtatttagaaaattaaattatatttataattatacaaaacatatgtatatcattatataacaaacatattaattaataaataaaaaattaaatataaatttcaatgcactgttttttgaaaaattaaaaataaatattattattaagatatgaaatgggtaatgcgtatatatattaaaaaaatataaatttaataaaatacatagaatacaaaaaatttcaaaagttaataaaattacataaacatgtatgtgtttcttttttcaagataaaacataaaacgctcctcacaaaattgtacttaagtagaataaaaaaaaaaataagaagcaattatatatagttcaaaaaataataatattaaaaaaccttatagacttttttggatcatgaattgatgattctcactttaattaccatcatttaattaaattttggtatactctataaaccatcctaccatggtagaactattaaattatatttttccattaaaatcctaccacgaaaataaaagaagaataaaaaaaactcaatttgataagccaaattacagctaaagatagaattttctaaaagtaaaattagaaccacaaaaagaaaaagtatcataccttcatatgaggagggaggtcattttgcacaagctaaaagcaactaatgggtcataataaaagaaaaaaaattatttctcacctttttatatacatatattacactaacattaatataactttcattgtatcgtatgaccattttcattaactttcattgtatgtatgaccttctcattctctttatgcaattattatatcattagattactattgcattgcattgtatttatttgataagtagaatttaatttaataaatatgaattaataaagaaggtgaatgaagaaataaataataaaaataatgattaaaactaaataaattagaaaacttgaaaaaatagaaaattaagaatgaaactcatatataattccatggcatcaccattgttaacaaaagaattatatatatattttcaaaaaaaaaaaaattatatatatactaggagacgt

SEQ ID NO: 99584 - DNA, 3388 bp, Cannabis sativa
tacatagtacataccactatatactccattttaatgttttcactttcattcattcatacaacaattcattgctctctctttacagaaagtatgaacaagtcactcatttaattttgtcgctaattcatttacttgtgcatgttattaaggcatgaaaatgcacttttacaagtagaaatatctaaaaaaaattaaattttaattatatatttttatgaattaatagaaaatatatggtttcaatttaatttgtttgatattgtagaagaggtaattttgcaaagagaataaagaaatgatataaaggaagtccaaatccattggaagatgatttatgtattatgtagtctctcacttaagggccaactaccgtgaggggattgcagaaacgttggaggcagcttctccaattctcatcactaattaatgagaattgaggccatctccaagtaacaatttttatatttgacaaaaaaaataagtaaaaaatgtgttatatttgacataaaaaataatttagtgatatatttacatcaattttcaactttgtgccctcatatacaattgcaaaatttaaaattttaaataaaaatgtacataaaaaacgtttatcattaattttattatctaaaataatatatttatctatatactccataatttaatgctataattaaaaaaactaatagaataataaacatagcatactagtaacccataaacttttcttggtgacgtggacatcaatgtttgacacgtgacaagaaggatgatgtcacagagttgagtagacccgaaacatagcaatcgacctaggaggggaccctagtcctacgcccaggttgactccgggagctatgggatgaaagttcgaactttaataacttgaatctaactcactatctttcagtattatgtaccatggagacatggagcaatcaaatccaagctctaggagttgagattgcatgaaacggcaacccagaagcgaacctggacacctagggaagaccaaccaattgaatgactttgattctccattagcagaccaagcattgtagatggtatcaaagcataagccatcatagaaggtgacatcaagaacaacttgatcttcaagagtagtcacttgctctttcaagaccttgacttgatctctaagattagtagtaactgaggtttgttcatcgagtgcaagacgagaagacttttcaacatccaaagtcttcttctgagcgatttctaggctcttcttcaagctactctctcgcgctttggcaccactagccacttcttgaagattagtcaactcactctccagagaatcaatcttcccattcaaagcagtcatgtggtattctgcaatagtagcacaatcttttacagcctcgagcttctcagcaagctcaaccattttcttctgtttgttatccacggtgtaagcataaccaacacaagcctaaagacaagaacataatgtcaggtgatgttaaacaaaagacagttaagctagaaggagacaagaacaaaacatttaccccgaaaatgtcagtgaaacatctttgagcaataacatgcagaggtttggtactgaccaaattctgcaatgggatattcttagccttagaaccaatcaaggcatcaccatgtgcaagaagccaagagtcctgcgcatgcagctgctccgttaaatctgaacccgagttcggaactatagtctcagcctcatctaaagagatatcgattagagatctctcatcaacaccagcagtactaaacatctctttgctagagtcttggggagggggagcgacatcaacatgtttactcctctttctaactttcttctttgaagcaacagaagtagcatgaataccttgaacaacttccctgatcgaacgatcagattccttcggtattagaatttttcgtcttgagtttgaacaagatgccatagcagtcaggaagctcatattgtatgcaaagaaaaaagacaagtggttagtacaatagaagaaaagcaaaacaacaaagttcaacattcacaacatggagcatcaactgcctactgatttcccatccttctccaaaatagttcgagtggaggtaaattctccatcttcctggtctaagaacacagatattctccctaaatactctgtgtcattgcaaactatggttgaatcttctgacattatttgagacaagatgaaagttgcactttgagcatctgcatcatcctgctcgagtggcattgtccaagattcattagtaaagcaagtgtcagcatacactcgctagtaggacattatcattccaaccttttgaagattctcagtattgaataaagttcttctgtctctctcccatgcatcaatcttattcggcatggcatcgactctcctcttcatgtcaatcaaaggagcaagtcttttaaaagggccagtcttttagaaagttatgtttcttaatggaagaacgagattatagaagtattcttggtggtaaaggtcgcagttagttttggtaatattttctatgtgtgggttgaattgatggaagtgatagaagccttcttctttttgagttggacttcttttcaagtcacaaaagaagtttattttgtggggaattgggataggtaaatttctcagagaataaaatatgaagaaggtggcaagtatcctatagccatttggatttatttggtagggacaaactctaaaaaaatctgctactgatatgaatcatggacgcaagggcaagtaagcactcgcattaatgtggaatctcgaccaagcactgtaccaagtgttctgggagccattgggactgccatattgtggcttctggacaacaattttaggaaagcaataatcatcctgaattagttgggcttgatgttcagtaagagtgctaagcacaagaggtcttaacctaaaagctcgatctcttggatcatcactttcaatagcagctttaagaagctcagttgctattactttcccaccacacgccatgtctaagctctcagacttgggcatagttagcttagttctaatgaactaagtcacatggggatcatactcatcaggcaatcttctacttctcttcatcctagccatgacagtttaacaatacaagttgcttacaattcaagaaaaatcttatttggttgtgaaaaaatttaagcgatttcaaaggaggaaattttcaattcattaggatagtattttggaatttagaggtcttagaaaaaataattcaagggttcttaggagtttgagaatctttggagtaagatcaacagaggagaaaagaaaaaaaaacaacgctaaaaatagaagaaggaaaaatctaccttgggatgaagaacacttgaagactt

SEQ ID NO: 99585 - DNA, 1511 bp, Cannabis sativa
tggtaaaataaattccaacagcggaagcctactcacgcttgccttaacttcccagatgcgaaaggcgaggcatctctcccgaacctggaagggtctaacggggaagcttgcttgttttatacccggataggcagtagaaagaccaaaaacagatattgaccctcatgaagcgttgtggacgtcaacctttcacacacgcaaagtcaccaaagtgatggttatgctttctctaataaagatcagatcttgtctcttacatctgagcatggcagtgcttataccaccaccaccttattactagacggccattacgggttgttgtttataaaggagcaagctttgagagacatgtggcccccacttttaaaggttaatcctttgtgtgacattattgaagttccttggtattggcctcagccccctcaagcttcacagtggttgcatcaagttcttcttgaagtttcagtcacatctcgggcttgtccttagcctcctgggatgtctcaagttcagccttgtgggccctcttcacctcctcgacctctttgtttaaatgggagatctccgactgagcctcattctactctttggcaatggcctcgcgttggccaatggttctctgaagctcgccctccaatggaaggtttgctgtgaaaaatgaaactgcataagtatttctgagggttcatgaaataaaaggcaaaacaaaaaggagaaggaaatcgagagaccgaaagcgagactcctttcaagcatctcggttagactgccattattgaccaagtcccagtcgctgggtagaaaggattggagatgacgccaacaggccgcgacatactgcgcagaatgtttcgaaccaacgctcctggcctcgatgggcaaagcctcaggcgcctcactagaagaagttgtggcttggctagtttttggagcaggctccttgttgagtgtgagggcaggaggatggatctagacctgatgcttagaagcctcgagatctatggtctgtgaggcatgctttttgttagcagtaatcttcctgggccttttaaggggctccacgttaacgtccaaagaggttttcgaggcaactatcctcttcttcccctttttgcttgaagtgtggagaagatcctctagatccatatctgcgagataaatgtgttaatatctattaaataagcagaaaaggagaaaatgggaaatgaatccccacttaaggaatttaccataatcataagatggcaaagagggaggagtactatattattcactaaactccctagatcatgtgatcataaatatgtcataggggtttagtggatctaaggtccaatctggatggctcgctctatccaacatggtcccatattgctcggcaatcccataataagaactactaagttgtacgtggaaaggtgggtaccaactatcgaacctatgggtgatgcaatctaggaggaaggggttctaaatataaaaattatatcaactatcgttgaaggtcacta

SEQ ID NO: 99586 - DNA, 1549 bp, Cannabis sativa
tgcgtgtgtttagttatgcctcttttccctatctcagagattataatcaacacaagcttgatttcaggtccacaaaatatgcctttcttggatatagtcctaaccacaaagggtacaagtgcttgcaccctttaagacatatttacattgcctatagtgttacttttaatgaaagtgaatttcccttcacttcaactttcaaagttgaacatttcaaaaatcctaaaataaacacttgctcaagttaaattcaatacagccaatggtcttctcctttttctcattttgtgcagaaaaataattgcttataaagcactgaagttgataatggccactcctcaacaacccatgagttatctcctgcattatccacctcaagttcaacacctttgactagtcaagataaaactcaaaattcatctaatatccctcatttgtcacagatttcagatcactcatactcagctatacctcttgaaatcaacctgcccatctcaacctcacatatttctcaactcactcaaacctctccaataccttatcctacaaagaacattgaccatcccatgataacccgatccaaggtagggatcttcaaggctaaactttttctagctgccacatctcaaaaatcagttatcactctttctgaagacatagtacatacctcagttgatcaagctttgaatgatccaaagtggaaatcatccatggaccatgaatacattgctctcaagaaaaataaaacctagtatcttgttcctagataaccacatgtgcatgttgttcacaataaatgggtgtttcgagaaaaatacaactcagatagaacaataaatcattacaaggcgtgccttgtagccaagggattcaaacaacaaccaggaattgacttttttgagacgttcaaccctgtagttaagccatctacaattcgtgtaattctctccttggttgtaacacatggttgggagatctagcaaatagatattaataatgcatttttaaatggcacccttaaagaggaagtttttatggaacaaccacctgggtttgtcgattctcaatatcctatggctgtatgcaaactcaataaaaaaatttatggcttgaaacaagcccctcgatcatggtttgataaactcaaggggtctcttctcgatcttagatttaaaaactcaattgctgatacatctttgttcttctacaacaatggcaatgcttttatgtttgtcttagtttatgtggatgacattcttcttacaggcaataatgccaaacaagtcattgtcattatttctaaacttcagcagctctttgccttaaaatccctcaaattagtcacatacttccttggttttgagataactcaagggcatcatggcttacacttttctcaaaccaaatacaccattaatctcttgagaaagaccaacatgctcaatgttaaaccatgtcccacacctatgagtcaaagaaacaaattaagccttcaagatagtgttgcttttgaacatcaaacatttgaatgcactaaccctaggggttg

SEQ ID NO: 99587 - DNA, 1548 bp, Cannabis sativa
gcacaaattaagaacaagtatgaagataacggatcgccttgacgaattcccctagttggcacaattggaccaatatgcctaccactatgagtgaccgtatactccacagacgagatacaagacaatacaagaaagatccacttagcatcaaaccccattctctgcagaacaacttcaagaaatttccactcgactctgtcatatgccttgctaaaataaagtttcaaggccatatatccctccttgcccaatcttttctgtttaagataatgcatgacttcatacgagatcatgatattattggtcataaacctcccagggacaaaagcactttgtgtttcggatatcaattgtggtaagacagctttcagacggttagccatgaccttcgaaacaaccttataaaggacattgcataagaagatcggtcttaaatctcccacgttgctaggacttttcttcttaggaactagaacaatgaaggttctgttaagccagtgaggaagagaaccatcaacaaaaaattgacgaaccaaagaaacgatatcttccttaacaatatgcaaacatttttgaaagaacctcggagtcatgccatccggaccgggagacttttcgggctgcatttgaaagagcgcattcttcacttcctcctccgtgacagctgacagtaagtcaatattttgttgaatagataccgaagggccaatattatcaataacagtggcgaagttcacaggtgaagcacaatataattcatcaaaatactctttaataacctcactcaaacctatatcccagtcgcaccaaaccccagtagcattttgaagtttagtaatggagttgtttctccttcgggtggttgctgcagcatgaaagtagcgattgttttgatcaccatcacaaagccagagttgttcgatctttgactccaaaagagctctctttgagcataaacttcaaacaactgtttttcagcatcttgaaaccagctatggaaacatcatctcgacctctcttgaaatgagcagcctttttttccaaaagttaatcctttttttaaagttcccagtgaaatcttttccccactcctcaaggttcttcgcacaaaaggacactttacccataacatccatgtgattactagctgcccaactgtcttcaacaatttggagacataaaggttctcttagccaagagttttcaaacctgaattgctttttgacaaggacgaaattgttaacagtaggttcaagaagaatagggcagtgatcagaactagtaagctcaaggttagtaagtttagccgagtgaaaaacacttaaccaactttgagatacaagggctcgatcaaggcgaacttcaatccaatttaacgatgtcctccctttctcccaagtataaggataacctgagagattgaaatcacataatttactatccaccaaagcttaatgaaatccttccaagagccagtcaggatgaggcacacctcctttcttatcttcttaagataacacattgttgagatctccaataacacaccaa

SEQ ID NO: 99588 - DNA, 2913 bp, Cannabis sativa
ttggatgcgggtcggcacagttgtgccataaggattgggggcgtaacggcgggttcgtggggcgggtggaggccgaggcagaggcggctgcggtggctgagaaagtggatgggttgaagacctctaaggagccccgggagtctcttggtaatggtggaacattgattggtttggagttggatgatgaaatattttctgatgagttttccatctctacacaagcactatggccaatcataattaagcattttaaatctatatatatgtatatatattatataacactacaaaagaagataaatatcagattttatatgaaactttacaccaatatatatgtctactactttttggtgcatgagagattcaatgatgtggtccatgcatccataaaaattggaatagagcataaatttatgtgtatagatatatattgataaatagaaagaaatcttattattattatggagaggcttaaattaaaattgaacacctaaataaataatgctaaaacatgtgtacactttcgaattgacccctctactaattaattaattgatttaggatatttgtactagtatacttattactattatactactttatataaaattccaaaatattatcttactaaaatattcttctataattaatatattgataatattttttttaaggtgggacagattttgaaatgggatgttttggagagtaaggatgggtgttgagtaagaaaagctatctttcataacatgaatagtcactttacattgtttttggtttattttgtgttttttggtgttatacataatatagttaatagttagctacaagtccctaaatgcatttttttgggtaattttgaaaacgattttcaagagacatgatgactagttgtgaagagagaggggtatttttgacaattcatgtatgattgttgggttgatagatacgtgaaactttttcaccacctcagaactctagaagatattattgtccatcttggatcaattaagagagacaacttattaagtgtgaaagtgataataaagaaaaaaaaaacaaccaacaaaaattatcaaaacaatagttttttttttgtgtactaaaaacttagacaaggtccattttcttcgcttaatagtacacattattacacactgcaacaactttatgttcgtacgaggatttttctttgtttttgggaacttttgatgagtattttagtgcaaatatatatatgcctggaaattaaactgtttgaaaaaaaaaaaggactgtacgcatgagaaatatttgaccataaaactaataaataaaaaaataaaaaaggacaaaattatgagttttataaatatgagaaattaaataagtaatggctgattaagaggaaaaaagagataaaacaaaggcgagctaatataaggattaagtttatatccagtattaattaattatggaaaaatcccagatatatataatatataaaataaataagtagctaaaattgaaaacataataaaacgtacctctagtgaactaggtagatagtttttttttcttccagagattgaaactactcgacaaattaacaaaagacgaattaattaattcagtgatgagagcatgcagtagatatatatacatatattatatatatatatatatatatcagtgtggatcaagtatagtactcgatcagagatatatatatataattattgtgtggatgatgatggagaaaaataataaagagaagtgaggagaagatatcaaataatgattgttcaaaaggctacttttctttttaattaattaaaattttactttattttttttattttttcttctgaaaaatattaaaacaataataataataataataataataatggcgaaaaagggtttggcttcccatccctgtacaccaaagacttcacatgcctcttgcacttatattcccaacctcaataattatatacataacacaaaaaaacaaatgaaaacttattggaattttaatattcatgactatatatttacaaataaattaatgattgtatttattaccttcgtactgtagtgtaatgatgttatatatatactgtttattcccacagtagtattttacagtctggaaattggttggcatcaacaaaagagaattatgttgattttttatgccaaaaatggatatggaatttacaaaattatgtcctacttatatctgatcatcacattcaccaccacgtttttggagattgtcctctgcttttgctctataattccttagtatatgtctcccctgtctcactacagatcaaccaccactatatatctatatatatatatatgtatatatatctagatgagatcaagagacatagaagaatggaatgaatgaaaatcaatatgggaaaaaagaagaagctaatatggaagcaagcaacatattacatcttgaaacttgtaatctcaaattaaagcattatggtcactttggacttatatcatcactccacgtaccctgtttttttttttttttttttggctatatagatgatataatattcaccacaaattattgttattgttattgttattatttgtagtacatcatgaaaattatgatagtgtattttggattatggttgtaatctatgatgatgatcaaaagggttttcacatcattgtctaattaattaaaaagggaggattactttacaagtatgtgatctatattaggtcaagccctaccatggttagggttagaaaactagctttttctggtccatggtatactcattagcaagattaggacatttaccaaagttatcacaaaagtttttagtgtgaaagcaatgagaactattatttatccctaataaatatatattaattaaataccattgt

SEQ ID NO: 99589 - DNA, 928 bp, Cannabis sativa
tgtctggctcaaatccctcttcttccatttgaaaatatagcgccagagcatcttcgtactgtcccaattcagtatatccggagataagcgaattccacacaaaagcggatgtgttcttcctcttacgcatttcatcgaacacctggtgggcatcttcgatgcaaccacaagacgcatacagacgaagtaacttcgacgataggccttcgtttcttttcaaaatattacgcggaataaggcggtgaattcggacaccatggtcgatagctcgtaattcgtaacaagtttccaaaagcgaagcaaagatttcaagctcaatatccaagcggtggttcttcgctgatgcttcgagttctttgacgacggcgtcaagcacgtcaagctttgttctggggtaagagttttgggtggtaaggagtggagttggagatgattttgggaaagagagggaagttttggtgttgttgttttgatgcttttgtttctggtttttcttgtatttgggtactgagaagttgattgtgagttttggatggaagctcaaaggcagaggtggcaaaattgtgagcatgttttgggttttggaatgaataggaaatacataataatatgacagcagatttaggaaatgcatatggaagctcaaagctccttcagagacaacatgctcaaataactgtctctttttttatttatttatttatttatttatttatttaagcgtttacatatataatttgagactcgaacccaggacctccaacacacacccaccccttatggccattttagctagcctcaagtggttagctcaaataactgtcatatcatggaaattttgaagaatcaacgtgtatgaaatatatatatggttaaaacagaataacaggatctctatgaacgtgtatattagagcatgcaaataagg

SEQ ID NO: 99590 - DNA, 2463 bp, Cannabis sativa
  modified_base (38)..(51): a, c, t, g, unknown or other
  modified_base (1545)..(1546): a, c, t, g, unknown or other
tgttttgagttataatgctttgtgttttactggtgttnnnnnnnnnnnnnntatttttgaaaaaaattccgtgtgacagtatttttgtaaaaattaattcaaattccttgtaagtttcccttattgaatccgtgtataaagacgaggcccattggagctgaagagaggcgctatcatagagaacaaagccccacctacgttatgagcaacagaattaaaataaaagctttacaaaaatgacactaatctaatcgggataagtaagaactatttttttttattattgtatattaattaaatataactgtaaaataattttaatgaaaaatactttttttttttataatcaatgtaccaaatatatcttcacataacttatcaaaaatagagttcctaacataaatatgacctataaaattaagtatatattaaagagtaataaaagaaaattaaaaattaaaataagtaatgaaaagtaggtatatagtataatttcctcaatctaagctgtctagctatgtgatgaactctcaaaattattgggctttgcatctcatttgcatatgatgacaaattgggatgagaagtttactcaactccaaagattattggtattgagaaaattatattatatacccattttattttatttgttttaatttttatctccatttttatattcttaaaaatatacctacttttatagatgatatccacattagatcccttaagttaatataaattatatgttagatttaagtagactgactgagtttattggacaactcattcataaaaataggtatattttaataaaatatgatatgagagtatttttgattaatgattaaaaaaaaaaaaaaaaatatttctcaacttatctcattcctatttgattttaagtgtttcaacaaagattttcagttgggttttgatttcatgcaattgggcttgaaatctctcatcttcttcttcttgtcattttatatctacttcgtttttaaaattactgcattggcttgtaccatttaattaaccaaatatcattaaaagaaattaataaaaaatgtatttattatttttacaagaaacaatattatatctattgttgattgtttacgtagaaaattattgttaattttttcttaaacatatatatagtaatattttttgggattatttcgtaaatatgtaatgaaaaaatccttaaaaatgtaagaaatgtttttttaaggattttgaatttttcaattttcttttataaatatatttccaatttcatcaattaagaaaaatataaaaatttcttccattttattaccccaatatctagttatttatgattgcaaaaaaaaatatctaaagttatttatcataaatttatttgttcgttaataaaaaaaagttgatttttattttgttaaaaagtgaaaaaaaaaaaaaaaaaaccatgagcctgtttggctgtatttttcagttttcagtttttagaattgtgttttcaaaagtgagaataaaaaaacagttttttgtcattttaaaaanntaatggtgtttggcacaaaatttttaaaattatttttacattttttcttactaaaaatattaatattttaagttcgggtttgattctaagtttaggaaccgagtatgtgaacaaaaatataaaatataatatgttagataaaaaaaattgtttttaaaaattgaaaacaacatttgatgttttctgttttctagttttttaaaactcaaattttaaaataaaaacttttgccaaatgaaccttattagtttttaaaaactgttttcaattttgaaaaatagaaaacaagttttaagttatgaagtcaaacagcttccatattttttctatgtatacaaaaaaaaaagtacagattaagaatagttaaaagagcatttgcctactaaagttgtagctttaagtttgcgaaaaacttgcctcatttcttatctacacaatggtatggttgtatgatttgcattcttattctttatgctacaaacaatgcttgggaatcaattgaaaaaaaaaattgttacttggtaaggcaattaaaacagtttggaaatcctctctgtttctttttaaatcaatacttggtgggaattttcttatcactttgtctactatattttcaaatactaagtttcaacattttatttgcaccatgttatataataattgagagattcatggctagaaacaaagtcttctgctgcaatggctcatcagcattgtttgcaaattacaaatgttaaaacaatgtttattactacttccttcaaaaaaaaaaaatgaataaaaataagccttttcattaaaatgaaatttctgagaaaaaataagagctaatttttttaattattaatgactacacatcttaattgtcttattgtcaagattttattgttgatgtttatgaagttttattctttttt

SEQ ID NO: 99591 - DNA, 3537 bp, Cannabis sativa
atggtttgatatttttaaaattaatattatagttaaatttgtttagtaaccattcatgggtaatgcccattaagaagtgttccttatatatacatgaatattaatataaaaaattataagaattttataactcctttagtaaagtcataaaaagtctactacgtgaccttttgtttggtagattggattttattttattgcgttgtattaccattactataaaataggcttttcccaacggttaataaaagagttaattataaaaaccgttagaaaaagtcagcaaaaatttttcccaacagtttagacctgaagcaaataaaccgttgggaaaaactaataccaacggtgaaaaattgtggccaatacttaatgaaatatataaaaaaaaaaattaaataccaacagtttgtaactattgggaatactaatataattgttgggaatacttaatattcccaacggtgatcataactattagtattcccaacagttataaactgttgggaatacttagtattcccaacaattataaacggttggaaaaaatactttttaacatttcatttttatgtgattttactttatttaaataaataaataataaaataattaattggagtgaaattaaatattgtatcagattttactttattttaaataattaaataataaaattattaattgtggtgaaattaaatattgtatcagattttattttatttgaaataaataaataataaatattggtatattgtattttattttattgtattgtattataggttgggtatggggtccacgactatggtcaggtataggttagggccaaggttaggattggggtctaggtcctgtttagggtcgggttgggatctgagacaagttctgaggtgtgagtcgggtaggggttcggggcgagtttcgagttgtgggaccatgggtcgagattgggttccagggtttttggttccgatacgggtaggggcaagagtccagatcagggccaggaagatctaggtcgaggctggggttcgagtcggtgtccgaggccagtgtgggggcaaaggctcgagtttaggattaggatcaagagtattgaatgtcgaggttagtatcaaatacgatatataattaaaaatatctatttctatttttaaaaaaaaatacaatacaaattacgcttcaaacacagtaatatttaactaacttattaatacaactcaatagaaaaatactattgcattttaataatactatacaatacaatatgtaatagaacattgtgtaacaaatacacccttaaattttaaaataatttgaatcttactagttattgtttcttgttgtagggattgtcatcatatgcaacaaagagaaattgtatgagtgtactaatggaaaatacaaaattcgtacaagcatcttcaaactccaaccaaaatcaaacatctcctctcacttgtctaaggcgtgagttaagaagccttcctcccttaggcttataccgttccatttacagagttcccaagcggctaagcaatgtcaatgaaaaggcctacacaccacaagtagtttccattggcccaattcaccatggcaagaaaagtttgaaaccaatggaagttcaaaagaaaagatacttacgtaattatcttgaacacacacaccaagacatgaactattacgtaaatatcataaagctcaatgaagaaaaattgcgcaattgttatgccgatcctatcgaattttcgagtgatgaatttgtaaagatcgttctagttgacgccaccttcatcatcgaggcattgctgataagggctggtttcatagacataaacaacaacgtcgaggattgcatctttcgacaaccatggatgttgcaagacatcaaacccgatttgttgttacttgagaatcaattgcctttttttatccttgaggaacttttcttcccagtaagaatgtttttctctcagcagaatatttcaatcactaagctagcccataatttcttcaataatgttgttttacaccttgaagaacaatggaatgattctgatcagagattctcacatgtggaacattttgttgatctattcacaaaactatccacctacccagtgaagccaaattgttatgatcataaaatgagaatggaaactttatacctcccaagtgcaacaaatctacgtcaagttggagttaagttcaaggtgagaacaaccaataatttgcttgacatccaattctgctatgataaaggaattttagaaattcttaaactcaatataaatgacagcacagaaatcgtaatcagaaacttggttgctttcgaacaatgccattccttccataacaactattacataaccaattatattgtgtttttggattaccttattaatacccctgaggatgtggaattgcttgttaaatatgggattattgctaattatttaggtgataacaaccaagtggccactatgataaacaagctcggtaaaggggtttcatatagtgaggatggtttttattttgctgaaatatttgaacaactttgtgactactctaaaatcccttcacacggaaggaaggctaatttgaaacaaaactactttcactcaccttgggcaggtctttctgtcattgcagctgtttttctcatcattcttaccttcatacaaacagtttgttctgttatttccgttgttaaaaactccaagtctcactagtttctatggtatggtagtttatttattatgtgtgagttgggcttctttttgaattgaaggatattaatatcgaattgtgtgactataagataatgtttttctataactctcattattaatgagttcaaacaatgttgtatttgtatttggagattcattatataaaattagctattgaatataatgtgttgatagacgaagatcaaatcataatgattgggtctttatttcttcttgcaagtataaaaaaatttctaaccaattaatattgccgaaaccactgagcttgtccacctccgcagagagagtggccatgacatgaaccgtgccttgttggcacagccgtattcactatcacgggccaagaagctcacgaccatgccggacctgctattgttctttcctatgctatctcaggcatctctgctatgctctctgttttctgctacaccgaatttgcagtcgaaattcccatcgttggaggctccttctcttatttgaggatcgagttaggggacttcatcgccttcattgccgccggtaaccttatattggaagccatcatcggcactgccgcagtgggtcggtcctggtcatcttactttgccagtttgttaacaaatgacactgattatcttcgaattcgggtcaattttttgcctaaaggatttgatctatgggacccagttgcgtttttggttattgttctcacaaatgctatagcattaagtgggacgaaaaggacctctgtcttgaattggatcgattgtatacttagtcttatggttattgtgttcattat

SEQ ID NO: 99592 - DNA, 869 bp, Cannabis sativa
  modified_base (315)..(316): a, c, t, g, unknown or other
tcaataatataataataatacatataattatatatatccaataatataatgctgcaattaattaatacatatcaatatgatcatcactaattactattactaccaatcaatcaagttagaaaaaaactcatgatctatctgaagaacttgatcataattatcatcatcatgatcataattattaatgacattattatgatcattaatttgatgattattattaatatcagaaaagcttgaacaacttcttccatctccttcttgttcttgatcatcactagtacaataagaagataaattattattattattatnnttattattattattattggttaatcggagagcttcttgtgctaagtgaagttcaccacgaagcacaagaagctctttctcgagctgtttcttctcagccagagcagcatcgagtctgtattggagagtagtacaatccacctccagactctgtgttcgccacctagcgcgcttgttttggtaccacactgccacctggcgcgctgggatgcccagctggttagccagctggtgcttgtgctctgactctagcttcttctcgtagcagaagtttctctcgaggactctcacttgttcgtcgcttaacctcttcttgttattttgactcatgttttgccctaatactataccttcttggttttctccttgttgataatccatcaaataatatatagataaagatatagatatatttaacccctttttgagtgtgtaaagtgagagagagagaaagagagagagagaagtgttcttagaaggagtttttggtttggttttgatgagaataatatgaagggaattactttagagattcaaatattggtttatataat

SEQ ID NO: 99593 - DNA, 1142 bp, Cannabis sativa
ttgttgggagggagcttgacataagaccatgtcttgttggtaagaagggcatataattctgtgttcatggcattgttccaagcttcgatttgaacagcttgattgaagttttgtggttcatagtgtgcctgcacagcacaaataaatgctttgtgagctgcggataaatttgtataagccataaatttgtgtaaggggtaaggggtagaggattgatcatgaatggcagaataacattcataatctcgaagataactgggagctttagtgactctttctgatcttcttatattagcaggagcattgtcttgataggtaggggaacatcagtaagagatgaaggtgattgaactggtgtgctgagatctgtagtggtagttggagtgggggcatctgcaatatcggggggaatggtgtcctgcaaggaatcattagaaataacagtgttgggaatgtgtgtagggaagtcatgaacatgagtgtgagatatgtgagaagatggcagaaccatatgagaaaaaggatcacaagcttcagcattgtttaatttttgaaaaggatatatttgttcatgaaacactacattacgagaaataaaaaactgatgtgtattaatgtcatataatttgtatccttttatgccttggggatagcccataaaaacacaagtgcgtgcacaaggtgcaaatttagttcggtgagcagttaaggtagaagcaaaaactaaacatccaaagttccttaagtgagagtaattaggtggaataccaaataaaatttcatagggggttttatttttcagattgggagtaggtgttcaattaataagaaacatagctgtcatgatacattcagaccaaaagtttataggcatgttggcttggaaatataaagcacgagcaacatttaaaagatgctgatgttttctctcagctatagcattttgttcaggtgtttcaacacaagtaaagtcatgcaagattccatgttgagaaaataaatctttgaagattaattcgggtgcattatcagacctgaagtttttaaaaatgcaattaaattgagttttgatatatgataaaaactgaggaatgatatgagagacatcagatttttgttgcatgagataaatccaagtgaaa

SEQ ID NO: 99594 - DNA, 1096 bp, Cannabis sativa
ttttggattgaaccaatccagaccgaaaaaccgaaagttggatttttttgagggaaaaaaccgaccaaaccgaccaatgctcagccctaccaaaaacacaatatgaaattgtgtcttaattatatgagaagcccagcctgtgtctacgttaatcactttctctcctctgtctctttttttgatcatcagcggtatcagaagccttaaacctcgttcatcggagaggaggaattcataggctgttggcttcattaccacctgccaaagcttcactcaaaggtacgctctttcatctatttttacagttgtttttttttttttttgatttctctctgcatttgtgtgatcaatgttaaagtaattgaatcaacctgtgttttgttctgaaaaattgcttagaagaagaggataattagttaatggttttgaaatatgataatccaaattgagttctaaatgtagagaaatgattgaaactttatctggtttttttaaattaggatcattttcaattaaagaaaataaaagaagtgatattaggaatgaatgaatgatttttttgattacttaatagcgattttaaatatatttgttgtattttagtatagtggccaccaggtgtttgtaataatgttcaaacgaaaacataatgatgtattggcttcacaaaccaatacattcatatatccataccacatcttacacacaagcgcacataatgactatttgagaaaaatgatgaatttaggaagctagctaggtaagccttgcttctatattgtagtgtgtattatgaattcttttatgaaaagatttcgatggttatccaaaagatatgctatatattagcacaatgttgctgttgtggaattatacattatgcatatctgctattgctaaagatataacacttgaaaaatgcatataatgttgaaatatttgatcttcgtgtactcagtagtaatattttatggtctatgatagaaggctcagggagaagggtgaaagaagaaaataacagaagaatgcgaacattctatattgtaaaatttgtgaaatcagtacttggctgtgcttatggacatagggcttcatt

SEQ ID NO: 99595 - DNA, 1437 bp, Cannabis sativa
  modified_base (1406)..(1406): a, c, t, g, unknown or other
ttttttttacaaaaaatagtatattatgtaattattattttttttcttttataaagtaattatatataatattatataaacggtttatgtttataaaaaaaaaagtaattatataaaatacataaactatgaattattatatataatatttaataatgaaattatttggaatggtaatattctaaaatctatttaaataggatgattaataattttaacttcaatcgacgaacttaattataccacattatgtatttgtttaaatatatttttttaataattatttaaatataattaataaaagtaaaatatataattataatttacaaattttgatgaacgttgttactccctgtgacacgtcctttaagcttaatatatatatatatgattaattatgggaaaacacacccccccaaaaaaaattattttcatagataattaggtctctaaagagaataaaaggccaagcaagagaatatcccaaatattgaagtggatgtggtagttggcctaatggattttgtaataatagagcagccggcctatatatacacacactttataaattagttagttatatagaagatttacccttgcagttgcactgacacttatgctgatttctttaccccatctgtgtgcacttccacaagtccctacaagatcttcttcgaacttgcacccttctaatttagacttcttctctcactcactccttttttaacttcacctccttctttatgttctcaaatttcaacccttttcataattctaacactttgttctaatatttacaatacctatttatagcgcgtgagtcacacctccagcccagaaggataagagattcttctgtttgcaacttgcagcgaatgaacatcgtgcatgagcttcacgcgctgttgctttgggagtctgattgtaggttagactattggttagtgaaagagacaaaaacacaccgttcagacagtggaaaaaggtgatgaagaataataatgtaatggggtcgacaacatttgattggtgggaccatgggacccatattctcatgcccaataaactccaaaagcaaaaagtattattgagacatttatcaaaaagaaaagtaatattgagatagcacaaccattcacttatttaacatctttattttctaatttgtttttaagaaaatgcccaaagaaaatgaggtttgattgttctttcaagtcctttttattaattgatcaaattgatagttttcattttttttatcccaaaaaaagttagttgaacgatgtgtaatagtgatatgtgtctctatatagaataattggtaatttggatgtgtgatttattagaatatttttattatggaaattattttctaattaagaaaatgattttctatttaaggaaanaaataaataattgattttctgataaatgaat

SEQ ID NO: 99596 - DNA, 1098 bp, Cannabis sativa
attaagaaagacaaaatataaaaaaaagttcaatttaaagtcttgtctttagagagaatgctttttaaactaattctgcttttgcaattgaactaggaacgaccatcttggaagctattaaagaagcagtgggagacaatgcagaagtaatctacgaaccaaagccatcaccagaaacattatcacgacaagacatctcttttgctattgttgttgttggggaagaaccatatgcagaatttaccggggacaattcaaaccttaaaattcccttcaacggaactgaagtcatatgctcagttgctgacaaaattcccacattggcaatcatcgtatccggaaggcctttagtgttagagccagagctcttggagaagacagatgcacttgttgctgcttggttgcctggcagtgaaggtggtggcattgcagatgtcatctttggtgacttcgacttcacgggaaaactaccagtgacgtggttcaaagcggttgaacatctaccaatgcacaccaaagaaaattcacatgaccctttatatccatttggctttggcctgagttatactaagcatgcatctctagactaattcagaaccaagtagacaagaatgtctattggtctcttgaatttgtggtaatagaaacagatatttgaactattcttactagcatcaaattaaaccatgctttgttgtattaaaatctaaaattcccttatttcctagtcattacttattcactgttttatgtatagcagtgtataatgtggagattgttatggctggtaggatcaaaataataaaatctggctactatgtggacaatgtatttgttagatagttctttctattatatttttcttttttttactaatattatatattatatgacatcaataggtaagtaatacgtcttatttgttatcatgtgaacagtaagccaaagacttagttgagagtcttaaatattacgtaacttggactggactccatgctagtgatgtattcggagttgacaattctgaatggttattgtggtgtatactccaaaccaaatcaatgaatggtcaaaattcatcagtcaaaaaaacttttt

SEQ ID NO: 99597 - DNA, 6013 bp, Cannabis sativa
  modified_base (43)..(58): a, c, t, g, unknown or other
ttaaatatctataaataatttttcataattaaacataattaannnnnnnnnnnnnnnntaaactaagcggtctttacatcgcacatccagtctggtgcatgcgagttgatcgcacaattgagctttggtcagatgtcccttggttactctgtttggatatcctactatgcacattcaacatggacctttctaccaatctttggaggctgttaggagtataaccttttgcccaggtatgaaattataagatacatgtcatcgagttcactgccacatcatagtgcataaaataggataacagtaattgtgtttgtgttacactaatagttttattacaaaatcattatttttctttaatattaaaatattaattattgcgagtcaaagatgaaaaaagagatcgagaatgagataggagagtactaaaaaaagttttacaaattaagttctaaaaattatgttagggagataaaatttattatatatgtacatgtattttcttttaaaatagatgtaaatataagatgagaacaaaaatttaactcttttatttatatttttatgtgcgtattaaatttaattctattttttcttttttctattttcattcctattcatgtattattttactagctagtaaatagttagttacaactactaactagttactaatttttattcctattcatatatttttattactaactagttactgattttactagctagttaccattagtaacttgtcagtaatacattactaacttaattttttaataataaattaactaattactcataaattataaaactagcaagtagttaaataattaaattattaattttgtagtattttcttatgttgtcagattttgtagtatttttttatattgtcggttgtgaggtcaatttacaaggatctgacttatttggtgttaattaatttctagctagcaagaggtatacattcactaacatttgttataggttaattatgaatgcttagaggagtttggatatcttaatattcatctgtagtggtgtaggttctgtgatttattgtactgtagtcgaatgactggaataatatgcatgtttgatgagtttgaatatcttccgtagtgaagtaggttcaacaaatacatgtactactgtcggatgtgtggaaaaaatttgtattgctaaatgttgttgtgattattttatctcattttggattgtgttgttgttattaatagttttaaattttttgggaacgttcatttatatctgttttgctgctaaaattttaatagaattatgactagttactagttagtaatttagtatactatgattagttactaatcagtaatttagagtaagattagttactagttagttataaattatataactagtaactagttgtaagaaactagttagttacaaattatataactagcaactagttttaattagttactagttagtaatatgaaagaaactcttccctctattgctaccatttttcaaaaccttagggttatgcatctcaatcaataaatacataaaaaatatccaaagagtttgagattagtggttatttcttaaaaaaatgtatcttattttaaatttaaggcacattgagattgagccactaattaacaatttagcactaaatatttactagttagttacaaattttagaactagtaactaagttgtaaattaatttttagttttgtagtattttatttttatgttttgaaattttgaattgctgaatgttattgtgactggtttatcttattttagattgtcttttgttgttattagtagttttaaatttttatggaacattcaattataccgttttgctgtcaacattttgatgaaattaggataaaattatttgatttaagtttctcttaaaatttcttattaggatttttttgttaatttttgttatgaatatatcatggatgcgtgaggagaaagagacactgcaatttcaagtaggattcgaggattttatagagtttctcctaaagaattctagaaatctctaatatatttcttgtccatccgtagattgttgtaatggatcaaaaggaaatattatgatgattaaggatcatgtgtattgtagaggtttcaatagaagttatactacatggtattgtcatgaaaaacatttaactgatgatccataaccattagggaagtgagggtagatgatattgagggtaatgattctgataatcatccaatggacttgtttgatgaaacataggaggaatttcttgatgatcctgaaaaaattcgataatttgctaagtgatacctgataaaccctcgtttgatggttgtaaaaaactaagactacaaacaatgataaagttttaaaaaatcaaagcaaaaaaagagtgagcgataaatgttttactcaatttttagctatttttaaagatattttgccatttgacagttgtttcccggagtctacatatgaagtaaagaaaacttcaaatttcataggattgaagtatgaaaagatctacgcatgtctgaatgattttactttatatcgtaagtaatatgcagacatggacaacacccaacttatagtttatcccaccataaaataaacaagggtaaggataatatgaaacttatcccccaaaaagtgtggtggcatatgcatttgattcctcgacttaatacgattatattgtagtgcagaatattctaaaaacttgatttagcacgagactaagagagtgaaggatagaaaactcagacatcttgcaaattcacaagcacaaaaaaaaactaaattacataaattcagaattcaaatttgaacgaaggcatcttcatcttggtctatctgtggatggagtaaattgttggaaattattttaccagaatcttaatttactaatcatgtatgttgattataaatattataatttaacatcctaaatatgaaaactgttgaaagataattaaacacataagagttcgagaaactttacattgattgcaacagaaacaatatgactccttccgttcaatactctaactcttgttcctttctatcgcagagtaataacaagtattgaaactcaattctcctttgaatagcgaaacactttttctacacaatcttctatgctgatttgagtacaacctttatttgtgttagcaaacactcactcactactgggctgaattcaatattaagaagagaaagggaaagagagagtggatacaaaattttcatagagcaaaggaagctattctaatttctagggttgtagtatttttttctcttttgaatactgaagaacacttaatgcaactctctctttcaatcaatgctcatcatgttctatttattggctctctctatgttagctttaggatcaaatgggatttagaaaaatataattggccgaattctacacctggggtcaaggctttgatttttgccattttgtttcattcaaatgaaacagtgctatctctttcaaaatgccatttttttcaaccctctttatttaaacattaattttatctgtttgacaattattaataattatcaaacaaaatttatgtttaaatatttattaataagatccttaaagtatcttaattaacaaacaaaaccctaatctccatatactcaaatatgccaaacttcagtaaaaattctcaaataaggcataatcttatttttgaattacaattaacttaataaatcaatttaactaagtctacaaggtagtattatcccagatagtgtggggactatgggtctatgtaaccaagctcctaataagctaatccaaaatttacttagtaaatttctcaacttattaattcttcttaactccactatagatttggaattacactcttgattacatagaatgctctatataccaaatacagatacactatgaattatctgttgttataatctaaacaatcaatgatcctctatagacagtttacatcttcaaaagacaaatttattgttttacccttcgatgtattttatccttaaaacacttagctacttataattgatattttagtaaaactaatgtaattagcgaaatatgagctcttccatttatgtcgttaggccaagctctaaggaaaccgtcgcttcacttctaaatagttatagaagctatagattctatttgtatgattaacactcccacacaattgcactaccgaattccaaggatgtaagtatgggctagagctacaggtaagcttgtaatgaataagttaaagaactcatatagtacaattaatctagaacttaattatcttaggattgagatcaattgacctaagatcagctaagtgacatcaacttagaaaatataatattgtaagtttatgatatcttttccactcccaatatcggtccagaccgatgctaactaatacatctatttgccaatgccctagaaaggactgttatcctattttttacattatgacgtgacatttagctggatgacacatgtcttagactttctaacctgtgtggatggttacgcgcctagcagcccccaaggattgatacaaaggtccatattatccatgcatagcaggatgttcagacagagtcatcaagggacatccgaccaagctcgatcgtgtgattaactcgcatacaccaggcagggaatgtgagttgacaattttagagatggacatccttacttccaagcttgcatgtcgcgaagataattcctatatttgtgggataaattcaaagagtaaaggcaataagtctagatttcccaatatctacattgtaattatagaaataaactagttttctattttatttattatagattatggtaaatcattcttcatgtaatgagcccctataaatagtgatttaatctcactatttgaggggacaaaattgattcagaaagaacactcgagagagaaatagcgatctaagagagaattactcatagatctattgtaagagctttagagagagaatactttgttctttgtctcataagtcaatacaacctaaaagggagtgggctattaccgccatcacgggacttaacctctagaaattctgctgttctctttatttattatttttactttttattatttattataactaatcactttatttttactcaatgccgttggctacaagtgaagtcaacatttggtgctttcattgagagtagaaacacaagctttttgtcttaaagtcttgacaggatacaagatggttgtaacttatgggggaattcaaactaatctagtcgacccgatggtgacagatccaagcgtgtagactcttggaaacgcaaggatcgaccagggacaacccctaaataagttaatacataaccactgacggtgggctttggagtgagttcccctctggctggattcacttcaagcatgctagaaactgggaataccagtatggaagatgtatataggaaaagaggatcctttatctcacttgaaatactttgagatgcaaatagacttacagggggtaagagataatgtatgatgcaaaattttcccaaccacattagcaaaggtcacccagcaatggtatttcaagccacctctaagaaagttcagttcatggatttctttctcatctgaattccatgcacaatttgatattgatagttttatatgtgatacatatatttttgttaaaagatgtttcctagaattagagcctcatctgaagtggtgcttagagatattaagagtatcttatcacttatgattgattacactttttacaaagaagaggtataggttttatatttctttatcgtcttgaattgaaactaggaaggacagtgttcctttcttgaaaatttagaataaatttaggttttatatataatattactagttaagcttgacaacattaagtttagatatgtacatgaaatcttctctccctagaattaaactcttttgtttctattaaatc

SEQ ID NO: 99598 - DNA, 1616 bp, Cannabis sativa
ataacactaaccggtttcctagaagcttatgcattcggataataaggtcttcttcctcttgagacattccaccacgttttatatttggtctgaggtaatttttccatcttaatctgcagctctttccacctctcttcaaacctataataatatgagaaaatgagtgccagagaaggtgaaagagaccagatgagtgtctgactcttatatgaaataataatgaagaatattatgataaggaacacaagtaaatgtttaacctgttaacttggacacagtttgccaattcccttcaccatgagtttccacatagtttttcaggatcaagtcctcttctggtttccacaagtttttcttaggaagttgtttctttactctcttgttttccatcataaaagcactactctagctctttttctttctttcttagttgatttgaaaagggaatatgattgtaattgaaatctgcagaggaagacaactgagattccacaaatatatatacgacatattgtgtgaaatgcatatatgttataacgtgttacataccaatcatgcattcattataaatttagataattattacactatgatatgatactgaaagattgatgtgagggccctgttttgcatccaacttttgcttctctctctctctgtaaaaagcatatttgcaaatctcacttccagctcaagttcttttgctagattctagagagagatagagagagagataagatctcatagctgcaatctgtatgtaaattgttgctcaagaaaaaggtgattgatttgaggattcttataatggaattccatttatgaacaaaaggatgtcataatacttgagctatagcatgtggggttttctgttttcttctttacaggttgtaacataaaagcaaagagttatttggtcattcttttttctttattgggtcctaatgatctacataaaaatgtgatgcgatcacctcaatttaggcacattttgtctttttctaattgagagcttgaaggaagattccttacaaatgcctgagattttgagggagtttctcttatattttcaacaatttgaaggatttgtttccgtgggtttcacttggattggaatgcagatgtgaagtactaaacggttctagctaattatagcgcctacaactctccaagtaccttatcaagccaattttacacacaatttacacataaagatgacacacacctatgacaagttatatttaataaatccatcttaaataaagataattggttgaagttacttactagtaagtgtgcgtcaagtttgtgttatcattactctttttattttttttcccgagaaagtgattttatgggattttttttttgaaagagtagaaaaaaaggttaaaaaatatgctatacacaaaactacaaatgcatctatatatatatatgaatattaatccaacactgactaaaatatgttatatatatgtttatcgagatttttagaaacggattaacaggaacttaaagaaatgcaaaatagtaaataatagatgaacagattttttacatggttcatgtgttaataattcttagttcacgagtcagtagtattagccttcttt

SEQ ID NO: 99599 - DNA, 2519 bp, Cannabis sativa
  modified_base (2464)..(2464): a, c, t, g, unknown or other
aaaaaaataaaaaaaaaaggtttttcccttttttttccttttttttttttttttttttttgcatcaatcactttgacattttcaattgacaagtatagtgagcgagtcgaacaagtgtgtggagaatgatgaatgtcatatgtaaagtaaaaactaaacattttgttgataattcgaacatgtagttgcccgaatacatttgctacatttggaagcctatctttgtgccctctttagttcagtacaacgtactaaaaatgaactttccatcactagggacactttcccgtacgtacaataggacatcactttgaggaacaccttagatatttaatttttatggattttagagcagatgtttcacttggattcattggcttgtgagtgttggggtattgtctaatagacgatgtagggatctctgacgagcttctcgaagaatactcacttgtatctattttcgagattcgatttccctcttcgacatgaatgaatttttcgctctctcatagaagtcttctatgacatccaattctctttcagcatgttccctcatagtctactttcaggacatactccaacaactatggcgaatttaagtttatcgtcaaacatcctccttactttagcaactttagtgttaaagcactggatgtatctttgcaagctttctcgttcctgttgcttcatatttgtgatacttgtcacagacataatatataaatgagatcttaaactcaaatatttacatataacgtcacatattggattatatgataatataatcccacattatttagaattgctaatccatatcttattttcagaatattacatgaagagtgtaacttagacttttcaaatttcagctgcctctaactacatatataataactatttaattacctgattgaataaatacttcaaacataataatcattctaaattaattacactaaattttacttacaaaagttgtttccaaccgcattaataaaatatcatggaaaccttacaaaagtgatatgaatatgtagtacttaatggaaggtgggaaatgagtggtaaatgacattatagattctgtgttttataaaaattaaattgaaggtattattttgtataattttgaaaaatacaatttttatatatatttgtactagaaaataattttaggttggttatatattcagaaaataacaaaaattaaacttaaggtattattttgtatgattttgaaaatacatagttcaatttattatttaccaaataaataatccaattagtgatttttgaaaaacacaatatttaaaataatagttaccaaaaaaacggaggtataaatataataaaatatgagaagaatgggcagttaaaactgcaacatgatagaaggaaacaaaatgcacgtgaatatacaataaaatatcataaaatacaaaaatcaaatgtagccgattcaattaaatcgatactaaataaatgtcttcatgtgtaaggttaaaagaggtgttgtcacttaaaatatgatgctctcacttttgtctcaactagtacaccattcttcaaaataatcacttgtactcatataataaaaatagggtaggtctacattacaggatcgtaaagaggtgttttgatacattctttatttattttcacataaaaaaaaaattaatttaattttttttttatgatcgtgtatgttataattatttaaaattacctgtaaatttttagaaaattctgaataatttataatatcgaaaataagatttacatattgtgttgtacgtgcgatttttttttttatatatatacgtaataagtgattgtttaattataaactatttaaaaaattttgaaaatctataagtagttgtaaatagttacaacttataatcatgggaaaaaatacactaaaaaaattttagttggtgacactgataagagtctacaacaaaaatgttcaaataaatatatattattataattttattttttatataccataaaaataaataatatttaaattataattgtttacgtgccaataataaaattatttgtaactacacaaacaaaaatagtgtccccactataattttaccttacataatacatgatgatcatcactcgtagctaaccattggttggatatttggttagataaatatccaactttataaagtactacttcttataaacagtaaacatatgccttttgaaagaaaaaaacacacaatacatatgtacatgacatcgccaatattgcataatatatatatggggtctcctacgtatttcattatcatcatcaattgtattcatcttaaagtaaagtacaacaacaacaccataaataaataaataataataataataataataagggtaaatactatattttacaccttgtattttagaaaagttagtaatttgactctctgttttgttaaatganaaaatagaccctgtatttttcaaaattatacaaataggaacttgaactgattttt

SEQ ID NO: 99600 - DNA, 2846 bp, Cannabis sativa
  modified_base (2112)..(2117): a, c, t, g, unknown or other
cctactagaactcagagacttcaggaagtgaagaccaccttccttgctgggttgatggttcgaaagaaagggaaagagagagatggagagttgtgtgacttctatgctaagcttcaattaaaccctttctctcaaaataccactaatacaatattaattcaaataaaataaggcagccactcatttcactacaagccaaaacaagggtcttaaggggaaaagacttaattacccatctaactaattaaactagctaccaactcctatgggcaaattggtcattactaaacccaaaaattcaacaaccaataaaacacccccaataaaacaacacataccaaaatatatgaaatgtgactctctaaaggccccacgtcgctttccacagcttccgaacacaaacacagaaattgagatatttatatacaatagcataataaacatatatgaacttaactatattttcacaaaatgcatttataaatgttaattcaatctcatatataaaccctaattaattaataatctaatttgttaaacttaagcgatctttacaacaagggtcagagcgtctctctctagaaatcagaggtcttgccttagccagttttctcgtaattctcgtgagaaataaaaactcaaagtagacgtagctccattaccatcaaccatagggagaacactactacaaatttcttgtgtatctctatttatttatttaaacttatttttcctctcaccaatctagagagcgagtgtttgccagatttttgcgtcaacattttggtactttcattgagagcgacaactcgagatcacaatcaagattgttgcaacaagatcaacaagtgttgaaagaagcaccacaataggttaactcacttgagacgccaattattggagaaagtgatgggacgatacatgtatcctagtttccaggtggaggccttgaaaccagttcctctgctcgtcctccaaggctaccaacaactactggtactgatgctagcaaccaaattccacatggtgagccacacgtggagttagaagaccctgaagaagtcaatcctcaggatgaagaacttaccctattaatggctaacttacattaacaatggggacagtctcttgacaagaagcctgaattgttccaatagaatggttgagaagcctatagatccaacaatagaatggctccttcgagagtaacttccactagagctagaaacaacccttgtgtgccaactagtcacgtgtgaacaagtgctcaagggaaaacccttaatctgggaggtacttctaccattcctaatagtcgtactgctcagcgtgtagcaagcatggaggatccccaaagaggtgcgaactataagcgagcatccaaaaggacttagactcaggagcaaaaatcaatgggccctccacatgatgtattatggtcacctatttgggaaatggtctacgagtgaacatctaaatggactcagacttgggaatgtggacctactgggctaccacctgccactaattagatcaaccaagagcttgctcaaagaaattcaaataatatagaaaactgatctcctctgcgggattctcctcacaggtccaatgattctaggccccgtaaccctttaaaggggaagggagctgcagtcaaccttaggggaggtactcggaagctctaccatcgatactgaagagtatgagttttggagggtgagaaacaatgaaccactccatactcagaagtatttccgtgatgaaagaggtgttttgtgtaggtatttcgctcgcggtcctaatggctagtagtatgagtaagtaatagatagaaaaacttgattatggttaagtaaagcatattttattaaaggataaataccattttagaccctatgtttagcaaaagttctcaattggaccctctgttttgctaaatgataaaatgaaccatgtattttctaaaagggtaaaaataagacactaggcttaatttttgacgattttgttctcaataaaaccaacttgaagacaatttctaacacaaacagatactgaaaatgtaaacagttttatcatgacacatttagatcggattattattaaatnnnnnnttgacaaaaaatcagttcaagatcctttttgtactattttaaaaaatacagagtctattttatcatttaacataaaagagggttcaattagtaatttttgtaaaatgcatccaaaatagtatttaccctttattaaatatggaataatatgtgtaagggaatatatgggtaagattataatcttactagagtaattatgtgataattagagattttaatatgaattgacaaataaatataatttatttattatggaaattttattggaataagtgagtgttatgtatgctatttatgaaataaaatattttcaagtttaacaactatgaaatccgattggttggccataaatgtgatggtggtaatagtttgtgatttagttatactgggatgttctattgggtatttgtattgtcagggtatctcaaggtaattggatatggtcaatttacccctagccttagagattatttgggaagtaagtaacggtaaaatagttatttcacataagtttatttaatcttttatttttaatggaattattctagagtattatgtgctaattagataagtcaaaaattaggaatagttagattcattttcacaaaataagataaacaaaaaacttctctctcactcaatcttaaaaatttctagagtattattaataaatcttaaaaattaaaataagagattaaaattcaaaataacgataaaatatataaatta

SEQ ID NO: 99601 - DNA, 949 bp, Cannabis sativa
  modified_base (751)..(758): a, c, t, g, unknown or other
ttttaaggtaccctatttatttgggcatgtgatattatatgtcctaaaactcttttgcccaatcaaattagtatcctcactttttcaaatgagagtaacctaagttgttttgatatatgcatgtgttatccttgactcttgctccctaaattaagggagtaaaaagataagctttttactagtttagatggaatggaccattctaatgggagggagtgtgtcactatatagagaggtagggtaactaaacctttgtttgttccaaaggattgggggtcactgtcatggggtcaaataacagcttggttcacactatcaaaacccacatctactgatcccatataataaaataattattacaactgttttttttagagaatttttacaactattgttaaaaatataaaatttaaaataaataccaagttgaactagaaattggtttgtttagcgagaccgagaagcggtccgtgtgggacgagtacgccattggatctttggatcgttgtaagcctagtaggcttgggcccaccaaaacagtccaagcctcaataatggtccatcacatgcaatcactatttttaattgtttcttttaataaaaacatatttaaatagttaatttttttcttttaatggtgggggctaatgttttcttacttgagaacaaaattaaaataataattattaagagcatgtttggtattgttttctgttttttattttcaaaaattatttttagaaatgagaannnnnnnnagtttttgaagtttttaaaacacaagtcatgtttgggtagtgttttttaaaaataatattgacaaaaaataaattggtttttaaaacaggaaaaaatattttgttcttttcaaaattcttattttttgtaacttttttttctgaaaactgttttaaaaaaataagctaaacaagccatattgttttcaaaa

SEQ ID NO: 99602 - DNA, 2801 bp, Cannabis sativa
  modified_base (27)..(33): a, c, t, g, unknown or other
aaaatagattacattgaaatggagttnnnnnnngggcataaaacccaacaaattcctctcagcagttatgtgggtcctgatttgtggtactgggttacatgatacttcaggtgttttcactgctaaaagttcatattccctgcttcaatcaatgaaaactggcagagatattccagataactctggattcttgcggctcttatggcagttacagctccctccaaaggttctcaattttctgtggagagcttctactaacagtctcccaactcggtttcatctttccacaaaacatgttccaattgctgcaacatgtcctttttgtcttgctgctcctgaaatgactctgcatgttcaggtggggtgctcttttgctcaaagtttctggagtaaggttccaattaatgttgtggtgcctgatgcgatgttgttctcgagttggtttgaagctggattggcatcgtggaacacggtcgaggctcttgaggctggtatgatttgttcgtcagtgtggactcatcgtaatgatttggtttggaactccaaacgtcctgatgcgagtgaggtagtgataaacgtaaaattaaattatgttgaatggtttaatgctcaaaaacataatgtcacggatgcaagtttaaactggccgactgcgcttcccgtcgagcattggacaacacctgatttcccttttgtcaaagttaatgtcgatggtgcactattctttaaccaagggcggtatggtctgggtttgattgcaaggtctgctgcgggaatggtcttggaggccagaattttatctagagaaggcactttacaacctcatattgttgaagccattggtatcaaggaagctctttcttggagtaaagcgaatggatggtcacatgttgtagttgagtcagattgtttaagggtcattaatgatttgcaaaagctcaaaagtatggcttctccttatggccatattctttataattgtaggaccctagttgctgaatttgatgttgtttcttttaattttgctaagcggtctgctaataaggttgtgcatgctttggcgtgatcttttctttctgaggctgaccgtatttttagtaaggactcttttccttttgtaattgaatccttggttttggatgatttagtttaatgaaatttaaacattattcaaaaaaaaaaattaatatttttttaatgtatatatataaaatatctcacttaatgagggaaggcattatttttctaagcgctttttcaatgggttactaaaatttcaaaaatagtagagtttggacacaaaattactttaaatggaacactagagtgtcccactattttaacattaaaataagggaatgtttatggttaaatttttatatttatatacatattatagtgtgagataatttaataaaataatataataataaaaaacatattttttaatacaatttttagtgttattgttaaaattagaaaaaaaaaaattaatgtaaaaataatatccttaggttgatttaatattaaatttgggtttctatcgagtatttattgagagagagacggggcattacaccgtacgcacatttcaatgtaaacaatttttcaagtaaataaatgaggtaagtgggcaatcacaataacatatgacgtggccaaaattaagtgatttaaaaacacccctaaggatggaaccttttgatgcatataataataaatgctgcttttgatgcatcttgagctataattggaattgggggcaactgtgcatgaaaatcaacaataattagggctctatcttttacatcaaactcatcaacagttcataataagtaaatctcacaaatcatacatcaattttaattttgtcataccaaaaataaaatatttcaatgataataaaaaagtaatgatatgttcaaccaaaacgcacagtcgatatatcatacaatattttttaaactctatttaaaaaacagataataataataataataatcatcatactgttagagtctccatgaactctttatctagtaacatagattcaagtgtctcagctcgaagacaagcctcaaagtcaatgcttccctgttcagagccaggaaaaacagtcaactttccatcatacttgttcccaggaccacttctcacagtaactggtcttccccaaccaaaatcattcccataaacattgaaccgtggtgaactaccagtacttagttcacaccctaactctttctttatttttattttcactggggcttccacccaattcttcaagtacttttgggccttttccgaggtatgcgaagccacaaacttattcatctccaacgccgcccaccccaatccattcttacccagaagcttccccgctgtggtctccacagccccaaacatcacggcattaccacaatacatttctgataatggcggttccattcttggcctgagacccactacgataatgtagcacacttcgtcttcgggttttagataatttcggtttcgggttatggatacccaaaggtgagccatcaccgcttgaagagaagatatattattattgggttttgtggataacaaatcgactatctcagcgttggctttagctttgagtttggctatggtttcttttgaaaagcgaagcattctttgctttaatgagattggtgttgagctacgagtgttgtttatattttgatctggatcaaaaggtattctaagtggaagaagatctgggttgataccttcaaagaattggtcacgaccgaaaactgggtgtggagggtcta

SEQ ID NO: 99603 - DNA, 937 bp, Cannabis sativa
tttttttgatgaattatctcatagtattattgtaggataggacccttatttgataggtatatagcataatatatagaggggttagagaatagagagtgcttggatttttctaacatttggtcacaagaaagaatgtctagttgatttgatgcttaatataggtaaggagaagaggccaaacaactcacagaagaattcaatatagccttagctggagccatacctataatcatttttcatcagaaattgaaattaaaatacacaacaaaacaatgctattgagacatcatactttaattaattaattcattaataaaaagttttaattataattaaaaaattaatcccaaaagatcttccgacaagaataaagcaactatgtaatcttgtcatgagtgaaaagatttcaaatgtattaattcactaagaaactaatttattcattagaataatcaaaagaatagtgagattattatattattaaagaaaataaataaggaagatataaaagaagaaggaaaattagggggagttaggttttctttatttgtgtaaatatgtgtatagtatatgtatgtgtgtatgaaaatgattttgcaccttcaagaagctttgtttgaatgttccaagtaaaatatcttgtcacctatatatatctaccttttgacattattaaccaaccgcattaaattatgtagtcacatttctctctctcatttttttctctatgaaaattgaaacatggtgtattttgtcactatcatgtttataattggggagttttcatttttatagttttcaaagtatgaatttgtaaaaatacgatattttttaaaaataaaaaaatatatattttaggggaaaattttacaaaaaaaaaaagttaaaaaaataggtactttttatggtaatttcccttttctataatgagaaatct

SEQ ID NO: 99604 - DNA, 2289 bp, Cannabis sativa
gacaaggttgagaatagctgggctgattttcttcctgaattagactatgccataatctctgatggacattggttcttccgagttatgtatcttcaccaaggcaatagcttgacaggttgtgtctactgcaatgaaccaaacatcacaaaactcgacattagctttgcagttcgaatggcatttagaacagcatttgatcacataaacgcctgcaagaactgcaacggtcttgtgacgctggtgaggacatttgcaccagctcacttcgagaatggattttggaacaccggaggttactgtaaccgaacgagtcccctgagtaaagaggagctcgatttgggggttttcgagtgggaaatgaggaacattcaagtggaagagatggaaagggctagagaaataggaaagaagcaaggaaagaagtttggagttgtggatgtgactagggctatgcttatgagaccagatgggcatcctggttctcattggggcaacaaatggatgaaaggttacaatgactgtgtccactggtgcatgccaggtcctgtggatcattggagccattttttgatggctgttatgaggaaggaattgggtatattttcatgatacaagaatagggttcttattagttaatataaaactatacaccatactgattttacaatctatttatttgtgtccaattttcataaatggacatatataatactctcaataaaatttattatggggcatggttactgttgcaaataatactgaaaaatgacttttactttattgatatcttttaacatcttcacttctatttcattgatatctttaagagttaaaccacattaccaaggtttgtttgcctcttcaatataaaaatcatatggttaaattacatacaaaaaaagatgccaaaaggaaaaggcaatagagaattacagagaaaaaattacacattttctcactcaataggtaaaaatggaaaattttatttttattagatgtgttgagtcaatatgtatatatagcatactattaagagaagaacaaaatctgcagccaggaactgttaaaccagaactaataatatactaattttaagaaaatatccaatatactcaatcaaaaatagcaaaatatgagatgagaaagagaaaagaatgttattaaacataaaaatgcaaattttgttactatgcagtctatgctaaaaatagcagcagcaccattgtaattacaacaacatgaaaaaggcattattggattaaaaaccaaagccaaaaactaaatatctaaaaatgaacaaaacacaaaacaacaattcttcaacaaagctaaaaaaatcaaaattcaagcttctaatgtattaccaagcacaaaagagaagtgttcacgaactggagaaaactcaaccaagccaatatccatggcgtagccagtaacaggcaatttcaactccctcaacacacaaaaagcttcagccatacgagccttgggaacttcttgagctacagcacagtaagggatccatgaatcaggacgatactcctccccaatttcgactccttctttcttcattaactcacacaattgagagtggaattggagcaacgacattgaaggtgttgggcctagaaacaggacattgttgtcgtttgaaagactcccaattgaagagaaagacaacggtaaaggatcttgctttgatgcaaaccctttgatgaccgattcaagctttgtgggttcgatcgaggaggttgagaagagagtgatgtgtggacgtgattcgatttcgatgagttgggtactaatctgacggcgtgcaaggacgttccaggccttcaagacctgattttccagtgctggatcgaagtaaagctcgatggcatagccttgtgacattgccccaagaattaaattcagaatagattagatcgaattagatgaaattaagagatacccagtaatcaaaatcaagatctaagaatacccagatggagaaacaaacaattatacacacaatatgtgagaatcagattgagccagattccagttcttccccaaaactaaaaacctagagagagatacaaagacttgagaccaaaaacgaaaatgaaagcaaaatattaagctaaacagaaaatggggtgaagcacgtgtggaaggtgaatgagtggaagctttttcaatcgaaaatagacgaggaataaagcaaaataaaaaataaaaaaaaatggaagatttttagaaattgaaaattactgtagctttaacgtttgttaacctacaagacta

SEQ ID NO: 99605 - DNA, 2122 bp, Cannabis sativa
  modified_base (1290)..(1297): a, c, t, g, unknown or other
tctctctctctctctctcctactaaatggggctttgctggcccatatcaccttcacatgggccccttcttaggcaacccaatcccacctatgtatacacttgcacaattcacaaggaccaaattacccctctcaaattcacttattaaccctcttaaaccaaacatttgtttgcattaaaaattaagctttgtcttcctatatatggagatcatgtcatgatccttaaaaacattagtttaattttgttgtagtactgcactttttttttttattttgtttttgttttttgtcttggattatatgcttctttattaatttagttttatttatttatacccacgttgtccttgtaggattacatgcttgtgttctggataaagatttatctacattatactaaattatcgttttagtttagctttaaataaagaagttggttgtgacgataattaataaattgtcaacagaacggagggcattttcggaatttagaatttaaaggtcctggaaatacatgtgcggctccagattggcaggctttgggttgagcaagttgattgagctctcttcccgctttcttattttcaagatagagaacgaattgatatgtgaaattacattaatagcctccgttctctagtattgtgtaataaatgttttttttggtcgtagtatcaattgagtatgtatatttttttacgaaaggaaaagaactcaattaacattttctttttctaaattaaaattgaattcataaattagcccagtgctataaatttgtgtgtgttgctaactaagtttatattttttcatgtttttcaaaatataagttgtacacagtaataattttttttaatatttttgtgttgtactcggatttatgccataacttactcgtgccgatatatttttctaaaataagccaatctatttttgtattcggatttgagttcgtatttacttttctatatataatattaatatattttttaataaattaattactaaattaaatgtatattttatagtttcaattatattttgatagttttttaataatattttacaaaaatcatataaaaaaataattaaaattatttgaattaaaatatttacttacaaaacttaaatttttatgtcataatttataaagaaattaatatatagttttatttttacatattttaatatttaattataaaattataatgttcagtgttatatttaatttttttttattattttaattaatttataattgacaaatactttattattattattattnnnnnnnntattattattattattaaattatatagtttttaatatttcgtgtcgtactttttgggtttgtcatgtgacgtgctttcgaacttaagacttacatgtcgtgcctttcgtccttctcatactgtgtcgtgcttaattaatcacatatttttcgtacaatgtcttaccaatttttagcattatgtcgtatcgttgctaaactcatattttttcgtgcctgatcgtgcttgtgcttgtttcgtgtcatgttaaaaaacctaacccatatttacaacacaatctaagccgttgaattcatatctaagccattccccttacacaccttctatgcatgtttgatttgcattacattttgtaccataatatatgtgtagtgcatatggtacatgataaccctaggacattactttaattaatcaagctttccctaaaaaacaagatttgagtatatgctcatttcatgtttcttaccatctctagtacatggggtaaaaattaggttaaatttggcacaaaaaaaattaataaatgctacattttagtatacttttttttataattatactctaatacataataacaaattaagatacaaattgacttaaaaagtaattattattaattattgataatctataaattaaatatatattttaaagaataatgacaattttacaattaaaaaatatattaaattaaatcattaatgctaaatgataatgtaaattaaaaaaaatacgttaattgttttctaaattttagtatttattaaatttaacacaaattttaacatataattgtagatttttttatttttttatttattt

SEQ ID NO: 99606 - DNA, 3642 bp, Cannabis sativa
tctctctctcttgttaattgagttgcggttcaataaagctgtgggaagatacaaatagggtcaaagaaaaggttttatcaacatcggaattcaagtaatggtatattccccctcttgatttttgttatataaatatacttgattttgattttgtacttgtttgtaggtgaaattgatctgtgaactttcgtctgagacatgggtttttttttttaaaaaaaaaaacccaacatgatgaatggccattattaaagatttgttttgataatgattttatgttgataagtttgttcttatgtgcctatgggaattaaccttaaactcaatgtgcttttttcatgtgactgagatttatgtcatcaaaaaataattttttgtaccgatccatgaaaaatctctggtctaggagtatgtatatatgtcagaacatggggttttaaccatgcagacttaaagaactatgtcagtcattataaaaaaaatataaattaaaattaaaatatcctccttttcggtgaaaactttctcttaaacaattcttattataaaattaagaaccattgatctgaattatcttgtacttgagaaaatgcacaatataacaatatatatatgctatatacattgtacttttttgttgttgatcatgatgttttcatggactttatttgtatatctttagtttagattcttgtctctgttttttttggcattttagtttttttcttcttaccatatattttagcatgctttcacaaaaaatgttgacagatattccatgcacaggccttgtatatctgttttgttttttcttttcttgtgtgtgaatcaaatatatatatatccatatatttatgtatgcgatctgtaaataatttgtcggttcataaagtattataacacatacacacatacatatatatgcacacacacaatccaacccctcagattctattataaggctttcaatatatataatctttaagtgagtcgataattgattgcacataatcgatagtttggcatcttcaaggctgtttatttttagatagttaatgctatacacacactgtcatatacttaatttaaagtaaatgtatagctaggtaggttttcattgtaataagtagtttattaggtttacattttacttagttgggaattatttgaagagaaaaaacaaagacttttatttagatagatgtattaatattgcgactaactgattaattaatgacatgaaacaaatttcagtagctaaatgttcttctggaccacaaggtactgtacatatatatatacatacatgtatatatctttactgaacatcatgaaattttacatcattacaatttaccttgcttattagttttgaaaaagcaatcaagctaagatctagtaacagtttgaatacttaaaagatatagatcgatcttctggttagtttagttttgctaatatatatttatatatataaatatatattatgtgtgtttattataataatatgtataatagaaaatacgagttaattaagtaaagcaaagaagaaattaaataaagaaagagagaaaaaagtatccaagataatttaccatgcattgagaagagtaagataattaaccaaagaaaaactagaaacttttgtgagaaaaagaactgtcaaaccattaagatgtactcatgtcttcatgtattttctgtgataatatacagcaaacaacttcagctttttcatgtgcatacacaagctggtgtgcgatatatattttatgtatatatatatatgcctcatgatcagtactaggaaaaaatactaagcatatttataagatattcccaggcataaatacatatatatatattatacactatagtagctcaatcctgtacatatatatgagagtaaataaatactaagtaacatatatttatatatataacaggatcttaatttacatgaaatccttagctggatttgtatatatagattccctttgaggtttcacggggcctccagtcttgatccaattaataagccaacctactttatatgatccaacaacctttattgtttggatatgtacacatacatacatatatttatataaatatttcttgatcttacccactaatcacacacctatgctaaatgccaccctttcatttgctgttccatcttctttaaacaattgtttatttaatatatatatattatataaaaaaaaaatatatgatgcataaaccatcttttgaactgttattcctttttctaatttgtttttttctgtgattataatatataatatatatgaactcgtgaatcatttgctttactttagtgaagagtttaattaatgtatatacataagggcttttttttctttctttctctcaagtttttctcatcatgatctttatgttgataatgtttgtagacttaaagctaaacaaagtggagacaaagaaactttatttgatcaaagttgattaatcacttacaggttatcaggattacaagtcattaatatgaagaaaaagtggcactgacttgttattgaattattaattaaatgataattatgaccattgggagagctaggggtgtggtgaaaagtcttaaactaattaactttttcttaccctggatttttgtgaataattaaatttcatgatgaagaggttaaaatctcaagaatagagaaagaattttaattaatgtgttcaatgtataagatgtgtttccttaccaagaaaatgtataatacgtatatatatataaatttagtttcctaaattatataaattttcgcgactctttccttaatattttgtttttacaaatttgtaccctaataattaagtttaatttggcaagttagagcatcttcaattataaactaccaaataatttgtgtggaatttttacatttttactttaatggcatactaaattatacactatattttatactattaatagtgttgagttttgaatatacactaatttagtgtaaaacttttttcttagagcacacatgtacactagctcttttaaaatagctaatttttgaaaatagagaaaagagaattgctaaaatatactatacatcaagtaatttattttacatatattttttaaatggaatgaatagtacttctccacatgtagagaagtatttttaatgctctaaatttattttattaatatttttttgttttatgtgtgtatgagtgtataaattaatgttatatatatatatatttacaatgaataaatatatattttaaatataatattttattgatatagaaaaaaagaaaaaactaatgtatggtgtaatgtaaaagtttaaaataaaataaagaaaaagtaaagttttagtcatgtattttaaaggaataagttgagaagctatataatgtgaatgctcttgcattctaacccttaatttaatttattttaaaaaataatttacattttagtcattaaatcaaaatttattataaaaataataaatgattcaaaacactaatatattgaaaaatataaaataacaataacaaaaatactaataaatataaaataaaaaaaatatactaaagttttaaaacctaaaaagacatcattgttaaattaat

SEQ ID NO: 99607 - DNA, 906 bp, Cannabis sativa
tcacattcagatattgttatagtgtcaagagatggaaatgcagcatctatttccatcttttgttgctccattggaagtaaaggcagtagttggtcacactcattgatcacgagctttctcaacgacgggagggaatcaggcaacgaaactttgagctttggacaatctctcaattcaagttcctcaagaacaggaaacactatacctttaataaacaaccactcgcggagctcaagcatcaattctaaatggaaactctccaaacaaataaatggtattaatgatagaattatttgaatagaactatgtacctattctcaacaggctgggaaaattcgaaataagtcattgattctgttgtgttaccaatatataaaaagaaaatcttaaacttttatttcaatattttaaaaataaattttaagttattaattaatatacttgatagtaaggtaaattagatgtaaaataagttccactagtaattacacttaagtgttctactacactagaaatcttgatcgagtttacatgtattcataataccacaaagccttgaaaattgttcgaaccagcctaaaacggttaagaacttggtgtgtgtgaaggagagtaatgaggggcagcgagaccatggtgaacatggtgtcgaagcttactaccatctttaactagatatgtcggattctattatcaagttaagtttaacaaattgtaggaaaatttcaatactctgatttacaatattttgagattgatgggtgtaatagcttgaccaaatattctttttatcacaacttgtagcgagtgaaggctcttcatactcgatgtggtaaagaaaaaattgcaagaattggttcaactttcgattaaaaactttgagacttgttttaagacatgaataac

SEQ ID NO: 99608 - DNA, 1072 bp, Cannabis sativa
agacaaagaaaaggaaaagaacttgtcacatactcgaaacagaagtaggcatacatccaagaaacatgaagaaaattcagtgccgtcccaatgtagggtacaaatcctgtcacagaaacctgcatatagaaaaatcatatcatcatatgtgaggaccccactgtatacaggaacttattgcattttcttatgttgcaaataagcatatcagatgataatttgtttgagccaaaaaaaatatgtggtaaaagagaatagcgcataatattgcagaaattgagaagagatggagaaataccataggctagaatgttagatatatttgaacaatgcaaaactagagaaagtaaataaaactgtactatttgatatatcttacctctatgaagaagaagctcaaaagaagtatagaatacaactgttctcctattacaatcatgatcctaaagataaataaaatagcaaagatcaaaatgaatcaaaatatctgaagtaaaaaaggaaaaaaaaatcaaatcaaatcttaccctcccaagccatcacgctgtcgcacatgacctgtattttgtgaggttaatttctcctttcccatgggatccactttcacgggaccagacttttgtgcggcttcaaaaccatacttagcaatatcattgtacctgaatttgatattttagacccatgaaaagaaaggaaatcttaagtatggggaaaaagttgtatgttacactaatgaaacacaagcttattgtcacttcagaattttggtggactgagttgttgttcaaatgagataataagaccataaattgacttaaataagattaagaaataaacttggctgaccaagttaaaaaacaaaagatgcaacaaaggtagagcaataaataccagagagcgcttagaataatgctcagtgcatacaatgggtagaaccatatgatctgaaagtaacgaacacttacatcagttaaccacaataagattgcattatgagtagggataggaattggaatagaatgaaatttaaacttcattaaaaaaaatgatcaactttttttcatcttgtttc

SEQ ID NO: 99609 - DNA, 3574 bp, Cannabis sativa
tctttcttctcccacattaggtttgaccattgggttatggaccattaggttgaaggtgaaggaagatgaagaagttacatggggttatggtaactggtctttccagaaaaaagagagtatgaactaattccattaatatatatatatatgttacacaaattcacctctgttcagcatcattgaacacacacccaagaatagaatctaagatgtaatacttaacctgaacacttaaacacacacagtagagaaaagagcgcaaagatctattattttattatgtacaaatggtgtctaatacaacagtcatagagagttgagttacataccctttgatacagcaaaagaattacaaagacaagagtattaactaactataaccgtgactaacctattagaacatgacacctaggctaactaactacctataataactgtcaggacattagttagacaaaccagaaaataacaatatacatcttaattaattactacaaaaactttttcagtcacaacaaaaatataaaaaacttgtgactaattataaatcattatttttatgttttgactaaaaagtttgtccttaaagtataatcacaaaaattataatttattgtgactaaatgtgtttttagtcacaattcacaatagtacttgttgtgactaaaattaaattgatgacaatttgtatctaaaagctatattttagtcacaaataattttttttttttgtattttttgttgtgactaaaaagtaatattgagttaaaaaaaaattatattatcactaaaaaataagttttttataatgaattattggatgagaaagtacgcacaaaattccatgggaatttatattaattatcaaatttaattaaaattagccaggacaaaatttgtttcttaggatcaagcaatctcaaccggcttagatagaaacaagagtacgaactatatatatgcatatacatatacatatatatatatatcgattaattaatgcaggattaggacaaaagagaatatgattaattaatcataatgaatatgttattatgagaataattccaacttctaattttttgctcttttgtcctaaatctcaataacataaaaaggatatacttaattatatatgcaacatatattttcttagccatgtccttaggtctcaacgttgaattttgtagatccccatgtttatacatatgtacatacatatataaacatgatcaatcaatcattatataattataatataatacattttattttatatttagtgttctaaaaagaaaaacaaaccaaataccctataagattggagagtgtgtgtggtgaatcttattgaatccatactatataaaactatatattccacgtgcaattctatggaacaccacactcccaaaaacttagctctcttcttaattatttctctctaatattttcatggcttcttctcatacattagagcaaatatgtattgagcaaccaaccatacttgaaaaatctcccaaaattactactcaaaacaagtccactactaagcaagtagtggaacgtgctcagtggctccgagcagcagttctcggagccaatgatgggttgctctcaacagcctcgctattgcttggtgttggtgcagtcaaggatgaccgttggtccatggctctagctggcctcgctggagctttagcgggggcttgtagcatggcggtaggagagtatgtatccgtttcaactcaacgagacattgaagagaaacactattttcaagaaaacaagccctcgtgtcccgagtattctagggtttctactccggggaggtcaccggctataagagtggttgcagaagatcatgcattagatagtagtcgagaaattgtgttgccgaatcctcacaaggcggctggggcttcagcactggcgtttttgagtggttcggttgttcctttgataccggctgcattggttgttgatcacgcgatgagagtcgtagtgattgtggtggtggctactctggcgttagccctttttggttgggctagcgccgagtttggtgggtcctttcgccctaaggtttcggcattgagagttgtggttggaggatggctggccatggctgttacttatgctttgcttaagccttttgacagagaccacgacaagaaggagtgataagtacatgtatataattatatattttaatgcatgttattgggtaaacagttatgtgttaagattttaaattaattatattagaatatttttgtaaggtctcaattattaggtgtaaccttttttttttgtttatatatacaatttgagttttttttttttttttttcaagttataatgtgcaatatataccattaatttcttagatgggtaagtaataaccgtctaaatgtaaaataactacaaattataaattagtaaatgccaaaataacttaaaagcaaaatatatatggtttgtgcacaagtaactattaggtaaaaagaatacaaaaagtgatatctctaatgtatgtaaaataaggacgttttatttgggaaaatgcttaatttaatgtaggctaggaacgaattttattttcaaaattgaaaatttttgcaaattttgtggacccacgatttttttactcatatttgaatatcatacattatttttatttaagtgcataagacaaaggagaacaaattttatgcttggaaaatcttaaatttaggtgatctattatttttaaatattgctcgaatttaaaaattccaaaaatttataaaaatggtataatgaggtggtcgtaactttaactaattttgtcaaaacttaatctacgaaactctaatatatatcattcacagattgctatcgtgaaaatgcttcatttaatgctggaaagaagaatttttccaaaattgatttttttttgcatattgcatagactattactcacgagctttttatgtttgaatattggacatcattatgctcgtatcttcctccacacctctcgaaacttgaccaaatttttgtttgggtgcataagacatagggaaacgaattttgtgctaaaaaaatcttaaaatttatgtgatttattgtatctaaatattgctcggattcaaaaatttgaaaaaagtttcataaaaatggtacaatgaagtggtcgaaaatttaacgaatttgccaaaacttaatccatgaaattctattgttcaaaaaaaaaaaaaaatcattgaaattctaatatctccttcccaataattgttatcgtgaagatgcttcatttaatcttggaaagaagaattcttccacacttgaaaatttttacaaattttatggactattattcacaagtttttagtcatattctaatactggacatcattctacttgtatctccctccacacctcttgaaacttgatggaatgttttagtatctcaaacggttttaaaccgtaagagattctcttgcttttaacaaaaacccaatccagatctaattaagttcaaattatttcgtttctctcaaacatagccttaaccttaagtaacccactcccc

SEQ ID NO: 99610 - DNA, 4641 bp, Cannabis sativa
  modified_base (64)..(70): a, c, t, g, unknown or other
taattgtgaatgactatatgttcaggacttaccagattttctatatattaaaccataaacatgnnnnnnncatgtaaacataaatgacttttaatatttcattgataaacaaatcagattagattgaaatgggttttatttagggcataaaatcccaacagtctattggtcatagctcaattctgaagttattgggtctaaaattggctcacaagatagactggtacactttactctgaaattgagtagtgtaattaattgtgggatgttggagaataatgccacatcccacgtggcatcatatgcgaacagtggcatcccaaaacacatgtttccagcagttctcaccaatgtcatgaattccaagctgagaggtgacatcccttgtcactccatttctaattggtgtatctttagccgaaaataactatttttccaatgtttgtggcattttggtctaaaacaaggagatttttatttatttgtaattttttattcattattaaggatgatgtatgggattgttagtgggacaccccgacatgtggggatcactaacaaatcctaaagcttatattatgagagtaagaggttgagagaaagggggatcgtttttgactcatagaacagttgcctagaacaccacattcctttcttcacatttttcttaagtcctccatactttatcgacacaataaatacttgatccaaacataattcatctacacagttaccaagaatagggaccattctcttttcttattggttatttgttccctagaatcttacaaccaccaactttgatagatttgtgaatattgagtatcacatgagtcttgtattcataagtctcgaatgagatttcacctagaaatattttgttgtattactgtccacaccctcttgtgaacttaactctagtgtgtcagatctaattagtaaaataaaaagtagacgtagctccattaccatcgcgacatgggggtgaactattataaatccctgatgtccattttatttattgtagttctttttagtcagattgattcattgcagtcctctttgtatttatgatcttcttagatcaattgatgaaaaaatgtgtcaatagtttggtgctttcattgagagtgatgtggtgaaaatttgattgttttcactttagagaacttatcaattttccttttacaacaatagagttgagtacgaggaggaccaattttgaggaggaacctcatggagaagagacctctaggcaccgagaaaagaatccctttccacctatgccaaaagatgagggacaagtccaaggttgtgaatgttcctcatatcaatcaagggactgcccaccagtcaggtccatacttgtgaatgaattgttctaagaaaatgaaacactacgcgtttagttggccaaaagcctacgccacaacaaagagctacaagagccagcccaagggtgtgggtaccaacctcctgtattaagagatccttatccccctaggagaagaagggggcggccaaggagagaacatgcccctatgaataatctaacaaggaagggggatcaccaacctttaccaaatgttggaattcatgtaaaacatgcacaagaaacccatgtaccaatacatggaggtggtcatgaagcccatgagacccaagttgttcctctaaggcctaaccgtgagaataatgatatgagtggagaagaaatgagagagcaacctactttgattcgagccccaccatcacctataaggtaacctaatccgtcaattggtaccactccgtaagaactaaggcggtccacctcccatggtaatgcgccacatgctcaaccacttaggggccaaagggcaacgcaccgctcctcatgaagatcatgcttgttagaggacatcgtgggccaaaacaaaagatgccaccaaggcaccaacctgctcaagaaaatagcaatgtgtcaaaattagatacaattttgatgccatactctgagccatactttaagcatccccaaatatctcctgatcatccacaataataaaggacaatgagttttgttgagggtagtggtcgatccaactctagaagctgctccattagtgttcataagaatgtgcctcgcaattatgaacgtcgtaacaacaaccgccctccaagggaagcaagaagacctgattagtgagaatattcgaatcaaagacaacctgatttcaagaaacatttaaatagaaggcaaaatccaactccactagttgcaaataacaaccataaaatcaatgggggacttcaaaacaacatccccctagttggccatggcgaggaaagacgagtcaatgaccctagacgaatgccttggaacaaatgattcaataattgatggtggccaataatcaaaatgccactaggtatgattcaaatgaggagtcagagccttactctcctaaaatattggccctaccatatctgcaaggatttaagatactgaccacgatcaagtgacttcaatacacttatgcgtgcccaccaagtgattggtgacttaaaatgtgtgttattccctgtaacacttactggagcggccaagacatggttctagaaataaaagaggcactccattacctcatgggaccaactctcacgtgacttcaagaaggagttatgcgcccccaaggccaaaaagttagaatgttcctcccttgctaatgtgaagcaacaaccaggcaaaagcttaaaagcttatatcaattgttttaatgtcgaggtagccaaggctagagacgttaatgatagtggaagacttatggcattgggggcaggaattactaatgtgtcccaattttgggatagtttataaggaaagggacctctcactatagatgagtttatgaaaagagctcaaaagtacatcaatggggaggaggcaagattggtcaataacgttcctctttcatctggagcaatagaagatactcccacttcaactaataataacccctccaatgagaacacttccaataagaggaaaaatgaccatggtgaggacaacaacaatactaagaaaggaaggaccaaccgacctttttacaccaccttcatagagttgactgaaatgcttgaaactattttcctcaccaatgagcaaactgtgaattttagaattttagagccgatgaaaggaatcacgaaaaattgagatacctcaaagtattgtcgataccacaaagacgtaagctacacaaccaacgagggcaaagccttgaaaatagaaattgaatatctcatccgagccaagccacttgctcattatgtgtgcaacaagtaggggaaaacacctaagcacaagggcaagctaaaaacaatgcctaagccacgccaaacaatgcgcatgccatgccatagggccaaaatgtagaaatggcaccacctttagaaggaaatgatgtcttagtaattgctggaggtccacactttgctggaacaagtagtggagcccaaaagtgctatgttaatgaattaaaaagtggtaataatgcacaagtgccaccacctcaacatcccacaaaacaacctcatgcagaacatcacattacttttaatgaggaagatcagcaccatgtacagatgccacataatgatcctttgctgataaccacccaaattgcctacaaaagagtgaggagaataacttgttgataatgggactaggtaaacttatcatacaagtccacccttcagaagattggactcgagacttgcgatttgcaaccatgcctcacatatctaaatagatttacaggcaaggacatagcaagtaatggaaagataactctcccctaacaatgggagaggccccgcgaattgtaagaaaaatgacagaattcatcgttgtggaaattccatcagtatacaatgtgataataggaagaccaacacttatcgcaatgggggcagcaacatcagtgagaaatttggtgtgaagtttccaacaacctatgggaatggcatagtacgtagggatcaattggcgacacgagaatgcaatagcgtggcaatgaaaggacaaccccaacctatgactcaacttttccaagttataacctttgaacatgcttgccaagacaataaaagttgctaggagaagcaacatggatccactcttgctagaatttatttattttctcaagattgaaaaattttatggttttttagtttttaagggtcatttaaaaaacacgacatttaaatttcctttttagataattggttgtttattttttaataaatgtttgcaccttctttcataaatgtttcttttgaaatgttacgtcctcacccaaacaagttacaaaaataacccaatacttttatagaaagggggcatatagggtataggccataactatactccaccactccataaaataaatctcaaagtctttgcctacacatcacttcgtgagcatgagatttaaaaaaatgtgccatgaatattttttcaaaatttcatctcagacagggggcaaagtcagtatattaatgtgataaaaataaatctcaatgtcattactaacatatcacttaaagagtatggaattttaaaaattctttccatgaatattttttaaaaatttcacc

SEQ ID NO: 99611 - DNA, 882 bp, Cannabis sativa
  modified_base (38)..(61): a, c, t, g, unknown or other
acaagattacaacataaaaaaactgtattttctgtaannnnnnnnnnnnnnnnnnnnnnnntatttaaaatttcgtgaaatcgtatttttataatttttgttgtgaaataatccctatataatataataattatataattaatggaaaattctataaaaacaattgaaaactaactaaaaaaatacattccatcatgggctttagattgtttttcattttaggttttatttggattttgaattttaattgagagaaaaataaaatttaaacaattaaattatctcatatttggattgaatcaataaattaatattttatttatttattaaaagaactttattttaagtatagcataattttatgggccagcttttgaaaaatgttaaagatattccctagaacggaaaaaaaaaaacaattaaaaatcagcttaattattgaaaaacttgtagagaaactacatttaaaaagtaaaattggcacaataatccaaatttttttttttttttaaaaaaaagtttttaaaaactctacaataaatttatttgtactaaaatttatttatttattatatattactaaaaagtatttaaagaaattgatactatattaataaaataaataatattaatttgttttaaaatatttatatttattaaattttttacttttttataattattatatgttgttaaatcatcacatgcatcaatctagaatttcatgatatatgatatgtttgttttacatgtcataattgaaatttaatttaaaaatgctataaaatattttcaaattatcttttatcaaatacatataaatttatatttaaaaatataataataattgaagatataaaaaataatttttttgtataacat

SEQ ID NO: 99612 - DNA, 1139 bp, Cannabis sativa
aagtcctataatatgataagttttaggtagaagaaaagaatagataccagttgtgttcttaaacgtgcttcaaggttttgataaacttcagatgatgggtttaactcaatgagcctattaacatcaaaaagtgctgaattgtattctttgagtgtcaccagggtctgagccctcagcatcagagctccagtatgattctgatcaagctcaagaactgaggtgcattcctctgctgcctgataaaaaaaaaaatagggtcaggtcagactcagaacaaggtcactctgagaataaaaattatgtataatataccaaaatgcagatacacttacttatcatccctatgtattaaagatattcatatatatatatatatatatatatatatgcatatgtttcaactcaatgacactatcaagtacctttttctctgaatgaaaatttgaaatttacaatataactcaataaaagattccaaattcaataactaatagaatagtaagtaaaattgcctaaaaaataaaattgttaaaatcccaaagattgagaatttattcaaaaattcataattatgattgaaccccagaacgattattgagcaataacactaagaaatggagatttaaaacagatttttaaaaaatatatatatgataaagaaaaagatgaaccttattgaaatggtggagtttcaagtaacaagcggctctgttactatgaagggcaatcttctggggtttggtcttggccatggttagagcttcagtgtaaaaccctaacgcctcttggtaccgtccttcccggtacatcaggtgggccttctcgatcttgttcgggggcggcgatgccatagtcggcggaggactacgaagcttttggaagctcaaagctaagatttttattttttattttttgtaattgaatttgaatctcaaaagagacataaaaagaaagagaaaagagaaaagtttacaactttgaattgaatgataataattgcgttgtgattagagacagaagaagaagaagcttttgatttttgattgagacaaagtttagctcttttttatattattttatttttaaaaataaataaataaataaaaatggtatttttatatgaaaattaaaaaaaaaaa

SEQ ID NO: 99613 - DNA, 1973 bp, Cannabis sativa
tttttttttttttttttggagatgctgcaaagtattgttttgtttctctttgaagcagactgagatcccaagcccccagtcccactcaacaaaatggactgaaaatcatgggaggaagggaacagatgggatggtcggtacgagaagataaatttaatggcaaattacaaaatattttatgaactataacacttacttttgacctttttttctcctaatttttcaataggtgttaaattatgtttagtttatttttacttttccaattaattatgtaatcaggtacccattgtatgtacttcactacaattatcaactccgttcatattataacgagtaggagagtaaatcaaaagtaatatacaaaaaaaaaatgtaagtaaaactaaagagcaagtacattaattcaagaaaaaatttgctatctttcctaaatataaatttgatgaatagtgatacaaactttcataaaatttaagtacaatttcaaatattattaatgagcttcttattctattgtatattgttcaatagttacaaattagcaacaccacaatataaataataaaaaagggcctattaaattgataaataattagagatgaaaaatctacaacttaaggtcatggacccatccatgattgatctaagtggaacagttaagtgagcccccaaaagacaagaaaaataatggtgggagatttttactgaacagagcacttagcacagatgacagaacaaaaattgtcagtgacaaaatcatgggccatattaatgaatcatgactcacatgatccttcttttccagcagaaagtgtctgataaagaatccaacgatgctttacaactatggcaccacattcacaatatcttacaaaagatatgaccattattatattacatgccaatatgaatcaaaaagggcaaaaagaaaaagtttgatgcagctgaatctttttgtataaattaggaagtaatacatgtatgtatatagccttgtgtatatgccaagagaatgtcaaacattgtcatgatgaaactttgatatatatatatatatatatatatatatcagaaacaatgaaataggagaaatgaataaagtgataaataattgatcagactgagaaaagtgctctatgattcttttgacaatagtagtttcagcttatattttggccttactagactttttatttttatttttttatataatcaacttaaagctctaaaatgaggccgtgtgaggcattggcagataagtagcctttacaggagatgtaaaagcaaatgtcaaaatgcacttactagctctcaatatcattacagctccacacaaattactacctaaaagacaagactcaaatgttttcttttcttttttttttcaaaaaaaaaaaaagctgatttgttgagaaagaagctgacctttgtcattaagtaatcttgctggggaaaatacctaacatattttgaacctttgagataatctatcccctcataactcaatctctatgctcgagtgtgctatgattatgaaaataatgaaagaacaagagactaaattttgttgttttaaaaggttagaaacttctaccaaaactatccttgaatcacaagataatctacagaaaatcacattttctttttcttctgtaactctatttttacaagagaaagaaagctactatatagtatgtgcatatacctttggtatattaagctcacgaacatcatggggtccattcacatttgcatttacaggggaagagaccttaccaagagatgattctgaaccagcatttgaaaatcgaacattctcaggagagaagtcgctaccagtgccagtaggtaccccgccgccacccccagaatcagcattaactccatgaaaagactcccctgaaacaagtgcttgcaacaactttggaggtggaggtacagtcacctccacaagtccttccaacatcttc

SEQ ID NO: 99614 - DNA, 1988 bp, Cannabis sativa
atgatgattgaagatcttacctaattaatcatatgcttgtttttgaattagatacttatctaattaattttaggtgggcatattactctgacgattaatttatctctctctctgtagcttatcgacagatatttggccgtggttagggtcattgatcatagtaagtatgtgggggataacttgggatggagaagaatcacaatgggagcaaggtgcaaccattaggggctttctggttttgtttttttttttcttttcttaattagttttttgggtttattttttatggaagttttttgggttttgttttgaatgaggagatggattttgcttggcagtggaaaacttcttatgataatacttgaatttttgggtaaagtgagattgatgaaagaacaaaggagaagatggatagagagaataatgatgatgaaaatggaataggagtggaagggtagggttgaaatcaggagagacatgactgttttcttttccaatctgaggtttgatttcttctgggcaatgagaaggactggggaagaagaaaaaaaatacaaaatattaatttttaaaataatttatttatttattaatttattttaattttaaatggttttaaattaaaactataatttggaccaatagttttttaacatgtggtattttgatcagctataaaaaagactaacttacaagaaacttactattgccgctatttctcgagattagatactaatgtacatcaaagtgaatttattgagacttttgccgcaaatttttcttataactattgtacatcggataaacagaataaaggcaaaaaaaaatgttaattcttcctttccaaaaacatataaatgagaataccataaaaattagtgagaacattgggcagctaaaaacacaccaaaatttagttttgtggcggtgaccctccactggcactatcatgtgcatttccatgaggtgctgcacccgagaacatctgcatcactgatcttagagccccagttagatcctccggcatttgctcgccgaaattcaagttgatgttcccaccaatttgtattccaggatcatcaaatccattgacgttatcatcgtttccttgcctgttctgagtatgttgtccttgggggtatgcatttgtagccaaattcataaacatattggtaaaatcagcaggaagaccagttgtattgaagggcatagatgcgaatggaggtggagcaccatggcttcttggccctcctgcagactggttatggtgatccgaatcactttggctggatgaacttgcactctgtatggtgtatattggggaatataattaaaaattcaagcaaaaaagtaaattataataaacaaaagaatgaaaaatgataagttcaacatatagaaactcaaataatatgggcgtgtttgaaaagtgataaaggacccgagttggaaactcaaaactacaaaatgttcgtgtcaaggaagcataatggataggtgactgcttacccgatcatgtgcagcttgttgtgtccctctgattctttgctcagccatctacggttatggcaggaaaaagtagtcagatgaagtagccttaggtatatacatatatataaatatataagcatcttgagtggggacatcactttttctcctactgtaaacatttttcgtattttaagaaattatttctctttttttatattacattgtatattgtagttataggcctcccgaccgaccgttttcaagaaattttgagaattttacaacgtcaaaataaagttcaaaataacttgttgcacccgtgtaaaataaaaatagcacgcgtgcaattgaattattttcggtactgtaaactatttaaaattttttaaaaacaagcagaaagccagtatagctctaatgtacaccatcaaattaaaaaaaaataatttataatttcttgatatgccaaaaataaaaatacccctacaataaaagca

SEQ ID NO: 99615 - DNA, 1623 bp, Cannabis sativa
ttctttactaataaattgttttttctctattttaattacattcttaatcgcttattaattgactcattatcgttgaataaaagtgaggtcaacagataatattgtaataatcatgcatattaaagtatattattaattgttcatggtaaaaattcaattaaaaaatatgatatttattattgtacaaattttaacacaatttttatcatttatcaaatttgatattttcacacgtaccatattgaataatcttactattataaaagtgtgagtaacattttgatttctcttttacaatattattttgtaaactaatactcttatgataatattttgaaagtaacattttagtataaaattactttgtaaaaatttaattagaaaaatattatttttttaacaatgcttaagagtaggatttgaccttaaggttttagtgatcaaagtccatagataatattagaacaaaaatatttaatttgtatttcatgcactaatattaagcttaagaatatagttgtagaaggaaaaatgtagtttattaatttcagcataccaaaaaaaattttagattaattttttttacatcatcctgtacattgaagttatttaggaacacttctaaatttttacaaaatttctaatagtttattataccgaaaataagattcaaatattttgttgcactattattttttcttattaacgtggtaactaattggttgaatcttaattttacaggcagtcctaaatagctaaaatgtaaacgatcataaaaaaaactaaaaaacttttctagatactgaaatagataaagggattaaaaatttaatagtaatatatctcataagaagcttttacagtgcacccatgaaaaaagggtgcaccaatgcacccgaaactgttttgactttcaaaaaaacaaaatttaatttactttttttttcatgagtatgttatacttatttaaaacatcctacaaaattttgaaaaattcaaagtagtttacaatatagaaagtagtgttaaaaaatttttaatatgtgaaatttaaattacatgaatttttcttacaattaaaacgataaataaaatataatatggagaactaggcacgtgcattgtacgtgttagcttcacctagtctctctaaataagagagaaaaacctccactaaaaaaggttgactggcttgtgaaaaaaataataaagaacaaagacttaggggttgtttggattcataacttacaaattatttttagttattaaatacaaaaaaaaaaaaaaattaaaacctaatagggaaagtttggccaaatttttaaaaatcaagttttaaaaaactagaaaataaaagacatcaaaatgttgttttcaattttaacaattgttttttttctctaacatattacattttatatttttgctcacttactcagtgacgccacgcttgaagcctcattgggtctttacacggacagaataatgtctgttatacacaagtatgtcactctggctacttcttggaatgatgactgaccaaaccaacaagagtgttttcaggatgctttgtcctcacttgcacacttcctggaaaatgttcctaggaggtcatccatcctg

SEQ ID NO: 99616 - DNA, 1413 bp, Cannabis sativa
taattaatcatgattaactgctaatttccaaatcaaactaagcggtctttacatttgcactgtcgtttcaatatataatgtggtggtacattaaaaatgccaaggccttaaaaaacacaaatcgcatgccgataaaaaaaaatccttaatactcaaacatgcaacataagtaagttatagttgttgaatttgaatcccaacttactatgaaattttctttcctctcaaagtcttgcactttaaaaaatttcaagatactatcatcaaattctttcatagtaaacaaccaaatgccccataacttcaacttgaaacttcttaaaaactttgtgtgtgtgcgtgtgtattgttgacatttgtatctcaaatagtgatggagatttcaaagttggatttttgtgccatgtgttaaaatctgcataaacttctttctcttgtctgtcttgaaaagccaccttgtactgatcaacaaattctttcaatgaaattttcttgttcacatatttatcaaagaaagaatttatactttctggtcgttgagttgtagacattccaagaaaaaaagtatctttcacataagttggtatccaatacttgcgatcttgaaacaagatatcaagtcattcattatcttcaagctcaaatgtttcaatcatatttttccaacttttttttaaattcttcttcggtctatgaattgtaaacacaattattaaatactcttatgaaatttgcattttcatttacaaaatgcccaatgttttcatgaattttctttaatatatgtcataaacaaaaatgatgctttaaatttgtaaaaacaattttaattgctacttgcatagctttgtcttgatcagttaaactagcacctaaagcttttccaaccatcgctctaagtcatgtttgcattaaccaaacaaatattgaagtttcttttgcaagcaatgtacacccaaagattgtagattaaaaatgattattcactccaataaatcacattttgtattaatttgtaatataagttgtatcaagtgagataatatcactaaaagatttgtaatcatcacgacttgttttttgttttgaaagagtgatcagaatcacatatagacaaacgttgacgtaaagggacatccaacttgcaagccaattgtctaactgatagacatataaagtcagatatagatcgctccgaaacaaagcgacttatataagaccaagttaccctaaaaatttagacaaaattacttgagatcattctaaaaagacacccagtctaaatgaacaaaataagcaaacctacaaaaaacattaaaatttttgtagtcatcacgacttttaacatctatccaaaaaatatttttagacgttcttccaagtgattcttaatatgcttttccatgtatccaa

SEQ ID NO: 99617 - DNA, 1048 bp, Cannabis sativa
tactatgctactattacttacaattcaaatggttttataaattcagggagggctgtgggacggggacgtggtcgtggccgtggaaggggtcgtgcacgtggccgttagatacattacactaatttcaattctcaaggcacatggttatgtaaaaacacctatgttgtaatgaagaacttattgcagatcttttaaggtaccaaaggagtgacaatgttggttactccatttagttgtctatcgtgggtgattttgacactaacatttcttgcttgtagtgttaaattttggatgttgattcaacgagaattagtactcccaatattttggctggcagaggttcattgatcaacctgccccattaccaaaatcatccattgatggattttttagtgatttatcccatacagccatatcaaaagttatcgcaatgaccatcccaagactactccagctttggtaattggcttaatatttgtttgaatgaaatgtagatcgtgtctgcttgttagatcatagttttatttttcatttttcaacttcctttttctgtggaaacaaagccaagcctaactttttgaagttgacaagttatgaagctgcatttataatagctagttacttaccaatagcagtagatatgttacactatctttttataactcacagtgaatttgctttttaacattaaatcaggagttgattacttagcgatcagagagtatagagggaactgaaagaaagaaaactcttctatagttaagaaaaatgatgtaaaaaaattagagaaaaatattttgctgatgagggcatttacttataattataatataaggttaccaaagaagcttggtgtgctaggggttgttgtgctgttgaaatgttaatgatttaaagcttgttatctgcaacccgtgtcttcttgttatctgcaatccgtgtctacaaataatgaagctaattagtaattttttcctctgaattttgacatgtaataaatcgtgttctctgaacttttttggcagttaaaaattccacttgaactatt

SEQ ID NO: 99618 - DNA, 3214 bp, Cannabis sativa
tgatgataaacccagtgttaaattcccgagctcagcttggttaaaaattggagttgaataaaattgttgctcctgcaatgaactctcaaataatccaaaatcggtaaaatttgagccgagcggaggagactctgatggtgttctatataagaactgattttccaatggcggaccagactgttgttgctgttgaggaaaagattggggttgctgctgcaaaaaattttcgaattgctattgtgacaaattttggaattgctgctacgaaagaaggttgttgttgttgttgtggaggagcgacataactctgagaagatgaaccatcagacgactgcggctgactatacttttgaataaagttctcaaatcgtgggttatataaatgagcacgttgttcaggcgtcaaattaccctccatgtggcacgcatagttgagaatatttctgccacaatactcatcatttcagtagttggcggaggaggcaccgtcgactgactttgagtgaatgacttctttcctttgcccttgagccacaagtattgcaagtctcacccacaagccaaacaattttaatttgttagtttatggtttgttgtgagttttaatgtttattttttttaatgaactctttaatattatgtttgttatgtttcttttttcaatgttatattatgtttgttatgttttttttcaatttttttttatcttagagtcgataatatatcaacattccatcgatatattttcgacacggttggtcgactaaatgttgacatactatcgacaacatgtcgataaattctcaaataacctatgaattttaatttgctttctaatcgacatgatatccacaaactgtcgataatggtcatctctgaccttttttagcaggtatcgacatagcatcgatattctatcgataaactgtcgataacatctgaaaaacccagactttgacagaataccagatctgcaagatctctaccatttcagactaaaaaacaccaattctagcaaatacgacacatataacgaaagcaaactacataaagtttaacaaaatgcttaaaccacaacttacccattataatggtgtaagattcttgagtgagattggggtatgctccggttttccaccaccgcctaccgagaaacaaccattcgatagggaagagagagagagggacgagagagggaagttttttcagttttttctagagagaaagagtggtacacgagagggaagagagaggaaagttttttcaatttttaacaattttattttttttaaaaaaaaaagtaaaataaaaagttcatgtaattaattacattaatttgtacaaattagtagagggtttgaaatttgatatttgaggttttattaaggacaaacaaaaaatgaaattttcgtatatatatccatacttatagtacattgtttttattatatataattcataataataatgatgagagatattgagtaatgaaatgaaatgagaatatatgtatagctagagagagaagagagagagagagtacgttgttatttgtaattgtattgtttataataaatatatattcttttattctttatgtatagcattagcatgcatgcagtagcagacacttgtaggtccagactctcagagatatcatctattctcttctgaattctactacactctcatctctattatctctttctcattaatgctcacctctttctcatctattttcaccaccaattaattatattaaccaatacatacatacatatatattaattactactattctaatttctacatacctacctactcccatcactatatatatatatacaaagattgttattaagtgtttagcacattctaaaagtagcattttataaaattaattagtcatattttataaaaattatgttttgaagttatataagatctaatatttaattatatcaacactaatataatattgaaaaatatgctaggcactagggccggtcctaaaacaaagtgggccacaggcaaaagaaattttttttgacccttatgttagaaaaaaatatggtatttttcaaaatcagtaaaaaaattgtataattttaaaagaggaaaaaaaattttaggcccctgggctgggtgggccctaggcacaggcctagcccctatgcccagggccaggcctgctaggcactaataatgcattttaacatttctatatatataacaaaaatgctaattattatatgcataaaactacaagaaatgtcacttttaccagcacagttcactactgcgctggtaaaagttacttaccagcacattttataaattggcaaaaaagtcaaagatttaccagcacacatttgcagtggctaaaatctaacttttactagcgcatttacgcgctaggaaaagtcatttttgtcagcagtttttattaagtgctgacaaaaattctaataccaacgttgatttgctaaccttttttgccaacacatcaaaagtaaatttcattttactaatgcaataccaaacttttgccagcacaaaaatatgttggcaaaagtgacatttgttatagtgaaaaaagatttagtaatacttttaaaagcagtgtaacaatatattatttttaaagcattaaatattatcataagggtacttatataagtgtcatcttatatactaactttttaacaactatatctaggagacaacactattgccttttaattttctttagttaaaaaagtgttgctaaaagttaattttgtagtagttgatgaatagagtaatcaaaaccaaaaacgattaaagcaataaataataaaatcaacacaagatataaactggttcaagtcttatagatcgatgtgatctatggttctagtccaattttagaacaaccattgaaattttctttattgattgagtaagaataagatacattgcacattaattatctgttggattctctcaaagtgttatctctcacactctcattcaatagtctttttcatttacagaagatatttcgatataaaacccaaatccaatctctctctctctctctctctctcccttccccttcttctccattcgtgtagcaccccgagctcaggccatcaccggcattaatagtctaaatggaccctaaaacctcaaaaccacttcgagccgccttagctctctctctctctctctc

SEQ ID NO: 99619 - DNA, 3513 bp, Cannabis sativa
gatcttacaaaattactagattttggaggtagtttaacatttctactgccacacggaaatttttacaaaaatattgtcctcaccttaatttttttttttatatatagtacataccccaaaatacatacaaagcctcaattttcaacacctacggtccaaactactagagcaatactagaacaaccaaaaaataacgattattccaatcagaatgtaagtattcaagattctgatcctcaaacaataacataaaaaatcaactaaaacaactgtaaaataatagtaaaactacaaaataaaataactaaataaaatcacaaaaaaatattatacatcaataactcttttgtcaatggagactttcagaacatcacgagaggcaacatttaccttagaaaacttctccttaccctaaatacattaaacaaataatttagaacaaaaatcaagtatataatactaaacatcaaatagcacatacagaacaacaaaacatataaaatttaacaaaatcagagaatgatgaacaaaattctaaattgatatttgagattgaacatgcataaattaaaaaaataaaaactaaagaaaattttgaagatgatggagatgtgaagagcaagaagtaatggtaaccacaattgaaaaaacgtggattaatatttttataaatgaataaaaaaaaatgacaaaaaaaaagcttaagaataaaaataaaattttgaagataatggagatgagaagatcagtaagtaatgagtttgtgctaatatgtattcaactgtatttttaaaaaaaaaattgactccaaagaacaagccatataacaacaaaaaagcagttgaaaaataataaataatatgcatacaataagaaacaaaagaatacgaaatacataacaataacaaataaattaaaatgagcagaaaatatagatcatagaaaaaaaaaaaccagaacatgtacaacaaaaaaaaagaaaaaaaaacctaaaacagctgaaaaacaacataaatactttcatcactttgggtatcttaaaatcttcttcatcaagttcgaaatcagagtctaaatcttcaatgatcgatttcaaatgtcttgattttctctttttcagagaataaatatctgatttccttttcaaaactataaaagatgtagggctatggaggttttctttgaaatatttcttacccattgctaatttactagaagaagaagaagaagatgatttttgtctttgatgtttccaccttggctccagagttggtaaacacagaagaaaaaaaaaaaaaaaaaagaccctagtgatagtccatcaggttactttttctgcagcaaaccctaaagtagggctaatggacccagttttccccttaacccgaatgcgggtatcgaaggatcaaaatcctgctcgtgatatataactcaggcgggtcaccacttcaagagttaccagctagacgaatggaacttaatcaagaatggtgcatcaaatgaccttctggcaagaagtgttgagctcttccagtcggttaatgtttgattttcttattttattatatcttctttcttcctttttttaaactcgtattctatgtaggcttctttcttggcgcactttgatttccaagccaatcaataacattcaaatcatctatccttggagctaagtaaggccaatgaacatcgcgagctgctggccacccaaaagaatgatattgagagggagaatacgtgcctaaagaagaaagtcgaagacttggagaagtctgagaaagacttgaaggcagagtttgaatccctgaagaaaaacttattggaaagcactgagagagccgacaatgcagagaagaaaatggatgagacgaaggaggcccttgaaattattgcttgcgagagggttaataacatggctaagcattccatttatagcgcttgaatagccaatatggatatgaacctcaatttcttgggtgtaaatgccgagaagatgttggcctagtttaagaaaactaaagaggcggagcgaggtgttgatgaggagggggaaaagttgaagctggtgaggaagaagatgaagtcatctttaagtctcccactatgtagatttagtgtaattatgttcaacttttgcacaatggccctcttgctgagataatagcttgccattcgtggcacttttatttatgtaattaatttcatattattttttcggatggccaatttagatccgttaatcacatttataatttataccattacaatatagatatttcctccacttttgtgagaaattttttatccgagttcgatttttcacaagttgtttatggaccatcgtctattggtatgcttatttaatggttacataatattttgtttaattttgtcttaggattccttactcattatttcatcaagtaaagagtgaacttgaatgtttttaaacaaataatttcttgattgtttttaaatattttttatttattctttgcgagtagttaattgtctatttgcaccttagcttatgtattattaagattcactctaggatcttgttcataatatatgttatatatgtgatttttttattaattaaactcgcattaatgttggcaagatttttaataatctcattttttttataacaagtactatttttattcttgctaataataaaattttaatattggatttttttgttgttttggaccaactttaaccgaatattgtatcttttgtaatttttttatttttagaatttcaattatcttaaatttgttggataaaaatatgtgttgcccaagtaattttaaagtatactttatgattacctgaaacaaatataaagaatgaaattctattcaaacataaatttaaaaatttacatattctcaggataaattagtatttataaatatacaaccattggtaatatggtctcagatgttcgctattccaagtattttttaccagcaagccatttagtcatgctaatttataaactcttggtgctattatagcttcaacaatatatggacctttccaatttgggttagatagtcatgctgcaggatgcgaatactcgccttaacaccatatctccaatgttgaagagcttcttgtagagtccttttttgacaatttagatgccaaaatattttttatttatggtgagatttctttgtgctatcaatctgattttatccctttattattcagttttattgctcttttctatcttaggaaaaattaatttttcagctgaactttttcttgtatggaaacttcctgtaagcgaagaaattctcttatagaaagttattttttcaggaaatttttactattattattttccttaatgagttcgattgtgtcttgataagaccagatcaaacacactgtttatggtaggtatcaagatccaatacatgatcggacacatttttggcaagtttccttttctggtctgatttgctgcaacagaatctgtttctgttgctgcaa

SEQ ID NO: 99620 - DNA, 1286 bp, Cannabis sativa
ttgctaaaatttgacattgctttaacattaggtcgatcctttattttcttattctatacataaatagttataaataaattaatttgtctattatgaattaaaatagtatatatgttaatttggtttttgttggagtttactttaaataacgtagtctaattttaggcccaataattttattttatttatttttcttgcttttgcaaaaggttagtagtgttcattgtctctatcaattacactttggaatttgccggtgactgacttggatgccctgtttgtgaaagcgtcccaatacatttgattaaataaatacaatcaaagttatttgaaaaacactatcaaaactttgattaaacaaatttggaccaattttttgtttttcttcaaaacaaatatatagatagatagaaagagataatattgtagggtctctctctaataattcatagaagggaaggcaagtactactattactatactatgggccttttggaaggactcaatgcatggcaagagtataatggagccccccaagctgaatcatattcatagtataaatatatatatatatatatatataaatgccagaaaatcagcatctaagactttagtctaataataataataataataagctttatttcttattaaaaactctgccagagcagcaaaaaatatcacaatcttaactcaaccccacctctctatcgtattatgatatgtgacacatcaagtttaatgacctatttttcacattaaaagaaaataaatgatgaacctcccaactgggtatgggctacttaagtcaaatattatttacaaagaaatttaaaaccgaaattttgcaatggcagtacgaactaaatattattacattactactgttttaagggtttcccataaaaattcaaaagaagaataagaaaacgaaaaaaaggctatgtataatgggtaagttatgaaaagacaatatgaaaagagtagcttaattaactgcatttagcaatgatatgtaataattagttaggggaacatggaatagaaagatcattattatgatttaacacaagagaagagaattagttaccacactcaattaattactttattatttcaactcttttaaacaattacaaaaacaaattcgaaaaaataaaattaaaataaaatcgcccctagctaagctagctatgtagttttgtaatcattgcctagttgtatatatttatatatatataaaaaaaaaacaccccaaaaataaaaatcttcagattctcaaacct

SEQ ID NO: 99621 - DNA, 1974 bp, Cannabis sativa
tcatcagtccatgaagcagctagagtgacgtactcgtgtataagaaccattcattccgtgggtgtaagggcccaatggaagcttgaagcggggacgttacagttacattaaaattgaaaagagttgttttagagctaaaagtttcactagttaacagaaatgcttttggagctttaaaagctcaaaaacagttatatatatcactatcccaggaacaagaacaaccagtctaggcaaactaatatatgttgtctattatactatatattctaaagttagggagtattaatctagctaataagaaaaacaaaagtacaaaactagacataccattttcaataatagcatatatataccttgtagattaaatattattaacaactaattcataattataaaaaggttaaaggaaaaaagaagaaattaaggtttaggtggttacggctcacaaaactccaattgggatcatatataggtacatacatggctcatggaaggagggttccactcattaagtctagctagttatacaaattataagtcaaaatatatgtatatatatgtgtacataaggcaaatccaaatgcaaaagttatatttatgttggtctattttgatcaacactgtttgatggtccacaaacacagttatttaattcataattttaattttaatacccaacccaacctatgtatcctttgcttatacacataactagtcaactaccccttttctcagacagtaccccatgttaccttattctctatgcatttttgtttttcttaatttgcagttgacaattactcttaattaacttaacccaattttaactttacattaacaaagatagttataaaggaagcaatttcatcgagattggtatataagcatttatgtctctgattcagatgtccatcattgttgattttttttttttaattttaaataaagggagatattgtatatgtatgtaataaatgtgaaggatatggtatattagaaaaatgcaccaaaaaaaaataaaattaatatcttatcttcaaaaagggtatcacaattcacaaaaaacaatttgaaacgtttcgttttaatctctattattttcactgattcaaatctaaaaactgtaaaaagaaaagtggaaaagtatgtaacatttttaaggcagtaaaaaaattaaaaagtagataaaaaaagcttttgttgtttatcccactgaataataaaataattaaattcaagaaattgtgagtttcaatgcaaacggttgtagcctacacgctcttccatgattaaacctttggctgctaatatgattggcccactgacgtcattaattcaataaattctacttattaatcataaaatttgggattaattaaattttctttctttacaacaaagtcagtgcaaatctcttccctcctccagcgttattcccgttaccgtggtctgtcccgtacactaaaattttttcatttttttttttaattttttcttaataaaataaataaaagaaaacaattttctttgtttaaaggctgacaaaagttatttatttatttattaatccaagcctttgattattaatctgagcacggatgaatctatgccacgtggcgaagactgcatgcataaaagtaacgtacaccgtcgccacgtagagatgattttgacacgtggcgtccgacggtggcactttaataacgtgttaattatgattatggtaagccaaccccctcgtacttcatgcatttacctccaattgtccaaaaccagacgtgggttagtggcttggatctaaccgtaatatttccccactttccgaggtcaatttcgtcagaccaaaaagtaccacacttccagttttattttaattttcggggatattaaaaaacggcgtcgtttcaaagaaagaaagaaagaaagaaatcctaacattctccctaccctaagccaacaaatatacctttt

SEQ ID NO: 99622 - DNA, 1930 bp, Cannabis sativa
tatgcggtggatcgccgccgggggcgtatgtgaagtccaacaaagagcggatcttcttgcaggcagcgagaagttgcggtaggctgaaagtgaccgacccgaatccagaatgggtcatggaggacatgcccatgccacgtgttatgccggacatgatactccttcctacgggtgacgtcatcatcatcaacggcgccggcaatggtacggcgggatggaacgacgccgtaaacccggttctcaaccctgtgctttaccgtacccgtaacccaccgggtagaagattcgttgttttgaacccgaccaccatacccaggatgtaccactcttctgctcttttactgccaaatggccaaatcttagtgggcggaagtaacccacaccggacgtacaacttcacagctagaccgtaccacacggaattgagcttggaagcttaccatccctactatttggaaccacagtactcgaacatgaggccttcgatcctgaccgtcgaattgagtatgcagaccctgtcgtacggccagatgttctcagtgacgttcgtattgcccctttaccgtccgaatccggggatctctgttgggctcgtaacgccgtcgtttacaacgcactcgtttggtatgaatcagcggatgttggttttggaggtgggccggttagagcacttgtctattttcgcttacaaggtctcggcccaaggcccatcaacaagcacggttgccccacctggatattacatgttgtttgttgttcattctggggttcctagtgaaggtgtttggatcaaagtgcaataataagaaaataagaaaaaaattgtacttttcgagtaggctcctctcctgtttgtaaatttgtttcaaaattctttacttgctatctagttttgtttgtttgtttagatcgatttctaaccactcatcatgaaatgtttatgtgagttttatagattgtgtagtactttgctttttggtgcaattgaattattttgtagttttttcgaaagtgatcgatgattaaatgagtatgtattaccagacatataaccatggagagttgaaacgtttaacttccttaatagtattattattacttttatcattgtcctgttaaattggcaaatgtgctttttagaaactaaaccgcgggggatttttcttaatcaaatttatatgctgtaacggcaaaaaataaacaagtgcctctaaattagattcatcaaagaaaaaatctaaagggaatataattattgtttctgtttgtttactcttgtatccccatcaccaagacaaagattttgatgcaaattagaagatataccaattaaaagtcgattctatagacttcgttttagaacatccttgccgagactcgatgccgtcgcgaacatctatagcttgcgtagtataggtggaggagttggattctacttgaatagcagcaataacgacaactgcaatcgatgatggtggctgtattaatttcaattgagtggagatcataatagggactacattttctactcagggtgattgaagcagaaacgttgaaatcagatacgtatttttctatttcttgttttcatcatatgtgttaatttttgttttaccatgtaataattgatcttgtaattttttaaatttggtttcatttatatatcctaatattttatatcgttaatgtggcgttaaaatgaacaacttactacatgcgacaattagttcttcaatttttttttttttcttgcatgttctattaaagtcttatttcagtctgtggccatggtgattccggttttattcatgcgcacatcttagtttttcaaagttttattataatttttatagtttgatgagtaacaaacagcagttaattatctcaaaaaaaaaaaaaaaaaaaaaacaaacagcagttaattattgat

SEQ ID NO: 99623 - DNA, 1175 bp, Cannabis sativa
aatgaataattcattgaaaaaataaattatctaattaaacaattttttcatcttaagagagtatgtatagataatctatatgtagtatattggttgttcgacacatctaaaaatctaaataacaaatttactaaatcctcaagcaatcagggacgggcttagaaatattagcaaggaacaaggacaataacataaatattaaaatattaatttatatttttatttattttttttgacaaagtgattagaatcactcatgaatttacgatgcagacgtctggatcctcttcgaaccaagatagctcatcgtctaactgcagagcatgctttgccatgggctgctaaattgtcagagcgaaccacataggacaaaactgccccctaatatttagacaataaaactataaatattaaaatattaatttatattttaagagtaataaataaagagaaatcataattttaaagggagcctaagaaaataactatgttatagaaataaatttaacatcacacaaaataacacacttaaattacaaaacaatatctaaaatattactattatgtaaaatagtaatattgtagcatgatgattatgatatgcactaccgatagaaaataaatttttggattggaagaaattctttttaatacgaaatgtattgtgtgactcttagtaataaaattagttattatattaaaaaaaaaaactaaaagtataaatttatcatatagttaatattttttttactgtaaataataaaaatattatgttccattatatttggtaagaaaataaaaaaggataaaatagaagaaaaagagatatttaatttatatttgagatatttaaatagatttttttggtggacaatctatgaaagatttatacatataagacattttattaaatgaagaaaaagacaagaaagctcacattttctcttttcttttctagaaacatatatttgatactttaacaatagtacctttttatgcatagatacgaagatttcagattttttttttgtccaacaacgatatttatataaacatagatattattaaagtaatttgctgcaaaacctcctcaactatcaatttacttgcaaaaaaccatctaaccttatattttggtgggaaaaccctctaaagttctgttccgtttacatttt

SEQ ID NO: 99624 - DNA, 1064 bp, Cannabis sativa
  modified_base (436)..(438): a, c, t, g, unknown or other
aaaaaaaaaaaaaaaaacgaatatgtaagtttttctacaagatagtaactaagaataactaatttgttacgaacaaacactaactaaaaacaagcaacaaataactagtccactactaaccaatgcaacttattaactaactttaactacattgttatacttaagatagattttgggagaatatgattggtcatataggacgtgaggagacaaatcaccaaaagacccttagagtagggacgtactcactttgttgggtgtggggcatgcaaggctgtagtatccagtgaaaaaatattacattagcctagtttgtaacgtagtattaagtcttatattgtatactaaaatattatatttttaggtgtccataaaagttaatgccacatataattttacataaaaagattgtataaaatacaatttaatataatannntacaatacaatacggtgtaatacgccgtaccaaacgaactctaaaaaattaaatatatattttttaatttaataattacacaataaaataatcaaaaaaatctcccacaaaattaatgaattaaataaaaaaaagagaaatattttttttttacagtaactaaagtctaaatctcgacatagcaaaaactttaggtgaatttaaaaattaaagactcaacttgacataaatattattttcaaatatgaatttgcttagaataaattttactcttagctatagtgggtcaaatttttggctttagaaatttaagtttcatgatatatgtcaaacgtttgaatactctatatatgtagtgttttacagaggtggaaaaaagaggtttttggggagtgtgatatcaagatgaaacttttggagaacaatctccaggcaattcagtcaaaggaagtcgacgatcatgccgttgaggaggaaaggagaatagagaatgagatcttggagatattacggcgtcgggaaagcatctggaaacaacgctctagggaactttggctggccaaaggtgaccgaaatacatccttctttcatgctgccacggtggtgagaaaaagaagaaatcagat

SEQ ID NO: 99625 - DNA, 1686 bp, Cannabis sativa
tcctagacatggtttgacttttagccattttgtgtaatgcataaagatataatgatcttgatcttggtattgtacaatgttgtaagactgaaatgtttgaatctgactgtttttcttgtttggcagttactgtaagcgagatccaggccttatatgaactgtttatgaaagttagtagctccgttgtcaaagatggacttatacacaaggtatgcttttctcttcactgttataacaattattaatccaattgagtaagtggtatttgggtttataatgattatggattatctttctttgcatcattgaactaatctatgcttttatatgattattaggaagaactccagcttgcacttttccagagtaatgataagaggaaccttttcttagacagggtatgctactccaatatttgcaaaattgattatttaagttctgttattatgcattttccataaaagggttatagatttctatcaactgaaattttgagtggatgtattgctctctacagtgttcattattgtcaatagtttgaagtgagtgtcaattgtattctctcttaatgtgattaaacttcaaaaccacttccatagcctgctacacctaacttttgtgttctgtcacacttggtagacatttgatatttattttttctttggcagatatttaatctatttgatgtcaaccgcaatgggtgtatagagtttggagaatttgttcaaaccttaagtatttttcacccaaaaacttcagaagctgtcaagactaagtgtaagaaatatgttcaaataatgaatactgaacatcccaattcaagtttactgcaaagtgctttttaatgcaactaaccactaaaagtagtccaaatatgtgtgttgcagatgcatttaaattatacgatctcaggcacactggttacatcgaacgcgaagaggtaagtcttacattgctgctaactcttttggaatgatataatgccttttttcttttaatggtcctgaaaaatcactataacaataccttctaactagatttacttgaccaatgtgttactgtattctcattcaacagtaacgtttcttcaactagtcaattagctattaaaatcctttggttattggaaaacagttgaaggagatggtgcaggctcttttgaaggaatctgatctgaacctatcagaagatgttgttaaaatgattgtagacaaggtatcattagaaaatgattcttctaaactcttctcagtttttctggtttcggtgctcatccttcatgccttatcaaacagacattcgcagaagcagattcgaaaggagatggtaggattgatgaggaagaatggaaggagtatgtagagaagaatccttctttactcaaaaacatgactctcccatacttaatgtatgtctcaatttactacatttaatcatcccaaattgagcaaaatgtgacactttcttttggacttgacttagttatctgcttcttcagggacatatctctagcatttcctagctttgtgttcaactctaaggttaaggagtccgagctgtagcctcgaaaattcgtgatggcgaattcatcctggttaagattgacacagcgcgaagcaacttagtcatgtaccgaaaatctggctagtgaataaatgtaattcgagacaaaaaccagttccaaac

SEQ ID NO: 99626 - DNA, 1695 bp, Cannabis sativa
gttgtatttgccgtacaacagtataaaagtaataaattgggaaaaaacagtaatgggtgtaaatttccctaaaacaatctgaattccccaaggtagatccgggcctaagcccactaaaaaaaagtttcaaaatgatatgtggcggcaaagctgtaaaactttttaagcaaggcagactgaatttcagagagctcccgccataatctctttctccaaaatctcaacactcctccctcttggcttcgattcaggtacgcttctttcacaatttttcagtgtttatcagtattgttgagaaattcgatcagtgttttctttttttactttagatttcccgcttgttcctcaaatctctttcttgattttggtgaaaccaagccaatcggttttgagatttgggaggcgcgaattttagttttctctttcgagggagttagcaaattaatgcagtaagggttaggatctcgatttcgatatttgtctcgagaaatttaagcgaaatgattctttaattaattgtttgaataattgtgtgcgttgcctctgatgcccaaatctgtagtgtcttgaattctaggtttttgttagttgatttgtttatatatacagggattgagatctgggttttgaatatggggaggtgggatggtgaaaatactaatggcttaagttgcaggagagccaaatcactatgaaagctgctacagagaagagcaaaaaagcaaccactgttccgagagagagaagatcaggtataagtaaaactggagccagcaaatttagaaaaactagcgggcaaaattccaaaagaacaggtaagggatcaggtctttcagttcactaagttattactgttgaagtgtttttaacttagaacttagaatctgtggactaagttaacaatttttttttttgactaataatgtcttgtggcattctgcttattttaattctggagggcaagctgaatgttcttcagtaaaacaagacgagcatccgttaccatcgagtaaagctgaagtactgttagtgaagcctttcgatgaaactaaagggacacaggacttgtctgcacctaatctttgtcaaggaaagacatttcttcctgatgcgaagatcaagttgcaacttttccccatagatgaagtcactcgcaggggtttagaacaagtaaactcctgaatctcttttaaaaagcattttgaatttcatatgcgtttagatatcattcatttcgtgctgttattttactgtttggttgtgcatttaggatggactttatccctatttggaactcaccttaaaagctagaaagaagatttcttctgtgctcgagcacctcaataaaaagtggggcagctcaaaaattgctattggtgaaccggtgctttttccctatgatgtacatggtagtatgtctagttgcagaaggtggacaaagaaagatattgacatcaaagcaggagaaatctatgcatttattggaagtcctgcaaattttcagttaaggtataaggtctaattttattcaaaggtgtgtgaatgagattattttaagcaactgacatgatctctcattatttattttatcaacttataaggtacggttggttctcaacttctgattctaaaacatctgaagagcttcgtaaaccatcaactccttgcaatgttaatttgcaatctgaaaatgaa

SEQ ID NO: 99627 - DNA, 2073 bp, Cannabis sativa
tatatatatttgttgttgttgttgtaaaaaaataatccctttttcaatgtcagtattgcttctcttcaatgaagcattattctgaataagcatctgggcataaccctacatcccattccaccttgcccttttcttcatttcagcatctttgttttctttttcttgtggtagcacaataaatcagcataaagaaactttatcttcaatggtggatattagactatgaaatagaccatataagacatgaacattaatgatgataagtctatcatatatacttacaaacatgtttgttttgtttgattcttgagtcggtggattattttggtacaaagtcatttgtgtcacaatttgcaatctaaaacttgaaaatctcttgcttgaatactaaccacaaaaagagagagagttatattatgtcaatttagacaaaattatattatggcaaacccgtttccacgaaaacattgaagaagtttaacaaaatcgataaatttgtgttgaaactaatattatatagaagatgcatttactcctctaattgttaatttgtatacatcttatcatagaccttctcaggttagacagtaaaagtcagagaaaaacaatcactcattattaagaccaaagaatcgggtgaaaaagaagtagaaaaacttccatttggccatattttaaaacaaagtacttaattttattcatttccattaacataagaatgaataatgatattatgaatctcattttgaataggcatgaatataacctatcctaatggagaacgaatcaaatcagatggttctatttctcattctttctgacttgctcttacagaactaaggtcaaaaaaattgagagaaattagtcattcacaaccaccctaaaataaagagctttaaagactagaagaaaagcaactatacctaacaaaataaattaagtaaacttataatcaataatctgatgatcgagtcgatcccgtctactttctcaactatgctcccacatttgaacatagtattagaactaaacaaaactctttaggagtatccgatcaaaaatagtcacaataaaaaacaaagtgtcatcttcaaaaaggtaataacaatgtttactctttaggataagaacatgttaaataagactattacaagatgaaaattaattataattataattgaccaaactatatagaatgaacaaagaacaaaaatatggtccataagggtatgctcatacagaaggggaccagtcactttctctaccccagaaataattcaactcttctccccaaataagaggcagtaagatcaactttctgaaaacatgttttcgtattaaaattctgagacgttatcatttttgtctcttggacttaaaatgtcaacaacctataatttatatatttatatatatcaataatgacaaacttggtatatgttacaaattctgtaaacaactgagctaatactactaatgtgattatagactgtgtttcctttctctaattttgtttgatatattagtttctgtacctaaatttccatgatcatgtgagataagagcactgatgcatgcgaaactccccgcaaatcattctgtccagcatgtgaatttgtgctcgtcaatttagggtccctacatggaatgcttcatctgaatttcgtactaaatgaagagagtccgtgagggagtcaaaaactatagtcaagaggaggaactagatagcggtaaagataccgagttttctgaggtcaatatatatgtggagttaaatttggtgttgagaatcaggttgagtcatgacgagtaagaaattggactatacagggataaagctgctccattgcctgcaaatcacagaaatataaagaaataaagattaaacaagttgaagagcaaataagtactcacccgaaaagttttcataagtcctatatgaagatcaatttgtaatcctaagattggaagcaatacggggcttagacatgactacttattgtagtaaatgaagcacgtaagataggtcaagttcagaactaaaacggaaaaaacaatgtcataccattcgtc

SEQ ID NO: 99628 - DNA, 1614 bp, Cannabis sativa
tcaagaagcccaacaagaccaacactttgagaatgaatcaattgcttaatcaagttttgtttttgttggttgttggctcctcagacattccatgctaggattctatccattttgaagaggaggtactccccctcctcttatcttgactggttatggttcttgaaactgaatatcaacatccctttcttctgagtgttcctccagaatatcaaaagcattctcagtactggtctgccctcgctgatcgtgctcttttggtttccacccattgataacgagtttaaaaccttcaacatctgttacaatctcttttttcccctctactttcttctccttcaccacccattgctgctgcttctgtactcccaatttctttctgcaatcttcagcagtatgtcccaagccattacaatgtttacacaagattggcttccactcatacttaattcccactgaggcagtaaaaccatattcatcctcgaattctatcttctccacaagctcttggtgcatagaaacttcaactgacactcttggaaaggttagattctgcctttgtttagttactgcatccaccaaaattggctccccaatttgtcctaccagtttgaagagattattttgcccccaatatttcaattctaggttttcaagttggatctagatgggaactttgcgaatatcttccttcctgaagttagaatctggataccaagccttcattatcacaggcctcttattgaaaaaggtataacccccatttagaacaaagtccctgtcttctatggaagcaaaccttatcaggaaaatgccatatgaaatgagcccaactttatcaactttttctttccaaatcctcctagaaaatccttccaacacttccaatggaggattagcccccagaacgtaacagacaattgcagagttccaaaatgaaacctcctcttcgatatcatccattgttattttcacattaggttttccagcagtttggaaggatgaatttaagctccttacaacagaacctgatctaagcacagggggaacagagttcttaccgtgattgagatcactattacattgcttgttagcttccatgaagtgtgcgaagtccgatcgaacatcttcctgcctctgtaactcgcgtaacgatgatctaggtgatagagcttggaaagattctggatcaggttcaaactcatcttcctccatatctgaaaaattaataggttctactcccagtacagcttccatggatctcgttttcttgacatctccagaggatgacggaccacgcttcttcactggtttggttggttttactgcagcaggcttcttccccatgttcttagacctcgtatttgccatggcgccagctcgagagctgagagaggaagaaccagagaaaaaagctttctcttattattcaactagttttgtttttaactatgtttcagtgttttaagaactgatttcctctttatattttaattataaccagtttgaattattgcgtgttacttgtttttattcattatgttataaaatcggttttaattaaattataaccgatttgagttattttgtgtcatttatttttgggtaaataccatt

SEQ ID NO: 99629 - DNA, 2421 bp, Cannabis sativa
aaatcgctgacattctaacaaaggtcctacccagaacaagttttgaagaattcaaatccaagctgggtttgtataacgtatacaagtcagcttgagggggagtgtagaaatatctttgtaaatagctttgtacaattatatttagggtgtttttgatagcttagtttaggttgtatgtttgtggaattttggcctagaaacaagggattttttgtagatatttatttttttgtaattttttattcattattaaagatgatatacgagatttattagtgagacaccgtgggggatcactaacaaaccctacaacctatataatgagagtaaagaggctaaagtagggatcttctgcttggaccttcttttagattgacttggcggcagccaagaacatcgtatctcttgcttcatctttttccttgggtccaccatacttagttgccaccaagacgtcaaacaccatttatatatttctcttttttctactttaatggtttattgttcttaagaactttacaactaccaactttgattaaatttatgaatattgagtttcccatgagtcctgtgtttataggtctcgattaagatttcaccttgaaattctttgctgtatttttatccacactcttgaaacataactctggtgtgttggatttaatcaataaaaataaaagtagacgtaactctattaccatcgcgacatggagggtgcactactttaaatctctggtgtccattttatttattgtggttttatttagtcgattaatttatcgtagtcctctttatttttacgatcttcttagatcagttgatgaaaaactgcgtcaacacttacaaaacatctcacactctgctgttttggtgtcttacctatttcatgcttattatttgtttgtttatcaaatgtgatcgccgctaaatatttatattttatttatttaattataattatgaccataggttgaagctttggctgttctttgcatatgttgtgtcctttgtttctctcgcggcttcagtgggtcttctgatacaagattcactagtgaaaactggcccttcagtatggacaggaacagctggtgtcttgcagtgtgtgtttgtccttgtcaggtagagcagcttctctttaactctattatcttcctgtatttccatgttattcagggccgttttttcttcctctttcttcttttatccttattttctatttcaaaaagaattcttgggacttattgtggttttaatcattcgttttcacatttctattatatataatacaactggaatgttcatatggtgctttcttagttcatcttttgtagagcgcaacaatttctggtctatttgatgcattttgtcttgaatatcctctattatgtctcaaatatgaaattaaatgcaattttcaacgctttatctacactgcactgccattgctcgcactagctcacgcactctctcggcataatgaggatcactgactgatgacataggtataccctttttcatgttaaccggaactttattttgtgcatgcagtgggctgatgtattggactgttcactcggagtaacaggggaattcaaattgctatcaactggttctttttgaatactcaacactaccataagtgagaaatcggttgttaatttgctttgtctcactttcacttattatttgtacaaacgattctataaaaggcagttcgccatgtaaatgttgtatttacaatattgttgttatcctaactgaaaatgatgttattgtggtcatttcaacaagtctatcccaccaaaacatttctttttaagattttttgcacttgatttcttggtcttggtctcgatttctaaatcgacagtctttctattattagtctttcgtgctaccaaatgtttgagggtgtcgatgcttgaagaggaaaataagcatgacgtaaaaagtgcgggaattgaatgagcttgataatttaaagaaaaatattatataaaatatggtttttaaaaataaaataaaggaaaaagggtttttaggcataaatataggggtttagctactttttttgttttattataagcttataatttcacattttgtacattgacaccgaattatatgaaaatataataaacaatacaatttaatataatattatataatacagagaagattaaatattaaattgtattatataatattactggtgaagttaaattgtgttaacaatttaatcactgaattatataatattaaattgtattgtataatattatataattcggtcaactatgtgcccccagcatcttggaaactagttttttggtgattttttcagtaattttaccggtgacaatgtcaattccgacgactattctggagtttgatattggtgccggaaaagtcgccgga

SEQ ID NO: 99630 - DNA, 1466 bp, Cannabis sativa
tttgatctgcattagtttataaaataacaaccgcttagtttaaacaacaggagattaaaatgaaaatttattaagctgaaagaaaccttttgttgaagagagcagcatgtttcttcttttcctttcagtctatctgaaagttgtgagacttgcttctctgattggctgtgcacggttgcctttagctcaagctggttttcaagttctttgatcttttcttgttggtttttgtatgtttgatctttcccttttgtcttattctctaaattctgcaaggtctcttctagtttccttaaagattcatctttagatcgagcttcctgcctcattttttcaagcttttgaaaataaaaataagttgaaatgtcgaaaatagtgatgagaagaaaataagttaaactgaatatgtagatactcactgatgctttcatcttttgaacttctcctgtatcaacctgcttcctagcaggacccaattcaactccacgtacccttgtcgcaaaatttaaagagctcaaagtttcacccacatccaggtcggaagggcttatttgcagaaacatcaaagtttttgcatcaccccctgcatatgaacacaacaatctcattagcattaatgaaacccggcataagaaccaaatttttacaagagcgggcaaataaagatcacaatgttgtgtgacttctattacctaatgaatcttgaagtagatgtgtcaacttagaattcctaaaaccaaaaaataaatgtttattagacataacagaagctgtgtttcaaaattatcttaaatacatacgaatgatagaaaatagagcaaacctgtaagggatgtggctacttttgtttgctaaagccgaaatcacgtctcctagcgctgaaagggatctattgatattttgagcctccttgagtcgctccccttgagcatcagtttttgcaagcctctcactgcctgccaaatcaacaagccaaagcttgctcttggtgcactcgccattcatcaagttcttagctcttaccattatgcaaagcaagcttaataaagaaccaaagtaaatatacatgttcaaatattaataaattaaatataaagcaaacaatgaaacttaggtgtttggtataatgtaatggtaatagtaataaaatggaataagaatggtaatcgggattgacacagttttcctcacttaagttctatatttatataaagagtattaaagtaattttagttttactgtgtttatactttgtgatgtaattctcagtacttaccctctttctatataatggtaatggtaatggtaatagtaatggaatggaataagaatggtaatgggaattgacacagttttcttcactttaagttgtatatttatataaaaagagggtattgaagtcattttagttttactttgtttatgttttgtgatgtaattctcattacttatctttttcaatgtaa

SEQ ID NO: 99631 - DNA, 876 bp, Cannabis sativa
tattggagttatatgataaaaactagtgtctatttactaaatagaaccccatctgttacactaaaagaccttacatcctatgaattactatataaaacaaaaccaaaatattctcacttaagaaatttcgattgtcttgcctatggatctcacataattcatactcacaaatttgctcctcgggcaagaccttgtgtcttcataggatatcctgaaaacatgaaggcttacactcttctagatattcaaactcatcaaatctttcattctagagatgtaatcttttatgaatcaatatttccttacaaaacatctgatcccaaccccaatattgacattttttttcctttccaaacatctaataattcccagactactcttgaaatacaaaaatctggtataaacatccctgctacatcaccaaaagctcaaaaaatttccaagtcaggaagaatcattaatcccccagctcacctcaatgactacagttgcctcactactacttcatcaaccacagatcaccctctctctaaatttctctcttatcatcggttcagctccaaatttaatgctgccattctcactgcagcacagtttcctgaaccacgaacctatgctgaagccaaacttcttgcaatttggaatagagccatggatgatgaaatagatgctttggaaactaatgacacgtgggttgttgttcccttacccgatggccatcatgccattggaaataaatgggtttacaaaaagaaactaaaccccgatggatcattacaaaggtgtaaagcccgacttgtcgccaaaggatacaaccaacaacctggtatcgattactttgagacctatgctcctgtggccaaattcaatactcta

SEQ ID NO: 99632 - DNA, 1784 bp, Cannabis sativa
ttttcaagttgtatgttgttttgattttgctctttgttttcattgatctctttgtttgttttgattttcttagtctgttcaaggagtgtcctcatccggatgagaagcaaagacttgagctaagcaaaaggctttgtctagagactaggcaagtcaaattttggttccaaaatcggcgaacccaaatgaaggtgatttacttgattaacatgttcattttgttaagaaaccaattgagttgtctttctcaacaagtactttttttctttgttttttgggattgttaaccagacccaactcgaacgacacgaaaactcactgcttaggcaagaaaacgacaagctccgagcggagaatatgtccatcagagacgccatgagaaaccccatgtgcacaaactgtggtggcccagcaatcataggcgaaatttcgctcgaagaacagcatctcagaattgaaaacgcccgcctcaaagacgagctcgagcgggtttgttctcttgccggtaagtttctcggtcgacccatttcagccttggcgacgtccatggctcctccattgcccagttcagctcttgagctcggtgttgggagtaatggctttggtggattaacctcagtcagtaccacaatgcctgattttggaatttcgtcgaacactttggctgcccttcctcctcagtcaaggtctcaaggcggcgtccaagttctcgaccggtcgatcgagagatcgatgtatctagagctagccttggcggcaatggacgaactagttaaaatggctcaaacagaagagccactttggatgaaaagctttgaaggaggaagagaagtccttaacgaggaggaatacatgagaagtttcaatccttgcattggcatgaaacctaatggattcgtcaccgaagcttctagagaatcgggtattgtcatcatcaacagtttagctctagtcgagacattaatggaatcggtatgatacttctcatctcaattaatttatttcaacttataattaaaaatatctcttaatttttcttttcacaatcatgaatcgattttggtacttttaactttcccagagccgttgggcggagatgttcccttgtgttatagctagaacctcaaccactgatgtgatctctagcggtatgggaggaactagaaatggtgcacttcaactggtaaaatcttataaataattaaactagttaatcttttttcccacccttaaaacacaattatttttgttaattaatagaattatatattgatttcagatgcatgctgaactacaagtcctctctcctttggttcctgtccgtgaagtgaattttctccggttttgtaaacagcacgccgagggggtctgggccgtggtggatgtgtccatcgacaccatcagagataattcttctggcccaccctccttcatcaactgtaggaggcttccttctgggtgtgttgttcaagatatgcctagcggctactctaaggtaattaaagtccctttaattaaattattcttggaaattttgagtatgattttttttcttttctcttaattactacaattacgaacacaccctttaagtgtcactttttgtttttctcttctaaacatttattgttaatgtcccaaagttcctttcatctgtttttttttttttttggttggaggggttctttaatgcttctctgctgaagcaaactataaacataagagcttagctgaaaacattaaagtgatttaagtaaaaacactaatcacatcaaatcataagt

SEQ ID NO: 99633 - DNA, 2223 bp, Cannabis sativa
  modified_base (395)..(395): a, c, t, g, unknown or other
  modified_base (814)..(814): a, c, t, g, unknown or other
ataaatcccacttttctatagtctattctccaaagttacaaaagataatttgctaaactaacatcaaaaagtaatatggaataattaaatattacactattttttttttaaaattatatttttacatttacagatttttttttttattttattttacaatttttcataaaattaatacgaaatacagaaaactatatagaaagtaatataaaaataatatataaataacatcaacagttcaaaataataaaaaaaaaaacaatatacaaataacaaaaaattaacaaaagtacatcataaaaagataatattttttattaataaaataaaaaaaatcgtaaaaatatttaaaattccgtaaaaccgtatgtttgtaattttttttgttatttttntgtatttgtgaaataatcccaagtaaaattgtgtgtctattactactggagatgttcgtggtgcgggtgcagttttttaaattcgcggtgcgggtgcagtttttgactattttttcaaacaaacctgtacatgcggtttttttcaattttccaaaccgcacccgcacccgcaccgtgaaactaaaaaaccgcatcgcaaaatatggtgcggtgcggtgtggtgtggtttatgcagtttttacggtttggactatcactaaataattaaaccatcacaaatacaacaaaacttgagcaacacttgtcaaaaataccataaggcttgaaaaataaatataaaaaaaaagtttcaagtttcaacaatacaataattagtgggcttgggttgggccttcacatattagacctaaataaatatnaaaattagtatttttataatatacggtgcggtgctgtttgaaccgcatatttataattcaaaatcacaaaccacactgcaccgcgcggtttaggaaaaattcaaatcgcgaccacatcacaaagaatttcaaaccacattttttttgcgatgcggtatggtgtggatagtttaagcgatttgatgaacacccctaattactacctaaacgtctcgtattgcttaatgtagttaagtaaaattttgtgtctgataactattgtagaataatattaactatttacaagctaccatctgatactactagacaccaataatggcaatactctttgcaaaaagaaatgctaaatgataccaatagtacttaatatcacttaaatatttcatatcgctattggtgtaatcaattatcagacctcacataatttaatcaactatattaattttacacaataacccatactgtgtaaatttaaaatagcacaattgaagaaaaaaaaatgaaggttaacttttgcgttggtcaatgagtttgaccagatacgttgaccaatgcaaaaactccctttttatttgggtcagatgcagggctgaccctgagggtaggcgagctaggcgtgcgtcttgggccccaaacggtcaagaccctgaaattatgaaaaaaataattaatatagataaacattaaataagaaaaaaatataacaaaaattgtttggtgtagttatgaaggattgaactttagagctcttaagagtttttttaaagcttttccattacactaaatcactagaattatcattttgataatagttaaattacatataggggccttaaaatttaatttcgccttaggcaccatatactttagcagggtcggccctagacataggcaggctatgcccgtgcctagggcccacactttttggggcccaaaatgaaaaataaaaaaaaaattcattatatttttatttaactaaaattaagtgtattgtaaacaacaaatattcatagcttagttagttgagctgtatgacatattatacaatgtcatgggttcaaatcccataacacttttgttcaatatttttttatatataattttgagggtcccaaaatttagtttgccttagacccatatattcttagggctgaccctgtaccttaggatcgaccctggttagatgatgggcgtcatcaaaaggccacgtgtcactcacccaaaaatgcaaataatatttatccccaagcctctatttgcaagccttcattttctcgagagttatggaggcttactatcctaatcgggatttggaatcccattcatgtccatgaatccaattttccccttagggtatttgcgaagatgttacggactcttcatattctcacaattctagtagtagttgt

SEQ ID NO: 99634 - DNA, 1937 bp, Cannabis sativa
ctcaagaagggtctaaatacctccttctctttcagcttgttgtctaattctacaaaatcctcctcagaattatactgtccagaatgataaaagcatcttttcaaaaattcattcatcttatcctcacaattctccctgcataatccttgtatatgtcaatcaccacaacagaagaaacttaatgcagaggcacctgcaaaccagattatttacctcttatcaattctgcaggtcaaagttctgctgaccacattcctaagttcttcatcactcattttagttcgagcataaccaaacacaatgaagttctgccaaagaccaataatatcagaaaaagctcaaatggtcagccatttccaaatgggcaaaataaaaacagattcagcatatgatgataatagtcatgaagttgaaccttgggtagataatcatcataataaagagcaaaaagtgctggaaaaatcttctttttggcaaggtctccagaagctccaacaacagttatgctaatagtactgtcttcattttcctgttctgaaaaggaaaatattttctcttcgggctcagattgatctttggtcatagggtttgcagctatacctattccaaattccaatataagattgaggaatggtaatatatggaccttcattaacactcaacaaactatacagatgacaaattgcagacctcaaatagaacgaaatctaaaaggagaggactgaaaaatgagtacaccaaagcttccaaaacttaattagtatcacatggggaacttcataagtacaattgatcaggatatgaaactttgtgtataatgtgaattccatcgccatacccttttatatagactacaacatctcaagtgtgattctctatctaaaaaattctgacttttgtaatggttcattctccatccatacagcaagtaaagcatttgaagttgaacagtgtctattacaaggttagaaaaatgtcaagtcctggtgttcttcgactttatgcaaggaaataaatgaatgctcaatataaacatagcacaaccaataatatgcaatttgcttgtagattccaaacttaaagcctgaagtaatatacaaaactcatattctctgctcttaaaatgtaccattagcagaagataaacgacaaaatcagtggtaaaaaaatggtaaagtggatagatcataatgaaaaataacattgaaaaggaagaaaaaaagaagagaacgactaaccatcattcgaagaaacagcatttagtggatgcccatttgaagatttcagcttaaagtgcttcattccatgatttcttgatccaacctgacaaacccacgaggggttatgcttctttctcgggaatatgatgaatttacgaaaaagtgttgcctcattgttgagcaaagaggaaaagatgaaggccgaaggagacgacgaagtagatgaacaagaactcaattgtgtagccatgcaaatttgctgttgggcaaagagaaaaaaactaatatttcagaataatttaagttatacaatatgtatgtgcactgatcttaagaaatattatcgtatctaataacattctattaatatccagttctgaccggttcttcgtaatatatatttttttttgaacaaagttcatcgaaatacttgaaaagatgagtttacgataaaaaaatctgttttgtgaggtcaagaatttttccaatttatttgttgcagtatattatttttcacacttgtaattgcgacggcaatgaggtaaaattgtaacatgagacaagtttatagtatttttttttctttcttttctttttaaatgaacatttaaactggcaaagagcttacaatgaaaaaggtaagactatctacaatacatagtgtaaaatttggggtgatttgtggcaaaactttttttatatattaattttaagttt

SEQ ID NO: 99635 - DNA, 1846 bp, Cannabis sativa
ccaatagtgatataatagcattttttgtattcattatctttcaccagcatactgctaatattgatcattcactgagtgtggggtcttggattgattttgatttattgcatcaattggtacaggctagaaaattgcaggagagaggatggcagccaagatggtttcagagggacgaggatggttgttatcgttacaagggcgggtactgggaaactagggagcaaaggaattggaatggaattcctgatgtatttgggcagagtactgatatgccttcatgttcagtagaagagcaagaagagtaattttggctagatctcattataatattttggttttcttcaatattatatctatttatttattctgttttcttcccagaatgcgagtttagtgtagaccaagtataatataaaagaactcatcatcctacaaggtgtattattatgtaatgcttgttttttttattaaaaggctctttcatttgtttgttgttgctgagacttttttatccttcctttccatcttaaaaataccacttaaatgacctcaaccaaaaaaaatatttaaattgattaaataataataaagctttttaattgactatatagcttggatccaaaaatacatttataaatagagtttatcccaaaagaactaacacaaaatttcctcactgattgaggcaatgcttatcaccctacagttaactttcaatgatcttaaattgctctaacaaaacaaaaagaaagaaacaaagtgagtatatagtatgattgaagtaaaggactatttccatgctttctttcctctgaactgttttccagcacgctgctcttttatccttttcacagctctggtttttacaatcctatctctctttgcagcaagaggcatagccttcttatgttctttctgccgattgctcaaacctccggtctgcaaaaatcacaccaaaacaagaaaaaacataattataataaaacacaaactggtggcatggcagcatcactgactttaaggcaaaattttactgtttactttcccacgatgagtggagctcttttacacaaatcataggacccttaagtctaaaaagcaaaaggagcgcccttttcaaagtttatattgatttcgtagctaacaacctaagaggctttataaacaagcttgcaacaaaggtctacgaatgaaaattatataaaaaaaatgtgtgtaccttcttttgtttaactgcagtgcgggactggtactttcctctatcttctcttcccatcttaaccattgccaatctctcttctttgcttagctttttccggacgtgagcctatcagatacacagccacttggttcagtatatgatatttactactgataccaaaagaacatttctttgctttgtaaactttctggtattactaatgatgtcaaattaacagaaagccaagatcttaaggtatgtattgtatttatattatttgatttggacaaactactgaaagccacatggacaggctgaaagttgaaatgctttgtaaaaggtgcagaacttacttcaaggttggctggatccactcgcttaatagttagttgctcggaatcgggaatattgatctgttgtgctttagcatctgcgccttttcttaacaaaccatacttagccaaagtatcttttgcatccttcttcgcctaacaaattcagcaccaacaatcatttttaatttagtgacatcctggaagagagctacactgggccaaatggtataaaataaaataaaaggaaaaagcactatagttttcacgtttaccccatcactggagcaaagttatgcacattacttctcgc

SEQ ID NO: 99636 - DNA, 1380 bp, Cannabis sativa
aaaaattcaaaccctattgagaagttgcaatagctgatatgggagcgaaattcttaaatagtttatgttctgttttccttttaaaatacgttcttactgaaaaatctctagaaattcatatgatttgaatcagaattatttgcaattattcctgaaccattttctgtttgtgttagattgagatacctttaagtaacatcggttatggttgtacacttgttatattttcctgaaagcatttgacataaagattttttttcttattgaattagtatttgtttctttcatggtttttgcatgtaaatattttgattatcacatgtggctgtacacttacgtagtttttaaaccaccaaattacaggagtaagttgctcaaatagtttgatctgtccatcaaaacttctattctaaggcttcatacttgtagcatatttttcattgttccaataatttacatcctacacaactttatcccatttgtgtcatttatcatatgctgctaggaattgaacataaaatagcattccactgtttttgttttacaaactaatctgcttacgctatctgtattctcctctcatttgaattttttatttatcataggacaaaggtagaccactgcccaagtttggtgaatgggatgtcaatgacccggcatcggctgagggattcactgtaatctttaacaaggctaggaatgaaaaaaagacaggtggaaaacctgaatcaccttcaaaggatgaccccacctttaagcatgaagcagttcttggaaaacctcaatctgtaagttgttgctatttccttatcaccttttgtttgataccctaccaacttgatgtctttaacatttataatttgggagagttaatttaaatgcacatatttatttattttttaaatttctcttgaaaataaaaggatcattaatccaaaatcaggcttgaggcaacaaaaaacttcatttgaatttttaagtgtaatactttaggttattatttttttttttcaatttagccgttttagaagattttaatcctggtgtgccatatagttgagtttacgtaatttcaatgctatttgaaatgttctcaagtattattaagttcctgaataatctgagtttactttcatttgtgccattttttgttttaaaaaaattaaggattgtcttggttttaactctaatttgatttttaaacatttattggtcttagtgtttgacaacatgcttattttctcactttattttaaattttatcaaattgcatctgtcattgtaatcttgatctgaattggtgtacttagaaacaacacacttcagttgctcagaaacttgagaacgttttttttttcttatggtgccgtttggtaacac

SEQ ID NO: 99637 - DNA, 2457 bp, Cannabis sativa
aaacttttcccatttttacaataaacaatatatttttaacaagtggtttaattattaagaaactttttttaaaaaaaaaaaacagaaaaaatcgaactaacaagttaatcatgtatattatactaggttgatgtcactctgacgactttttcagcactaacagctactctgataatttttccagcaccaacagcaaactctaaaaaaagttgtcggaattggaattgtcatcgaaaaaattagatttttccggtgataatgctaattttgacaactttttcggcaccgacatcaactccgacaacttctttgacacttgtagctgttacagtgatttttcaagcactgacagcaaactctgatgactttccggccccagtgacaactccgacgataaatatagtttcatttgttttattttatttaaaaaaatatatgaaagaaattttaatattttttatgataatttaaagtgacatatcccttatatgttaagtttttattttaaatgccatatttttttcctactaaatttcctcaccatatatatttatgtaaattagctttatttttttttttcatatttatataaatacctctttattcttttaccagcaatcaagattcatgatgaagatgataattttttttactctctcaacataattgaatttcactcatataaagaaaataaattaagtatgctaaagtgaattttaagtttttgtcacgatatgtatacaatatagttttataatagatttttttttagaagactaaaaaggtgggaccaagtacaatattaatgtagcatgatattgagctcttaactattttattttgcatattaattatcataaaacatctcacggttattagctaatattataagaggtggcatctcacaaataatttatttttttaattatttattaaattaaaatttgagaaatttaacattaaattacactataaaaatgtaatactccttataaacaaaatgtcccaagtttgagtcttcttatttaaaaaaaaaaaataaaaaaaaataagaagatatcactcatttgtagtgttgtataacttaccattttagcatttatcaaagatatatgtccccattacttaagagcctcatttatgatcttatataacatataatgggaacctgtgagaattgcggcatacgaagaaactcaatattttttgtctttctgacttttgaaaagaaattgcaatttggaaatgaaacttaatttcatacctccattgaaattcaattagaggctgataagaaggtatagtcacattgaatttttaaagtttttcaatttgggtggtctttcataaacttaatatatccaaatgcataaggtgtggattgttgactcttgtttgattactctgttttgactttcaaattcaataatgacaacaaccaaaaacatgatatctctaatttgtaatttcttttcaacattgcaattgggacattctcagattataaagatttttatatcttctttcaagaagattattgttcagcttattaaatgactcaatctcctccctttaccaagaaggaaccataaaatgccatagctaatatgaactagcagcctaagccttgatataaaagaaactcaaaaaaaaggaagaaattaagataagataaaagcacctccaagtcatgaatcaagaactctgaaaatattaaggcatatcaaaaaatttccttttacaattgaacttgatataatcaaacacacagtatgggaaaagaatatagaagaacactaattggatatgattagtcatataaagcttaatcttacaacatggttaaataaccaaaaattcacattgaacaataaaagaaagagagataataactactgaagaaagattcagagcagtagtaaaattggtcatttgcaggaatagcatttccatgtggatgtgatgattatatatcctggtataagtatatgcatggtcaaaagagtgtaattaattaattaatacaggttcatagcaatgtcgatagaggcaagaaggaaggttaattaattgatgttgccatcgtatatagtgaatgattttgagctttgttgatttcatccaattattaacacatccacgattaagggcagaccccctgattggtttctatggaagaagcgcatgcattgctgtcatgctcaaggagtaaatatttcctggacgatgaatttggttgtcgaactcagtgcttgagggaggcacctgtaatcaccaggatagaaccaacaaagtattccctttttactgctgccaccatggtaaacaatgaagatcattcttgggcctagatcacccaatgcatcacttttgctactgctttggaagcccaagtacaagccatctttcttgttctctcttgggctcataaaatggcttgggatgatatctattgca

SEQ ID NO: 99638 - DNA, 2122 bp, Cannabis sativa
tttttataaatggggttgaaaaaaactgcctctaaaggctaacattgtagtagtgtatacattttgacatttaacatttctagttgcaattaagttgcacgttagttgaataatagttttgctattacaatatcatagtattataaaaataggactcaaaattattaaatacgctacctaatacagataaaacacgattgttgtaatattcatttgtattaaatatgtagaatttgatgcgctggacagatttggactgtactagggttttttatcaaataagcccatcaatagtgtaaaatacattgaatttttgctttcataagctattgagtcgggtaggtgaggtttaattccaaaaagtaatctatcatacggtacatggtactattgacagtgacaactggtgtgtggtccgttgttgggaaagagattgtcaaaatatggatgtatggcatgaaaaggtaactaccttttgccgtgagccaatctggaatctgacgaagaagaaaggtcaccaaattcctcaagattgtgacagagacgtgagtagtatctagaaggttaggccatttcggataactctttcagcttctacttctggatgacccctggggtatttgttgtagatttccaagattatttctctccttagtatttaattagagttgaactatattccagggaagtggtggagctagcctcgtgttctagtgaaggaaaaaggtttttttagtaaaagagtatttatgaaaatataaattttataaggataaaaataataaaaaaaaaatgtatatgagaataaaattaaaaattaaaattttatatatacaaaaattgaaatgtataagaacataaataaaatatattaatgttgtgggagcataaaatataatattcaaaatttatacacaaaaaattaatttgtagaatgttgaaggggcaaatgaccccactcgccctcctttccctctgctcttgggaatttggtagatccaaatcattcccggatgtgttattaggattcacatctattcgagagatggattgccttgtccatttgcttgggctagttgattggctggtagtttagtgggcctccatgaggaattacttgtataagattatttacactacatattgaaatttttaatatttttatttttttactgtgaggtgaaattttttacaaaaatactgtgtaagttttatactgtgttaaatttttactattgttctacggttattttttagtgttctactgttatttttaatttttacgttttgtgtttcactgttgttttataaaaacacagtatttttaaaaaaagatttcgtgtgacagtatttttataaaagttaacttaaatttcagtatttttataaatttctccaaaagttttattgctaactcacgcgggaatccacatcgatgtaatgaaagtgaacgcatgtaatacttaactatatttataatcatatatcacactaactactaagtgattctaggtatcattgatgagaaaaaaaaaatatctattaattaactttgtaattgattgggataaaaattgtaattagtttcttttacactcttttctattttactttttgtactcttgttttcattctttacatcatgtaagtaataaattctatcctcaattatttaaatttatatgaaataaatgattgcaaacataatatattttagattaatattaaatggcatttggtaactgatttagtgtcttgtactataataattttttagggaaaatttttagtcatagttaatcaaaaagacaaagctctatatatcgaagggaaataaaattgcacaaatttcactaaagtgttagcttggctaaccacggcgccaagaacaaaaggagaaaaacaaaagggcttttttctataataggtattttaggcccaaattttacatttttagtttggtaaggaaaattaaacaaaaataggaaatctaaaagtttttttttcaaaaatacggataagttatctcctgaagcacatgaatatcttttcaaggatgatatattatataaacaagacactactttttaatggtagactgaattgggcctatatacatata

SEQ ID NO: 99639 - DNA, 3991 bp, Cannabis sativa
aagttcagggggcacgatttagtatatgtcaaagttcggggggaaaaattattaattagccaagccaataaatcaaaatctatataaaactcaaagctaatggccaggaggaagacccggccactaaacttaggagacctcaaacaagagcaataggggcaagagaatgagctaatccattataggaccacttaagaaaataatataggaccagccatttttaatatttttaataatagtgctaaattcagtgaaatattttttttactcaaagtagcttgcactaaacggagacaataagagaatattgtcagatttgtgcaccctaatcgacgacaatggagcaaactttgcaacaacgttgtcccctctcacacatgaggctcatagggagcggagccattactgttgacacccctgagcaaacaacctctcctgatcgactcaacattacaatcccaagaccaatcttccactcatcggtatttttcaaaatagttcaaaatattatcttgagctcaatttgatatttttttcattgaacaaagcaaaatgctcaatcaataatttttgcaaaacacaaaatacaaaatagtatttactttatttttattttattttccaatcattttgtttaatagtattttgtgaaattcgttataaaatgattttacgtagcacccctctacaccctcgatgaaaaagttatgctatgtttggtaggagggatggagaatagaaaagatggagagttaataaagaatgtagaagagggagggagagtgaagtagcattctttttaagttgtttggtagaacggatggagtggtgagacgatagagagtatttgtttttgaaattattatattatccttatacataatattttaataatatatttagagggtataattgtaatctccaacaattaagaagggagagtatggattcttctattaatggaaggattgtaaattgagaattatgaagaatttgctctccattcaactatgctttctctcctccaatctctcatcccaaacaagaagaattgttatctcctctcatctctctccctccaccaaccctcctcctaccaatcctagtgtcagtcacagggaaaaaatgtactacattctaggccctaaagtcaaatctctttgtgaaagtatttcgtaaaaatggttagaaaaaggtcgtcatgcaaagtgagtgtaaaatggtttattttcatcattattcaaaggagtattgtttacacaattcatttatattttgaatgttaatataattatggacttcaaattatcgatgaaattaaatgtacatgattaagcatattattttggttttgcttagacagattttgaactccctattagtacaactatagaataataaaagtttggtttagattctaattataacttggtttccaattttagtttggtttggtacttgtcaaaaaataatgaaaaattatgataaaactaagttgctcacatcacattcattagagatattgtgtttccccttataaaaggcaccaaatctgagctaggggaccattagtataaatgatataatactcctcacatgggttcatgtctatcaacatccatgattttgtacaagctctcaagcaaatggaaacttgtggaagattttatttgtacccttttagcccctttttcaatcacatattcttccatatgtaatataatgtactttaaggtaattttataccacaccccaaaaataaatgtttcagtacactaactatttctttctgtatttatgagaagtaactatttatgcaacaaatatatttaaactttatttttagtactataaattattcaattttttaaaaaattaacaagtgattataaataactacaatgtacacaattttacaaaaaaaaaaaaaaaaaattagctaaaaagatatcttaaatagcaaaagagataaaagatataacaaaacatactttcttttttttagtgtactttagatttctcttatactttatataacaactttaaattgaaaattttgagtatagtggagtgagcatcacttaaataaaataaaaaaggggtactctttccttctattcaatttggtgagtgcccaaattgtcatgaaagaaaatgcattgtaaaagaaagaagaaaaaaccttctctttttgactatgtcaccggctttcttggctttaattgaactgtgtatgaatggagttagtatacgtacacatttgtacggtcaaattttgtcggttggaaaaaatcagagttgtttgtttattttattggtacctatctttattttatatttagatcttataatctagttgaagagagcccatgtaaagggtatgtattaattaagatttacatggagatttaaggagtggagagacttttaggtgactgtttggtggaaaatataagtgagaattggtgagtttgttttagatttatctagatcccatttaattatatattggatattaattttataatctaatctgatcaaattaatttcagtcatctaataaatggattgaatccgttctatttattgaatgtatttcatgtatatctaaacctgagtcagcccaacattttagcggtgacaatttttttaaaaaacattaataaaaaatataatttttattgaaaaaaaatacaaattttgtgaaaatataaataaatatatgtgagaataaaagttaaaaatataaattttacggggacaaatataaaaatatataagaatagatatgaaaaaaattatttttatgaggtcaaaatataataccaaaaaatttatatacaaagtttatatgaataaaaagttgaagaggacaaatgaccccacatacttccctccgtgtatacctattggtttgattcaggtttatctaatattttaaacataacattttttagattagatggatccatctaatatattggtttgattcaggtttatctaatattttaaacataacattttttagattagatggatccatctaatattttagatccagatttattagattggatcaatctaatctaaaatatatatataaaaatttaatattaatttttttatatatatgtatatatattacctataacaacataatatttaattactcgcttgaattaaatgaaaatgctaattagtttgattgaatgctggatgtattggatatttggatagtaccccattcaacatttgatctcattcaattagatattaaaaaataacatttaatctgatctgatcataattagaaaataatatttagcagtgaattataattaaattgatcaattattattggattaaatcaatttatgcaactcctaccccatatatggtgagcagagatggaatctgttgacataataaatatttgatattgaaacttcattccagctacccttttcatggaaacttcccatgttgcatggtctttaagtgtgattgaagcaaactaaagcttgggacagttttgatgtatacatatttagagagattttactataggggatgtcactttagctttcccattattattatttttttttttaaaaaaaaagatcaaataatttatagatattgaaactagagtttaaaacaatctcttaattaattattcagaaataccctatatgagaatcttccaaaatatttatttattttagcagtaagatattgtgtatttttagaatccatccctagatttgctctgtctttgatctttaagtatataaatctacggtcatcttaatgtgaaatttaaatttggtgttaaatttacaccaaaaaagtactatttcagtattaaatttttttctatttcgaaccattgcactaaaaaatactttattattatattattttattaatataattagaacatttacttaataaataaattatttaattactaaaaagttaaaaaaaaaaa

SEQ ID NO: 99640 - DNA, 2438 bp, Cannabis sativa
tttttttttttaaaaaaagaagacatgccattcctcattctttgatggtgttttagaagtttgtcatttcaattcattttaaggtcaattttcagatgcttattttgatagtagtgaactttcaaatttacaggaataagagagtttgtaatatccttggattatggtttgtttgtagtcctaacctgatatttactgtaatctgggattttgctctgtgtttttctactgattctgcttcaatggggagctagaaacagttctgcatgtattgcttacccttactgtgctatgcattttgaacctacatggcacaaatgtcttttaacaaagtatagaagttgaagaagtaaaagttgatcctcggtaggtcgcttttacttcaaattgtcatcgctataaagtacatattactagttatttttttttttttggttgataatgtttttcaatttcctattttttatgggaacatgtgatttaggattttgaatgtcacaatattagatgacgaattgactgtttagttaattcactctgtttcagtgttagtactttggattgatcccatgagcatgaagtccatctgtgtggcgcagctagttatgtatcaaaagaagatttcttccattgagcattgctagtcggtctaacatttaatcgcttttgtagatgttgtgagatctgcaattgggttcacagtgtttacaacccttctctcttcatgggccctcacattttcaattggaggaacgcacctgtttggccctgtgtgggatcaactagtaatgtacaaccttgctgacaaattaggcttgaccaactggagctagagatgtatgtctattcttattccttttgtcttcctcttctttactatattagttgattcgagtggttgggactgtttgtttgtttgtttatttgcattattgcttattaccataaaggaccttgtatatcccattgctgtaagatgctatatgctgacattaaattagaaattggtcctctctatcttcatcttgtgtgtaagtacaaccacgtgacaccacatgtcataaagtctggtatggaatcaactgtcatgacctaggcataatatgaaggaatccctcttttttttttggtattgctgtgttatttaacaagttaactgttacctatttctatattcattatatcttgtttgtatggctaacctttctcttagtgttccattttgaatttctacaagttacaatgattacgaaaaaaagaaaatggtcatttgtaaagagagaaacattgagaaatcttagaattatccttccttcccacctagtcgtataagattttagtttgatagcttttccataaattaaattcaaccttgtgcatgacaacagacacgttttctttaattattcttccttggaaaataactgtgtagatttgtttagtttttccctgtttcttttgttaacaagctccttttttctttgaggaccgcaatttttcttattcatcaataaagaaacattcttagcgaagaataataatattaaatagagaaaccaagtccaagggttgttggtcaatggaaacaaccgttttttttgtacagtccaacacctattggtcaaggtaaacttaatagtatatataggcttgaagagagaaatgtattgtttgttggattaagcacgtgattgctcaaataacgtagatgggatgtcattgtcacatgctgatgcttgataagttcattgtatgagtgtttgaggtttttgatataatttctaggacatgggatttggttaacttgtgtcccatatatattatatgtgtggattggtcatgcaattaaaatcaaaatgaataagttacttgatttttctacttttatctctacaaaacaatacactcacttgcctcaatgttatttggtctcattataaacgtttttttttttttctgcttaacacaatgtaactttttcattatggtgtaaaagtagaaaagctaggctggccgtaagaaattttagtagttgacaggttttggaaataaagaaatcatgagacgttgtaggcgtctagaatgaagtttgtatataattaaaattagttacgcaacttaattgttggttaagttgtcaagtcaagttccactcaaaaacgaaggagctctttcatattatcattattattttactgccgtcaagacagaactcctaaaactttacttgaggacaacactttttttgacttctatgtccataacttctattaggattggttgaattttgtaataaggtcattatgaaccattgaattttgttttttttttttggacaaaaaagaagaaaataaaatgttccattgagacgaaaatctagttaacaatatccataagatttaattattacgatgatatataacttttttttttttttt

SEQ ID NO: 99641 - DNA, 1618 bp, Cannabis sativa
tatgggaggtatgtgttttattgtatttgatgctctaaataaatactagatcttggctttaatgattatgagtaatcgttattttaacattccaactatatatacataaaaaaatgcctctaaaagttcttttattctcattctctgaatataaaaaaaattaaaaattatgaatcttgcagtaatattagtgtttatttacatatgttaatggtgttacttttgtgttgtgttaatatgtttaattgtgtgttaaatatattagttttgcgtttacgtcacaaatttgtttaacatatttttatgttgtgtcgtgtcatttttttaagaaattgtatcatgttcatgctaagaatttagagatgacgaaggaaattacattatatacttaatttttattttttattttaatttttatctttctttttttcaataaatttttacttttcttgtattagtccttaatttatatccaattttataagttatatttttattatgtgtattttaataagttatgtaaaattatgtttggtaatttgattataaaatagggtatttataaaataaacttattttacatttatatttgattaatgtgtaataagagagattgtaatttccatatatctcataatttttttaatttaaattgatgtatttctgttttaggctgtttacgtcaagaaaagaatgactgttgaaagaacatggcaaatttatatagtgatgaagctgttgctacggagaaaggttctggaagttgattgaagctctcttctctgatccagtccctgcaatgctaattgaggacgcttttgctagatctgttacggaggattttaacatttagataaaatcgagtttagtagcttctgtttcgtttcctggaaaaattaatatgcatgttttatcagctattctaagactaggcatatatctcttttgttctatggtttcatcattcacattttgtctttctttacagcttgaccttccagtgtcgttgccttgtcttcttcacataacaatgtgttcagctctttgcaatgactaatcttacagtgcaatccagacgaagggacttatgaaaaaattggcgactcaactgaagtgactctccatgtggtggcaaaaaaggttgctatatattgtacttattaaaaccattttaatccttctctgctgtaggttgcttttccgggcttcgatttgccttcttctttgaatattactgagaagcatgagcctccatcatactgcaatcaccattgggggaatcagttaaaaaaggtttatacttcaaacttgtttgagaacccttcttttctgtactctcattatttcttcagagttctgagcatttttaggagcaggattatgtattttattgtgatccaaacttgcaaacaagcactaaatgagtgaaactgcttaaatctttcttctcataaagcatgctatcaaggaaaaacagagccatatctcgttgaacattttgatatttgccgtctgatgaaaaaagtaccatttctagatgtctatggtagaattcacttgtgatcggaaaatgatgagtgttctttgtagccgaattcagcttcaaatatatatatat

SEQ ID NO: 99642 - DNA, 1419 bp, Cannabis sativa
atgtttggggtccttctccaaatgccactgctgaaggatacaagtattacattctatttgttgatgatttaacaaagtatagttggatttaccctatgaagagcaaaactgattctttttccaatctttctaacatttagaacttttgtggaaaaacagtttgacacaaatttaaaatgtctacaaactgaatggggtgggaagtacagaaagttacaaccaattctacaaaaattaggcatcttgtttaggcacccttgtcctcatactcaccaacaacaaggtagagtagagagaaaacatagacatgaaactgaaatgggattaactttgttagctcaagccaaaatgccttttagcttctggtgggatgcgtgtgtctctgttgtctatctcataaataggttaccaacaattatcagtggttacaaatctcccttccaatgtatctatggcatcaaatcagattacactttttaaaaaacctttggttgtgcatgttttccattcctcaaaccttacaatcaacataaatttcaattaaagacatctaaatgtgtctttcttggttatagtcctttccataaaggctatagatatttacactcttcaggtacaatctatattgcaagaagtgtaaacttcaatgaaaaagagtttccttattcaagtatgttttacactacacaaagtcccacatatcacaaaattttgcttgcaccagcctttgtaattctcagtgtgtctccagctgataacctttcccaatttcaatttggttctctaagtttaacttcagatactcaacaccatacaccatacgtgtcagcgtcttctcatcaaaatgatgaacaaacagctgagtcatcttccacaaatgacattgtgccaaactcccctcttcaaaatgatgcctctttcactatggaggaagtgattattcgtaatccaactatatctccttctcctccaacattaccttaggctcatccaatgcaaactagatcaaaatttagcatttacaaacccaaagtgtttcttgttatagcatctaaacaacaactctatgagaaacagtacaagaaattttatttgaggcataagaagtacttaaatgcacagtaggtggatgcaatgaggaattggcttgagaagaggcagtgaaaggatgaggatgatggaagagacagcttgtagagaccttgattaagagtttattgcagaaggacctaattcgtgatcttatcaatgacaaaatagtgattagtatcgaattcgatgacaacattgttgtcagcaaagaattgtgaaatactaataagatttttatgtatagtagggacatgtaagacactttttgttgggttttatgccctaaatagaattcatttcaatataatcagagatcggaagagcgtc

SEQ ID NO: 99643 - DNA, 1324 bp, Cannabis sativa
tgatattaagaatattaaattttaaaataaaataaataaatttaatgtatttgagccctccacatttataataagttaacggaagtggtagtaacggtgtaagagaattgtaacattaggtatttttgcctcaaaaaaaaaaacattaggtatttaagtgtataaaatctgaaacattaaatatttatgccacaatttaccctaacaataataactatttatatatcaattataaattataaattataataattataattatttttatcatataactattattaaaaaaaaattaatatataaaaataattaaaactataaaatacaaatatattttagtatttataataaaaatataaaaatatagagcgtcaatttgagcccatataagaacacaggttggtttatttaagaaaaatggactagcctgaataaagtactataagaaattactggactttcgggccacggaaagcgcatatcctataaattattgcacggcatgacatagttcatatgtttctatagcttgacacacgacccatattttaaaaagcccaaaaaatataattcgagttagtacaacaaacacgcatttacaacttaatatacgagtacgtgttacaaaaaatgtaactccatccctctaaataaagaaggaaaaaaaaaattacccatttactggttggtcaaatgaacccatccaaactgatccaccaatatttctatttctcaaattaattttatattttaattaattatgataataaaataaatatagtagaaatttaaaaattaaattaattaggttgttcatataatttgtaatttatagttctaaaccccaattaattaattcagacaaaactatttgagatcggacaaaaaaatcagtgtaaataatttaatcaaccggaacagtttaaacaaataaaagaaaaaatagactttacaagaatggagccagccaactatatcaagtgaggctaaatactctttttttaataaatgagttatagatactaggtgtggggatgtgcattgttaaaatatatgtgttataatcatatatcttacttttattaattatatatatatgtttaaaaaattgttaaaaaaagtcatagacaaagacatagtgtggtatgggttgcttattaagccaaatgaatttaatagctagcaatcaactgttagttttgacaattaaaataatttttaggaaattattagttcaattatattacatataattgtgttcaatattaatatatatatatatatacattgtaattttattatatgaattcaaatgagtatggca

SEQ ID NO: 99644 - DNA, 1366 bp, Cannabis sativa
tggggaagtagtaatgaatgggtagaaaatggtggggaaaagagaatataagagatcaagaaagaaaaggtttttggtgctgagctgtgtgtttgtgtatatatatatgtatatatatgtatatatgtaactagtggtgaatatatagtgaatatttagcttttgggtaggggaagagagggagccatcaaaagaagttggccttttatgggtgggaggcatattgatatgaggatacaatggctttgtaaatatatatattggtgggtctaatatatgatatacatatgtgaatgtgacaaataatacaacactaagaaagtgatatgcgcacatggtgcctttgagacttagccccactcacatttatgactttcacaacatttctgtcaagaaataaaacaaacaaacaaaataataggaccgccgactaaaaatttaattacatcttaacacaaccaagtcaagatcaacaccaaagtcttcaaacttaattacatcttactaaactaagattgtgtttacatatatatatataattactatttttgtctttgaatttttacaataccaaattgtacttttatagtacacatcttgtaaataatatcttttgaaatagtaaaaaatatagtataccataatttgaagttctagaaatgacactttatggagccaaaaaatttatactataaataggttgtatataaaattaaaagagcacttagtgataaattttctcatatacatgtagagaaaattagttgtatagatagagaatgggttgccaaattgtaatcaaggtaatacattgcaccatttattatgagagagcttttactcatggagctatattttttattagagattacaattcggaacaaaatgaggatgcctaacaattttctttgaggttatgttttggttgagtcttgagcaataaaactttttttgcttaccaaaagttaaaaatatcatttgaaatataaatattttattggttcttttattgtattttatttaattttatcgtaataataaataagtgaagtggtagatgatagttgattataaatgaatgcaaaattaaatattattcacttattttacattaatgaattatagaataaaagatttttttataataataattcatttttttatttaatttttttaatcattaaagtaaaaaagaatgaaaagtatttagttttttcttttatttatcaactactattaattgcatcataaaattgaataaaatataatagaagtacatactactagagatgaaaatttataccgcggggatgggtaaccgcggggacccgcccctaatggggtggggattccccatcttagtggt

SEQ ID NO: 99645 - DNA, 778 bp, Cannabis sativa
tattattatttttattttgattaaaactgaaaaaggaaaaaacccacatttttttatcacatacaacccatattttgaaaagtacattagaatgtggtaataataatataattaaagaaaattcttagggccaactcctaaaagatcgttacatcacaaaaaaaatggcataatataaaagtgatgggatttgagtgtaacaaacatgtcttaaatgtggataccataagtacctgtgtgatgtttgaatatcatacactaatacaagttctactacattaaattatgatatagatgccacaactttggtgttcccaactgtagttgacattattatatagaaagacccttgaatatggctccatagaattaaaatttgctataaacatcgtataatagtaaatatgtacaagataccgaaaatggtagagacattagttcaaataataaagaaattatctccctactatcttctcccaccttttagaacagcaacaaattacatctgaaagaaagaagtaatgctcaaacagaaactcacaagaaataagttacctgctgatttaaggaggaaataaattttaacatctgcatgatttcctatacacaattgataatcttaagctgtggccaacaatctggttgaagtgaataatccatcccattttccttccaaggatataaatagatgatttcgaaaagatgttcaggtgtgaattttagaaagttaaaaaacaatctatgctggagcaggggcacccacttcctcattactgtt

SEQ ID NO: 99646 - DNA, 1843 bp, Cannabis sativa
attaacctttgatggccgagaattggtgggaagcaatgaaccaagagccatataagtctcacttagcttcatccttcttattttctccttagcattatgatcttgtttcttaaccattaaatcctcaatgacttctggctgaactctcaattgcttttcatcatactttgattttttgtcatcagacaaaaatgatattctttccatgtcattattgacaagtaaggagtttgagtctatttgaggaatagtataagaagtacatatgttgtttccttgttcaacatcaaatatatgtgaagtttcatgacaaggatcatgaatggttggaaagttgctatcttggtagtgtgaggaagctttagtattttgttgtaatattccattaatgtcattaatattgcttaacaattcggcaaatgcagaaacttcttgctgaagatcaatagggtttacattcaattcatcacaaggactaattggagtactctctagaagccatagatcaccaaagccttctaaatcaatattatctatgaggaaatcatattaatagagataatttgttagactacatacaataagattattattatatatatttttagtttcagaagagaaagaaagaaagaattgtaaatgaatgaatgctcacttcattagaatgaaacagaggaggtacaacactttatatacacacacttcagtcttcagcaacaacaaactaacataatacctaaccaactactctaactaataacagaatttgtaacaaactcaacaccttacaactaacactttaatactcccccttaaggtggagaggatatattacaaattcccattttgctcttgagagtttcaaattggctaggaagcaaagccttggtacaaatatcagcaatctgatttttgctagaaatatgagcagttttaatcactccttcttgcactttgtctcttacaaggtgacaatcgatttcaatgtgctttgtactctcatgaaaaacaggattcgcagcaatctgttgggctgttttgttgtcacagtgcaaaatagcaggtcctacacgttcaatgtttagctttttcaaaatagacaagagccaaaccaattcacatgtagtattagacattgctcgatactcagcttcagctgaagatcttgagactatagattgcttttatacttttccaggaaaccagagaattgcctaagaaaatgcaaaatcctgttgtcgatcttcttgtatccacataagctgcccaatgggcatctgtgtacccttggagcttgatttcagaatttgtaggataaaataacccctttctaggtgttcctttcatatattgtaaagctctttgagcagcattaatatgtgtgactctaggggaaacaaaaaaactggcttaatttgttgacagtgtatgctaaatttggtctagtaatagtaaggtactgcagcttccctataatctgagttttagatttacctccataggtgtgttagcagcctcacatcctaattgtccaagatcttttaagagttttagagcatagtgcctttgagacaagaagatatatacctttgttatttctagcaccttcaagacccaaaaaatacttgagttcaccaagatcttttaacttgaattggtcattcaatctggtttttaaattctggacaacaaccatgttattgcttgctatgatcacatcatcagcataaacaagaaggattatgattcttgatccttgttgttgtatgaataatgagtgatcagttgccgaatgttgaaaaccttcagcaagtaatgttgtagagaatttttcaaaccattg

SEQ ID NO: 99647 - DNA, 1798 bp, Cannabis sativa
gtcctttattttctttgcttcttctctttctctgactattatttttatatatttttacgagcaaatttctacatatcttttttatgatatatatatatatgtgtgtgtgtgtgtctgtgtgtgtgcgggtgtgggtgataaaacatataaaatgtggttgcttgttgaaattcctgaaggagctgtatatgaggcattattgttaagatttatttgatatgatttgcgtcttttacccctgttgtgagtgtggtttatgttattgtaaggttattgaattaaggacataattacactgtattacgtaatacgtagtatttatttgcataaaaatgttatataaacaattcttccatgacaaaggggaaaaaagcatcaagctaacttcttttatatcttctaacatgaaattatagggaatgtgtttcagtcctcctactttagatgaaccctcctccaaagacaagcatggtaaaaaggatcgagacagaaagggaagcaagaaagatatttctcacataaccggtaagaaggtttcttcaaaggaatataaagatgcttcttgtaaaccaattcttagtaagaagaagaaggaagctggtaatgatttaaatggagaagttaaagctacaaattcaaagactcgacttaatagaaatggtagtgttcataatcaccaaggaaaggcatcttcaggttgtccttctaagtatcacattatgtgcttgaatgaaatagagagtgcattgcgtcatgatggcactgacattgttgatgaggataagcctttctttgctagtacttggggaattgagttttggagatgttatttagctggaaaagatgtactagagactagtggaacttcttctaccgtagagaaaattgcttggattgttagcagtgctgcagacaccatttctaagaaggaggaagaaggtgtatcgtatgccagcccttttctcttgtttcttgttccatcccaagagaaagccacgaaggtttgtgctatatgttctgtctttcactcagcagtttgggacacttttggtttcataaatgtgttcttatcacctttatatgaaagtccatagggtggtcaaagttgctaagtttattccagtttcagtgcaaacttttttgtatcagatactgtcgtttctttgtgatgaaaaataatcatgtttggtttaataatttgtgatgttatttcttttattaactatttttctcttctttcctgatcatcgctcatcaggtgcgatcagtgtgcaaacctttgaaagttcacgggatacatacagtgagtatccatcctggtgcttccttagatcaccagatccaagggtaggtacatattgactatagagcattcaattcttttaggcaattccagacgggtttgtcagggtcgatcttgcaaatttagtgttaatacacaaattttgtgaatggtgtattttgttagtttacctatgcatatatttagttaggtaacaaaaattgtgattatttccagggacattttggcatgaattcatgtatctatctttttgtatgtatctgcttgattaatgacctaacatgcttattctttagtgtaatacaatcacatttttgttaaatttatttcttgtttctcatctacagtttgaagaattgtgaacccgagtttctaatttcaacccccgagagacttttggagcttatttctttaaaggctgttgatatttccggggtttctttactggtaatgatctgtgtatttattttgtactctcttcttgttttgttttaa

SEQ ID NO: 99648 - DNA, 1005 bp, Cannabis sativa
tagtaaaagaaagagaacaatcatagtttttggagtatttacaaaatcaacggctcagattgttgcatacaagtcaaattttgtgataaaaagtgggacccacgagatgatcctaattggctactttttagtggaatcattaattataataataataataccaaaattactttttaatttaatgtaaactcttaaaaaggatttgaaaaaaggtagttcctataggagtcactttaataaaaagttatgcttcaaatcaaagtctttgtgcattcacccccttattgggggaggcttttatataaattataaatacttattagccatattttgtgtatatatatatattagtatatctctcttcaagtcccaagctataataaaaagatttaattatttttgtgttcaaatatgagttgagttcagaatgttgggtttattattatgtaagcaaagcaagtttgtattgacaattttagccttgagaaccgttggaactaaaaagggtttgaaatttttgggtcaaaacctacattatctactattaaaatataatatattggataggcactagtagtagtagctagctagctagctgtggagaaactaattaatattaatttttttggtcacttgatggtaagtgatataataaattaaacttccagaagcagaagcagttgacagagaaaaaataaaaaaggggagagaatattttgaaagggcttgttctctaaacaattctggataaataccaacccatttaatgccataaatatatatatgtataaaaataaaaattaaaaatgaaaattggtataactaatttgggatttccatattattatactaggctaattagaatttttattctcgaattttaataaatactaaatcatattctctgaacttttaaagtcattaaaaataccttttaaactattgaaattgttgaatttaagaatttttgtctaatgttagtaaaaaaaatataacatagatgaa

SEQ ID NO: 99649 - DNA, 998 bp, Cannabis sativa
aaaaaaaaaaaaaatcaaaccaaaccaaaccataaaatcagatcaaagtaaatcaaaccagcccataaagtttctcaaaataaaacgcatcaaacacatattagcaacagccaaacaggcaccgatcaaaacaaatcaaacaaaaaaaataaacttagggttttcccgaatcgaaaaattaccttctaaaatccgtgaagtggctggagctcggttccacgcccatatctaagacaattaaaatatcgagattgagctaatttcgttaaccagatgtaatttagagagtggcattggattatttttggcgcgaaaaaggtgtttgggaagagagaaaatgagagagagaatctgagaaaataaaaacttatgggttttctagatataaatgagttagtaatagtatagtagtagtagaagaaaaagggttagaagtcatagaaaggaagaagatttttggggattttggttttggtttatcttcttctctctaaagtgttgacctaaatatcatatatctcatctcaatactccatcattttactatattttattcatttctggctgatccattacctaattaattctccttattttaaatcgtaatgctatatttaattatctattttcatatattttctcgaaatatcattaatgctaaaaatatatgtaatataattaagaacatggacatggaaaaggattgaaatgttcatagtatatgagtctagatctgttcttcctttttagtatgagttgatgtcgtttaatgatattatatggacccacttgatatggtactacattacactatactaaatactaagtacttctcctctcctctcatctttgtggttcaaaattaaatcattttatttaacccaaaaaaaaaattaaatcattttactgtttttttaactttttttttaaaaaaaatttaccgtttctaaagtggttgcagcgctagttataatagagtttttatacgattttttgtt

SEQ ID NO: 99650 - DNA, 3509 bp, Cannabis sativa
aaaaatagaaaaaattacctcattataaccagatatgcgaagggtgaaaacaaaatgacttcttgatgactgttcattcatttgggtcttaccaacagacctgaaacatacaaaatttatgaacaaaataagttgtttaagatagaactagagaaaagaaatgctacttaataccaatgtttactcttaaaatagattaattatatttcacaaaaccatttctcacaaatccagttttaaatgcatgacttgtatcaggtgttaagtcaaataataaggcattaatatcaccatgtaaagccctcaaataagtgcacatggactataaaattatggtggaaaagtataaatgaacatcttgtagatgcaatcaatctcaatagtcatacaagatgattaacaaagaagaaagtattgatctcttataatctcattacctgctctgcgcagctcggtccaagagatacgaaacttctttggcactacgaacatccacaactgtcagatcagacacatgtgtgtttccatttgcgtcatgtttgattgtgtattgcttcccaccgacactattttctgttcgtgaaacatctatagatgatctatttgtggatagcaaatcacgaattgtttcgttgtatatttccaacatggatacctaagatattttaaagagaaatgtattagtgaattaactaagattgcagcaagatgttcaaacaatagttatattaagtgataaagatagatccaactaacctgcatttcatatttccagccttgtagtagaagagattgtctagtttgaaatatttgttcaagtgaacgaggtatcagcccttttagatcaggctgtcctggtttgcccatcatggtatatgttttgcctgatcctgtttgaccataggcaaagatgcaaacctgaaaaaagaaacaaccataattttgctaagtattatgtcatatcagtaacactcaataaggctaacaaaaacataattatcaaagatgaacggtacatgcataatagaaaagagaaagtataatttcacagtctctcagtgcaatatcaagatagaaattgaacaagatttggagcttaggatcaccttgtaaccatcaagtgcactttgtacaagttgtgaaatttcttcaaagacgtcttcttgtgatgcatcgggtacaaaaactttgtcaaatgagaaagaatgtttctgccctgattattgacacgaaaaaagttgtgagtgcaacacaaaaggccaaaagtaaattgaggtgtatgacttgtctatatatctactccactgaagatgtagaatacagtcagcataccagtttgcactaaatcaatgccgcgtccgaaagcttccattgatgttggaaaagagataatctttccgtcagatgaaccatcatcaggcaacaaaggccgcactctacagaatacacgaatattccctttcagttcctgtgacaagaaagtggttcagtagtatgtcaagaatgtaactactgcaaacgtttgaaagaaagcattaccaaaatggtattatgtaacttctttcgaagcatttccccttcaataactttaaattctgcatcagccaaacgactttgtaagtcatcaataagtttttgttgttcttcatattctgatctcgtctcaagtgcagataagtcggacacctgaaagaatttgaaagaaaaagatatatttacgcttagattcctgaaaacaagtaatcacatgttatgtgcaaatccactttgtcacctgaagtctttctagagcagttgtgagttggtccttcagtgtccttatttcattactttgtgaatcacatttatcctgaaaagaacccagtattatgataaatttacaagtgaacatatttttacaagcataagctacagagaaaaaagcgttgggcaacctctagttcactcgtttttgttgttaggttatctaactcagagcaggaattctcagtagattctttatattggactacttcagctgttaaagactccacttggaggagcaagcggtcacgatcatctctaacttgttgcaactccattttaaggcttgcagattcattgaccaaagcatctctctgctttactgcctcatcatgtgatgtctgcgcatgatccatcaaataaatttttctatgaattcatgccaaaaaaaaaaaaagctaaagagaaaatttaaaaaacttcagtattgttactacaggactaaaaaataggcattaaagttcgaaaccattggcaagagctcctgagaatcatagtcttttagaacattaaaatttactgaagaactctgtatcacaagggttatatttcatctacactgaagtgcttataagaaatatttgttcctactatatgcaaagtggaaacaatgcaaaaagtggaaaagataacatttagcaatgttgacttccacagtaaaataaagaaactcactttgcacatagtaagttgaccccttaacatgctcaggttctcccccattccagccttctctttctctatacgcttaaggtcatcctcggctgtagataggtcggtgtgaagtttgctattatactgttgtaagctagcaatgtaatcttgcaatcgcttgtacatgtcattcaaagacgttatctacacagttattcataaacccaattaccaaaaaatttatgtaaaagttttaataaatctcattcgtgaagaattctcaaaaagcaactaaggaatctatgattggcatccattttaggttttaccttttgattagcacttgacagctctctctgagctttcccaagctcttccgatagagtattctgtgatctctcaatatcaagcctggcctgtctttcttttgtgagagaatccattgcagactggttgacattaacaaattcaagacatttaagaaagcttgtggatgtcagtaatactatacccacaaaattatattaaaattcatctgcttaccaatttatcacattcttcttgttcaaatttctcttgtagaaaagagtaattcttcctcagctcctgtataattgagttgagctcttcttccttgtttttaagtaggttttctgcattaatcaaaacacagttcactctcaatcactattcaaataaattcactgcaatatataaatataaatatatataaatatatatgtatatatgtgaaaaatgataaagaaaaaaaaaaggcatacctgtttcacagcatctcagctcagctttgtccagcctattctgtaatttatcttgctcaaacacataacttgtttccagctcttgaaaccatttgatgcaaagtttaagccttttaatatactcagtcaagagatcacatttttcctaaaaacaatcacaacagatttcaaaataaaatgcaatttaagctaaacttagactaaaaccccatttcaaaccaacaaatcaagaaacatttgtgagccaaaaaaaaaaaaaaagaccaatca

SEQ ID NO: 99651 - DNA, 1344 bp, Cannabis sativa
catatttagggtgttaaaaaacatacttgtgagtagatctaagatccgggtaacataaattccaacagcaagtcagacgcaaaagtcgtttcggctttgaaaaactttggttggctaatgctgagagtagggaaatcatttctcaatgttggatagattaatattctaataccctgatagacaatgcgttacacaatctcgactcttgtgctaccaatttgcaaaaatggcacattggaaaatatggtcgtataaagaaaactattactaaagcacagaccagagttagtgaattaaaccatgctttgaccagatctaccaacaccacggaggagctaaaagcctctaaatcaattcttgatgacttattggaacaagaagagatgtattggcaacaacgctcacgtgtagattggatgaatttgggagatcgaaacataaagttctttgatgcaaagcctcagcacgacaatccaacaatagaattaagttcctcattaatgattcaggccataagtttaattcccgttcagacctggtaactgttattgaagactacttttagaatatttttcagtcttctaatacagatgatgaagcttggtcctctatccttgagacgatactagccatggtaactcctgaaatgaaccatgatcttaccaagccttttactaaagttgagattgaagaagcgctgaaaagcatgagtcctgataaaagctcagagatcgatggtatatcagcgatgttctaccaacaaaattgggatttagttgctaaagttgtcttggagttcttaatgaaggagctgatcctaccaaattaaaccgtacaatcatcactttgattccaaaaattaaaaagccacagaatatgaaagactgccgacccatcagcttttggaacataatatccaaactcattaccaaggctctagttacaagatttaaggtagttcttccgcatgtcattttaaaaacacaaagcgcattctagcttaaccgtctaatgaccgataatattttagtggcttttgaacttgtccatgccattaaaacttgaactacgggtagaaagggaattgtttcacttaagttggacatgagtaaggcctttgatcgagtcaaatggcgcttcaataaggaagttatgagaaaatgggcttcgcggaacaatggatcaaccttatcatgacatgtctctctaccaacaccttctcctttactgtaaatggagaagtcacaagttccttgaccccaactcgtggcttgtgccaaggatgtcccttgcctccatacctgtttctcatatgttaagaatgttggaaataattttaccagg

SEQ ID NO: 99652 - DNA, 907 bp, Cannabis sativa
gggcactaactatttctaagtattggctaattgacaatatcctgtatttgaacagccacacaaggatgtaagttgcattagaattctttagtgtgaaaaattaggtgcaagaattaactgggctaactacatgtatgtgcttgatattgtttcttttcttcttccctttttacttggaattagagaattataatataatctcaatgagcctaaacaaaatataaaaaaaaattgagtagttattgaactcattaagtatacctcattaagcttcatagaaagttgatcaagaaattcaatgcgatcctttgacttctgtaaagcttccatgaccttcttcttctgaaatagcaaatcccttgcctcatcttccttccctaaccggacactaatggctgcttgtcgtttaagattctcagctgtctctgacaaacgcataagcctccctctggcactgttcgctacacaattctcataactgtgtcacttagtctctaacaaattaacttcaatccattcaacatggcgaactttcgggaagagaaattcaacataaagaagacgcttttcgagctcaaaaatcaaatgggtatctaaaattggaattagatattatgaaattgaagagacaacatacctttggctctggcggtgtcagcctctgtttgaagctgatccagttgggcacgtagctggtctgtattcgtattggaagccgaacacataatcctccatgaaggtcgccatggcagagccaggactgacactgagcccagtccagagttcatcatcatcgtcgtcgttgtcgtcgtcgtcgtcatcatcctctctcttcggttcggatttgggaaaagtagacaacgcaagcaaatggatcagtggtaaaaaagtaaaaacagtgttttta

SEQ ID NO: 99653 - DNA, 818 bp, Cannabis sativa
atcaagtcacttgtcacctaagcaaccaactcatcactcagataagaagacaattaggctagctgtctagctgtctttctctcttactttgagtttgtaccaatgcctgtataaaggtttgtcaaaacaattataaagtgtaatcccattattaagacagagagagtttgagaggtgtaagtgtgtttgagctctaagaattaagtgtgttaattgtaaaattcttagacaaactttgtactatttcattgagattcaataaagattatcaaagtttgtgtggctttgaaactgtttctacaatggactaaatcgagagattgcaaagctttcggtggaaccacttaaaattatggtgttcatcatttttcaatttattagttttcaatctctggttagaattgtttctgttagttggtgcattgaatcttgatgtttggtgatagtttttcacgacaaatgatatcagatttgagggttaaatcgatcaagatttgaaacatataaaaatattcttgaacatacttaaatattttttttaaagatttgaaactaataactgaaaatgtggtcataagtagcacaatagttttatacatttctcctcataaaaaacaggtctcatgttcgaatcttcctcttccaatataaaaaaaaaaaattaaaaattattttctcataaaatctatctagaatgttttaatgtttgcttataaagatattttcctttttcagtatacaaattagttaggagtggcaaaatgtatgttcgtgtcatgttttatttgattcatttttatatttcgtgtcaggtgtgt

SEQ ID NO: 99654 - DNA, 960 bp, Cannabis sativa
atgtattacagaataaataaaacctattagtgtcaatataaaatgcatgttgttgggtacaaacctcaggaagccaggtaatatattctagttatacatggacatcatatgatttgtttttgaaataagtagtaaagcacacaaactcaaatttccctgtctatatatttctcgagcaaaaattaacagtacattgtttaatcaaattatcatatgatatgattcatatccaaattaattcttgacattttcttgtctattttttacaatagaagcaacaaaagcatcaatggctttaagagaagaagaccctttactttctccctcttctttcaaggcttctcgtatctgcaacttaatctcattagcctttttcttcaactcttctccttgaccatcgctcgccatcaccaaatcaatcaccttcttcacttcatccccagcaatggttcccgaaggtcctcgactcagctccacactcacacccatctcctccaccaacatctttgaattgtaattttgttcccccgccaatggccacccaatgatcgggaccccctggctcaagctctccatcaccgaattccacccacaatggctcagaaacgcacctgtagacttatgccctaaaatgtccaactggggcgcccatttccgaactaacaacccacgattcttctccttggctcgctcttcgaacccttctggcaaccactctggattaaactctcctttcaaatcgaaaccctccggaggccttatgacccaaacgaaaggcttctcacttttttccagcccgattgccaattccatcatctgggttgctccgatcgtattctgggaaccaaacgcaatgtacagaacggacttgggttcttgtgaatcgagccactcgaacaacttgtcggctgacatactctctttggaaaaactgaaagaagaaggtgaaaacgacttgtc

SEQ ID NO: 99655 - DNA, 801 bp, Cannabis sativa
cgaggctctttgagcaccgcaatctctacttggcgcctgatgatctcttctgcatggggacaagtttctttgtaatagttatggacaagaggtggtgttacatcttcactagatgtttttttaaaatgtaaaacaaaagctaagagaatgaatactatcctcatcaagtattccattcttgttttttttgttaggatgaaaatgacacattcttgtttatcataactataagctgttaaaatcttagacaattttttgggttatgttttcttttaccattttgttttttatttaagtttcaaaaccaactcatctgaaagttatttcttttgagtgttattaatattatacaacaaagttggtccaaccaaccataccaaattagtcttttctatttatttcattatctttgtcctgaattatctaaaaacagtaagtaaaagtgattaatttaaattaaacttgtttctttttagttcggtgaaatataagcttcatcgtcgagagaaaaatagtccagatcacgagttaaggcccctaaataactgttttgtcccaactcaatattattatacagtgagagactcacttatcacacaactcattatttgactactagatcctccaaaaaaaaaaaattaatattaataataagggtatatagcggcataaatatccaaagttttaagtctgtaagcgacataaatactcaatgtttgtaaaactgtaattttcttccagtttcgttagtacagattctattttaaatttattaaaaaaacatttggaagtaactgatac

SEQ ID NO: 99656 - DNA, 1615 bp, Cannabis sativa
attaaatttagcacaaaatataaacttgattaaatttatcctacaataaatgttactttttttattcactctttttttgagacctagacccagaccttgatccaaatccaaactcgggagttggaactggacttggacccgaatccgaactcggaaatcaaaaatggacccggaccctgatcccggactcgaacttggacctaggattcagacctagactcacagaccaggactaagaccaggacccgtggcccaaacttgagacctggacccagacgtgggtaccggacccacacctggacctcggacccaggacttggacttggaccccaaaccccgagcctagatccgaatccaaactcgacccggacttggacccaaacccgacctaaacttgacagtcggactccggacctagactcgactcatacctgggagtcggacctcggactcgaactcgacctgaacctgggagtcggactccgaactcgaactcgaactcgacctagagtcggtgttggggtcgagtttatcgaaaatatattataactttacacaacctattaatacaagtcaataccaaatatattattgtattaaataatactaacagtacaatatattaatctaacaaaatacaatataatacgaaaaaaattgaagtttatttttatcaagttgagctaaaatatacatatagcactttgtccgttattttttctttggcaaatatttgtaggaatccgttattttgatataaaggtacgtatgtacgttatttatccgtaagtatatatggtgtcacattatattaactgtgttgatatatttgaagaagtacattgagcttataataaaagagtgaattaattgtctatgaggtctgctagattttctttaccttcaagattgcagtatatataaattataataataagaacataagacgtacgtgtcgttttacaatcatattttttgttaattcttgtctagataattttcattactttgattcgaattctaaatttaatgataagttagcctataatttgtgataattatagaacaataatactctagttataataactttttattgattatagaccatagcagacagctaattaatttatcgttcaaaactaaaaaaaataaaaccacatatagtgattataaatcaaggtgtgttgtgtccattaattgttcgcaacacaaataatatcagtgtctttatattatgatttaattaattaatatttcttttacggaatttatgaatcagaatctcctacaatataatgatattgatatataaaaaacgaactaattaataatataaaagacgagaaaaaaaaaaagaaaagaaccaatccatttagtatatatatgcaatataatgatcgattgaacaaagttcatgaaccaaaaataacttaattaattagataatagtcctagctagctatttagaaggaaattttatggttcattgcacttaatatttaaatagattaataatggcactttttaaaaagatatgaagataagccaaatagtatattcgatggttgtataaatatatataaatatttataataaatataaaagtcatggt

SEQ ID NO: 99657 - DNA, 1056 bp, Cannabis sativa
agtttagtaatcagtacaaggcaacaattggggctgattttctgacgaaggaggttcagtttgaagacagactgttcacactgcaggtcggtctcttacttcttctaaatttactttattactttaggtaaattttataatgacatgcttttatgaatattcttggtgaacaattttaagttttagattggtgagcaatcttgatctgtaaatctgtttagctatttttatttttgttagtgctgaatccttgtctatgtctctatgatgcttataattgattatcaaagctgttcgcaaattgaaggaaattaggctattctgctgtgccccagattaacaaaacttgaatatttggttttcttttctcttcacacagggtttttgttcttttaaaccattgtcaatagatcttgtatgattgatttacagatctttgatacatgttgaataagaattatttaatgtagagcattataaattaagcattattttaatgatttttttttttgaataagtggggataactattacttttaatgtttaatgttaatccattttgatatatgcagatttgggatacagctggacaagaaaggtttcaaagtcttggtgtggctttttatcgaggagcagattgttgtgttcttgtctatgatgtgaatgtaatgaaatcttttgaaaatcttaacaattggcgggaggagtttctgattcaggtagttttcattagttgaacctgtgcatattatctaaatattggactcgagcattagctgaaagtggcttttgggattgtttttcaggctagtccatccgaccctgagaactttccatttgttgtgttggggaacaaggtagatgttgatggtggaaacagtcgggtggtaagttcttttatcttctttggatttaggccacaatgtgctgatgattggtttttacttaaaattattgtttggttcttccagtatgtgtccgtgcaattgtttcttagtgtatcaactatttttttcatctctgttataggtgtctgagaagaaagctaaggcatgg

SEQ ID NO: 99658 - DNA, 2381 bp, Cannabis sativa
taataatattttttcttaaattatttattgtatcatttttatataaagtgaaacacacttaacataaaacttagtatacgtgccttgcacgtaacattttactagtatatataaagatatttgtatatatataaacctatatctaatataaaaaaacataaaaacaaatttccttcaattttggctttttaatttatttttctcccaaatgaatagtaaccacttggtcaaatatgtggatgtgtctaaaatggtttccaactcatttggactagttaggcttatcatcaaatttcattctctaattattattttttagaatacaatgtaaacattttattcaatattttttttaaaaaaaacagttttattattcatcatgattaaattattatttttttttttaaaaaaagttcacattttcttacattattattatatttattattgatacttatagtaatgttaccatgcaaattagaaatggtcacttctctcttaatttgtctttttaaaatatgctataaaacatcatttttttttagttatcttattctctctatacaatatcaatcttaatattattttactcttcatagttcccacaagaaaaataaaagagttaatttaattaaagttgacttatgtttagtctacaaagtcttaataaatgaattcctaaaattgtggaggttgattataagtacaaaataaattgtttaattataagtattattgctctaataattatgtatataacattttttaagaaaaaataaaaagattattttatttctaatgttgttattttgaatatggacacttaacctaatacattttgtaataaattttgtagttatttctaattttcaatagccttaagagtcacataagaataagattcattttttcattttaatataaaatttaaagtatacatataaatatgatatatctaagtccttgttttttcttttctaatataaaagaaaaaaatatattttttttcttttaagggtaagaaaattattgtgttgtattaaatgtaaaaggaaaataaagtcatgttattttataaagacaataataaaaagagaaaaggttctttaactaaaaagggaaatttgagattcagtatttgtaaagaaagattttatttttattgagatggaaaagaactatgtacctaaatactagtttattttattttaaaaaaggttttgtttttatcaaaacaaattaatccattcacatgcttaaataaaagattgaaaataagttaaattttgatatatattaaattgtgtacaaattttttagtactcttaattttttttttaaattattgaaatttgtatatttaaagacgtttgtctaatttcatttaatgtaaaaacagatgtagtgattattcacgtactaaatcatactacttaaattttcatctatatgtcgggcattcattagtaaaaataaaaatgttaacgatctcaaaagtttaggaaataatttagtacttatcaaaatttgagagaaaaattcttaactagctttaaaatgatagattaagtctatagtacaccattaatggggtgtttcggcagacctcctatctgtttcggcatttagaagagcttttttagtttttttttttatcgtgtacgttataattatttagggctacttataaatttttcagaaaattctgaatatcttataatctgaaaataaaatttaaatattttgttacacatgcgactattttttgttatacgtgtgataagtaattgtttgaactttatttttcggcatgatcaactattcaaatttttctaaaaatttagagtcttaaatacttataacatacacaatcatggaaaaaaattgatttgaatttttttttctaaatgccaaaactgatatgaggtctaccgatagtggcaaactcagaactaaagttgagagggcatactttttttttaggaggacaaaaagtaaactaaatattaaaaataaatatatttttattaggatttgaaccattaatctctataatatatgtaagataacttaaccatcatgccaaaatgtttatatttatcacatttaattatatatatgttataactaatcaaaatacttatgcatattttttcttaaatattttacggagacgactgcccttcacctttatgtgggtctacccatatctagcgaaatattcttttaagaagtgtactatttgtaacgtcctcgcttcaagcttccattgtgcccttacacctacggaatgatgactcttatacacgagtacgtcactctggatgctttatagactgatgactgatcctacagaccaacacgagtattttcagcatgct

SEQ ID NO: 99659 - DNA, 1590 bp, Cannabis sativa
  modified_base (319)..(325): a, c, t, g, unknown or other
tatccaaacaaattattttaaaggctactgaagatttttgccccctgaactttgacatgtaccaaattatgtcccctgaaattttaaggtcgttaaaaatgccccctgaactatagagattgttagatttaaggactttttttcaattttagtaaaaacgtctaacatggatgaaaattcagggggcattatttaatacatgtcaaagttcgataggcatgatttggtagatatcaaagtctgggatgcatgatttagtacataaacaatcattgaaatagtaaaattgaataaaatattagacaaaagtccttaaatnnnnnnntctcaatagtttagggggcattttcaatgccttaaaaatttaaggatatgatttggtacatgtcaaagttcaaaatcctaattcataataacaaaaatatacacacgcctacaaaagaccagatataacaaacgtgcaattgaatatttaattaaactatcgtaaattatctaattaaaaactctgcaaatatctaatataactagaatatgcatcgtcatgtaaacaatatttcactcataattttcccaactgcatacttgtagaaacaaaaatagtgtctagcttattaccataaactttttatatttatataaatatttatttgaaaaaaatcctaatttagaatagtaattaagtagtatgatatgatctagtctgctccatgagaaggcaactgattttggacaacattgacattaagagtaacactactctcttcaatgtcatctttatactcagcaaaacaagccaatcttcccaactcctcaacttcttcaataacaatatcaagcttagcaaccgtctcaaccaacaaagaagcaaacgccgcgaaaggcaaagcttccgagaattccaagcttgttatcgcgattttgctaagttgaggcctaagcattttgtgttgactacgattattttgatctcctcctttagttttccactccatcaaagcggaagagtcagtcttcacgcttgataagtgtgagttattactcaaaaagttatgttgtttgtgttgttgatcgcttcctcgcggggttcgcttccccgctgaggctgcatgagctgcggctagggctaacatgttgtttgtagccgagccgcctttgtctgagccgaggaagagacggggttgggatttgattgcggtgtttagatcttgtaaggcctcgtggaggtgatctgagaggatctccggcgagcaatggcggcggttttttatgcttgtggctagctctattagggcttttgacacttcttttgatactcttacgcatgggtctttgaataaaactctaactgattttggggtctgaaataaacatacaaacacacataagtactatttcgtccaaataatttatgttaataaatttacaaattaatcttcttttttcacttaaaatatataaatctgcaagaaagtaaaaagaatgtgtattgctttgtgtaaaaatccctatatatattatatgtaagtgatcatctaagtcttcgatccaaaaataaaaaaatttccctatattcaagtgatatatttt

SEQ ID NO: 99660 - DNA, 1560 bp, Cannabis sativa
  modified_base (47)..(58): a, c, t, g, unknown or other
ttgaaaaatattttcacttttccacttttaaaaacagaaaactgatnnnnnnnnnnnnaccaaacgccaccttaattaataatcacgttggtgcacatcttgtttttaaatgaattggaattcggagaattgctcaaactaaccgacaaaggtgccaaatgttcattccaaaagatttgtttttgtaattttcctcaaggaataagttgataaataataaaagaataattaattaattagaacatgccttccatgtgctaattaatcaaagatctttatttctagttctaccaaccaaaactcatacaatttttcccctactactacatacccttttcctatttattttattgttttatgttagacattatttatcttttacattggtcatcattatatacttatgatacttcacttttttaatgaatgtgggactttagttgtacactcaacaatttttacctcctctcaaacaatttctcatatgttcactctccatcaaatagtgttttcactctaatgcgttggagcaccactatctcaagagtttttgctctttcttaggctaacttctctatacaaaacacaccacctatctaattgagcacattcacaaatctcatcgtgagattatttaggctcatctccttttgtttaacattatgagaataattcattcacatgactaactttttgggatccgactttgataccgtcaggacgttggacatcatctatcaccacattggtacgatattgtacgcttcatgcctaagctccatacaaatttatttttgggcaccttcctaaaagaatattcataccaatataattatgatccatacttatatatggatgatcttttttaattctagtccatgtgttagtttgaacacccaacactttagagtatattctattcttagtatatacaaaaattattataaactgttttttgatacgtataacgatgtatacagtatcgttatagcggacttaattaattttcttaagaaaaaaattgagtaatctatagtataagaaataagatttaaatagtatgagaattaaatcatttaactcgtttttctaattctaatcctagtcaggtggttgtgtatgagatttctattagattatttgtaggctattattttagctgattgctagtaataaaattgtatgatttactaaaaaaaaaattattcaaattttaaaaaataattgaaagataatataccaattttctcacagcacaatcttcacgagcctctttatttaataggacatttcatatttgaaaaatcatgatgagattctcctttctcaattcaaaccaaatcgatggacagtacatggtttttttattcgagaataatcgatggacattatatgggtttttaattaattctcatattattttattttaagaatttctcatattattcacttggcgatttttttaagctcatttattatttattaataattatttcaatcctgcacgatcttgatatggggcggtacgtacgtatgtgaattaaatgggccgaatggtca

SEQ ID NO: 99661 - DNA, 1073 bp, Cannabis sativa
gtaggattttaggaataaaattcctacagagggaggtgattcgagagccggtaagctaaacaagcttgatttatggattcaaattcatgacttgtagacaagatttatgattgaaagtttcttaaaaaagattgggaatggtgattttgttaaattgaatccaaacaatttcactggtgttaggtgagattatcatcgtgttcgtgttactttacctatatcaattttcctttaaagagacaaataaaaatatgtaaaagcgatagtgaagatttattctgggctaacttcaaatatgaaaaggttcctagtttttttcttatgtggaatcatgggttatttagatcatttttgttcaaaaatatttgatactcccattcacctgcttgaaaagccttatggcctttttatgaaagctcaaccatgatgtgcaaattagttgatatgatcacaggggctgcgatcaagcaaagctagtgaaatggccgataatgctaggcaaggaataatcttggcagtgattataggatgccacgtaatgctccagtgcacgagaatgaggctgagatcatgtatgtaaaaatccaaaaagataccaccatcttaggatgtattgattctggtacagttgatacaattaaggttgaagagttctttttgtttaagaaaggaggttgactattattaaattaaaaaggggtagagttgggtttgatggtgaggaggagcttaatgatgtccatgttaatggacaaggatgtgattgggtcatgttttcaaaaaatatgaatgggatggttcctgttgtaaaggcccacttagaattatgagtattcttagttagaattgtcgtgggcttgggaacccacgggctacaaaatttttgatagacattgtctttcaaaagaagcccaaatttgttttttcttgtgaaactttatgttctaaggaggttgttgatagagttagggcctgtttggggtttgaggctttattcaatgtggatgttataggaaaaaaggtgggttggcttatgttacgaaaattctatttattacgcaagtgtacgtatc

SEQ ID NO: 99662 - DNA, 1150 bp, Cannabis sativa
ttattttaggggtattttaggaatctttttgaattagtggtatcaatttgtacaaaaaataaaagggtccaatttttgatataggttgtattattatagtcaattaatgaaattttccttgtgatatctatctttagaaattaatttctttatttatttttttttttttgaaagaaattgaaacattaacaaaattaacttagatttgacatataaaatgttagagattcataatatataatattgaaatgtcatatacgataagtatgaatttatatgtaaaagacacaaagcttctatgagttggtttaaaaaaactagtaataattaaatgaataaacaaataaaagctcgtatgaatttaagaaacttccttacatggtgaatatatatttgtagtattagcctagattataactggatggagattattattttgagataaaggaagaaagagaaaatattgagttgagaaataactttctaaatttttgccattttttttttaagtttattttctattatttggtgaacttttagtttgtttagcaaatcttaataaatttagtgaaaataataaaataaaatatatgcaaccaaataaaataaaagatttactaaaaatcaaataataataaaatatttgtaaaaataataataataaaatttagtctccaaattattcttgtcttattactaaaatataataatttattgtttatatatggaagtaagtataaatttaaataaatcaaatgagagagagaatgaaagaaagaaccacaaaagtttgtgtaactagataagagtacttacatcaatttctccatacaattctatcatggatcattggacaccaaccatccacactctaagtatgatattgtctattttgagtctaagcccttacaattttattcttgggcactttcttaaaagacctcatattaatagagatatgtctatccttttatacccatgttcctttttattttctttatttctagccaatatgagactttattagttgtattttcaacaatcctccccttaaacacaacactacatagtctcccctcaaacgatcttccatcttgcaccactgttattacaaacaaacacgctccctgacctttattgtcaagaaaac

SEQ ID NO: 99663 - DNA, 1086 bp, Cannabis sativa
tttcttcaactcgaagaattaatcgtaagataggaaccctatatttttccgaattattagggcatgttcatcaatcgaaattcgagttctaccaacgtaaattgatgctcgacgatggtggtgatgcaaaaaatgatagggtttcacctggtggacctgatcctcaacatcattggagaaaaaataattgagatttggaatataaatattagttgagagttcttaaaatatttgaataaataatagttcattttaatggaggaaagaaaataatttcttcatgagatttttattccaccgctagaaatttaagtgtcttttcacctttttttcgtaattagaaatgagtacaagagactttagctcgatcaagattatactaagaacttctaaagaattgttcagaagtcaagttcggaaaagaatatcaaaattagggcttttcatagtcacagttcgaagactagacagaaatgctttattgatgctagaaagaggatcttgcataagaattgaagatctatcattattgtaggtttcattcaagccaatcaaaaactgtattcttttcttaatattcatgagtaacctttataggaccacatagccttacttctattaaaataggttgtaatatgagtggatccttgagtaagaacttgtgtacttcttttagcttcgaaaattcttggaacattcttttgatgaaatcgtccttaaaggttgttccaaatataagatgtatcttccatgtacattacattattatcaatatcacttgttatcatgtgtaaaatttaaaaaattattagactattgcatattgtaatatcctgaatttgtagttttatttcaaattatatatataaaaaaaagtttttaaattggaataattagactaaagtgctactttagtgtcaaatggagtgttttagaaacttatagtgattaaaatgaaaatatttgtatgttatggtggcatgcatgaggacaattttagaagtttgtgataaaaggagcattattttcttaatataaacaaataaataagtttgatttttatcatttgaaaaatgtatttagtgt

SEQ ID NO: 99664 - DNA, 1045 bp, Cannabis sativa
tactccactcattgccaattggttttgagatagaatcccatgattctcaactattattttgtggtggtattaatgtgataacaataaagaatgtggatgatattaagctagttttacactatattataagatgttattatacattttcaaactattttgtctttgttttgtaaaaaaaaatgtatttttgtctcttatcatatgtatagatctataatatttttcgagatacaaaataagaaagaaaattaggaatatttcttaatatatatggaatgtaataacttctatcatcatatgtatatacctcttccaaattcctattattatatataatggagatttatattcaagttcaacttttatgatatttttctttattcttttatttgctttattaacaactagctgctttttaaaaaatattattctaactttttttttttattgaaggtagatatgtattagattcttttcttttaaagaaaataacctcatatattaaataaggtataaattctctaataatggcctcaaattaaaactcttatgttatattaattgttaagctaaattaggagtgtatattaaaaaggtcatagttgaaactcaaaactcctaagttattaattagttaatatgtaatattattacatcacactaaaaaaatttaagctattacttatgaacaatggataaattgtttttaattatacaataacttgtgctcggtagatatacacatcacaactttttttttttttaatatcttacttactatatataaatgactatcaaatggtacttagttgtgttttaactgattgttgtgtattttaacagagttttcaaacttaataattatgataaatactattttaaattctgtattttgtaaaaattatcaattcgacaatttcaactttaagacaatttcaactttaacaattttattttttaatataattaattttaagataatttcaaacacgaataaatacaaaaaatgtaataagttttatcataagatctctagatcaaatta

SEQ ID NO: 99665 - DNA, 2600 bp, Cannabis sativa
ttcaggatgggtgacctcctgagaaattttcctaggaagcatgcgagtgaggacaaaacatgctggaaatactcgtgttggtttttaaggtcagtcgtcagtccatgaagcagtcggagtgatgtactcgtgtataagagtcattattttgtgggtgtaatgacccaatgaagacttgaagcgggaatgttacaattagggcattaacaattgtagccatctgaccaattctatcactgaaaattcaaatagtccaaccactataatcaaaattccaagctctgaaacccaaccaattaaactctgaattcaccactttagcagagaagcaacattcaaaaaacaggtggctatgactctcattacataacataaattggacaaatgaaagaatcaatgggaaagtagaattaagtaagaagatcttgagtgagtaggtgtgagttaattacctaccgtaatcagaaatctatgtttcgggatactcaatctacaccacacaacttgcttatacttcacctgactcacctgaggctattagcaattgcagaagatcgttatacagtttagtagttttaaacttgccaaaacaaccaacatcatgaatactttgtttgctaataaaaaaaaactatctcaaatggtataatttgcgccagtgccaactagagtcctactgcaaattatactcctagaaatcagagcctttgagataaacaatgttaacccatttgacacatgagagatcatgcttctccatgattttcctaacatactttgccaagatcgccttattcaagatagcaccatctctaaaacctagccctccataagcttttagaagattcattttctcccaagaagctatgtggaactttcttttgtttccatttaggccctagaggaccccacgacaaagtctctccccttgataacacttaaggcaaaaaaatgttcttccaataattcctgagccctgagagcagagaatggatcaattgcacttgaccaacaaaagataaatgtcttgttgcccaagttaacaatctcatgttgatttttttaaggattataccacaatcctccattctccatttagtatgtctcataggaactcccaagtatttaagagaaacttgccttcctcaaactagacttcctgaataatgcaagctttaacattattagtgacacccccaaagaaaatctgagacttattcttatttgccacaagactcgaaacactgctaaaatcatcaagagttgcctttaaatgactgattgcctgcttggaccctttatagaagaagattagatcatctgcaaaacaaaggcttgtgagttgaaggcctttacacataggatgatacctaaaagttttttacttagcttcaagctttagccatctagttaagtattacataatgagaacatagagcaaaagagacatcgggtctccttgccttattccctttaaatctcctttggattctaacattcatcattacggcataagaagtaccctctcaaacatgtcataacccaccctatgaaccaagcaagaaagcaaaggccttttattaagagatcttctagaaacatccagtctaccgtatcataagtcttactaaagcctattttagtaacacacctaggggatgcattttttccttccataatttttaattaagtcttgaaaaaaattaaaatattacggggctatagacatgtgcttagcaaaagcaccctgatttcgatgcacaagggaggttaagatctcaacaagtctcaaatagaggagttttgaaatgcacttatcaatgtcattgcaactaaaaaataagtctatagtcaatatcctttgtagggctattaattttaggaaccaaagagatggttgtttcattgtgctctgaaggtatctcacaaatattaaagaaactcaaaatagcattgctaacctccaaggtgattttaggccacattgccttgaaaaactcaaacccatacccatgggcttttagagctagggatattgaatagaacaaacttaatttctttataagaaaagggcttcaacaaattcagttggtgatcaattaaatgaagctcctgaaatgattaataaaatgatataccaccacagagtagttgtctacagtttggccatactagctatcctaatttcttctctccttttctttttgcgaacataaaaataggtagtattttcatcacctttattcaaccaagtgatcttactcctctgaaacaaaaaactattataaattctagcctgagaattataattagcagcctcaataaaagagtcatgttttggatgagtttgggcttaaaattgagcctcccaataaagagctttagctttatgatagttagcctcaacatcttctatagaacaattattaaaattctttagatggtgcttcaatctaaaacaccaaattttagaaaccaaatacttcaaatccttgtactctatccaaaaattaaaaaatctaaaaggttttataccgatattttgaatcacaacaaaagtaacaatacaagaacagtgatatgaaactatttcccatagg

SEQ ID NO: 99666 - DNA, 1793 bp, Cannabis sativa
ttttgtcaaaataagtcaggccttttgtaggtgcacttaggatgtacatagttgatttatgtaaatataatttctgattttccaaaaaaaaaaaaaataatagaaattatataataaatatgaagcattttatttgtcatttatagcaaatagaataagtgtactttgaatgtagtcatcatatcatgaatatgaaaaaaaaaacattaaaatcagatacaatttcactgaaatagttatgcaaacctcttaatttattttaataaaggaattaaattaatgtcttaatgtttaagccattttcatttgtatgtatattaatttgtttggataaataaatattgtggtcgtacgtacttggatttttaaattatttcttttagataatttcttctttggctctgaattttgtgtctcaataatggtttcttattataaataagacaatatttatatatttggtatgattacatccactgaactcaaaagtaatttatcacaagctatatatgtaaaaatttgggtaatgatggtgttggttgaatttagatcataaaaatacaattattttgttggatccaatggtacattcatataatcatcatgatcattcccactatatgagaattggtatggtactccaactttcctatattgtattttatgtcaccaaagaataataaaataaaataaacaaactttagtgaacctctccaataattatttcttatactcagccacacatattttatgcagtgccagtgccacaatcatattttgcttgacaaaatgatattttataagttgtacatgtttatgtatatattatgaatttttcaagtacattaatatttttcttttatatatataaaaatacacacgtgtataataattaatacactatatatatataaactgttgatttttgattttcaattattattgataataatttgtttgctttgacgctgtgctgcatacaggcaggctggcagggtatactaatttattattattcatagctctattatagcctaacaaacatttagtctaatcatactatatacattgttttcagaatatggtgaaatatatattttatatattatatataccacatgcatggtctcagttcttggtctaaaatgttgtcatatatatagaaaatgagatatatgaatttatgagatatgttaataaatgtaaaaattatatgtatactattattttttttaagaagatataatcgtgcatactctaatatgtaggtacgcaggaaatcaaaatataaaaataaggaattgattctgtatattacaatctttttgtcaaccacatgctgtaattttttttttatggtagtgtttgttatagttataacatcattcttgtaaatttttaaaaatttacagtgccgaaaaataagtttgaaattttttgaacacaggtagtaaattagaatatcaaaaactttatttttagtactgtaaactattcaaaaaatttaaaaaatttacgatattgtaactataacgaatatctgaaaaaacaaattccaacttataattttttgagtgtagaaattttttgtaatatgaaattgtaattagtactcttccctacaaatattaatggagagatagtgatggaagcagtaaaaaaactaaagtgtcagtagtatatatgtatgtttgaatcagagagatatggcctacatgtagtccagtgctacagacaccctctccttttttttttttttctcatgagttaattatatatacattcatgcatat

SEQ ID NO: 99667 - DNA, 2114 bp, Cannabis sativa
tatatatatatatataagatgtgccataaaagaatttttaacaaatctatataaaaaaaattatttctattaaacaaccaataacaaatctagcataaagaaatcaattacgttaaataacctattacaaatccaacatagaaaaactagttttgttatggtttcacaagttttgctatgattgttcatagggccgaaactgattttacaagattcataggtttgaaactagttttacaggattcaccatttgaaagtgggttcacagttcgaaactggtttcgaagttttaaaattggttttacaagttttaagggttctatagtggggttgctctattttatgatattattgtatattttttattttaaatttcttttattattttgtttctaagtttgaaattagttttcacacttatattttatttttagatttttgctgtgtattgtgtgttattttgattatatttataagtatttttttctttgtatttttgtgtgcatttttttaccatttgatcatgaaactggttccaattatctttattgtttatcatttacgttttattttcataatctttattgttgttgtgtaacgaaattggtttttgttttagttttcatgatgttcattattgttgtatgatgaaactagttttttagtttagtttgtatgtaaccggtttctccgtttaagattttaattggtagtttaatgtaactgacttctgaaaatttaattttataagctatttgttaaaaaaatgtgttatatttttttagtaactcgtttttatgtttcaatttttttttttattgtgtagttattttatgtctattcaatttttttacgtaaatagtgtgtttgtttgtttaagatttttaattggtcatttaatgtaactggtttcactgtgtcaagttttaattgtttgtttaatgtaactggttttttgtatacaatattcaattagttgtttaatgtaactagtttctctgtgtcaaattttatttagttagttaatgcaactcgttttaatgatttgagtttaattatctgttaagaattctcttatggtattttcttaattaactagtttttctgttttaatatatcattttattgttttaggtttcttatgtttttgttttaattttgtagttaattgtattaagtaattggtttctgtatttaatttttgttttagttatttagttaattgatttatgtgagttgacttttaatttagttattttatgtaagcagatattttgtaagattttttgctaagttgtttaatataacaggtttgttatttaagttagaagtcatttttaaaaattcttttatgatgtcttttttttttttttaagtaactggtttttgtaattgatatatatttttattactttagatgtcgtatgtttgtttactttttagttgattgtaatatgaaattggtgtctgtattaaattattactttttttttgcgcgcaattgattttaagatttagtttttaatatagttactctacataattggtttctcgatatcttatttttaactagctgataaatattactgatttattattgtcaaattctaatgtccaacttcggtgacaactctaacatatatccaatactggtgacaactccgatgtctaactacggtgactttccgggagcgacgacttttctgatgatgatagcaattttgttaaatattctcattctattttctacttgtattgcgattaatattttgttttagtggatagtgaaagttttgtgtagtgggttgatggtcgagtcttagagcttcttagaaatttgtaactggttttagttttggtcttgtatagttgtattggttttagttttagtcgtggtggttttagttttggtcttggtgttgtgttggttttagttttggtcttggtcttgtgttagttttagttttggtagtaagttgatggtcaagtcttggagcttctaagaagcatgtaaagtttatatatgagtttttgtatttgtattgtaaatagctttttagttaagaaaccaatttttgattatacacaattaactagtttaataatttattgcc

SEQ ID NO: 99668 - DNA, 4863 bp, Cannabis sativa
gtgaagctgcttatgttcttggtattcagatcatcagaaatttgaagaacaataaatttggaatcgaggtaagattagcatagaatatatttttatatgaatatgtgtatgtgtaatatatgcatgctagttatgattcatatactaccaacactagtacggtattgatactgagtgtattggtacaggatatgatgttcaaagggtacgatctggtgttaccaacactagtacggttaagtacgtagtgcatgcggtacaacactcagtagtactaggggtaccgttcagcgccaccaacactagtacaagacgagtacttaatgcatgtggtacaaaggtcgtacttctgttaagaatattcttaatcatttgttaagccttgtggatagatttatgggcccctaaatacaagtcagtaatatattgtatgttatatgctattcttagtgagtttgttgactcacaaatattgctttcatgagtagataaagggaaggctaaaactgaacagtagtgagttctgagcttggggatgattgtacatgtcgagacggtgcgacctggggagttcggtctcaggacgacttgagcttcattttgtggtcgctgtgcgacatgtctataaaagctatttcgaatgtaattaaaaacaggatcttagttttgtatataaatatatgtatatgtttataaaagtttaaagttaaaataaaattttaatttattacaattttcgagaaaaccctttgattagcaaaagtgtgcactgttattagaaagtcactgtagcgtgcgtaagcattatggcgttacaattattgttgtgatatgaataaccatttcatgataaacgacatgttgatgaaagatgttattacatatcggtgcactcatgtataatcaaattatacacaacacatttactacatgtctatccacatatgtgatctgaattgaaatcacatacactagagtatagtgtatagtaaatcatacgtaatagttctatattaaatgtttttttttttaaattttaatacactattgacttgttttatttatagtatataatcttaattctcttacgcgaccttacaagattatatcttcttcatataaataaagaattttcagatatttattaattatacttctataattaatatattatttatcttataattacatttcatatactctataatatgttattcattaattacttatttttaaggtaaaagtcccaaaaactatgataggacaatgtttaaaatatacgttgctattattgaggatctaaaagttcaaaaagtgttgttgaacttcacttatggaagaactgtgattctaaaagatgtgatgcacactctcgagatgaagaagaatctagtctcgggctaccttctcaataagacaattttacacagacgataagggttgatttatttactttaaccaaaaataagatatttgtggggaaggggtatgcaattgagggaatgcttaagttaacgtagttaatacttttgctcatatgtcgtgttgttttaatacttggcatgatagactttgtcacgtaaataaatgcttaatcaagaacatgagtaggttaggcatgattcctaaattatctgtaaataactttaaaaattatgaattttgtagctaagtcaagattactaaaataccacataaatctatgataggaaaagaaactaagcctttagatttaatccattctgatatttgtgaacttgatagaacttttactagaaatggtaaatgctactttgtcacttttattgatgattgttctgattttacctttgtgtattaaataaaaaataaaagtgaagctcttgatatgtttaagttatttgtggctaaaattgaaaaccaacttagtagaaagatcaagagattacatagtgataaaggcactgaatatgattctattacttttgttaatttttataacttacatggaatcatacatgataagagtgcatcgtattcacctgaaatgaatagcaaatctaaaaaaaatagaactcttactaaatctgttggtgctattttgttgaattctgatgctgcttctcattggtggggataaattttgttgattgtgtgttatgtgcttaatagagttcctaaatctaaaagacaattttctccatatgaaattttgaaaaataaacaacctaatgtctcatattttaaaacttggagttgtttggcatatgttagaatttgtgatcctaggagaattaaattgactagtagagtatatgaatgcgtgcttattggatatgttgttaatagtaatgcatatagattttatgaatcaaatgcgcgtctcattttattatctaatggtgtaaggttttaagaatatagattttcatttaaattgagaaatagtgggagtgcatcttctagtaacatgtctattattaggaataatgagcatgatgagggtatggaaattgaacttagaagatgtaaaagatctagagtatctaaatattttgattctcatttttatgcatatactctagaggaggatcctgctaacctccaagaagttttgacttcactagatgttaatttgtggaatgaagttattaacgatgaaatggactctcttgagtcaaaaggaactggcatgtagctgtgttaacaccaggttgtaagacaataggttgtaagtagatttttaaaaagaaattgagacctgatggtattattgaaaagtacaaggcacatcttgttgccaaagggtttagacaaagagaaaattgccaaagggtttagacaaagagaaaatatagatttctttgatacatattcacctgttactagatttacatctatttgtttgctcattgctcttgctgctattcataatcttattctgcactaaattgataataaaactacttttttgaatggtagttagaagaagagatttacatggaccaacatgaatactttgttgctcttggtcaaaaacataaagtatgtaaattagataaatccttgtatggtttgaaataggcacctaagcaatggcatgagaaatttgataatcttgtcatccacatggttttaaagtaaatgaaaatgacaaatgcatttattatatataaaaatagtgttttcacgactatatgcttatatgtggatgacttgctgatttttggattaaatattcatgtcgtgaacaatgtgaaatttgtgttatgtgaaagttttgacatgaaagatctaggtgaagcgaatgtgatccttggtatacatatcactaggtttgaaaagagaatttctttggagcaatctcactacattgagaagatcttaaagaaatataattactttaactgtaaacctctttgtacaccatataatcccagtgtaaaatcatttaagaattgtgtaagacaatctgaatacgcgagcatcattggcagtcttccatatgccactaatattggacaagacgcgacattgtctttgtcgtgggattattatgcagtttactagtagacctagtgtagagcattcacatgttattgagagggtcatgatatacctcaaaagaatcctgaatcttggattacattacaagaagtttccaactgtcgttgaagggtacaatgatactgaatggaacactttatcagatgactccaaggtaacaagtggctataattttagtagagctggtggagttatttcatgtaagtctaagaaacagacaatattagctcaatccacaatggagtctgaaatgattgtactggttactgctagtgaagaagcatgttggttgagaagcctactagctgagattcctttatgggaaagacctattccaactatgttgatccattgcaatagtgtcgtggctatagcaaaagctcaaaattattattacaatggtaagagacgaaaaatacgtcattaacacaacattgtttgagagtttctctcaataggagctgttagagtggatcatgtatgcactgatgataacttagctgatcctttgataaaatgttttgctagagagaaagtcattaaaatatcgaaaggaatgagactatttccctcggattgatgaatccttcataatggcaaccaacctatagactggaaatcccaaaaaataagttcaatgggtaataacaagttaagaagtgataaaaatgagatcatgctatcattatacaaaaagagaagcatgaattcgtggagcgatttaaagctaaattaatagaagctcttaatgatttctatactctaagtggagtggagtactgaggtacatgagtactcttgatagactgacctatgtgaatgtggaagtggggctgctttctataaaactttgggaaaaagttctagaatttttactatacaaggatagacatgcatgaccattaatgcaaggatttttaggctacaccttgattgaggctcaaatttgtacattttaagtctttatttatgcacatataattaatatgaattaaatattctttatttttaatggtaaaatctatttaagtagaaatatttaatttactttaatttttgtgttatttttcaaatttagacaaagtggtagaaagaaaaatacaaaagcccaatttagaaaaactcaaaataattatggcccaagatgatcttcatagttacatggcttcatcaatgacttggaggaatcatgtttctaagtcatgccaactcatttcacattacaatgtaggcttgatcatttcatctattcacaagtgtcacgggttcaccttttcaggcagcggaacacccgtgcggcaccttgacttctctaag

SEQ ID NO: 99669 - DNA, 1496 bp, Cannabis sativa
ggaattccaaattttttagtagtaaatttatagccattggatccataactcagtctgatttcccctccgtgttgttacaaccatctcgcatcctataaagatttaaaacaatgtgtttctttgctctcaatgaaagtaccatgtgagcaccattatcttttttgttaatgaaaattttgtggattttcaaaaaacaaataaaaataaataaaacataaaaaatacaccaaacataccaaagtagtgtcatacaatagagtaccctataaccatgctcacattatgagccaactttttaatcttttttaaggatgtactaaaaatctattgttaactagtgacaaagtccatcaaaagaaagatatttagattgaatttcaatctcagtttaatggattagaattttgttgatagacttaattacaccaaatatagtattctaatatctggttaatagattagaagttaaaatggcattaatttttaggatttagtctccgtttggagtgtgagacaaaaataggattgagatgtgtgttcaattaagaaaaatgcatttcgattagagcattgttattaagtattagtagtgcctagcatcttctagacatgtcgtgttgcgattgactagcgatactccttaaaaattattatattaaactatacgcgactcgatatataattggactaatagcgatattgacacagtgccttttagtatttctttttggattaggttgtggcatgggcaaggcttacgcacgcaccgtgctttgtgaggtagatggaattttgaatgagtctccccatgaaaatatgaatatatagtttctgttgagatgcagtcatagtacgagacgtaagtagtaaccatgtcttacaagcttttgcaaataccaactcctagtaatgtttttttttttaaaaaaaaaaagaaaagaaaaaaccaaaaattgaaagggccaaaaagaacttacatatacactaacactagtatattaatttatagaaattgaaaggaagcagtcaaagatgaatgacagtatggagctaccgtattatattccatttgtctctttagattaagttaaccattcttagtttgtttctttctttttaaattacataaattatttatctaataagtaactggttatagtaaaggcaagcagggtttttgacagggttctctattgtttatatagtgtcttatttaaactcaaagattctctaatttaaatagggatgtaaacggggcggggcggagcggggcgggtgcggggatcgctccctcaccccatacccgcttcttaaatttatccctatacccgtctcaatatccatttaaattaaagcgggggcggggcgggtattacccaacgggggaaggatcctcattgggtactcattacatatatatttttgaaaaaaaaaatgatatcttaaagagaattaaaaaaaaataatcaaacaaacttagtaaaacaataaactta

SEQ ID NO: 99670 - DNA, 2509 bp, Cannabis sativa
ttatacctttatctagctgtctcggagcatgccattagtgcggccttagtgcgagaagatggaaagcaccatcatcctgtttactatgtcagtataaggttactagtggtagaatcaagatatccttctcttaaaaaactcgcattatgcctaattcatgtatcttgcaagttatatatttcaggcacatccaattaaagtcttaacaaatcaaccactaagacaagttttatcaaaacctgatgcttcaagaagattgataaaatggtcaattgaattgggaaaatttgatggaacctaccacccgagagcatcaatcaaaagtcaagctttggctgacttcctaattgaagggatagactcagaagaaacccagctattgaacacgaagcagaaacatggaagttatatgtagatggggcttcaaatgagaatggctcgggggcaggggtcataatgatgtcgcctgacaactttaaattctactacgccttaagattctaatttgatacttcaaacaacgagacagaatatgagggtttgttggctggcttgagaatagctgaggcattaaaagttaagaatcttacatgctttagtgactcacaactgattgtaaataagatactgggggaatatcaagaaaagggattaaaaatagaaaaatatttagagaaagttcggaagaacttggaaatatgaagttaaaaaaataaaaatattatatcttaattttgtcaacacatctgattcggtcagatgcataaagtgcagtgcaaatatgatgttaaaaaaaaaaaaacaaacaatcttaatggatctatatctgaacaaatcacatttgttattcaaacaaatgggacctaaaactattatgttttactcaatgtaattttaatataattatttgatagagaagttcacattgataatatgtaaaaattaaatattatgcataagatacatgagttattcttctcagtattaattggttttaagatgtaaccttatgcaccttataccatacactcacctatctctatatcttcaaccgtacacttctatcgtgagatgttagagagtcttacattgataatatgtaggaactaaataccatacataagttgcatgagatactcttcttattatcaattaattttgagataaaacatcatgtattttataccatacactcacctattcctacttccttcatcatacacttccatattctaccactattcaaacatggtgtggccattaagatgcggtctatattcttctcctcataattcattatgaggaattggttgtaaccaaatacattattttgataaactaacatatataatttaactaaatattaagaaataaattggtttatttatttttcctcttaaacaaataatgtatcaaatattgattgtgcacaattttctttttctttattaagatcagctcaaatttaacaagtttaatattgattatgtttcactgatttattatatttgaagttagttgtttttgtataatttgactaatattgaatattacctaattcatatatacattgtttgaatagttgttgtagaaattaaaaaacgaatgaaattattgaataaaaatttaggttgaattgcgaattaggttgctctttttaagacatttgtggtactgtctaaaattaatgtgcaagtagactattaacatcgccgtccaggataaaataactcagtcaaactactgtatctgagctctattattacacgaagacaactgttgttatactacactcaaaaaaactattattgtctgctcgaaatacatatcgtaatataaaattgtatataaactttttcgtgagaaaataatgtttttctcccattaattctaatgcattatataaagaatgcacataaaacaataacatagagaaagttattttttctgattatgagagattaaattagactgtgaaaacgttgctaaaaaaagaggagaaaatatttctatttaccaattaattaaatacgtttaaaaaactgttttaaaactaataatataataaataaattttctttaaaaaataaggtgtatatcacaccaactcgactcaggcagtctgatgacgatgcgtgtggtgttcaggtgaatttttgtgtgactcctccctcttttacaaaagtaggtacccgttggagccatcccaattacttatatctacactatatatacaattataaataagtattccaaaataatatacaactaatcttttttttttttttttgacattggagaagaaaagattcgaatttggggcctcttctttacaaggaaaagtgtgaaaccactaagctaagcctatgaccactacaactaatctttttaaggacctcaaaatgtacattatcataatttttttttgggatattggcggctaaaccacttgaactttacggtttgtaacacttaaccacaaaaactgaatttttggcggctaaactac

SEQ ID NO: 99671 - DNA, 2126 bp, Cannabis sativa
cacaacatgacccatatttataacaagacatatgtttatagcactatcccatatttaggtgaaccggtttcttttaacatttttctcatacaaactaaaattaaaaaaggaaagactagctagcttaccatttttattttattattactttttttgtacacaactatcaaatcaaaacttagtcttaattattactagagttatatagatctagacatgaaaactatcttatctaatcttgtaatctttatttctggggtagtggggaacatctttttatggtttttgtgggataggaaagtgaagacgaaaaaaaatatgaaaatcaaattaaaggctataagttgatgttcttgccttatctaacatctaagttggattttcagtatttgctttaataataaataagagaaacatgccattaaattttgcaaaaagaagaaatgactcgacgaaactcaaagactgcaatcccatcaatccaaaataattatgataagttcataaagattaatactgtatattaattctgtacttattttaattaatgcattttatggacatgtccacatggatatgtttgtcaataacacaaaaactatttttgaaaaaaagccttaaaagctagttttcctcattggttaatacaaagaaatcttaacctcatcaacataatgaattaatggatatgtttattctgccacccaaaaaagataccatgaattaaaaggaaaaaaaaaagatctagctctttcattaaaaagtttagtgaacatcattaatgaaagataagacatataattataattaaagaaaagtactaattagatttatatttaagaatagtatgtgattaatcaattgaccaacatcattattagcaaaaagagttaatctaatcacacataatgcattattaaagcgattattatcgatcaacatataaaagatatatataagacataagggagtgaaaagtgatctttatcagaaaattaagtaacaatcttatatcccaagttaattattagatcactaaacaaccaaaataaccttaaaaacatctaatctaattttgcagctgattattaatatgtagttagatcataatattaggatattatttatttcaatatataaataagctagcatatataaatatattatatacaatatttaattttaccattgtacatacttctaataattagctgcaatctttttacatatatataattcaagtaataaataatatcatgagtacatcaattctcgtttttgaaaattaaaaagggaattatatatagatatatagagatatatattgttcctccaataaattgagacatatagatatggaggatcacattgtgaggcagacattggatcaaaaataaaagacatataatgttgtgggaaacccatgaagagaaataaaaaaaaaaacaacaaaaaagcataaaaagaaataaaaatggcaaacaaattttaagttcgtgtgtccacaatgaggacagagaaccccattgcttcaacttttgtcccttaaagaattaatgtttataaaattacattctcagctccatcaaagttcatttgagtaggataataattatatttatcgtaacaataattaatataatgggagatgctttttctttcgaacaaaaattgaggtgcttttgtgtatatataattaatatatagtatatgatcttaaaaaaacatgtggtttaaagtcacttcaggagccaaaactgttggattccaactatgattggtgacctttgcaagctcagagtccgacaggatttttaactaaagcatgttagggttcctttgtgcctcaaattttttatagaatatatatagtcctaatgagttatgtaatttttatgcaggattagttagatgaacttgagtatttgtcataattggaatggactgaattatattagtataatacacaacatagttaaaagtataaatatattcgggtaaatatcatcattttgaatcttgtactttgtaaaagttattaattagattttctgttttgttaaacgacaaaatggactcagtatttttcagaatggtacaaataagaccctgaactgattttttgt

SEQ ID NO: 99672 - DNA, 1758 bp, Cannabis sativa
  modified_base (45)..(79): a, c, t, g, unknown or other
tgaaccatgcaacataaaatgctatttctgatctttattaataannnnnnnnnnnnnnnnnnnnnnnnnnnnnnnnnnnggcataaaacccaacagtattttcatccacttccattggggccacaagttttccaagcaagcataaagtggagagggcttttagagatgagacactaggggataaagtgacagtggtttcaatgcaagagtaacatttgccattaaaaaggggaacacaagcaccatcagtctccatacctacccacccaacacaaacggacaaaggagacaagaagaataagaataaagacccaacaaccttaccaaccctccaaacaaaagtaaatgacaccaaaaagctaaaaacaaagtcaacacagctcactcctcacgacacaaacaaataactaaacaaaatacaaaggagaaaagctataaaaggaccacaccactcaaacagtggaagaggaacccaacactcaacacatagaggaggacacacaccaaggaatcgagacacaaagattcaaagcagaaccacagcctaggagacagatcgaaacaaagaggatgaagggatagtatatgactataccttcagagagtactactacacacaacattattaattatattctctacatttttttattgtctacgttactcgtaaattttttttcttttattttatttttgttttctgtccaagtggtataaattaagagggttatacgcctaactctctatccattgaccatcagtacgctcacagaatatatatatattaaccatcttcttcttattgtaacttggtatttttggtttcatcgaccgatttatggaaattgcaggcacctcaagtagtactactacagctagtgataatatgagtcaagagaacgagtcttccaacaacaacgtgcttgctcagtgtgagaacttttacttcttgcttgctcagtgtgagaactttcacttcttgtttattaactaattatgatttcttgtcaatttatttatttaatattattaaaaaaaatgatgtatggttgaatataccattgcaacatttgttacccaactataaattttggctttaaatgaaaggagtatatagtttgttctattactccctgccatgtcgattatttcattgttgaatggcaccagaatttttttatttctttgtactattattaattaatctctgcaatcaacaattttctagaagaaagaaacaaacaaaatgactttaattcatgagtttaccacatttgtctctgttataatatactcctctatcggaaagtgttagattatattttctgtcatgatctgggttggattccttatgaggaccaacctagcaattcccaaggatttctctcctttacaaaattttaggttaacaacagtgtatgcaaaaacattttgagttttttatatggttacattggtaatgtggctcaatttttttatactccttcctgtcaatatgcaagattttttgtcttggatttttgagtggttttcttatcttatctttttagggtgccacaattgtagatcaacatatatgcataacacgatggggccagtacagagatgaatttgatttttggaacaggtcttcagagacttgtgaatctagttccaaggtaagaaaagttcaattcttttcaattttatgagagtatgggaaattattgttggaaattattttaccaggatcttatatctactcacaagtatgtttat

SEQ ID NO: 99673 - DNA, 1105 bp, Cannabis sativa
aaaccgcccaaacaaaaactgcccgcccaacccaacccatgtgcaggcctagaaaaatagataagaaaagttttataaaaatatagataaatgtaacataattttttttttacattttattcaattttgtctctcgaaataaattaataaattactttaatgattaaaaaaattaaaatataaatataaattactataaaaaaagcattttatatattatttattaacgtataaaatgtgaaaatatttaatttgtatttatttatcaactactatccagtactttatttatttcacgataaaattaaataaattgtgattgaattatattattgtaaaaattatattttaatagatattattaacaagccatatactataagagcacaattagtaatgtaaaaaatttatggaacaaaaatattaattattctataatatagtgattttaattctctataatcgagcgggttgattagatttcaggtttacgggtcgggtctgggcaggttggtcaagtccgggcaagttggtcggatccgagtcaaatccagtcaaaatgttcaatcttatctctaaataatatattaagcaacatgggtacttatagtaatggtctacaaaacatgatcaaagtaaacaatatatgagcatgtccaatttaatgtaacaatacttcttattaattatttctgtctagtatgatagctgcaatgagtattacaaaatgttgaaagcttaataaatgaatatgatctgttggaaacattcattgaataagccaatattcttttccactgaaagacccatttgagtttggagggaaagagactagaatacaagtggaccatcacatgcatgtctttgacttagttttgagttttgatcaaatgttttgggctctagttaataattcaattcaattggattttgtagatgtagttggattatgtggaccaattaacatagatatttgagattttgaatgcccacaattgaaattgaattttaaaattgtgaacctaaatacaaaaattacactaaaaaaaaccctaaaaactaaatacaaaaagaagaccataataggtcacaaataggtgtgatc

SEQ ID NO: 99674 - DNA, 3423 bp, Cannabis sativa
aacggcatgactttataacaataaaactttataacaataaagtcccatgttggttacgaagcttgtatgctcttgatcagggacatgcatttttacctggttgtatccagatgatgcatctatgaacgacataagctcgtctctagtagttgcatccactaactggtcgatccttggtagccgggagcaatcctttggacatgccttatttaagtctgagaagtcgatacaagttctccaagttccatttggttttgggactagaatagggttggatatccacgagggataaaatgcctcgcgtataaattcgttaaatagcaacttatccacttcttgcttgagtgtactttatctctcagaatccaagggtcgtctcttttgtctcttggctgggtatttgggtcgacattcaagtggtgacaaataatcttaaggtcaatccctatcatgtctgagtagctccaggcgaactgatcttggtttgccctaaaaaaacttattagttgctattttagtttttcatccaggccgtttgcaatgaatacacactttgcaggattccatggatctaaataccctcttccagttcctcgattggtttcaattgatttcgctcatcctgaattcgaggatcaagatcctcatcctgcttctcgccctctttagttgtgactaccattagctgatcacccgcttttctattctgtagctcgatgcggtagcattcttgagccagaagttggtcacctcgcaccactcctacacctggtggtgtctgaaactttagggataggtgcttaattaaactaattgcccctagtccaattaacgctagtcgacccagtagtatgttgtaggctgatggcagatcaataactaaaaagtcttgcattatggtggtggataaaggcacttcgcccatcgttaatgggagctcaattattccttgactgcgacattgttgcctgtaaatccgcatagatttactatgcaagatttcaattttacatttctcatcccattttcttcactatatccttataaaggatatttattgaactcccgttatccaccaatacccttttcatccttttgttggcgagctagattgtaatcactagtgggttgacatgaggatatcttacgtgctttgcatcttcctctgagaacacaattggaggttcctcagtcttagctttcttagaagattcaagagcaaaaccgattttcgttcttaacttcctttacatatctcttttgggaattgttactttctccaatgagatgttgccctccctagataaccagaatatcctctccttcaagaggaggaggttgtagtacctagttgcctaggttattgggcagatttggctggttatgtccatcacctttgcgtttcacatattgccagaagtaacgttgcgagataaggctttctatctcgtctttcaattgacgacattcttttgtcgtatgcccaatgtccttgtgatacttacaaaaatttgttgcatctcttttgtgtctcgcatgcctcatgggctcaggtttacggaatgtgaccctgcgctcatgtgccagatagatattttccagagtttcattaagctcggtataaatagtgttgattggcacgtacttgtggtgcttcttctactttttcttgtccttagctgattccttagagtcatctttcctttttgtacaagagcctcctggattgtcagcctttgtcaagacggtgcttgtcgagacactgctgggtttacttctcgagccagtctttaacaacttcatctctttccttgcttcctctttttgaacaaacacatgagctctctcattgaactcactaatgtttttcacagggcgaccctgcaagtcatcccacagctcgcctccagcagttgagggatcagtcttgatccatgcttagagagcagtaagctagatactgtcattctaatttctaaccctcgcagtatttgtactgaaacgactcaagtaggccttaagtgtctcgcccgactactgttttatgttagtaagagaagacgctttgggtctttgtctcttgctgcctgcagctgcttctgaaagtctttagacagctgttcccaagaggtgattgaatgatgggtaaatttgttgaaccaactgctcgctaccccaactagtgtggtagggaataaaatacagcgtaaattatttgttacattgcttactcgcatgatagtattaaaattatttaagtgcacgaccagatttgtagtcccatcgtatgacgagacatgaggctttttaaatccctggggaattctgcgatcataatgtccgggtggaaaggcttgggctcctcgtccgagtcgtaaccaggcagtttctcaaatttcccatcttggtacctcctgaatttgtcctccaactatataattcgcaattggataggatcctcttgtttttgattgagttgttgacgtaggtgaggttttttctggtttagttgattacaaagatctggccgttgtggattatagttacttacagacttcgtccttatgtaactttcagttctagttgtgcccgtactctctcgttcagtactgcgatgagttctatccctcctcacgtagatcgactatgagttcttgcatgtcccaaactatagcttgcctcgtcatgtaccggccttctcttttgggaatgcgttgatacatgccccctattcggatttgtatgtgccccttccctatcagtgcgagaaggatgttgatggtgtctcgggggcaacccacctatcctaggttgagtcccaagatctctctcgttaccacgaaggatttcctattccctagtctggggttgcattctgctcgcatttctacgtgaagactcttgtaaatcacggtttcatttcctctgggttgtaaatccctggggtctccgaggcacttcttgacaatgtgcctgatcattcagttcctcatctccaagggcatccttagtttcccttggttgttcttcctgagtgttctgagggtctccctgatctgtctcctcactccagggtcatgttggttttgaaagttcactactacaaatattaaaattcgcgacggtcctaaaaactatttttttcgcggaccgtcgctaaaaaaattaagtaactatttaaaaccgtcgggaaaaatttagtattcccgatggtttaaaattgtagtaaacaaaataggcaacgtttttttaataaaatgcaattttttaatggatctttataggcgacggtttaaaaccgtcgcatataaaggtccattgaaaaatcattacctacttcttgccacatttctcacgtgcccaccgacatgttttctatttcccacatgcccacctatatcttctcacctatttcttctccat

SEQ ID NO: 99675 - DNA, 2425 bp, Cannabis sativa
atatctctaggtccacctataaaggaagctggtaaaataattcgtttgccaacttgtgaacctcaattttctccaacttgtatactatcaattacaccttgatacatttcacacctaatttgatcttgttttttgcgaaggaaatctagtctagatgtttcaagcttaagatacattacaacatattgttgtaagagacgacctgcatgaagtaatatccctttatcggttgttcaaatttgtaacttatagcaatagtattctctacaagaaacaaccaatccttttttattcttcttagctaagttctgttctttttgtaataattgttcagcagaggtggctctagatggatcaataattattcactatcatgagaaggctgatttctatttttatcaactcggttaattttctcatgccaaccagtttctccataagaaaataataaaggatattgaaatggatcgtaacaaccataataatactgtactttatgactaaagcatgaatgactatatacaacaatttcacgatctgttgtttctctagaggagttatcatcaatttatactgcagctacttgcgaagctgaaggagtgttgtatactctttgatctaatcctacattagatttgtatatggattgtgtagtttgtaagttaggaatgtttcttagacttcgaaaaaatgaagaataaggattcatatttatgatttctataagttgtgcaactattcttggattcatttttgatgatatgttgatttggttttctatttcatgctctgtatcatagaagtacaactgtaaaaaagatggtgggccttcatatggaagcaattcattaatataatgagaaacctgtccttgtactctaaatgtgtatattcctttgtttcttttgcctaaagttttgtcatttttagccccaaaggaggtgaaagcaaaatgattattataagtgcgaacatactttctaatgtgtttattgagtaagagataagggtatatataactaaccaacttcaaatatggtacacctattttagtaactatcatcaattgttggtgttttatctgaaaaatgagattatcaatttagcaaaggtaactaaaacttatttttatttatattgattgtgtaatatgaattattccacaatataaactaacctatatggtaatgagtggcttctgtttgcttgagtttttttgtttgatatgcaattcgatttttctcatttatttctttttttaagcttccgatagatttgagcgccattttttagaagctaaatttgctcgtttcctcttttcttctttgtcgagtggcatatttatctattatttttaagagtacaacaatagtataataagtttatgaatttaatattttccaaaagttgaatagtattttataatcacgaattacatatatatataggtatgtcagaaaaaacaaacattgttgaaataaaaatatagaacaacaagttaatcgattatttatgtaagtaatttaaaaaacatatctttattgaagctgaaattgaagaaacagtgtagagtaaatatataggtgtttttttccttttaatatcttcaaaaaataatgaaatgtaatattgattttaatatatacactaataaagaattacacaaatagaagagaattaaatatgtttttttttaaaaaaaccaaatgagttttgaataaagtcaataataataaaatagtgttcatgtggtgtcgctgtacttaagatgacaaacatggttttattatttatgctaaggttaggggcaattatatttgtttattttatttgatcataatatcaaatatcaaaaacaaataaccaggaacacactcagcgagctaacaaactcaacctatatatctcaagctttataaaggtatttttttttttcattcaacagcaatagtgtaatacacaacaaataagtgatatggtgcaactttttttcatatgtaattaatgcgcacatataagaaaagtagacaataacttcaaataataaatcttaaaattacatttaacttattttttggttgttccaaaggcatatacaaaaacatagatatcataaaggtaaacgacaaatcatagtcaatgatactatgcaattaaaaagaagataaagagaaacatatattaattgtcaaaaccaaacttatttaaatctactcatagtcctaaatctctaatagatacaaaagagaataagaaagttcataaaattgtaagcaacccaagtcataactgtaaggataaatttaaaaacttagaaacaatagttgaaactggtaagtcaatcgtagtaagtgtatgtttatacaaaagtcaggtatgcaagctcaaacattttaagagatgagacaattaaaaatagagcatc

SEQ ID NO: 99676 - DNA, 776 bp, Cannabis sativa
gtatgtatggctatgggtaccaagttcactaatgttgctcttacaacataggacaagtttcttgtactctaaattcaaattctttcaaccattttttctattcaaacctcacatttagcagctggtagtctctttgcacagatgagtatacccaaatatttaaaggggaaagagctttgcctaaaaccagatacttcaatcactcttttcacctcatttgcatccatattcttgtaataaatggttgtcttctctttgctcagctatagtccagaggtttgagaaaataattccaagccctgaagcataatgtagatggatttaaaattcccatgacataatagcaacacatcatctacaaaacacaaatgattcaatttaagatgatcacatctgtcatggtatttgaaatcctcctttaaaccaattctcatcattattggggaaatattccattccaagcacagataataatggagacattggatcctcttggcgtaatccctttttggcctcaaaatacccatggagtgatccattaaacatcaggctgaatctcagtgttctcgtaatacaatcaactgaatgaattttcctagaaatctgaatgtatgcaataccttctttgtatatgccattaataagtttcaagctttttaagcttttagaaactttttgattctcatgttagtttgtaatatttttggtattttgatcctcatgacagttttgaaatgcatgatgtgtgaattttttatgaaaaagatttaattttg

SEQ ID NO: 99677 - DNA, 2006 bp, Cannabis sativa
  modified_base (1131)..(1134): a, c, t, g, unknown or other
aagagtttattaatttaagttcgatccatccaagattataagaataatctcttaattacaatctttttgtttaaagaaaataccttttgatttcaattacggtgatattaaatattttgaaataattttgggcaaactggggtgaatttagacttgtagctgaactcactaattttggctaactgagctgcttacataccttctttgtgaaggatcaagccacttgtagttcgaaatatggtattttttgaatttgaatataagaattctggtacatgactgctttcagaaattctttgctttttgaaaatttagaaaaattcctaggtagatgatcttttaaggaatattgagatttgtgttttatactattttgcagtattgacgactgcacttagttttagctactaagttgtctacatatcattttttaggaatcaaatcgaacgtatttcaaactgttttttgtgacgctttgttaattaagaggtaaataacttctttagaatgccatttaatttattatggctttgaattttagtgcacttttgaatcactaaagcaatttcaagcctccaaaactttccatccaagaaccactaaagttggagttgaaacccttgccaagtcatctaaatacacttatttgggggagaacgaaatgctgccagctattatatcagcatggttggaggctgaagctgaaagttcattgctagaaatgttaaaaaagcataggagagcaattgggtggactatggctgacataaacggcattagcccaacaatttgcatgcacaagatactcttggaagctgactttagtaactccattgagcagcaatgaatgttgaatcttgttatgaaggaagtggtgcgaaaagaagtaataaaatggctagattatggtattgtgtacccaatttcaaatagttcatgggttagccctatttaatgtgtgcctaagaaaggcgaagtcatggtggtggctaatgagaacaatgaattgattcctactagaaccgtgactggttggagggtgtgcatggattatcaaaagctgaataatgctactcagaaggatcatttcccgctgctatttattaaccaaatgctggatcgtttggcggnnnnagagttttattgctttcttgatggttatttgggttagaagtagatttctatagcatcggacatctatatggttcagccatcaaaaggcactagagttacttttctctgtcaaaccagattacaaatagctcaaggtgtttgggtgtctttgctaccctaatctaagaccttacaacaaaaataaaattttgtacaagtcaacagcatgtgcctttcttggttatactttgtctcataaaggctacaagtgtttatcaaaagaaaagagactgtatatctcaagagatgtagtgtttgacgagtttaagtttctttatgctactactattaaattatctcaacacaccagtcccatgtctttatctttgagtcctggcattcgacttgtgttacctaatgcccatctccccatccctactcccaatatcactctttctccatctccatctccatctacgtcccctcaaaccagcattaccaatcttgtacatgctcttgctcagattgtcaatgtcaaacctaaactaccagctgttgtacgacaccactgctattgttctagaacaaaatgatcctactattattaataacactactattgattttcctgttaccactaacaatgctcctgcagcttcttaagttgctcttgctacttcaacacatcctatgaccactcgattaaaagcaggtatttgaaagcctaaagcttatttagtgttttgggaaccaaaaactatcaaataggctttgcaaaaacctcactggttcaatgtcatgtctactgaaaacaaggctcttatcagaaacaaaacctgggatcttgttattttaccacctaacagaattcatattggatgcaagtgggttta

SEQ ID NO: 99678 - DNA, 2760 bp, Cannabis sativa
  modified_base (2722)..(2732): a, c, t, g, unknown or other
aatcaggtatgcatacctaattattatatattattattgtgttctatgctatatacaaattgatcttggggtttatattaatttttctaacagataacagttgtgatatgaatatctctttcatgggaaatgatatgttaatgaaagatattattacatatcggtccagtcatgtataatcaaattataaacacctttactacatgtctatccacatattgatctgaattaaaatcacacacactagagtatagtgtataataaactgtacttggtatttccatattaaagatctcttactttaatagactaccgacttgttctattcatatcgtgtaatcttaattctcttgtacgaccttacaatattataccatcttcatatgaataagaaaattttagatatttattaattatacttttataattaatgtattcatttatcttataattacatttcatttattcttaaatatattatctattaaatacttgcttttagggcataaatcctaacaagacattggttagagttgtgattaggtgtatgggtgcctaagttacagttcaagatgtatgtttatgatttatacttttcttacgaagtctgtcgactcacaattatgttatgtgtgtaggtaaaggcaagacaaaagtcgaacaataatgagtctggagcttgatgcagattgtacatatttagatggctagacctggagtgttcggatcttcgggcagcatgagctcaattttgtagtcgttgggcgacactttttgatatactgtattttggtttattttcatgaaaaatatttcaggtcccagaatttgtaaactttaattatttattatattatttagtaaagtttattatttattataaaatttgtaattatacacaatttatactaaattatttgattagcaaatgttagcatagtaatttataaagcacgaaaacatacttaagctagtagggcgttacacagttagttatgacctctccatttgatttagttgttaatgattgtaggaatttgattatttgtatgagcgaagtctttttagtatttttgtattattatgctaacatagtggtttataagtttgctagacttcatgtttttttttctagattgagtttttgataagagtgttgtttctactgaatttatgtttatgattttagacaatatgtttttttgtgctaattacattaaaaaaaaaaggcaatggagctgtgattcctaatataccccttctttcacatatataatatttttaaaatttttattttttttaagaaaaaaaagcttttcaattaattttggtaaaactatttcaccatatatatatactaggtagatgttacgtggcgagccacgtaaatattggttttatttaaggtttagattttttttttaaaaaaaaattagtaactaaagtggtatgattattcgaacgatttgttttataaaaataaactgtgtatatcaatgtatttagtaagtaaaagataattgtgtctatgaactaatgatatgtatttatccataatgtgaataaataaattattataagtcataacaatatatcactttaacatttattatttgaccctaaaaaatttaaaggaacaatatatgtattttgtaaaatttaaaggaaataaacagataaagacttgcatttaaaaagtactggtttatagcttctttcattttcagaacaacaccatgtctcttctggaagcaaataaccttaggaacctcaccacattaaatggccttacaacacagttgtggtatgaaggtacactatcttcaagttttttccctttgaaaatgttaattcccacaaagtgacactttgcaagccaaaattgaaagaaaacaatatgcaaagtgtcaatgtttaaaaatattagacaaagaactgttatgtaatctagaaatatttcaaaataaaagtgaattccatcatgaatactgtgaaacaatttaaaataggaagcataagtcagtaacaatcaaacgagcctttatattgcaactcaattgcaactgcagtagaatgacattttaaaaatttgtgatcaaatgctaaaattaattaagtcaacaaaatgatattatatttcatattcagtaaaagataaaaaatgtaactacctttttcatatgaccagtggcaactgtgatgtagaacaaagatcttcatttgatttgccttttaacaaagtactctaccacactttcataatatcatgcaatgtttgtccctacatatttttaagatgcaccattttacaaactcatatttgaacaagtttatgcaaacagtttaaattttatcacgatatccccctgagtttatgattatagcatgaatgtcgctagtcttagtcatcacaatgggacccacatgggagcccttcagtgtgagttgcccaaatcctttactcacacatatcttcagagctaagctaatcctcttacatttacacatttactgaactgttcaatcagccccttctaaacactacatagatgggagaaatttaaaagtctaaatcaagtgactaatcaagttgacttgaaattcttgattaatttttctcaagatacatttacattgttgaaagaattaaaaacctgtaaagaccgcttagtttaatttggaaatttgaagttaatcttgattaattatgaaaattatttannnnnnnnnnnataatttattatactgttattattgaat

SEQ ID NO: 99679 - DNA, 3736 bp, Cannabis sativa
  modified_base (2711)..(2712): a, c, t, g, unknown or other
aataaactacaaatttttcttgatgtgatggcaaagctaacactggtgttgtgatcagccattatttcaactcctgaaaacttatttcacacttgttggaccatataaactgctggctcttcttagttgactccattagtggcattgaaatcatagaaaaacctttgacaaaacgtcgataatatcctgccaacctgagaaaactttctacttccataactgttcttggccttggctaatttttaatggactcgatctttcgaagatcgaccgtaattctatcttttctgacaatatgccctaaaaaggacacttttaacaactagaattcacactttataaactttgcatatagcttatgatccctgagtcgttgtaaaaccattcggagatgttgctcatgcttttcttctgtctgagagtgtacaaggatctcgtcgataaacactataacacagttatcaaggaaatccttgaacactctgttcatgagatccattaaggttggtggagcatttgttaatccaaacgacatcatcaagaactcgtaatgaccatacctgatctgaaatgcggtctttggaatatcttcctctcgaatcctcagccgatgataaccaaaatgcaagtcaatcttagagaatacattcttaccctagagctgatcgaacaaatcatcaatcttgggcaatggatacttgttcttgattgtcaccttggttaattccctataatcaatacacattcgaagagatccatccttctttttcacaaacaaaactggagctccctagggtgatacattgggttgtcgagtaaaccctaaatatagcatctcttgaagttgtatctttagctccttaagttctgtcggggccatcttgtatggtgccttagaaataggttttactccaggtgccaagtcaattatgaaatctatctcttgctgtggcggtaatcccgaaaaacatcaagaaactctcttagaactctgagatcctcatgcccaaatgtttcaggtctactaaagttaaatacaactgctaaaaatcctacacatccactgtgtagtaaatctttagcccttaaaactgaaataatcgggatctaagaaccttgaacagatctaacataaacaaatggatcttcggccttaggttggaaagttaccatcttccgtttgcagtcaatactagttgaatacttggacaaaaaatctatcccaagtataatatcaaactctgttaattccagctctactaggtcaacactcaactccctattttcaaccctaactggcatagacctaatccaccttttgaagataactaattctccactaggtagtagggttctaaaccctctttcaatgaaatcataaggcctacccaattgattaattactctcgatgccatatatgaatgtgttgccccagagttaaacaatacagtaaaataggagttgttgacaagaagctgacctatcaccacagaagggttggctgcgtcatcagcttgagtgatagcaaacaccccagtaggtacaggatttgcctcttacttctgtttttctttctttgtttaagggaaatctttcttaaaatgcccaaccatgccacactagaagcatattttttggttgcattctccgagacgatgtttcttacatcgacggcacttagggtaagaataactctggcatcctcctctaccttggtaccctcagaaccttttgttttatcccgaaccactagatgtcaggaaagtcttcctcttctaatcagcagtggaatcaccagtgtccctaccatatccaaaagtaggaagagtggtggtcccaccaacacttggagtctctcggggctcctgaagaaatttcacgtcacccttagcttgaagagccttctcaacaatttcagcataagtcattgtgtcacttgtagtaatcaccagatcatgtttaatcttggcatttaaacccgccaagtatttttctttcttactgaaattcgtgggtactatacccgaagaaaacttggctaaatggtcaaacttcgttgtgttttccgttactgacaagccttctccctaaaccaagtcagtgaattcttttcgcttaccactgcatactgcctcattataatacttggcattgaacaatgccctaaagtcttcctgggtcatagtggtgacatctcaggtgtgggacactaactccaaccacacgagtgcgtctttctagaactgaaacatagcgaagttacccaatcattcctagtgacacccataaagttaaggatcctctcattaatgtaattcactgttcaactttcaagacatatggacctcccaaaataactggaggcacctgcttgtgaaacctctcatataaaggttccatacggttgctgttaacgcagatttttgttaactaattaaatttgagccttacagtacacacagaaaaaataaaagctgtaaaaataaaaatatgaacacatggtttttttacgtggttttgcagttaaaattctgcatagtaaatgagtcaatcttatttagatttttgattattttttatgacctctcttgtatgagttttttcgtcccttttttgatcttctttgtcactatttataattacatagtagacagttaattacaaagttgatatgtttacaacaatcatccctaaaatcatgggatttgannacatatcacgtagtgtaaatgcgatttatgatttgaaaatcatatagctgtgattttcccgcttttactgggtcaaaatgattgtgtttcaaacacttctttaattattgtttctagagttgtctcgaaagaagcttggttccagtgatctcaatagtgagctggggccatttttcctttcgaggtcgacgatgcatgtcttgtgtcgatcgctctttgaagcatatttgaatgttaacttcttgacttgccagggttgtgagcctcgctagcattgatgggatgaagtaataggaagtcttcccatagcgagatgggcacctcgcttacttggtcttgagctgatctgacacttagtttgtacactaagatcttttgcaattgatatatgtcgctttcgtcttccaatgtgtactatcctttgatgcctcgcaattcgcattcagcgacatatgctttctcactaacaagctaagtaccagtttgtatattgattcctcgcctaagaccttacagtctacaggttacaaatatactctaatacttacgtaattaatgagtgattccataaaaagcgattgcaccgatccatattcccttttatcttgacatgtatcctccactgagatggcaactgaattttcggtataacaattgccccttaaaaagttctttttttttagaaaaaagagctttttgataattacagagggcatttgcatcaaaatcccttcttggaaaatattcgtcctttaattctggcagttgtacggtttcgaggatcattatgagtcgtcccttcatattcttccctcgaacagttagatttccctagctttcttgtcactggaatttgtgtataaaagggcagctcaagcttgtcatttttcacaaacttctagcttttttggagaaatccatttttagaatggatcatctctttcatgttggaatgtcccttcagagtttagaagttcactcaccaaaactcattgttgacttcgcttttagccaacgacaatga

SEQ ID NO: 99680 - DNA, 2281 bp, Cannabis sativa
  modified_base (139)..(144): a, c, t, g, unknown or other
ttcgaggaggtcgaggaggttccagttccagcgccccagcgccggtggcgccggtggcgccggtggcggagtggcggacgggcggacgtggggacgtgggcgtcgtaaattcatgagtgattttaatcactttgtcaannnnnnaaaaaaaaaaaaaatttattaatcgtcaatttccttaccaaacaaaataacaaattactttgtttggtgaatgtttgataaaacaaatataaatatgttttaaattatgatttttgtggagttttgtttgaattttttttttttttattattgtgaacgttttttctaaagtataaaaattactgcaaatattcatttttattttgttcattttttttaataatttattgatatagtattaatgtgatattaattaatgtggtttatcaataaacaaaaaataaatgcataaatcaaagtgtgataatgaattggatagtttaaatttgttaaatacactcttgtattttaattatacttgccaactataaaagtatttagttttgaccttataaagatggtcatgtgggaaaactatctataatttttattaatggataatatatagtgtaattacaggaagtgttttattaatttttattattttttaataactaactaaatttaaaataattatttttgaggttgattagaatttttacatgtaccataccatattatatcttttgaatttttcagtttgttaaatttttttttgaattattaaaattgttagatttaaatatttttgtttaattttattaacgtaatgtagataaaaatttagagaacacgatttagttcatttcaaaattcgggagacacgatttcatagatattaaagttcaagaatacgatttagtacataaacaattatcacattagtaaaatgaatgaaattggacaaaatttttaaatccaataacctcaataattttggagaatttttaaccacttaaatagttcgaaggtataatttattagttgtcaaaattttctagttagtttttttttctaagtttttgagaagtcctaccgtcaatctcctattacaatctcttagtagacattcacgcccgaaaatatatgtcggaatatttttttaaatgtttttttttatggcagtgttcgttatgtttacaatattaaccttataaatttttgaaaaattttgaatgtttaccgtaccgaaaatatgttaaaagttttttaaacacgcgtggtaaactgaaatattagaaactctgtcttcggtactgtaaattattcagaatttttttaaaatttacaagaatgatattataactataacaaataccgctatgaaaaaaaatttaaaaaataatattttggcatttaatttcagacataaaaattaaaaaaaaaatatataataagatattgtaatttcggcatgtaattagctctttttggtaatttatttataaggtgatatataaacccagaaattcaaaacgatgaagctttgtactttgataccaaaaatggatccaaatcaataatcccacctccaatcatgacgacaaggctttcaaccttattcccttcaatcaagccttcttcaaaaaccaaacccatctccacaaacccatcatcttcatcatcgatcaaatcagaaccaaaaccatggtctgtctatctcatcatttccacaaatacccctatcaagacctacgtcggcgtcaccacctgcttctctcgccggtaatttcattcaaatactcaattggggctcttttgattttgttactaaaccattaattgttatcaatttcttcttcttttttgtgggtttgtttattttgatgggtttgagctgaaagttcttatctttgttgataaagtttctatttttttctgaaaattgttagtttaattgaaactcttttttgaaatagattgaaacaacataatggtgagcttaaaggaggagcaaaagcaaccagatctggaaggccatggatttctgcttgcttaattgaaggtttcaaagaccaaagtgaaggtgattcattgatttagacaaccatagctttaacttatgttaaatttctaaaggtaattgaatttaattttgtcttattatcttcttggtcataacccatgataatagttacatcaagctcaaatttctagaaaaaaaaacatgtctaatactacatagagcattcactcacaacaccttctataggtatcatcttatgattagttcgcgatattttctaaaagttatttt

SEQ ID NO: 99681 - DNA, 1250 bp, Cannabis sativa
atataggatatattattttataatttaattattatttttttatttttttactgcgaattattcatttttatttatttattattatatatttttattgtaatttgagttttatttttctaaaaggaaacaaataaaatagtcaagtctattcttaaaccaaacatagaattactttcaacgtaatccaatcttatccaatttaatcctgcccatcaaaccaactcttatattaaaaaaaaaaagttttgctagaagatccaagaattttatatatataaatatttatgtttatgtatatatacataaattattggtgcaccccttttcacaatgactagacttatgatctcttttgtgaaaacccaacttaatcaatttattttcaaagtttctacaacccatcattggcctactttaaatcatattcttctctacttaattggttggtacttaaacactttttattttgatcttaatttcaaaccaactactcaatttacaattcaacactttattgatattgatttgtctatcttcatgattatttttctttattaattcgtgtaataaaacgcaaaactcgttttaatacagaatcagaatacaaattttttgtgtttgctctttgaaattaaatgtattattactattattatagaacataagattgaaattatacatacattttttaatagttattattcaataatttcattctaactaccaaaatattaatattaattcatacatttatgtataaagttcaaacaaacatgtggatattcttgaaatagttattatttcatttctactctaatttcattgtattctttttcatatttttccattgtattccacctaaccaccaaacacatctttctagattaatatagaaattttgatcattttaagaatagaaaaggtgttaatattagcatatattttataatttttcaatgttaatattcaaggttcctagtccctgagattgataggccttttaggacaaaaaaaaatattattgtgcttttattaaaaacatgtgttattttaaaaaaaaaaaattaaaaaatatgtatatttttaaaagaaaaaaattggacctcctaagctggatgggccctaggtgccggggcgaacccaggcggtattttttacttttttactgtgttttttataagtttcatactgcagtatacagtgttaagttttcactggtgttttactagtgttttactgttgttttgagt

SEQ ID NO: 99682 - DNA, 793 bp, Cannabis sativa
tgttaaagtgtactaaaccaagtggaaattgtgggatttagagcacttaaacaactcaactaactgccttgacagtttgaagttaaatcggttagtgttgtcctaactaaccgagtgctatatatagaaagttttgcaacaaactaagtgagagagatcaagttagtaagggtgctacacaaagaaaaacagtgtgttattgagatgaattctcattgagtttgagggttgtaaaaggtatttccatgtgtttgattggactgcctcaagtgagattatgtttgtaattggtgtgaatcaccactagttttctttatgtacttgttctaattgtttgtaagttgtaattcttcccattcattaatcaaaacatcatagccaacagagttgtttctacctggggattaggtccaagttttatccaagacttgtgactgaacctcgctaatcttgctgtcattttagtttttttggtttactatttcattggttcatgtttcagacctattgttcatcttgcatttgtgtccatgtctatgtttgagtgcacaacatatattatatgtacataaaaaagataaaaaaaaagatgaagagtacaatacaatatattatatataagaacaagaaagagatgaaaacaactctcactcacaaccttgagtgtagaatactaatgataactatgaattgaaccgggtataaatacctttgtctaaaagcttatttctcctatctctaagcactaagagaattctctaagaaataattttagaaattatcaaggcttagt

SEQ ID NO: 99683 - DNA, 1093 bp, Cannabis sativa
gacagtggtaagggaacacacaagtagagacgccgatttacacagaaaattaaagggaaaaaaatcttagaaaagggaaaggggaccgtacctatgagtgtgaggctatgaagccaagctcgacaacccaacaacttatactcagcaaccccccaaacagaatgcctcctctcctctccgatcagatagcgaagaaagcgagaaaggacgatagtgagattcagtaacggaggattatcagaaaagattatcaataacagacatgtattatggtgtatatatataaattagagatatgaaagagatatatatagattagaaaaatgaaagagatagagagatatatttagatctagacagatccagatagaacttatcggagctcgatcgccggggggacgaccggttgtgtgctcggccaaagggcagaggagctgggtcggagatgatagggcgaaggtgctgtgagtctcaaatggagggttttgtattttattttttttatcagacacgaaagtattagaaatgaaatagttgcgccagatgttattgaggaaaattctccctctctttgaacagtaaaataataaaaaaaaaaaatggggaacgaaaattttatgccaaatacaatatatgtcattttaaataattatttaattacttttaaaataaaataaattttatcttgaactactattaaaagtcccacctgataccattactattaggaacaaaattttattattcctcgtattgtcgcccctcaaactcttatttgttgtagtgtgtttgaccgattatgtaagatcaagtgacacttactttatatttaatggtgtgatccaaatcaaataaactatgttgaaactattacaaaagtggactaaagagaccgcgttcgactgaatcactatatttctctattgccctttatttccaatttttgtctattttcacagcctaaacattgattactcgttattctaagtgagtacttgcataattgttagtgggtgttcttgctttactcggatacttgaattgttttgtgttgtctaatttcgaccgacaacacttgggataagctttgtac

SEQ ID NO: 99684 - DNA, 1966 bp, Cannabis sativa
aaaaaaaaaaaacaaatctttaatgattacatatgtatagactatatgaaaaacctctccctaaaaaaagaaatgatttcataattaataaataaccctaaaatccttaatatttttcaacccttttatatcatcatcataatgattgaagcagcagagcataaatatagtctatagttacgagtggtgttgatggtatggtctcgtacctttccaacaaagtggtgcttgttctggaagatggagttgtagtaagcgtccatgcgaacacgatcgcagagcatctccttctggtggtagagaaaggcatatgtgcagaagtaattagcgaaatcgacgcccttgtccaccatggctgggccgccgccatttctgctattgtttgcgaagcttcccatgtatgatatgtcaacctaagatagggaaggagaagaaggtgttagggcaaagtgaagtgaggcgcaggaggtgggtggtggtgatggtgctggtacttgcgcttgctaggtctcactcactgtttcccgtctccaatttgtattcaatttaagaaagatatttttgattcacacaccgtcaccgcgcttttttcgatattaaaaatgtgttaaaaatgtaaatattattttgaattttttcttctgcaaaaattataaatttgatattttattttgttaaatgataaattagattttgtattttttaaaatagtaaaaataagattttgagcttaattttttaatattttgttttaatataaccaacttaaaaacaattcctaatactaaaacaaatgcagaaaatttaacttattttgtcataatacatctaggtcgaattattattaagttttattttgacaaaaattagtttaggtcttatttatactatttgaaaaatacatggtccattttatcatttaacaaatcagagatccaatctctaacttttgcaaaatacagggtccgaaatagtatttacccttaaaaaaattctatatttaggggtctcatgaatcactttttgtagacatttaagacaccctgcaaaattttgggtaggggtgttcataaaaaccgataaaccgaaatcgaccatcaaaccaaccagaccgtaaccgaatttttggttacacgtcattaccgaatttggcagtcgatttcgatttcggtttttttgacatagcagtcggtttaggtttttgaaataaaaaaaatggttaaaccaaaaaactgccaaaatcgccaaaaaccgcaataaaccgccaaaaactgcccaaaaccgtctaaaaccgtcaaaccgaaaaactactaaaaaccgtacggtcggttttatacggttataatttctaaacggtcagttacggttttcgtaaaataaaaaccgtaaccgaccaatcagttataaaattgtaaaaaccaaccataaccgaccgattttcacccttaattttgggcaattcaaaaaaatttaatacaccgaaaataaggttcaaacagtatatttcacacgcgtataaaataaaagagatatgtgcaacagactgtttgaaccctattttcaacgtattaaatttttctaaatctctcaaaattttgcaagatgtctaaataactacaacgtagacgaccataaaaagaattcaactaaaaaattctctcaaatgctaaaacagatagagagtgcatcgatagattccttttaaggggtacattgtaaaaatatccaaaaccatattggaccatacattttgtaaaagttaacgattagacttctgttttgttaaataacaaaaaaagactttgtattctttaaaaaagtacaaatacgacactaaactcaattttcgacaatatttttttaatgtaacaaacttgaagataatttttagaacaaacaaatgtagaaaacaaaactagttttgtcataacacatctatatgatgttattattgttgggttttatg

SEQ ID NO: 99685 - DNA, 1434 bp, Cannabis sativa
gggggttcccttcagttcaaaattaataagtgtggagaagctttggcagcgtggggtagtgagagggaaggtaatttttctcagcaaattaaatggtgtaataaaactttgaagcggctcaaaggtagaagtgataaggaaggtttacaacaatacagtgagattaagaaaaagttgtttgaggtttttcaccaaaaagaggtttattggaagcagaggtctaagcaaatgtggctccgtgatggcgatcaaaatagtaagttttttcatgctcgagctagtgctagacataaaaataaccagattgttcaattgaaagatgaaaatggtgtgtttgtggattgggaaaatggtttggatagagtcattttggattacttccaaggtttgtttacagcttcagttgtagattggagagaagtgctatcttgtgtgccttctattgtcacggataggcataataaaatgttgcttcaaccagttttggatgatgaagtgaaggcggcagtgtatcaaatgcacccagataaatctccaggccctgatggtatgaacccggctttttatcaaaaatattggcatatagttggcggagatgttattcatactgttcgagaattttttagagtggaagctatgcaaccggggttgaacaaaacaaatgtggtcttaattcctaagaagaaatgcccagataagatgacgaaactcagaccaatctctttatgtaacgtgctagctaaggtcatcactaaagtcctggccaatcatatgaaagggctcctcaatgatattacctctgttaaccagagtgcctttattcctggaagattaatcacagacaacatcatggtctcttttgagatcctacactacttgaagagaaagcaaagagggaaagatggctttatggcgcttaagttggatatgagtaaggcttatgacagggtggaatggtcttaaatatgtgtaatgctttctaagatgggctttgatgataaatgggtgagaattatatctagttgtctttccttagttgagtatatggtggttagtggcagccatgaaattgggcctatagttccatcccgtggacttaggcaaggggatcctatttcgccttacttatttctgatctgtgcagaaggcttttcggctttaatacggaaatatgaggaaagaagatggattcatgggtgtaaagttgcaaacagagccccggtggtgtcgcatatgctttttgcggatgatagctatctctattgcaagtccaatgataatgatgtccaaaaggtgcaacaactacttcgggtctttgaggaggcatcagaacaaaatgtcaacttctctaagtcatcagctttctttagtactaacacgtcaagacatgataggactcgtatttgtcaagtgttgggtattgtggaagcggga

SEQ ID NO: 99686 - DNA, 690 bp, Cannabis sativa
cgtgtataacaaagcaaactataattgctcgcacaaagaaaagcagatgagaactggtcacgaattgaacatataactactcgcatacatacatagtagattaataactacttaaagaatatcaaaggaaaagcgagatcattggaaatgctttctaaaaataacttaagttggatcaaaataaaaactgtttagattgtgaataaaaatgcaatgaataaatatattaaattcatgtatgaggtacgaggcattataaaataaagatagatagaaaagaaaagttggccatccaacattgtaaaaattgtctttacaaaaaataatgccacaaggggtaaaccattgtttcggccaaaaggctatttttataaatgtatataaaagaacaaaataaataacaagttaaaaacaagtctacacagtaggagagttggatggatcttcttcgtctgcctcaacctcctcttcctcgctgacctcttcttttctggtcttctcacagaatgcaagcatatcttcagctccttgacccagaaagctgaagtccatctcgagattggctgaccaagcttgatagatggtcctcctaacaattttgttgaccctatttttggtgtcaaccttggcatcttcaagatttttgttagcctccgtctagatggtattgatggaatcctcaagctcttt

SEQ ID NO: 99687 - DNA, 3218 bp, Cannabis sativa
  modified_base (67)..(92): a, c, t, g, unknown or other
ttttttttttttttttgaggtagtatctgataattcttaattagtccaagttattaaatttttattnnnnnnnnnnnnnnnnnnnnnnnnnntatactaataagaaaataacacatgattaatgacttaatatttaaccgttggataaaaagttaaacttgattatttatgcccaaaattaatttttttctttttatagcatgtatatattatttattgagtagttaaaggtggagtgtaatgcattaattccctcaaaaaaaaaaagaaaaaaaaggtggagtgtaatgctaagagtgatcacgtgcttctcgtgtcactaatcacgtgtagcttctatcatgaattgcatacgtacgtacgtactgtatttatttattaattaattttttttgagccaaatttactgtacaagtttttatatagattactttattgtatttaaatatttatgtaaattttttggtagaatttttttgcgctcaaatttttatgtaatttttttagcggtaaaatctctctggaattattttattataatattagtcttttgttgctattaactcaggaactaatgttgcattaatgtgtaattgttgagatttttgttgccaaatataaattatgagaaatattaaagggtgctctcctatgtgtcaatattactattggttaaattaagtatcgggtcccatataatttgatataaaggtttttaaggagtatcgccagccaatcgcaatacgacatatcgataatgtgctaggcactactagtgcctaatagcaatgctcataaattattaaaaaaatttgttgctaaaaaagtatacacagaaatttaagtgcaacaaaataaattatataaagataatatttaaatgcaacaaagtaaactagatagaaatttttatcccaaatgtgattgtcattatctctttcttttatataataatatttttttttgtaaggatgaaaataataattattttttatcatttagaaaatattttttctgtttttgggcaaagattaagtaccctaatgatattctttagctatgtgaggagtgtgattatatagctgagacaatctcagaattttggattagatataggtaatacggccataattagctagtattttttttgttaatataaactttgttacctttgtaaaaacttattcatctatagtatagctatatatattatatcaaatgacaattttaggattaaatttgagagggggtgtaatttttttttttttaaaaaaaataatatgatatgcaactgttaaagacatagttttcattctatatatatctacatatgtcccaactataaaaataaaacagcaattaagtaagattattatttccttgtaagggaaattaaagaaaaactaaatgatccgtctaattcataaaaatgagatttaaatcatgtgttaggataaataggggcataagtacctaaaattttgagtttgtaagcggcataaactcaatgtttattttagtggcataagtacctaatatttgtaaaattgtaatttttctctattttcgtcgggttctgttttaaatttattaaaaaaagatttggaagtaataacatacatattttcgtccagaccaaataatctagaatttgggtcttatatgtgtcctgtttaagacaataacagagtctgttgaaactggaagaaaattacagttttataatttattaggtacttatgccgctaaaaaaaatcattaggtttatgccgcttacaaactcaaaactttagatacttatgccactgttaccctatctattaatcaaagttggtcgtcttaaagtttcatcagaattatcgttttctctaattaattattagctatgacactacaaaaatttttatttttagtcacaataaaacttatgactaaaagtaaaaaattatgactaattataaatttttattcttatgttgtgactaaaatatccgtagctaaaagtattaaccacaaaaattacaatttgttatgattaaatgtatttttagtcacaatacttattataactaaaattaaattattgacaacttgtatctaaatactatattttagtcacaagtaagtttttgctgtgattaaaagtcacatttggtcacaaaaaaattatattatgactaaaaatatataaattaataacaaatatgaattaattacatttaaaaatgtataaattattagtattattattattaaaaaaattatgtaacactacactctttaaaaatgggtataactatgcaccttttttatgtttttagtcttaatttttttatataataacttacatcctaattatttaaagtgacaaaaataaaatccaaacaatcaattacacatataaaatatatttaggaaaacacatcaattttaaaaaacaaatgcaatgtacaaagacacatattattattatagaacattattattagacaccagtagtacctagcacttttatacatatcgccttacaattagttatattgaattatataagacccgatagttaattgaaccgatagcgatattgatatataaaaaaaatactaagtataggttgtaccttttagcattaacttattattgcagtatttttgttactgttactattaaaaatacagttgtgggtcttaaaaaaaaaaaagaaaatacagttgtggaccaaaaatgtacgtatgtgtttactagaggtttaaataaatggtttgaagtttgaacaagaagaaaaatcactttcagattggttgccaaaggcttatccataactatgtaaataaagataccaacttttcaaactacatttatttttcactcctcatttttccttgtgtcaatatatatcgacttctttcgtattgtacttttcaatcttgatttttcatatattatttatatgatcttgtggaccaaattaacaataaaagtccaaaacaaaaatgtttatacacatatagatcatagtattatatattcttcaaattaaaattgttcactttattaacaatataaaatatatagttaatgatatgtaagagaattgttgtttgttaattattaattgtatacaaataatgtttacatacaacaatatatattgtattaattttcttcacatgcatactatgatatgtctcgtgatggtttttttttttttttctttt

SEQ ID NO: 99688 - DNA, 1225 bp, Cannabis sativa
ttcacactgcatagccttgttccagccaggatgtgcaagagcttctttgacatcacaaggaagtgttgttgctggtttccatgctgtctgccccatgaaactcgaggtttaaaattcctgtctttgctcgagttatcatgtgatgtccagcagctgctggtgtgggaatatcaggtgcaacattagtttctccagaatgagattgtccagaatttgactcattagtgtcaataatcattcccctctcaacacctgaaaccgaggaactggaaacagtagcaggtgacagatcaaaaccagtagagttgtgagaatttacctgactatgtgctggagaagaaggttcttcttcaggtgtgctcaaggatgaggatgttgtggctgaaggagtccctgtaggaagagtgaaagagggtaggatagaccaagaagagctttggatgatgactagttttacctgttaataattattcagaaaaccaagtttaaagggaaactcgagctcattaaaaatgacattcctagagatatagatttttccagtgggagtaaggcatctatagcccttgtgagactcactataacctaaattaacacacttcaaggaatggaattggaacttgtgtgtttggtatggtcttatacatggaaaacaagccacaccaaacactttaagaaaggcataatcaggttttttgaggtatagtctttcaaagggtgatttgttttcaagaatgggtgttggaaacctgttgattaagtacacagaagtttgaaaagcttcccactaatacttcaaaggcatttgagcttgagctaagagagtgaggcccatttcagtgcctatgttttctttcagctctaccattttgagctgaagtgtgaggacacgagtgatgaaaatctattccattttcaaaaactgtgtcttgaaaagcttgatattctcctccccaatctgtcctaagtcttttgatttttctttcaaattgggtttcaacaaaggctttaaattgcaagaaggctgcactagcttcagctttggtttttaatggataaatccaagtgtagcgagtgcaatcatctatgaaatgtatgtggaatttaaaaccattgtttgacactattggcgagggaccccataggtcactatgcacaagatcgaggacattggcagctttactattagaatttttaaaaagaagagcatgcgatttaccaaatt

SEQ ID NO: 99689 - DNA, 873 bp, Cannabis sativa
gtatttttaatatttcttctttaccttttgtaatttcttctctgatttcggatgatttaagttaatgaagtttcatttttattcaaaaaaacatataaatcaaataaaaccggccacaaaaccggtttttgtaagtaaaaataacaaaaagttactggttgtaacagtatattattttgtgtcttacttgaggtaaagtgaggtactaaataagtaagtcaccttttttaaaataaaatatcctttggacgttgtttattgtctaaaggaaaaaaataaaataaaagaagatctcataccatctctgcaatttcatttcattccattctgccccaaaaaccctagaatcccaatttgaaatcatccgaagtgatcgccatggggaacaccgagaagctgcttaatcagatcatggagttaaaattcacagcaaaatcgctgcaacgccaggcccgaaaatgcgagaaagaagagaagtcggagaagctcaagatcaagaaggccatggaaaaaggaaacatcgacggcgctcgaatatacgccgaaaatgctattcgtaaacgaactgagcaaatgaactatctccggctgtcttcgcgcctcgacgccgtcgtggctcgccttgacacccaggccaagatgaccaccattaacaagtccatgggctcgatcgtcaagtctctcgaatctactttggctactgggaacctacaaaagatgtccgagaccatggaccaattcgagaagcaattcgtcaacatggaggtgcaggccgagttcatggagagcgccatggctgggtcgacctcattgtccactcccgagggtgaggtcaacagtctcatgcagcaggtggccgacgattacggcctc

SEQ ID NO: 99690 - DNA, 3096 bp, Cannabis sativa
acggttttaaaccgtcgggtatactcctattattttttttcgtactgtattaattaataataaccgtcgcctattgttgtagctattgtttaaaaccgtcgagaatactcatttttcccgacggttttaaacaattgcttaatttttttagcgacggtccccgtaaaatatcgttttcaaaaccatcgcgaattcgaataattgtagtagtgtaaggataaccgtttaaggataatgacaaaagagcggttattaaatattatcctatgttcataaaataaaatgcgggaaacgtccatatttcttgaacagttatgaatgattagatcttaaatgaataactgtcaccctatgcacctataaatatggacaaaatccagggtaaaagggatgaccattttgaaagagaaaaagcaagatatcattactactaatattattgtattctgtatcccaattattgtccccaaataagatggattcgtgaactatgaagaattaacttcaaaactacgttaaaaactttccggtgttcatttattactgtagttaattatgtggtatatttattacaaaaaagctaatattttttgttaacgaaaatcttcattaacagtttggtgctttcattaagagcctttgtaataaaaatttaaaaaataccctcctcataagacaactaaaattctatatccatggcagataatacccattgtgatgacgaaagtcatccaaaggagacaaaccattgccttggaaaggaaccttagggatcacaaagaaccatatttatatatgtcttttttttttttttttgaaaactattcaaattatagtaaatatttttagtggcttccttagttgtatttcattatgttttatatagttttctaataatgtagaactaatttggtactatttgaaagttcttgcgaaaaatatatgtattaaattttaactaattttagctaattaaataaatatttgtaagacaactatacattcttaatcataaactatatcaaaaaattatttttttaaaaaaaaaatgaagagtagtacaactgaagatgcacatttacaatgctatacaatcttttgataaatattaaataatttcttatactaaaaatataatttaactttatatatttatactattaaagaaaatagctatcactaattataatatcaatgtaatcttttatttttaggtgcattacaaaattctcatatatataattagggcctatataggtgcaccatacaattttccaatacacatcattagattttatgtatatatatacaaagtgatatatatagggtccaaaataagtgcactcactttccattatatttatatagctatgattttaattttataaattttgatttatattgtatactgtttatcaagttttttcagcaactaaatattttttaaagcttaagaaagtgataacatagtaaatagaacgataacaaatacgagatttttacgtggtgcaggcgttaactatcttaagtctacgagtctattttattaggctcatcagtcggtaactgtttacacaagtagagatacaatagactaaaactctctttcaccgtgtccctcttgaagaagagaaagcttagtaggaatattctggagttgatagtagggttacaaaatgtgttttcttgggatgatgaagaatgagtcttccatctgaaagaaaggtccccctctcttgtgctttttcaaagatatttataggccaacttctttgcatgtgctgccttggatggatcatcgtttgggtgaaatctgactgttggaccggtaggtagcatatttcccacatggcatttaaaggtgtcagatcgtacgagctaagcctccggcgcgtgtcaccttagggcttatcctttttgaatttccctttatccatggccattggatcatatgcttaggtacacaaggacacgcatgctctgtacgatagcgtgtcgtgggagacaacctctgacatcgtacctgaaaaagtatggtcactaggtccatagtctgacatgtttaggtgaggcttccgtgggctaaaggcgtagcccggtttagtgtgtctcgaaatgccctggcccctccaagaaaactagtactcttctcagcagcagatggctttagttcctagaatagggagagactttgactctcgaataccctccgtgtagctagcagttagggaactcttcttcatagaggctcttctcacaaagttggtgcccttaccttcccaaaacattatttgaggaagtggggcagcagatgacatctaagccctccttagaaacatccacgtgttatcacgacaaaaatacgaataacatttaccccaagctttcggggcataacttggtctgggagcttgcggcatcttctcctaggtggcttcgagcacgtgagatttatgacgagctctttattatactgtgtcatcaacccccaacttaagtgtcactatttagaaggcataatttcttctattttcttgtcagagttttaaatgttggcttttgagttttgtgtatgtacagggcacatgttctgtgagatgcccaaaaatgacagtgattagatttgagcagactttgcatttgctgagcacttttcacgatgtatgcaatgatggaagctaattgttggtaggctatacaccttctcagcttcctacctatccaactattagatgtctcttgggtgagcgagtcgaaccgtttgcttctcatggaaggtgcctcttcctagtacccaataaatacctttagcagtcatcctacacttttcatttttctgtctgtcatatcagaattctattaatttcattccttcctctgccttgcaagaccgtcttcatacctccatactcaggcatacatcccgtcagcaaggccgtagtgttaggaccaacaacctcattttctcttaacaactagtaagtgctctttactgttaacttgttgttgatttatgagggaattgtgtgtattacgtgcgattatttttcctagggatatcggtactgtgcttgttacctttatcatgagaggtgg

SEQ ID NO: 99691 - DNA, 2072 bp, Cannabis sativa
ttctaaagtgattctctctgtttttgtatagaattttacattgcaattctacaggcatatgatttagctattatccaattctcttttctttattcttcttttttaaatgtagatatactaaacagaacaatcctaaggcaacgttttgtgatgtatgatgattagcactttctgaaaaatgtatagcaaatcgttacccaacaaatttgttatgtatataatttgtataatataatattattaataagaagaaagagtttaataattaacactgtgattggagaatatttttaaataattttggttgtgagtaataaaaatagaggaatataaatgggaataagacttaatatgaatgaaaaggatgatttttttcaatttttggataacatttcctcccacttttggatggaatggccattctgccagaatgtggaaaagccattctattggaatgacattccagagttttacaaagcaaccaaacaaaataatggaataaaaatggtttcgattccattacctccagccaaacatacccttagtcaacactttctagttccttttctgtgaaattgagaatggaagcttttcaaaagagaaaaacaggtattagtttgtaggctctatgttgttatgctgcctagcttagaaggttgacaactttatttctctgaattttgactgtctatctctggatagtcttgtttagttgggtaggtttaaatcattgacttgatgatattctgttttctgcatttatttagtgatgtttatattgcaaatcacaatgagaagttcaagcaatatgaagcggactacactcgccgattaatggcaaaatacttcactaagaaggatctttatggaggtaggagtacctacatttcttattatatgtttccatgttccacaatgtttttctgaattccctgatttagtaaatcaatgtggattttctacatacaatcttttattcttcatattttcatttacatactctagatataatagcactttagtaatgatgattgttatccaaatagtaaagctcggagttttttcactgacaatatttttgttacaatcctctagttgtcttatttcttgtatcctgttgtgtgttcctgtaatcttcagtttcatttatcctgttaatccattcttaatccttgttttcacaagtttcagctctaatacttattaagacccaattccccccatatttgatgtgacctttctttttgtttatctcttcttattctgctttttgcaagtttctgtttatttcatatgaccctggtccgccatatctggttaatttgctatgaattgaatggtagtgtattttagcttcattatcgagctctgaaagtgctcttgatgttttgtggttcttgtaggcaacatatttgatgaaaacattacaatcgatgacgagcttataaaatcaagcaggtaatattttttgaagatgatgttcttatacataaattttctatgcgtgcagagatgttaatccatgtttggcactgtttctgcaggggcccatgtactcgctcatatgcagacccagttaaggcttttgaagaagaccagagcagcagtgactcgcagactaatacggagacgccatctaatataacaaatgggaagcatcaaataaagaagatcggttaagtataatttctctctaatttatcttcaatttgtagaaaaaatcacaagcaacttctgtgaggtgattactagttataggaatggacctgaccttcttccaacatacagcaaaggtgaaagacgttgaaatacattcaacatttctaggtcacaaaacatggctttttgtcgtaaattgaacaccatgttagaataaacgtaataaaacaaaaatatggattcattgatgcatgtaatggctgcgttgatctggcatcttgatgttatgaatatggacgcaaattgagtagtatgtagtcttatttaatatatgtgctgtatctttcatgattgctgtttatgttatgtctttcatgctcttttaataaggtaatttctcagtgggagaaagg

SEQ ID NO: 99692 - DNA, 1223 bp, Cannabis sativa
aacattctcaaaagtcaaacataacataaaaatctaaaatttatgcaataaaaaacttgacacacaaaaaaattctaaattatacatatagtcatatataaaaaaatgtataaattaattctttattattaaatggtccggtccaatttaaccgttaattatatagtacgaaccgcaaccgaaccattacgacgtaaacggtccggattgaccaaaccaccaaaaacggttttccggttacggtttacaatggttcggattgtagtggtccgaatttaaaccgcgatttcccggtttatatgaacagtcctacaagcagccttgacactagtcgccattgcaaccaaccgtcgacgcaagtcgcacttaaacaaccgtgcgacgaaggacaataattgaggtggttccataactcattccatattataaatttatgtgtatatttatatttataattaaattttgagacaaagaaagtagaaagtagctagtgtttttatttagtttttagatttttttttgtagttatgagattatttaggtcttgaatttgttgcaaagtttgaaatttttgatttggtttaatttgttttatgagttgtgactttaacatctttattgaatgaatttttatttaatttcttatattttgtaatcatttaataattgtactcatttattaattgtagtcatagggttgaattggtgtttgtttggttgaaaacaaaacaacacacaagagaagaaattgagagtttgttttttgtaaggcgaatctgaatgaggaggcagtggtccaagagtactgtattagcacatactgtgcttggtaagggtagtgtctaaatatacacaagtgagtgtatattttttgtaacaactccagggatgattgctgctaatgtatagtggaccaacttggttttagaaagaagaactgtgatgataaattcttaggaaatcctgttatttttttctaaatgtaaggtgaaggattttgagttcctaaaggacaagatttgttccaagattgaagggtggcgatgcaaacttcaagtgcaggtcggggagctatgctaatccgatcagtggttttaagttcccctatccatactatgtcgacgttcctcctccctaagacttgttgcatggtacttgatcaagtggtaaaaaaattttggtggttgggtagttctgaaaaggagaggttcttggccctcata

SEQ ID NO: 99693 - DNA, 1320 bp, Cannabis sativa
tcatgattctatccatggatgttaaggggtcctccctccccctcttctttagcaacttcttcaactatttcctcatgacttccctcttcctcatggagtgcttgaaatgcattcggggatgttacatttactattggtatctcattggccttctcagatctcctcccattcctcactaactgaaagccttcctcatccatttccttcagtggagctacagggggtttatcggctttcttaggcctccactcttgctgttctttttttcatgtcttcttacattctaaagtggaatggcctattcccaaacaattgcgtcattgcgatggaatcattcatacaccatcggaatctcaaccctgtgatcaagttcattcgtaaaagaaatttcctcagggaaatgttgatcaatttttacctcaattaacactcgggcatcagagagcatttccttattttgagtaatctgatcaatctgtaagggctctcctatttggctaactattttaaacaaggcttttctcccccaatatttaagctctagctcatgtagttgtatccatgtcggggctgaagagacattctcttttctgaagtctgtagttggattccaaagcttcatgatgatcagtttcttatcaaaaaataagtagcctcctgctaacacctggtccctgtattcaagagcatgaaatctaataataaagactccatgacttagaaatccaactttatccactttgtctttccataaccttcaagcaaaaccagtaaaggggccaattggtggattatcacctaacacatagcataccaaagatgagtttcaataggaaacctcttcctcaatatcctctgcatcaatttttattccccctgtgttgatatcagccttgtctcccaccaccccaaatttcaaacccatgttctgaattaagtgattagagtgcaacaagttacctgagttcaattcggttaatgaaccagattgtagaacgggaggagtgacagattgacctgaacggagcagcttggatctcctttcagatgcatccaagaaatttaaaaaattctcttgtatgtcctgaacacggagtgccctcaaaagcaaataccttggagagacaacatcttcgacaggagtttcttcttcagcctccgcctctgattcttcctctatgaagttagcttctgcaactccaagaatttcgtccatcgatttcatcttcaggggagtcgccgacgaagagggaccccattgttttccagcctttccttccttcttcccctgagttttcttcttcaccttagcaatagaac

SEQ ID NO: 99694 - DNA, 2405 bp, Cannabis sativa
acataattcgttgcttagttcaaagagaaacatacatgaaaaaacgtcaaggaaaaagccatataaatatattacgagataaaagcaattgaaaatttctgaaaatgaaatgtccaagtacagaatatcagcataccatatcatcatcttcatataggatctcaagcaaatgcggggcatcaggctccttccatggaagtctatgatagaccagttccgaaccaattctaatttgtttatgacattaggaacaccataaaattttcataactacattttttctttactaaggatgtgaaagtggtgtattatttactgtagaaaaaacagtttatattaggaatgaatcatcttgtaaaggtgaaatatagcattttaggaaagagatcattttcctctttattctttgatttgtttccttgtatagactattctaatctttatatacacgtttagtgtatagaattcaatatcagaagatatacctttgccatttttgacttggtattaaagccagccgcctcctaactgtaactctaatcgttttcttctccttcttcaccatgtatgatgcctcaaatgaatctaccactgttccagccaaaaccattccttttgactatcattatgtccaaatcaccaccattcatttgaatggtgataacttcctcagatggtcacaatcggtatagatgtacatgtgcggtcgtggaaaaatggggtacttgacaggtgagaagaagacaccagcagaggagggtccgacatatgagacttgggatgttgagaattcaatggtgatggtgtgacttgtgaattccttggaggaagagatcagttctaactatatgtgctaccctacagcaaaggatctttaggagaatgttgtttagatgtattttgatttgaagaaccaatctcaaatgtttgagttgcatctcaaattgggtgagctacgattaggggaagaatctgttacaaaatattttaattctctaaaaacttggcaggaccttgagctctttgacacatttgaatggcagttagataaggattgaaaacaccacaaaagaactattgagaagacaaagttcttggctgaactcaatgtagagtttgatgaggtgagggagaggataattgttcgacaacctctacctccaattggggaggtgttctcggaagtcagaggagaggagtctcaaaggagtgttatgttgggaaaaaaggttcttggaactattgtggaaggctcgactttggctattgtgggaggatattatggcagaaacaccaattattcacccaaatttggtgagaagcctcgcgtgcagtgtggcttctgcaataaaccttgtcataccagtgagacttgctggaaaattcataggaaaccagccagttggaaaagcgaagctaagagatcaggaatggccatgccaactgctaatgaagtttaaaccaatccatggagcaactgtatcatcttcatgcactgctgaaaactacctcgacctcatctggtattcctactgcttctatggcacatacaagtaatgaaataaatgctctaaattgtcttctaaaaaattatactacttggatcatagattccggagatcatatgacctattcttctaaattgtttaactcttatataccctatccaggtagtaaaaaagttaagctaggagatggtaatttctcgtctattgcaggaagaggtttaattaaaaattctgaggggatagatcttaaatttgttctccatgttcctcaactttcctgtaatctcttgtttgttagcaaattatctcaagattctaattgttacgcaattttttatgaatctcattacctttttcaggaccagagttccgggaagacgattggcagtgctaggatgattaatgatctctactattttgaatataagaattccaataataaaattgctcaagggtttagtagtattagttctctttctgttcatgatcaattaaaggtttgacattatagacttggccatcctagtttttattatttaaaacatttgtttccagtactatttaagaaattgaatcctctatcttttcaatgtgatagttgtttattggcgaaaatcttatgctaaaaattcttatcaatcttccaaaccattttatttgtttcatagtgatgtttggggacgtttaagagttactacaaattctggaaaaaaaaaatgatttgttacttttataaacgaccatactcgcctttgtcgagtttatttaatgcatgagaagtctaaagttgaataaattttttcaaattgttttagaatgattgaaaaccaatttcaaacaagaatgagtgctctgaaaaagaatgagacttaagaagttgttaaattaccaaatgag

SEQ ID NO: 99695 - DNA, 1153 bp, Cannabis sativa
tacatgttttttttttttttttcctaaaggcccaattttaaaatttcgcacaaagcccccaaaatgcttgggccggccttgtgtaggcctcactacttccttccattccaaaatttaataaacaatgtataaatatcatatcatttatcataattccctaagtaaacatgcaaaaccaaaatttaatcttagcaaattaagctttactatagcataaaataatactagtctattgaagataaaaataaataaattagtgttgaatagttggcacgtgcgagtgaaacgggagaaaaagagcaactctacgtggctaattggttatttcatgttggataaccaaaccaaatgtgtataagtgtgtggtgtgtggtccaacttccattcccaactgtcaccaattccaaccattcgtaccttcttaatttccaaactccaactccagaaaatataaaatttctttcatttccattcagattaacattatccaatctcatttatacatatataacatcagaatcttaatgtagtgacgtatcacagattctagtgtctcttgcagagaaaaatgacttccactgctacggcagccaccgtcaacggcagcaccagcccccatcatcatcatcaccatcatcatcatcatagatattcatcgatgggattgaggccaacaacgttgtcactgcccaatactcccaactgggcaccttcctttatctcccacagccatagccatagcagccatagatcccaccattctattttagtccccagagctaccacttcttcttcttcttcttcttctccggacacttctggtaataataataaaccacccaataacaagaagagaaacaagaacaaaaacgacaagaagaaacctcaaaatcaagaccaaactcaacagacccttccttcttcttcttctgctacaacaactactactactactagtgttgttgctcaagaagagcagcaaaagcagcagcttcgtctggatcttgaggatgtgaatcctgtcggactcggtcgccggtcccgtcagctgttcgatgaggtttggcgtaagttctctggactgggccagatttcgagcaccagcagagcagaccagagggatgcacttgatgctcttctcattagggaagga

SEQ ID NO: 99696 - DNA, 2071 bp, Cannabis sativa
tttattataaaaaaatatttttagccacattataaatttataatcactcttactaaattagtaaatttatctaattttgtgggagtttttctattattttagtttataattattaaattaaaaatttacatttacttttttaaaaggcattatttttgttagtggggctatagctcccacgtcaatgttaataggcccatccgtgattatatatataaatttttttttacgttttatattatagttttaatctctttaagtaactaatcgatgctcaactttaatgatctattttctcacgttagagttttgacgtgggtttcaactagttttttgatttttcttcgtcttaaggagaggtacagtttaaagaagaaatttttatatttctttctaattttattatatggagtcgcttttttagcttctttttatgatttcaaatacccggaaccccattcggacagtatcggacatctcaacggacacgaaacatgttcaccaatcagtcactatgtatcggaccaccatcgaacctatatcagaccactatcgaacattctccatcaacctcaaaaacttaaaatttgaaacctcctatcgaatttatattaggcctatattagacactatcagaccaactcaaaaaaccaaaaaaaaaccaaaaaattacaaagaacgtcttcgttcatgttctctttgtttgtggtttgtgtttgttgtttgcgttagtggcgatggtctctccattcacagttgaagaagggggcgaggtctcggtcaaactaaaatggagccctctcgatcgatcgaattggtgtggtctctgtcgaatggttggaatggtcgcggtcttggatcttttagtggggtttcgataaatttttcaatgagagccagtgagagagaaagaataatagggaaatagagagatgttataaagttttgaaatgagagatatattgggatatatatataaaaattggcgtatttcacaaatattaagtaagttaagttttggttattaattttaaattacaatatgtataaatatttaaatgtactttattgttttagtgttataatactattagtgtaattaagtattagattttatataattaattaagaaaataatttttaaaaaatatcactaactaataccacttataaaaaatatcagatactattaatatctaatatcaatacttaaaaatacttaaaaatatcctatactactaatataaacttaataataatttttttttatattatgataacatataaaaaaaaaaatctcaaaggtgttttattgcatgacatttttttagtattttaaaagaccaaaaatatattaagtttctttaattataagcctaatatgatattattagggcagttttcattttaaaaaaataaagatattatataaaagagaaggggcaataatggtaattgaagtaaaagaaggggatgatggagatgggggaccaattcacgtgcgaatcacatggggtgtgattaggattaggaaagaggtgatagaagagaagagaagagaagaggagggccataatgatggattgtcgggtagtgaaagaggtttaaggggccacatttttgactaaaataggaagattgggatgtgatcttgggtatcgtgtcttccctggggaacacgtgggacagctagcacgcacccgtggggacaccataatcataacccgacatcttgtctctctcacttcctcaccttttagttttttttttcttcactaatgctcaatctctaattataatttttttttagtaaaatataacttattttattaaaaatttattttaataatatattaaagtgtaatgtaaatatattatataataaaagatatttaaatttaaatcacaatataatattatataaaatttatattaataaatattatatatatattttttctaattgaataatgattaaatttcattaaactaaaacattcaaaactaaagattcaaaaacaaaaggtaaggagttcctactaaaagtccggtcagcctcaaaaagagaaga

SEQ ID NO: 99697 - DNA, 3973 bp, Cannabis sativa
atctgttgaaagctaggatgggaggaccacatcctaaagtacttaaagggctttcttccacttggcaaagtaggatgaatggataccactctagtgtatgatcgagctagccttctgtaaggaaaattgcttctgcgatcggaaaaagctctatccaagcttcattagctagaactctgtcgatcttggaataaattctatcttcaacacactgtttattgctccaagtaaagaagcttcccgagtatttaatatcttctagttgacaataagaaacacaattagcaaatgcagtcgaactgctatatcttaacctttcacctatacgctcatctttgttaagtatgtcattgaagtctcctagtactagccaaggatcagtactagaaaaatcttgcattcccttccataactgttgcctgccttgctcttcattgtaaccataaacaaaagttgcaaagaattttattatttattatgtactatttgtatagaaattatttttatttgatatttgtggtatgaaatttggttattatacacatgaataatattggtagcatgagaatttttatctctaaaaataatatattttttcttaaaaaatgacctatctcaaagggcctaacccaccgagattgctcacctgtctcggagggctaggcccttagagataggtcattttttaagaaaaaaatatttatttttagagataaaaattctcatgctagcaatattattcatgagtacaataacaaaatttcatacctatctcggagggctaggcccttcgagattgctcacctatctcggagggctaggcccttcgagatttctcacctatcttgaagggctaggcctgctaacattactcaatctcagtgctcttatttacggcagacaatgaccgccgagatagagcagtccaggggttgggcccaccgagacgggcccaattttttgtagtgagtgttactggaacctgaggctaacacttacgtttcttctggcatgcttagatatgtcgaagatcttgagttctttttacgtatttcttgtggaaagtaatcatttgccaaacttatatccacccttcaaaaggtcatgttgaaacagaaggcgagctatgacaagaagctgagtttggatgttaaggactagtgcaaatacacaacgtatggctttgtacttgtagtacaatatttggcgtacgagaccattttagttgttaggaagaaggtattgtacgaatcaggggattcagttttccaagatgcttagctagactagcaagggtgagattgggaagaaggagctcgatgcattattttttgaaataggtatgattttctcttttatgtttagagcaattattcaagcgaaatgtttggaataaatattgagaatttgccaacttaggccacaaaaagttaagtttttcatgaattccttcaagaatcatctctgctttaaaaaatattgagattcaactatttctagggaccaaatgaaatttctaaaggccaaaagggggacctagcacccagaatgacatctggggctaggcccaacgcctaggttgatattttgtcaacctgggttgtttccaatttagttcagcaaaaagtgctccaggaattatacttgtcataaaaaataacaaagattcaagtaaactcagggaggagaccacaaatttgagtcctggaaatagggccagcgcccaggttaacctggtgctcagcctagtgcccaggtttacaatcaacttgggatcctgcttttaattgctcaaatgccaaatttgatgcaaccattgaatccaacatggtcaaaaatagtggaggagaccctatcctcaagttcaaaagtcttggaagtatcaaaaacagaatcttgaaagcttggtttaaagggcccaatgcccaagtcaacaaatggctggttcgttgggttctgtttatttgaatctaataccatttcaactgtccgtctagtttttcacaagtgcaatgatccatgaagtcagaacaatcaatatcacaacttcaatttttttgagaaattgactcactcagaaatcgaaagctttgagttttttgtttctgcaaaacagcaacatctctgcgaatggtgactagctttgccagaacctataaattgacaaagtgatgttagactatcacttaggcatctcaaaggacaccccttggacgtttctacacttatacaacgtccaggctgatgtcagatgtcaacttgggcattgggatatcaacttaggcgcttggacctaaactgcctttagtaaaatgaccattactcactcaatttttattcaattaacgtgattcaacttgatcaagtcatgtcccacaccctagacatatttttgaagctattatcatcaaaattcacccccaaaagagttaaaaaataagcgtcggaaggaattcataagttcaagcaatcaatcaacaatcaagatgcaaagtaacactaccactcctggtatccacaccactactcagcaagcagtagacactgagatttcccataaaaaagcggatagcattcgagcctatagaaggactcaaacttaaaaacatggatctatggggtcattgcctgatatagagcaatcacctgttaggatggtggtggtgcgtgcactgccatatcttaatgtaggagaaaagattagattttgttaggaaaaacatcaccatcactttagtgacccgactcatggtaaaagtcgacatcttctaacacccatgagggtcggtatcttccctaggtttctctagtgtgcatttggggagccatccgaaacaagcatttctacaaggcccttttgggtttggaagagacatttcttatcccattattgggaagcaaatcctgctacgagcaggttttcacgtatctaagctctggatgatcgttcaacttgaagaaacctttcagtaattgtgcaccttttaacggacgttaactcaaggaggatcaattgagccttttccattaaatgtgagtgttgattgtgagaactcatcaactaatttagtagtcagaaaaggcaaggttacccagaaatgtgataaagataagataaagatgaaggtgaaaagttgtttgaatattcctctttatattaaattcaatatctgaattacaccaaatgattttccaacccctttcacatctgagatgggcatatttataggctttaatggcttggtgtacaaagtggtcccatggggataagatgtcactttcccgttgcatgttgcatgtgctggaggaagcttggcaccatgtacccttgtctggtgtcaaatggtccccaattgcaggctgaaggaggatggtctccgggtacacgcgggtccccagttgtaggttgtaagaggatggtcttcgggtacatgcacattttcctcagttgatagttgtaggaggatggtcactcgcatggcccccagctgcacgcagggtggtccccgggtatagggtattggagagtggttgcagcttacccttggccgggtcttcagcgtaccctcgccactacttgtatctccttattctcagtcttcataaggtgtggttgtacactcttcccttgcatgccttgtcctctgattcctctcctaatgtcattgttgtcatcatgcattcacctctcaccttatcttcacaccctcaaaaatacacccatgccaccttacacttggcacccttctcccatacactcaactccccccaaatttacacacactcccccacatgaacacatggcttgcatgtgagccccccatgggctcgcatacaaggccccccactcgcacaaactcccttcactcgcacacactccctcacatgtacacatggctcgcatgcgagccccccactcacacacactcccccacatgtaacacggttcgcatgcgagcccccactcgcacac

SEQ ID NO: 99698 - DNA, 1333 bp, Cannabis sativa
tttttttaataatttataaataatattccaatatataatcattcgacataggtagcaacttaatttcattacaagaatatatcaacgataagacatggaaagagaatttggcccgtatcagtccaaattgagcatatatatatatatatttatatataaagtttggctatgtaacgattttttttatttaacaaaatattttaaaaatataagaatattccgttaaatttaacggtattagtagaattagttttatagatatatatataaatattattattatttattttagattaatttaatatatataaatattaatattatttattttaagttaattgaacatatattgattttaaataactttaaatatatttataaatattaatatattatttgtaacattattattttttattgttacttttaatatcgagagtatgttcaatttaatattcatttaactttacatttatttttcttaatttttaaaatttaaatatttaaaaaaaaattaaaaaattaatttatttattttaatttataaaattttaaaaatacaaaacacaaataaaaaataaaaaatataaactgcacataacaataacctagtatatatataatcatgaatactaacctgaagcttacttttaaactatgcccattggatgatgaaaattttgggttaaatttaactcaaaaataaattaatattatatttaagctaaattttgtaattgcgctttaacacattagaaataaaataaattttattttaataaaaaatttaaaagtataaagaaattatattaaatatataaataaaaatataaaaggttaattatattaatgagtgacaaaagagtaaattttatttaaagtataaaaaaaaactatatcaaatatataaataaaaagggtgcctacttaatagttatatttttattgtaactacgatgattacacttttttgacatgtaacagtaggttaccaatatgtaaaaattcatttttcggaattaaattaataatttttttaaatgactaatatttaatttgaatatttaacatgacttttttagcaattaatatttataaataattttatttttatatacaagtccctattataatttttttaacagttaaatcatttaattacaatatttataataaaaccattttttatatatataaaattagatttccacatatgtcttaatttagaagcaagcagtgaagatgaataccaaaaaatactttcatctaaactaaatccacatatatcttaattgagaggggcaaaggcaggaggactctgagaaatttattt

SEQ ID NO: 99699 - DNA, 680 bp, Cannabis sativa
ctactaatggttacaattactccttgttgggttcgacgttttcgtcaaccacacttttagttggatcaaggctctaatattattttgtaacgttcctgtttcaagcttccggtaatctaatgaaaacttgaagcgatagtattacagcaaatcctgccgcgacctaaaaaaaaataacaaaaagaattataaaaatacaaatttacaatttttgttaatatttttacaggttcaaaattattttattacaaaaatacaaaacattattttttttattattatttgtacatgttgttacacgtaagttacataaaaatataattaaaaaatatatgtaagaaagaaaattataatccgtaaaattagagatatttacggcggaactcttctgatatttacaattattatatataatccttaatttacaattttattacaattatacttttttttagttgttaagtttcaattaagcccgttaaataccagctcaaaaacacatgacgatatatttattgagcttgtttaatacatagtctactaatatatcgctaagtgtttctaagttgacacttgatggctaaaaaggaatacgactacaataaaatcttaaaattttacagttatttttttttattagagttgttaagaatcatgagttttcatctcaaaatcaatta

SEQ ID NO: 99700 - DNA, 2691 bp, Cannabis sativa
gggataaaagccgattggaagggagagactaatctatcaataaagcacttcagccgatccgtgagtatcttggaaattatcttataacaaaaattgcataggcttatggggcgaaactggtcaaatttatcagcattctctgtctttgggacaaggcaaataaaggtatgattaattctatcattcaaactgccaagcataaagaaatcttttaccattccacagacctgtgcaccaacaatggtccaatatttcctgtagaagattcccgagaatccatccggaccaggtgctttaaggaaatgcatcgcaaacacaactttgcgaacttcttcatcagatggaattctgcaaatcagatcattttcctcctctataataccagtcgaaaacaaagactccagctcatcatcaatccgaggctgctgggactcgaaaacctctctgaatttcttctgaaaatactctccaatatcagtacgattttggagccatctaccatcatcattctcgacgctaagaatcttgttccttctcctccaaataactgttgaagcatgaaaaaatttcgtgttaccatccccatccctaagccaatcttcccttgatttttgcttccaaattctctcaagcctttgttcctaatccaaaatctccagctggatacttgcttcttgggccaaattttgatctgtaggagccatattctgaatggacgtgagacgatgcttaagattacgcaccttttcatcgcattggccaaaaacatttcttttccatagtttaagattctcctttgttccccgaattttattgggcagagctgattctcccgccccaccatagtattgcttccaagaacaatccacgacatcatggcaacccgtctgagaagtccacacttcgagaaaacggaaaggataatgcaatttttccaccacacaccaagtatctaggagaatcggagcgtgatcagaaccaacaatcggcagattcgtgacttttgcctcagggtgtgaggtacaccaatccacattagccagggctcgatcaagtcgcttgcggactctattgctacctctgcgagagttatgccacgtacacttgacaccatcacaccccaagtccactccccgtgtcgacaacagaaactccttaagcagatcaccttctcgcgtcttaaatttgcttcccccaactttctcattttcattgagaattacatttagatcgccaataacaacccatggttcattacagtccgccaccttctccgtaaacaatctccaaaactcctccttagaatccgaataaggggttccatatacgcagaacaaatgccatttgcaaaaaccacgggattctggaaaaatcacattaaagcctgtctccatatttgttatatgttgaatatcaacccccatgcgccaagcaaagcaaaacccacctcctattccaacagagggtatacaaacactattattaaaacccaatcgattctgaatattcaccataaaatcctcccccaccttagtctctaataaaaacatcatatccacattagtatccctcaggagacctcggagggtcctctccgccgtgggtctacgaagcccacggcaattccacgataagcacctcatgaggaaggtgggggcatgcttgaggccgcctcctcgccttcgccaaaattctgtccacctataaaggaatcgtccgtattgaaagtcagtactatttccaaattaccttgaatattatcacccaaattggaagccttcaatcagctccttctagttttaactccagaagatctctgtcccgtactcagcctccccacatccttggttttggctttcctgtttcttccttttgataccactttcggagtttcaattgttcccatacaaaatttaccctcaccatcaagctcctccaacctcgcattaccactgcttcccgctccttctccttcagatgcttcaaattgagacacggctggaaaaggatggtactaggtatgagctttccgtttcttacttcccaacacatgatctatcatttcagacaaattacgcgggttcggtataatagacagttgagctttgtagagatccaaatagtctgggccgtatagctgaaagaacattttctgggctacattatcattgttgggccatcctaacgagatgggttcttggtaattatgtggtctctgagatctacaaacccaagaatgagggatattcaaagattgggctatagtgggcccaatgtcagggaccaagtccatccttccctccacaccagcaaaatcgggttgaggaggatttaaaatctccggcccaatagacagacggggcccatctccatttaaattttcatttcccaccgtcagaggtacaacattctccctcgtactacagctgtcagcccttcccagagtagtggagacactcccatgtacgatcttggcagaatgacagctcacttctttttgtttgtctcgacatgggtcatcggtcgtttccccttctccgccgcagacagtcttccatccgactcaagtttcttctcaatgccacctccttatattttatatagatatattaaatatgcacatgatcgcattacatttggtggtcatggttgattatttttatttaataactcaaagtatgcaattatgat

SEQ ID NO: 99701 - DNA, 577 bp, Cannabis sativa
  modified_base (502)..(506): a, c, t, g, unknown or other
cattatcctcctcagcttcctcctagtattaataatacaagtatgatagataataagaacaacttcccgtatataaagcactttcctacatcataccattgttctaaattactatctactacatgaactttttagtattttaatacatacataaattgcaacttcattttttacatgtgtataatgtagttatataaaattccaaataaattaaaatgccgaaaacatgactgaaaaacttgttgtacgcatacttattttgatattgatattcatatgtttatatttatatgtacatgcaccgcatacttattttgatattcatatgtacatatctttatatttacatttacatgcaacagataccaattttgatatcttaaattatttgaaattaaactaccaaaataccaagataagtagtgataaaaaacaatccactactatagttctagaggtgcccatatatatatagtattaactaggggtgggcatcatccannnnnatccaatccaattgaaccgaaccgatccaatccaatccaattacaaaaagttggatatccaattacaattg

SEQ ID NO: 99702 - DNA, 2095 bp, Cannabis sativa
  modified_base (73)..(73): a, c, t, g, unknown or other
aaattagtacagtatttaaaaaaataggtaaaaataatagactttaaaaaagagggtaaaaataaaagagganaatataaaaagggtatagagtgcaatttcatctttttctagtggggcatgggcttattttgtttctaatacatatgtatcgaaaatgtctgaaaaattgaaatatatatagtggtatttgtcaaaagtttatatggtctttggctattttaatttagttaagtggaactggaacagtccaagcccactccactgtcatttttatatggtaatctaaaaccgccgaaaactgccgcgcaatttcattctctctttattcactcaaaacaacttagtaatagaagtagcttgagctctctcagtggtgaacatcaactcagttatggtgatccttcagcaaaaacctcaagacgatccttttcttaagttcattgattacgcgaggtccgtcctttgccccgaagatgacgaagatattgatcccaatcttaatggaggagacacccgtcgacctagttggacctggattgcctctcgaatcctcaagacttgctctgcctattccagtggtgttaccgccgcaattctactctctgatctttctcaggttttaattttttttttcttttcatttttatccaaaaattaatctgcaaattgagaattttgacaatgagttgcgaaacattattaggcttggaatgagcaacgtagagatggggtttctaagaaaaggccggaatgtattagccagttgaggaagaaacgcagacgaacgaagcttccgaacactgtaactattgattctatttatgagaaaaatttcttgtcgttaaacagtgtattggaatctgttgtggttgatgcttttgttctcccaggtactcatacactactatttattttgatttatgtatagtggcagttcttggcttgttattttgttgagtcttattacatctttgtattgtatagaattatattaaattgtgatattattttcgtcatgatgtttagcattttcattatttctctttcaggtacgaacatttacatgcttacgcttggtgatttttggagctctaataccattgatctttatctccatcgcaggtatactagagataccaaattggtgacttattcaaacagtaaattatttcaacatgggtgtgacccttttatattcacatgtgacagtgttaagaactagtaatgtgtttataccatgtgcatcttaggaaagcccattttccttttggtcatagatatttatattttaaatttgtgatggtaaaacagctttataccatttccaatgcatatttttcgcatgcgcatttagatttcatctgtttgtgtttgaagtttcctgttcattaaaggttggtttgaattctactcatgtataaatattttgttgtagatactatgatttggtggatcctaaaaatggcattttgaagaaaggaagagagattttcctcactgggtgctatcttcgtactgctgctgaaggatatggttgtccacggttgttgccaacagaataccttgtgatattattggatgaagtaaatttttcaactttgtttgttgtccttttggtctccaggattgtttcttactgtatatttaaccatgtccctgttttgtataacgcttatattttcattcactgtgcggctgaaatttgttttaaggattttctgtcattattgctaatttttcgtatttattttcaaatttgtaaatgtaggatgaggatgatgatgcaatgattattggagctcagttctgctcagatttattttcttcaatttcacttgatgcagtcaataaaggggtttcttactcgttatatggaaggtacaataaaatttgactgattttgaataataactttctagttttgttggaaattgttattcttcataaaaggatggcttaaatttcaatgctcggtcatcatcaaatgttctactccattataagaaggttgatgaagtaaacatgaaagcattacgtagctattcttgattaacaaaagataagattcctaattagggatgaatgatgatgc

SEQ ID NO: 99703 - DNA, 981 bp, Cannabis sativa
tttggtgctttgcttttactgttttagactacaagagttgtcttttttattatttactcctttcaataatagtgagtttacaaatcgaaatggtaatagcagtctttattctgaaccagatttttttgactcattgatctaatttgaaagtttcttagattgtttctaatgttttgctctacatatcaatctttcatctggcttgtccttgatatggttggttttattattttccattattctagtatgaataaatgggagtgtttttacctaatttttattagaaaatttttgactgattgttattaataggtgtaatttgtcacgtgttcatcttgaatggaaatttaaaattttttttgcactcatttgatgcttcacagttgatggcttatgaattttttagttgaaaatgctattaaaatttttttctctcaattattataaacgacttgattagcattattttcatgtaataaattatctctaatttatctattaatgaaaattctcattatgaaataatttaagtttttctttgaatgaaatatcaacttcattgaaataagctagcattctgaatacaaaatattctaaaactcagagatgaaataatttaagttaggaaaactaaaagacatagattttaaatgataaataagaaaatcaaaacttatttatttgtatctcattcactctaggatatatctctcacatccatgatctttgtttttatgttttaatgttctttgtttttcccacattggtttttgttatgtatttttcactctgaacatctttttattcacatcagttgtatgtgtggatttcatggtgccaaaaattctttaacgtgtcataataggaggagccccaccacatcaaacatccaactaataattctaacatatcacctttttcggttagacatatttagagaaagctagataccaataatatttatataataatattcaaaac

SEQ ID NO: 99704 - DNA, 828 bp, Cannabis sativa
gatcattgccatcttaaatgatggcacaatcatgaccatttcaaaggacagggtgaagccatctcctctacctgactcatggaaactgaaggagattttcgctactggtgttgttcttggaacctacatggctgtcatgacagtagtcttcttctggcttgcacatgaaacagaatttttctctgtatgtaatatcaaactagttcaaagctttcaccaactattcaatgtttatctcttagaacaaactctaaactccaacaatttgcaggaaaccttccatgtgaagcctcttacgaccctggctgagcttaactcagctctctaccttcaagtgagcattattagtcaagcacttatctttgtgacccgttcaaggagctggtcctttgttgaacgccctggatttttgcttcttggtgccttcattgcagcacaactggtttgttgttttatatcttttctattttcatttctagtgtaaataacaagccccacttccttagtgaattcctctgcttatccaaacaggtggccactttaattgctgtgtattcgaactggggttttgctagaatccaaggcattgggtggggatgggctggtgccatctgggttttcagcatagtcacttacttccctcttgatgttctcaagttcatgactcgatatgcattgagtggcaaagcttggaataccttgcttcaaaacaaggttttctttcttaactctctcttcacaaaatatatatatccaccaatataatcactcattcttccttctcactaacattttgttatgtttttttgtttgaaaaccaattaagac

SEQ ID NO: 99705 - DNA, 539 bp, Cannabis sativa
gaggaaattttcaacaaataagttttctaaattgaaatttgaggagccgataatcaaggagggcaagaaaatagctcaagttgatgtggatgaaattaatgctcaagccgctaactgggactcagctgttatatgtatggtattaggagctaatcctcctatggttgtatttgagggttttatcaaacgaatttggggcaaacaggggatagagcaagttattagaatgacaggtgggcttatgatagtaaatttctttgaaacttcaactcatgatcaggttcttgaaaatggagttgttcaatttgatagaaaaccagtgattgtgcgtccttggtccaaggatctaaacttaattcgcctaattcgatctttccccttatggatacatctccatggtcttggtcttcagtattggggaaacaattgtcttagtgctcttgtcattacaattgggaagccattgatgatggataaatttaccaagaacttgaattcagtttgcaagagttcttatagagatggacatagttgataat

SEQ ID NO: 99706 - DNA, 3309 bp, Cannabis sativa
ctctctaaattaaatattatttatttttgattcatttatttccttccaaactcataatataatacttaatataaaacataacatatatactagttaactagaaaagcacataaaaacaaaactatatgtgagttcttagattttattttagtttaattaggtgtaataaggtttatcaaaaattaataaataataaataaaatgaagttaaaatatttttttattctatgtcaataaatataatatatttttaattaaaatataactacatacttctaatctaatccaaataaaattagatgtctaattttttgtaattggattgaatttaactggtttattataattgtatcggttcagtataattagataaatcagatcacaaccaattactttattacataatctacgtttactagtgaattaatataaaaaaaatggcaccccgacaaaagcccagggccagatggtatgaccccggctttctaccaaaaatgttggcacattgtcaaaacagatgttatcggtttagtgcaacatttctttgcttctgggtctttcgtaaatggttgtggtgatgcaaacgtggtcctactcccgaagaaaaagtctcctcaagctatgcaagacctgcgacccattgctctgtgcaatgtcttatacaaagtggttactaaggtcatgacaaacagaatgaagcctttcatagatacaataatttcggattctcagagtgcctttattctgggtcgtttgatctctgacaatgtgatggtttcctttgagattcttcattatctgagaaggaaaaggcaaggtaaattgggtttcatggcgataaagctggatatgagtaaagcctacgatagaatcgaatgggctttcttggaatcaatgttgcagaggatgggtttttcggagcattggattcgcttgattatggcttgtgtcacatcggcaaagtataacatcattcatggcagccatgaagtaggtcttatcattcctactcggggcattagacaaggtgatcccctttcgccatacttgtttataatttgtgctgagggtctttcggctttgcttcagaaatatgagcgtagtggtttgatacatggatgtaaagtagctaatggtgcgcctcgtgtgtctcacatgctttttacagacgatagctatctttactgcaaagctacaacccaagaagcgatgcgtatacaagagttgttgagaaagtttgaattggcttcagggcagagggtaaattttgcaaaatcatcaatctttttcagtagtaatactgagttggtggttcgtaatcagatttgttcgctgttagacatgtctattgctgaagatggaagcttttacttgggactgccaagtactcttagtagaaacaaaactacggttcttggctatctccgtgataaagtcagaaatcgtttgaagacatgggaagggaggtttctctcaaaagggggaaaagaagtgctcatcaagtcggtagttcaagctcttccaagctacgcaatgaatgtattcctactacctttggtattagtagagatattgaacaactcattacaaaattctggtggcgttcttctaaagatgacaacaaagggatacattggatggcttgggatagactttgcaaacacaagaaaggtgggggaatgggttttcgtaatttctaggattttaatattgctcttcttggcaaacaaggttggagattgattacacaaccaaactctttgtcttctcgtgtgtttaaagctcagtattatcctcaaggtaattttttcaatgctcaactaggatccaacccgagtttcatttggcgaagcatcttggaagcacaagatttagtgcgtaatggtacgcggtggttagtgggaaatggctgcaacatctcggtcattggagagccatggctccctgatgatgcaaacccctatgtcactacaaatcaccccagccttaccaacaccagagtttgtaacttgatgaccgtgggagaggcaaagtgggatactgagctgctgcatgatatctttgaggaaagagattggcgtttgatatcaaaaatccctctcaacttagttacaactgaggaccattatttttggtcaaaagatggctccggcatctatactgttaagagtgcttacactcttttgcaaagcttgaagggccaatggtatggggaagaggatgcaagtttttggcaccagctttggagcatgaaagttccttcaaaaattcagaacctgatttggcgagcttgcacgaattgtctccctactttggttcagctaagaaccaaacatctggctgtcaactctctttgtccgttgtgccaagaacaagatgaatctatcttgcacatcttggttacatgtcgggttacaaggaagtgctgggacagagtggggataggcacggccacaccagcagggaccaattttttcgactggtgcacgacagtcttcagtgtagcagcagcggacctgtgctgcaaagatgcaacggttagttgggctatttggggtgctagaaatgagttagtttggaaagggaaaagtttcaatccgattgatattgttgcgtttgcaaatcgttatcttgaccaatggagatgcgctcaaagttccgatacggaatcgtcatggcctttacttcgggctagagacgttgttgagcgatggatcgctcctcatggtaatagtgtcaaggttaatgtagatgcatcaatgttcaacaatggtgagcaatatggtatcggtttggttgttcggaatgggtcaggactactaattgaaggtcgcaccagattgttctttggccaagttgaaccggtgcttgctgaagcaattggcatccgagaggccttaagctggatcaaggacagaaggtggcaagatgtgtatgtcgaaaccgactgccttaatgtagtgcaagccattcattgttcgacagagatgatctctttatttgggttggttattaaagattgtaagaatttgcttgctagtttaaacaatgtatctgtttcttttattaaacgatcagctaatgtagtggctcactcctttgcgagggcgggtatattgtaccctaattgttctttcagtttgtattagtgaaagtaatatcaaaagtgtttcattaattaataaatctggtatttatacaaggatacagaacaattgaccaatataactaacataacagaaaactgttattaactaacttagtaacagactaactaaataatagcctataacagattctagcttaaga

SEQ ID NO: 99707 - DNA, 2115 bp, Cannabis sativa
  modified_base (45)..(57): a, c, t, g, unknown or other
  modified_base (2089)..(2090): a, c, t, g, unknown or other
cgggttacgattaaatatttgcaatccgatatttatattgggttnnnnnnnnnnnnntataacccgactaaaccgaccgacgtacacccctaatataaaggccattttccaacacttgaagcaaaaaaataactctggagacttttatcaacatttttcgaagagttcttttcttctactctttttttatgttcttggttaattgttatcagatatttttaattatgatgagtagctagacttttcatttagggtgttaatgaagattgtttgatattatattttgattttaatgtgatttaattcttcctcaattttctatgttcatctatttcattcgtacttaatttattttaattgtctgaccatcaattaactgtttatgatatcaatatgaaatctgagaagagagtattgattatactatagtgaaatagtcacagatttcgagagtaattaggactttcatgcttgcctcctatgtatttaaatatattacgagagtaaaacatttgtataaaagttgagatttatatgtcctagtccaaatataaatttctatagtacattcgctatcacttgaaaattagattttgagaattgaattatgttaaaccagattaaatatatttaattgaaattagtcactttaactttaatcattgttaatttcactgtaattcattattttatttgtttgttttataatttaatttttacttaggttatttagttttaaatttcttttaccaaataaaaataagtatttaattgttcggtactcagctacagttctcgtggaaacaatctcacttacctgagtattacttattaaaacaatatgtatacttacgtgttggatttttcacaacactgatagggtaaaaaatattataatattgactttgggccgaataggtgaggcccaatttaagggataaccatcgttcgtacaagactgtaccatgtgatggtgacaggtgggcatgcaccgtcgatcgtgcataataaatctcagagtagtggacgttagacaaaaggtggtttgtttttttgatgtgcgccttttcaaggcctaacataggggacaagcccctaattgtgtgagattcggtgttagaagcgcgccatgtcagattgctcctgaacggtcgacgcttcgcgacatcccttcggctactcttccaggataccctaggggtatccgtttatcattcttcagacgcactaacctagttatgtgttaaccttccggagtcatttttccgactttacccgtaacaaattcttggttgaatctgaaccttaatccaattttgttcttggactgggtcgttggcttatttgagccttgttaatgagctcgcaaatggatttagaatgcgaccataaatgtatcatgtttccgaaaacgtagataacagtaataaactaaagctgtaaattattacaatcaattatttacccctacataatacgaacatgaaaaatactttaataatctttctaatgatattttatattaatatcagactcttagataaaaaattatgaacaaaatacttaaataatgtttatttaaaagagtaaatacttatttagtaccttatgttttgtgaaaatacaaacttagtaccttatgtttttaataatgatcaattagtaccttttatttacaaattctacaaatatggtaccctctttcttaatttattgaacttaaattttttagtatgactaaattacccctaattttaatacttatgaatttttaaatggttttaaacattatttgttttaattatatataataaaaaaattattttacacataaaacaatgatattataagttgagggaaacgaatagtttctctcatttcgtcttatacacactaaaggagcacaaccgtcacctttgacggagaagacgatcggagttccacctgagaaaacaagcgaagagccaaattgagaagtcaagactgtgtatattgccaaaaatctacgttgtaaaggtcagcttggaactttttctttcattgttattactctgtttttcaatagagaatatatatatatctttatatnntaaaagtgtctatctaacggcattt

SEQ ID NO: 99708 - DNA, 1454 bp, Cannabis sativa
taattctgtattcttcacaactgagtcttcatgttttctaggaaatatatgcacttcttacttcaaaattttattctcgtgtcttctttatttgctgtactttttgcttgtgtgatgcactaaacatggttagctactagctatgagactgagagtagaacttttattgaaatttagcatgtgatgctaggtgtttagctcctttgttgatttggtttttgttctctcttgctcagaagctttcaacagtaatgcttctgcaacttgcattccagagccttggagttgtctatggagatttaggcacatctcccttgtatgttttctacaacactttccctgatggcataaaagacccagaagacttgattggagccttatccttgataatatattcgcttacccttattccgctcctcaagtatgtgctgattgtttgtagagcaaatgataatggtcaaggtaaagtgttctcaaccttgaaagttgacttgccatagccaatcttctaagtgcttgcatttgcatttcatttgtttattgttcaaagaaactgaaaaatgaagaaacaaagaaatagggattacatgtgaatagcatgctggaatagatcttttagagtatctatgtttcaaagtaaagatatgataatctatatgttacttatatattatatacgttattttataagaaacaatacttaatgttgaaaaaaaaggaaaaattacttacaagaatatgatgtagtatcctaacaatacttttcttaaagaattatccttaagtagaagaaatttaaaaaactctacactcaatctaaggcaaacaaaaccaacaccgctaaaagaatattacttcaagtgagagtcattacagaaaggagaaaatccttgagtttcctcatttactgaacctaacctttattaaaagaaaaagtttaatgtcctcaaaagttgcatcatcatatttttccacattacaacaaccacatggtcttgcttttgctcaaaacatatatgtttttctatctgtattgtctcacatattttaggtaaaacccaaacaaaatcaactttgtttacatttcaaatcacattgatctagctttgctgccacgcagaaacagatgatccaatgattcagtcatttttacagaaggcacaccagaaagttgtgagtaaaaaatgcaaactagttcacaagtattagtgttaaagcacgccaaacaaaaagtttaaactctggttggaacagatgatatccaaataaaattaaaatgcttataaaaagtagggagattgccaaagaatatctgtggataaaggatgagtttcttatccatgatgatttttattaggaataaactttaaataggattttttttttttgtaaggataacctttaaataggttgagtacaaatcgtattatgtaaattacagttaattgtattag

SEQ ID NO: 99709 - DNA, 3238 bp, Cannabis sativa
attgaattaaattagacaaaagtccttaaatctaacaatctcaatagtttaggggaatttttaatagccaaaaaaatttaagaggtatgatttagtacatgttaaactttaaggagtaaaaatcctaattaacctcactaaaaatattattatagctaggccaagttttaaaattataaatatttgtgcggagattaacaaaagaaatgtttaaaataaaattatcattaattccattgaaagaagtcctcaaatttgatatacttggagttggagtgtcatatcatataaataattactaaatagctcgtacacattatatatttatttagatttatttgcggcgtaaatacttaaatttatcttttggttacaaattaatacttaagttaattttttggtggtaaaaataccttccgtcaatattttgttgcaagtgaggtacttaatgtaaacttttcagttaaatgccaactaaataaatacttagtaattttaattagtccaagccatttaattttaattttaattttttatttaaagaaacataaaaattcgtttataatatcaaacaataataataaactaaaattaacatatattaaggtattaacattaaaaacaatatgaaagttgcctgcctggaatcacttcttttaagccactggttttcaatgggacagataccaatatgaaagttgccgatcttataaataatgatagacaatgggaccatgacaagctttccttgcttttccttgattcggatgtttccaaaattataagcttgccattaacactcacctcacagcaagatcaacttatttggcatcatgattctcatggtttctatacagttaaatcgggatacaagcttgctactgatctggaagatcaataaccgaatgtcagcagtatacaagctcaacaatggtggcaaaagttttggaaaatgaaagtgccttccaagattagaattttcttatggcgtgctattcatgattgtctcccagttgcggatatccttcactatcgacacatttcggataccgatcgctgttcgttgtgtaacagaaataaagaaaccatttctcatgctctctttttctgcaaaagggccaagaaagtttggcaaaattcagcattcaacatcgctgatttggttgcaccagaaatgaaattgatggaattttttcttcatatttcttcttgctggtcttctctacagcttgaacaatttgcaactattttatggagcatttggacagaaaggaataaagagaaacatggtacgaaaccaaaaccatttgatgttctcctttattttgcactctcttacttggaggattatcactctgctagacaaacatcagcaacttcggcatcaacaacttctcctgctctatcttcagcaggtaattcggcagtctcttggctcaatcctccttcgggtcgcctgaaatcgaacacagacgctgctatcaacgtaaggaatcaaatgtataggtttggtgctgttcttaggaatagctacggtgacattattgctgcaatgtcttgccctttcaaaggctattttaaaccagacattatgaaagctttagctctaatgcatagtctacagtagatcaagaacttacaactaccagtgcacttcattgaaacggattctttggcagtagttaacggtttattatcttcgcaggagctagtttctgatttccatagtttgcttagcgacatttctcttttagtttccaatttccctggagttcaggtctctcatatttatagatctgctaataatgccgctcacttgctggctagatatgctctttcggcggaaattaaatgttcatggttggaggaagttcctccgccaattatgcctattgtattttaactctttgtttaatataatagcattttatctcaaaaaaaaaaataataagtaaaagaaaaatacttaacagtagttataggtatagttttgtattccacactttttttcacaaaaaaaggtacaatttcgaatcttctctccaatataaggggggaaaaaaatacttaacaacaaggtgaattgtaataattttgtcaccaaatattttacctaaaaagttaagcgtcacaaaataaactataaatttcacctttgtcatcacttattattattaggttaaaaagaatttgtactatccacattatatgttgaccgatttttttaaaatattatgtcaggtaatgaaatttgattgttaaatgttcactgatttctatacaatacttggaattgtgaaaattttattagcaatctcgcacccctaaacaaatggtcaagtcgaattaataaacaaaacgctcaaggatactctaaaaaaataacttgaagaaactaagggtaattggcctgaagaattacccaatgtactctggcagtatagaaccactgaacggacagtaaccaaactccttttgcataagcttatttattttttattttttttagtgtagcgtaatggtcttttgcataagcctatggctatgaagcaatgttactcgtagaactggagtctccatcccacagaagattaacctatgattaggagactaaccataatctcccaacaaaatcattagatgaaattgaaaaaacgaagagatctagtaaacttaaagctccaagctcatcaacaaaaaatagctaggtacttcaacaagcaagtgatagaaattttttttttgtgagagatatagtgctcagaagagtgttctttaacactatagacagtgtggcaggtgtgctcggaccaaagtggaaatagccataccaagtaactgaagttataaaatcaggagcatacgaattgggtcggtatgatgaaaacatggagctagttttagtatcattgtattggaatggtgaatatttgagaaaatactaccaataaatgcaaaggtttgaagaccatgtaattgcataatgctcaaacatcactcttaagtgatggccttctggacggtcaccgttcaaagatttagaaagtgctagtgctaaggtttgaatgatcacttttaaagcacaacttattttaacaaggattacttttcagtattgtcttttggacggagtttattcttcagaagattttattttcaattagctaagatccaaatagatcatgtaataattttttattattaaataaatgtaagttattttaataccaacacatac

SEQ ID NO: 99710 - DNA, 816 bp, Cannabis sativa
cagccctggaccagtacctaaaccccggacccattcctagaccttggagcccaaacccaaacctagactcgaacccagacccccgcctctaacttggaccccagcccccgactcggactcggacccgaaccctaaccccggactctaaacctcaaacgaccctagacctgaacgcggaccccggcctcagccttggacctagacccgtacccagcccctcgcccccaaactcgaacctggaccctagcccccgacccaaactcggactcaaccctggaccttagacctagactcggacgcagatcccagcctcagccctggacctggacccgtacctcgaaccctaactcttaccttggccccggatctggaccttggatccaaccctgacccctgaccccaacccctaacctaaacccccgcctcaaccctactggactcgaccttagactcaaactgagacctaaaccagactaaaatataagcataaaatttagaaaatttttcaaactgttcaaaccgacctaccaaacactactaaaaccgaaattgttcaaactgaaaactaaaaaaacggttaacagttaaaattatccttaaacgatccatttttatttcaatatcaaattaactgaaaaaatgccaaatttacataaaaacataaataaatttatatatgtatagtatttaacttaaagtttatgtatatgtgtaaattatctaattattatattaatattattaatataaataaatgaaaaaaaatactttatttatatatactctctttaattgctctccgtctttcttgactca

SEQ ID NO: 99711 - DNA, 1069 bp, Cannabis sativa
aacccagattaaaaccaaagcaaaacttacatgaactcttatactcttcacttgctgtgattctgaaattagctagagatggcagcttaaaatggtggtttccgaaattgcaccgaagagaagcaaggatatagggttttctaatttacacactagtgatgatgatatgtatgtagttgacctctaattttggtttataagatgatcagcaaactcatgaaccattggaactcccaattggggttcttaattaagtctggattttgtgtttcagttctacaaccaatttgaattctgaaagaataaactgtttgaaagaagcatggttgagaaaaggaaaagatgccggaattcaaccgaccatgctctccatcgaaagataaagcaaaggccactacgcctccacgtggcatatctctcactttcgtctcaaatataattaatacatatgtatttacacacatagctgctctggaatatgcataaatatttatatatataattatatatgtaaaatgttaggttgggtgtgtttaataatttatattttatatatgagcttaccagatacattttctttaaaaaaaaattatgaatggtttattgaactgatgattaaatttaacacgtgttattcgcgtctgctttatttttttttaatataattattttgaaattagttttcaataatataaattgtttaaaatttctagaaaataggtgaattatttaccatatatatagaaggttacataaaagatattaacaaataatttttttaggtgctaaaactagagcatgcctctactctacaaatagaagttattatactcatccttctaaaaagaaactcaataattatatattttattattataattttcctcctacaaataaataaggttaattagtaattttttttcccgaactttgacatgtactaaatcgtgttccctgaacttttttggccgttgaatattcttccagtagtgagattgttaaatttaaggacttttatctaattttagtaaaaaaattttaacatggataaaagttcaaggggcatgat

SEQ ID NO: 99712 - DNA, 2442 bp, Cannabis sativa
atctcttgtgtcaagttatttaattttctgcaaatatttttatattctgcctgttctgttttgtcgctagaaaacttgtttctacagtaatagaattacattatggttttgcaagtgtatacatatatattattaacatttgcaaaaactcggtttttcaacgcaaatgcggaggaagtcgcagacggtgctgcatgcaaggtcgtagacgattccagcactccagcctcctaatttttctaagtttctttttgctattgtcgaacctttagattttttgtttagcgatacaagggtactcgcgctttgtactatgaacaaattatctaacttttattatcgaacaacatatcagttcgaggatatttccttttgcatacttatttagcggtacacgagtactcacattatttaagctgcacttttagtcactgcttaagttttttctcgcaaaactctttatgaatctactcacagcttggtgtgataacttagaatataaaaacttgtgaaaaagttacaaaatttcaaaaactttgaatatttcattaatataatcaatagtacaatgttaatggttatacccctatacttagtacatttattgaaataaattgactatgtataaatacatgcgagtactattgatagtaatactttaaactttctccatcccaagctcttttgatggttgtactgtcgagatcggataatcggtatgtcacattaccgattttttcagtgattagatacggtcctttccagttatcgccgaatacaccatgtgctgagttacgcgtgttatgcataactttgcgtagcactaaatatcctactcgtaggttttgttctttaacctttgagttgaaatagcgagttattcactgttgataggctgcattttcaaatgagcctgattgcatttttcctctagaaaatcgagttgcagcaactgactttctatatttatgttgatattgaagacatctcttctcaaagatcttgctccaacctcgactggtaccatggcttcacacacccataagaaagcgagaaggagatttttcacagtcgttgagcgaggagttgtattatatgaccatagaacttgtggaagctcttctggccatgtacctttcttttactcaagcttaccttttatggtatgtttaatgattttgtttgctgcctccgtttgtccattactttgaggatgtgcgaacgcaaaaaaggctttctgaatccccaagtcatcacatagttgtcgcatctccttacaatcaaattacttaccatcgtcagaaattagcttgtaaggaatgccaaacctgcagatcatagcactatagacaaacttgtgtaatttggaggttgttatggttgcaagaggcttggcttcggcccattttatgaagtaatccgcagcgactacaatatattttactcctcattttccttttggcagttcaccaattaaatctataccccataccgcaaatggccaaggactagtgatagaattcgattggctagctggcctagcacataggttgttattcgctgacacttgtcgcatttcttggcgaagctagttgcatctgcctgtaacgttggccagtaatatcattacttcataatttttaaagtaagggaattaccaccggcatggttgccgtaaatcccaccatgtacttctcggagtatgtagtcgcattcattcatgttgatgcatttaagcaacgactgactaaaacttttgtgatagagtttgtcatcacaaattacatatcaagcggctcgatattgcagttttttagcttcggtcttgtcgccaaggagtactcctatttttaagtagtttatgattgtggtcatccaggtgaccttttttatcgtaccgacctccatcatttcatcttgatgaatagtcggatgggttaagacatcaacaggaattacgtcgagtaattctgcttctctcgtcgaggccagtcaggccaagacatctgcatgagaattgtaagcacgaggtattctactaacaattatctttttaaatttatttaataactcacaagtgtaagaaagatatttggccaaatgccctcctttggcccgatattctccattgacttggcaaactacgatttgcgagtcgttgaatgcttgaaggtattcgactttcatttcaagagcgaacttttaccctgcgattaaagcctcatattcagcttcgttattcgatgtaggaaattcgatcctcagagcaccatgtaccttgaatttgctgggacttatgaggattattccaccacctgatccctcactatttgtaatatctcgataagtctaatagtaaataattagggtttatatttatattatgtgttaattaggtaataagtggaattatgattttacaaatttatttcagcataaaat

SEQ ID NO: 99713 - DNA, 673 bp, Cannabis sativa
taataataataataataatagtcccctattattttggggccctgtgcaactgcccaagttgcacaggttattagccggccgtgataattggtaatgtgcatgtaggcagggggagtttccataggaatagcaacagatgtttttgcaattggcaaagaggttggtggataatgtgcaatagggatgtggtagtggcggctttggtagtagtagaatgtgaaatagcattgtaattgtgagttgagggaggagtagcagcggactgcttggacagtgaagtaactttcggagaaggagattggacaggaggcatgtcacgggagagttcatgatgtccagtggtaacatgtttatcaatgttcttgtccttagaatcagacgaagaaggaaaaggcgaagccaaaaaaccagcaaacttcttttttggggaacggtttaattgcaggtgatgcaaatcgtgattagcaatgtcaatgtttgcattaaaaaagtttcattaaaaaaattgttatgtttctatatttactacatttaaacataaatatttttaatattaaaaatttaaagctatttaaaaatgttgaagactttggtaattagacacttacactgtatttggtaggaataagagataggtggatggagagatatggagggagaatggtgaaatgag

SEQ ID NO: 99714 - DNA, 3410 bp, Cannabis sativa
taattgatttgttctaattcaaatagacgagataacaggtcatactcccttgtcattagctttttattttgaagcaacgcttcccgttgaattaacatctcgtctcgacgagaattctatgatcaggatgaaaatgaagagttactcatagaatctttagacttgcttgaagaaataaaagatgagtcacaagtataaaatgttgcatacaattaaaggataatgagacacttcaaaaagagagtaaaagaaggactctttaaaatttgagacttagtattgcgataagtattcacaaagatgaaatatgccgtatcaggagaatataaatgaagttgttatagcaccagaggtttataaattagcatggccaaatagctcactgatcaaaatcacttgaagtagagaacatttgagattgtattatgaataattgccttgtttgtaattgtttattttttcaaaaattatgtaattttaaaatatatagtattggaatttcagtcaattcatttgcctaaagtaatcataaatttgtactttaaaattacttggggagtatataattatatgttaactagacttttgaaaacggtagaaatataaaagtatagaaaaaaatatttaaaattaaggcttgaaattcaaaaaattaaaaaaaatttacaaagacataataatcaattaaaatttgtacggaacaaaaaatatcgaatattgaagtattattataaggaagaattatgaggataacacttgctatctaaatttctacataatgatgtggcatccatctagatgacatgtgcaacacattctgtaaccccaacgggaaatcctactcttagtaagtcatacaggatgagttaactctcaagatcacaaacaggggttgtgacatctaaatagagtatgcatagatagttgttgacctcaaaaatttatcaaccgacagcagagtcatataaatcagatatttgctatgtgttacacaattagagtaagaaagtaaaatacagacaaaattattatagaggatcagcccccttagatagcaggtaatgacctactccccttttagttgtattgatacagagagttaatactattaagatcactataggtgggatctcatatagtgcccttaaggatacaaagtagaaatcaagcttggcaaatctaaagtgttgagatagcttatcggcatgagagagagagtgagaaagagagttatcggacttaagatagtttatgacttagttatcgcttcttgacttaggtgttctaggttagagttaaggcctttatataggcaaacctaaaccttagtgtacaacgaaaaccctaggatatttgtatatttaattaattaattataaaagacaaaaatgcccttgaacatagttattttccaactattttattggaattttagcgcccaatttgcatctcaatcatgtagtccatgtgtagaattgtacagaaaatgctgcaagccttctcttggctggctagacatctgtagggagcaggctggccggtcatggtattgtctagggactggctgaccaagggtgtccgactagcttctgtgacaaagcgagtttgtcaattgatgtcccgtttgagtgctaggttcccgtttgctaaggtaccaacttggtcttcttgttggtgagttaaattgccatgtcaggtgggcaaaaatcgagataacttttaccctccaagtctttgtgcgaatgtttgtacagatagggacttgtacgggagtagtactttagtgcatgaggtatagtggtcatacttctattgagaaagttcttaatcattcggtgacccctggatgttggctcataataagagccaaagtacaagctaatatttcattgtatatattttatgcatatcttactgagtctattgactcagccgtacgctacaatgtgtaggtaaaggaaaggctaaggaagaggaacagtgagtttggagcttgataatgcttgtgcatatcgcgacaatacaacttagggggtttcgatcttacagtattttggattactttttgttgtcactatttaacatgctataaaggaatatatatatatgtgttataatttcaaatataggcagacctcggggtgttgaggaaaggctaaagcccacccagagatttaaaaatatattaatatacaattgttattttcatatatacatagtagttcaatagaacaactagttaaaatattttaaatttacatggaagaccatgttttgaattttcttcccctttttttctacgtatatttacattttatttattaaaaaaataaatgaaatataaagttcaaactagcatcaaacttatgaccactaaaataggggatggtgctaaatcatcattccactcaaatttaactagttattttcaaaaattaatttcagtacagtcccatctagtaaatttataagcgtatatatataggtttatacttaaatataattatatttgaatgtaagtggtttgggctttatatcttatatcagcgcatgccatttctgtttatcccttcttgtctctcaagcttagaaaaaccccataactacgtccgacctaaccccagtttgaacattcttgacctttttgtttttttttttttttaaaaaaaaaagagaaatagttgtaatagatataagttataactgttgtgggaaattaagatagattcgtagaatactgaagttctatttgttggaaggctttggagtaacgtacgtacacagaatcagatcaaccaattgatgatatggaattaattcgtattgtgataagtcaagagatcacgatacctatatatagtaatctttaggtcaatttgatctcaatatataatccatacagcttgtatatcatctcaattaattatcagattagaagtcaagtgaatttccaccaaacattaagatataatgatatacatattctgcattatatcttaaagtcataatccagttttgtaatgattcttaatttcacatgcaagaatagaatctgttatcgcttcattaaagattggagaaagcatatatagattagttgggaccctcttgtaacatcatgatatcttttgtcatcactaaaaatagaggataataatttagtagaagtaataaaaataactttatataaagttagtctttttaatatgtaatattgtttcattttatatgtctatatttaattttatttacttattattttataattatttatcaaaaacactatcaattttcttgttactgttcttttcttcttctccctctttctctctaaaagtaactaaaaattactccttaaattaggtcccaaagctgtaataaaaaataaaagcttaggtgccgtttggtaa

SEQ ID NO: 99715 - DNA, 1405 bp, Cannabis sativa
gtggagacacattcatggatttgtttctttgacatgcatcaaattctcgcacacactctgctacacttttctgcattcccaaccaagaaaaattttatgtgatcatcatgaatgttttgctcttgctggaatggccaccaagaggttaattgtggtaatcctacaagataataggaaaattggagaaactgtttgggtaacttaactctccctctataaaatattttccatgttccaatgagaatattgctgcttgatgcctttcttgttgcaaattagcaaataaatattggaaaggaaaatatcgttgtcaatttcttgttgcataacaccccgatcaattccttaagatagaagttgattttttatttccatagtgtgattgactcttgacaaagcatctgaaacttggtttccagctcccgatttgtattgaatgtcaaaatctgtggtttgtattgaacatcaaaattataccccactaattttttctatccaacattgatactctgaagtgaaaccgtcaagttaaatgcatccaaaagtggatgatccctgttaggaaacaggcaaaattgtgatgacattgtagacaactccacctaaagcttcctcttagcattagagaagtgatcttaactagtagtcaaatgaccattgcactatgagatcactgatcagaagaactcgttcgtgcaaaaacttgtgacgacgacaccaaatgtgtcagaacaaaattagaatcttcttcaattctgtctcagaaaagatcgaaactaaataaagaataaatataaataaaaagcccctccaagattaaaggaagagggcacttctaatacactctctctaagtatatgaaagactattgtaccctgaaagagcatacttagatggcttttcttcaatattgcataacgggaaaataatatcatgatgcatattcttatgtctttcgaggttagaaaccattgggaaccaatcaagagaatttttctaaacaaaaagcttcactttttgaggaatatttgtaaatcaaggggttttccaccaatgtgttctccttggatcctcaagttgcattgtttaactattgtgatccaaaagtgtcccaagtgagtttaaaatgtgtaaactaagtattctacataattacatttttacaaaaacacttttggggcattttctttgaacatcatgaagataagattgagattttgaagagaaccccctggatcatctccaaccagctgctaaatgttcgggactggcctgttgatggacactggcagaggtgcaattctccctttctcaatttttgctcccatgagtgagctactggatatttccatgttttgaggaatttctttcctcctgtctcttgtccttctgtcttttattcttt

SEQ ID NO: 99716 - DNA, 1917 bp, Cannabis sativa
  modified_base (64)..(80): a, c, t, g, unknown or other
atgttattttcgtattattttttagaaaaccgtaaaaatataaaaaaaaaacattctttgaacnnnnnnnnnnnnnnnnnttacaaaaaatagtgccttatgtaattattcctatattatttgtgtattcgtcatgagtttcttaggaaaaaatttccacaaattaggtatacgcacatatattctttatttttaatattatttttttattaatatttttcatgttgtgtgttaattttctatcattatgtcttgtgttaattctcgattactatcaatacttatattcacctttgtatgtttaaattattaatttttttttttaatatttgtatccaattataatacaagttttctctacatattgcatattaaagaattttaaaaacctaagtgttcaaattattaattcttttatatttatatccaactataatacaagttttctctacatattgcatattaaaaaaaatttaaaagtaaagggtccaattgaacatcacatgatttttaaaatataaaaagtttatccacgatgtccgaaatttacttttaaaagttaaagttcagtgttaatctttacccagaacataaatttttaaatatatattttagattatttataaataattttaatattttgacaaaatataatcttcaaaatatttattttaaaatatttatactgttcaaataatttacttactttttcattaacttgaaataataataatggagattactaaaagttgaaagctttcatatttgtactcttatttatcattttcttttgtgtgtccatgtgcttagataataataaaaaaatcaaacaattgagtggatcatgcgtttaaaattaacctttgtattgttgaagtttaaaatataattttttatatataatttaaaaaaattataaataatcgcacgagaagcgcgaattattttctaattttataataataattaaaaaaattcaatttcaataattttactattcttcaatgaattgatttgctttgattttttaattagtacaatggtttggttttcattttgggaaaatcgcatgaacattttgatttcaaaattcttctaaaccatatcaagaacagaaccttgaactagccatgatattatacgttggctggatgttgaccattttgtgctgcaaatatttaataattatatggcaactcaagatttaaagggggtataatttttttttttttttgtaaggtagatattaaaggttgttaattagttattctaactgatttgtaatcaattatttttctgttaattaccttgccaagttgtttattttatagcacatgtctaattgtacctttgcctatataaaagcttgtaattcagctcaaccaatatacaacagattattcttttccttttcactctgttttctctgttacaaagcttaaggcttctcatatggtatcagaagttaccctgcccatttcaatggcaaggccttccacaagatctcaggatggactccttcatcctccacctgaaaataactcctcagaccctcctactgaggttacttccgctcccacagcagatccaatggcgacttctcgacgacctacaaccaggactcgacctccaaatcatacagctgttcacgaagatccgtctccaagaaccgaagacaacccgattctcaacagccgatccacttctcttcaagatcgccatgttcatgaagattccagccctttcttcctcagttccggtgaccatcctggtctggttttggtttcgacagtactcacggggatcaattatcaatcttggaaaaggagaatcaccatggccttggctgcgaagaacaaaattgcattcatagatggctcactccctccgccagaatctggtaactctcttctccct

SEQ ID NO: 99717 - DNA, 1058 bp, Cannabis sativa
cctattttcttggatttttcaaaagtgaattaaaagttttattttaagatcatattatttgagatataaactgttaagtgatattttattatttaaaatatattttggtaagttataaaattatttcgaaaattaatattataatataacttaactttttaaattttgagcatattataaactattcaaatttttttttcttctcaaaatctataaatcatcttaaataattagtgtatacaattataaaagtaaaaaaaattacactaaaaattattatgaatgtcgaaataaataatagttattagttatacctaaacaatcctttggaattggactggagggtgtactaattatttttaacaataacatttgttttctttctctattcagaaaaatttataccgaaaaaatttgttctagtacttcatttatttgtttttttttttttgcattttagagagttttttttaatcaattatactcttcatataatgcattcttatttacatattaaatcttgtttatttattattatatttgaaactcaatttgaatttcttaaaaagaaaccctcaaatactaggaccataattatgttattcttattcttactatattgctaatagtcgttaatataaatctcatgtctccacttatgttagggtagagtatctatttcgaatttggatcagatttcaagtttcatgacaggtttaaaaatttagcgcttaatcatttatattttgcagatgatgcgttattattttttcatggaaatttcaagtcaatttatgttatgcttcaaggcttaaagctcttctgaaacttcagtttcataatgaatcgaaattcgtgatttattattgtggtatggacaagcaagaagtgcaaagaattcttgatgcttctggatactcacgggatagtctattatttaaatatctaggggctccgatttatgcaaattgtattttgaagatggattgtgagattttgattagaagatggttcacccagggctggccctgaaatttagtgggccatagagaaaaaaa

SEQ ID NO: 99718 - DNA, 1781 bp, Cannabis sativa
ctccagtttgaggtcccaaataacaaaaattagaacaagtttatagaaattacatatatagttttaataaattaagtatctaggaatgtacaattttattaagatcgatcgttgaaaaaagggtaccaataaaatttagcatttttcgataatataaacatttccgtgtaaatttatatatatttcctaaatacaacctccctattctatgctttttaagttattttggacaatattagcttaagagaatatttgggagagatataattaagcaaaaatgtcaagttttatggctgcatttgatcagagtccaaattatcagtaattacacatagttctttgtctttgggttgttaattataagttggcactgttttgagaaattataatgatccattatttaattaatttttataaattgctgtgaagtttattataaactctatatacggataagtctttggtttgtttcagaagctttaacctgattacgtatcaactatatgaagttgatatcaaataatattagatgctcaaataatagtatttcattagatctttttgtgtgcaagctttctaatctgtttattatgtatatattaagattattattcttatttaatgacatttttttgtgactttattacttataactttattcttacagatcgatcggataaactaaatcaacttcctgtattttatttattccgaaaccactatatgatttgaatgaactatatattagtaagaataatacatcatcgatcgatcttttaattattttcctccacacacttctctacctctttcttttatttttacgcatatatatgacataatttaattcgaattaattcttgataagactattggttcttattgtatatattttatattcaatactttcgtttggatttgatttcacatatttatcatcaacaaaaaattcctacgtctttcagcaaaagcatttagcctttatatgtacataattatcaaatggagcacacagtgcatagtgcggtgtagcaatttgttatatatacagattattatattttgagaacaataaaaatgatctccacccctagaccttgccaggagcttattatatatataatataggcaaaagttcttcatttaaacgtttcttttttctaacgaatttattgctttattcgtcagtacataacaataatctgattgattacaatatacataaatattaatatattaatatttacatatatacatgagctaggtttagtttgtgtcccttcactcaagttttaattagctccacacgtcgtttcattatatgccaatatccatgcagtctaattccaaatgagtggagaatacattttccatatatatataaaagaaaaagaaaattccaagctataggcctttcactttaatttttattataatgaaaaatgttttgtgctccatgaccacatgaccacttacggtccacacaacgattgatatatagcaattcacaatcaagaaataaatttttttaaatattgcctctcctggaaattcaaaaatcaaatgattgtaagacaatccaatgtacttgtccaaagaaatcaaaaaagtttttggaaatattcaaaccccttcttcatcttttcttgcaattaataattaattaaaggtcagtcggattctgataccacaaatagctttcatctgtcctttcaccctataaatcgtttagaaagaaaacattaatattggatgcgtattatctttctttcgatctatat

SEQ ID NO: 99719 - DNA, 1252 bp, Cannabis sativa
actcatgaattgtggaacaattgtaagcttccatttacatgatgaaatccttgttgtaagaagctacatttaaagaataaattatacactacaaataaatggcacaaaagagttttgcaaacatctcgatgactttaaaaaaaaaatctttgatcgaaataacattggtgtataattaattaacttgaggatgactattaaaaaattatctttggtgaaaaaactttagtcacaatataattttttgtgattaaatatgacttttagtcacaacaaaaaattacttgtggctaaaatattgtattttgatacaagttgtcactaatttagtttagtcacaaaaaatattatgataaaaaaatacatttagcaacaacaatttgtgatttttgtgattaatatctctagcgacaaaccttttagtcagaaatatgaatgataatttataattagtcataattttttaatttttagtccacaaattttattgtgactaaaactaaaaaaatttatagtgccgaactattaacttatataggtgtaaaaacattttctttctaaacaatgaaatttgtgtataagctttttgtggacataatacttctgaaaaatatatacatacacacattattatgtccctactttcatatccatctatttacttttatatcttatcaaaaatcttaaggaattcacaatgattattacacctcattaaaccatcaccattacaataagttagaaattaagagataaaaaaaaggataatcccacattaaaagttcgattataaaagacaactttgattatgtattaataacgggatcagctagagctactaactagctagaaatctaatgctgcatacgtataactgatgcaagccaagccaattttcttgctccaaaaataaatggctatacaaaaataaacacatgcatggaagcaagcacatttagtggtgtgtagtcatatttatgtcatatgtataagagattcatggttaaagccaccataaattattattaatgtaatcataattaatatatgtgagaaattgagctttctataagattttaagtaggggtggacatcatccaatccaatccaattgaatcgaaccaatctaatccaatcaaattacaaaaagttagatatatatccaattacaattggattggatactaaaagttggattctaattggattggatcagttattggatgtcaatctcaaattctaattaaaaacc

SEQ ID NO: 99720 - DNA, 1296 bp, Cannabis sativa
  modified_base (1026)..(1027): a, c, t, g, unknown or other
ttagctacgaagtagccaccaaaaaaagttagtagcaaaaagtttaatagctaccaaataagcattatttgctactaaattttttgtagctgaatatcttttttttgtatctaacaacatttgaaaaaaaaaaaaaaagtgttgcaaatttgttaatttttttatattgaaacacttaaaatgtaagtgttgttaaagaattataatgttttaaataatttttataattttaaattaaaatatattatagcaacacttctaaaataaacgttatgttcttttatttttattaaaaaagtaatgttatgtaatcttttttattgatgaaaaaattaattttattttaaaaaagaggtaaccgtgattatctaaaaaattggaaagtgttctccattttttttttttacaactacctcaatttattctcccactaactcacatctcctctctcgttctaattacttttcaagtgaagaatacttcaatttttgccatgcctcattaacgtaaaatctgctaactatttcacagttcaaattaaataatatttgttagtttccctaaaaataaatatcacaatatataaaatattaaagtttaaattttgatttgttttgtaagtgatactaatgaaatagtaagatcttaactatgactactctattataaaaaattataccttgtgcagattttaatgctagatttatatgaatttaattattttttatcgtttgaaatgcatacaatgcattaagtttataaagttaatagtaatttgttatattgaaggatatttctttgttggaaaaattggttgatagtatttgattaataccgacaaagtattgtcagggggtcaatactggcgggaccccaccgataatcactaatatcagccaaaaacacttttattatcggcagatcattccacctctaattcttataattattgtagtgactattattaattttaattttaaatattttgatattttaatctgactttttttatcttttttttttttnnaaaaaaaaaaaaaacagatttatacataaagagaaattgaaaatttcactgtcgtaaaatttatgcggactagtttacttaaatggagtttttgtcgtaaaatttatgcggactagtttacttaaatggagtttttatggtacctatcttcataaaaagtctggtctattgacctgcgtttttctctgttttgctgtcctgctgtttgtgttaaagtgttagtttggctgttagtgtttttttgttttgccttgatctgttcatggcag

SEQ ID NO: 99721 - DNA, 1993 bp, Cannabis sativa
aataaaatttaatgtaagcccaaataaaaagtctaacactatacatttgagtgtttttaaaagtaagtgccgaaaataatttggaagagagatataaaatattatatttttagatgatacataaattttggcattcttaaaggatggtaaaattttgtaaattatttttggtttattacatgacaatgttgatcttaaaaaaatatatttgttgtatgtatttcttcttaagaatgatgaactgttgttcgattataaactcatgatttaagctaaaaaaaaaaatactaacataatcatgaaaagagagagaaaataaataatatttaattattttatatataaatatatttttaaaaaatataataaataatctaatgcaacctaaatattaactattttcatacatctattgatttatgaccattagatacaaaaacttccatactatagagacaaaacaacaataaatatatgtcctataaaaatatatatataaaagaataatgctataagttattactagtatctattttgttattattattaatgtaattaaatattaaattttatataatatattaaatatttttttataaaatacggttaactaattacaatgtatcacctctatatatataataacaatgctatatatatataattatcttttatttctaaagagtgtattcaccacaccccatctgaccatttgcattaaattatcatattactttaacctctaaatggtattataaatttataattattattgataaacggaaataatggatcttaattatactgtaactcaacaactcgaattttaattaagttctctcaattattaaaaaatgatagaaaatgattaacaaagccaaataaaatgattattagaaattataactgtaagagcattcttaaggtgttatatatatatatatatatatcttcacattatttaaaaatttaatatattttattttatttttcttttacattattttagcagtcttatttctaaaaatattgcaatagtataatagctatcaaaaatgctataactatgatatcacacattattatatatatatttatatatatatatatatataaaattttaaggtttttttatttttacacttcaaaacaattttctttgtatttttatggaattctacatataaatccctaatgcaactagcgctgtagccattttagaaactcaaaccgtaaatttgaaaaaaaaaaaaagtgaaaaaaaataatgtatgggataattcccctataatttttttctttattaaactattttatatatatatatatatactagaagaaaggtacgtgcgaggcacgtatacttagttttatgctaagtgttttctacataatttaaaaataatacaataaataattgaaaaaaaaaatattataagttattttttgaaattatttttacgtatattcaattaataaaaataatggagttccaatttaaaaataaatacttgaatgcttagtaatggagttgcaatacgtaatattttatttaaaaagaaataaaaataaaataataattattataaataaatattcttaaaaatttttataatatattttcactataaattaataattatattgaaaattagtaacgatatttgttctatataaaaggagaaacttatcttgtcagatgtaattgatgccggctgaaaattttgaacacagactacttcaaataatttaataatttgaataattcaataactttacaactctattaataaccgagaactatatcactaatagtcaaaataaaatctataattaataataaagtttagaatgaaaatttaaaaattaacctaataagctaatacaacaaaaactaacacctcaaataataataataataataataataataataattagtttttaaaaaataagtcataaaaaaacaacataactcaaattaacaaaaaat

SEQ ID NO: 99722 - DNA, 2423 bp, Cannabis sativa
agagttgaattaatggatatgatatgatgagagtgaatggtaagaagctaaaccacatggttgcctaaccacccaaccaagatagcgatgggatgaacccaatctcccacaaatgttactcatatgctctcctcctcttcttcttcttcctttcgtttgtactagtgaaagttacacgtgatactacggatgtagagcaaaatatcataaccatataaatatggggaaaaatattatttatattcaacattactataagataatatatcgttattattataattaagtattaactctcactgttaattatttgtaagacgaaaactatccccactcaaaaatatataaatataaaaaagttaagaatacaccttaaaaaataattatacaatatacatctctatcatattttgtttttaacacataaatagttattattctcttatttttataaaataaagcacacttacaaattacagtgattagccttccatgtgttagttagtaattagttttaattaaattactgttttactattctaattacttctctatcttttagtactattaattcactagtaaaagtataatttagatctcatttaaatttgtgcaaaatatttcaattctaaaattaacacttgaagtgaaccagtatttgatccattagaaaaattaagattccataattataaatcatgttctcagtcatccacattattaacttcccaaaacagaagttgtaagaatcatcttctctcaaaaattttaacaagtgaatcaaagaaactaataacatgaaaagagttcatgattactcaggatttaggtcgatctactattgatcattgttatgatatgaattaggtctttatagtaaacaacatattagataaagacaacttcattcatattagtctttgtcatatatataatatctatcatatacaacatcttcactttgatgtcatatactacatccataatttgaatcaagattacttgtaccaaagaacgagcattagtaaaccgcactaaaaaccattgattaaaaatttccaaacttaaatatattgatgactattttatttatacctaagtggtcttagttctctatatagctacgagtcacaaccttatatatgaataagaaacttttcgatatttatatataaattattcaataataaataataatttaatattcaagcatatattaaaatattcaagtctttattatcaattagaaatgtctttacagacttttcagggcatataccctaaaacccagtgcccacgagacctgcatgttatgacgcaagtattgagtgagtgatctcgacatctatgaggctttggccatctcctgagattgaagtcagttggggccaaaagagcaccttccatgacttttgctacctcgcagactgttattatagaacagtatgaggccttacagaaacaaattgaggaggcacaacatgaaactcagtattcgaagcagcagtatgaaacacaacaagtctacctcaagcaattccaagatcagtttaagtatctctctcggattgtacctggtttgaacatgcctcctatgaattttttgccattccccactcctccttttgctggattgtcatcacatcatcctgagactcagaacaatgacgacaatgacatcatccgtctttagaacaatatatattttataattaacttttgaactgacttttttttttttaatattttttaatattttactttagaaattttgtttagttactaactgtaatacaaattgaacatgtttttatattagttcaattggaatattatttaattataaatatgaataccgttcttattttatttcgtttcttttaaatctaatttaatattaaaaaaatttattaaaacttttgctagcatgttatgcttgcttttgccggtaaaaaaaataccaacaaaaataacatttcttgtagtatgatacttacttaattttatgtagtgatcgtagaggaaaacataaatctccaaaacatctcaatagtaacatgaatctcaatacaaatgttgccataaaaatagtgtaaaagactaaaggttttccaacaaatatctcattacatatttctatatcttttctagttttaatggcgtgggatgataataggacaggagtggggtctcgacagtcgacacaggcacaagcagtagtggtctcaataatgaatattgtgttgagtttgattccatcaatcttctcttgcttgctttttggctaacctttacttctatatactcccacgccataccatatataatttaatttgtttcatcacttcaatctacccatctaattatacattaattaattaaactatatatataatatgttatattaaacatatccatgattt

SEQ ID NO: 99723 - DNA, 645 bp, Cannabis sativa
tacatattagtttgttacacatatttaatctatatattatattattataatataacagtatattaagagtcaacaatgctctgcctctacccataccattaccaataactcatacgttaaaaaaaaaaagttatggctctgcctcaaaaaaactacaaggcaaaaaaattcggctccaaagatgatccgggtcgggtcgaagaaaactcattgttttggggagaaaaatccggaagcgtgattccggtgaggcggagattggtgaagaggttgatgtttgattatatattcaaactgttcacccgattatctaaccagacccgacccgttagaagtaaccaggtattcccatacctgccggagcatggtgatggacaggaaagaactaataattaatgtttgataagattttgttgtctcatttctacgctttacataataaaagttcagtttttgggagctctgctgctcttgttattttttccggtttaaagtaccatatatttatgagtaggtacgcgctctcacgcgcctactgttggctgctttgattcgagttctacaacctgtgtttcttaaaaataaataaataaataataaaatttagaggattacttatcctctaatctccatttaaaaataata

SEQ ID NO: 99724 - DNA, 1185 bp, Cannabis sativa
aattagccgtgaaataaaataaaagttgaaattatttgatcactttgagaaacttcgaagttgacctcctatgagatcaaagaaactgtccaaagaaattcaggaaaaaagaaaaagcaaaagtccaacgacaggactaaaatgaacgtcatattagaaagcaaaatttatttttgtttcgtaaatagacttgttacattttatatatattcgttttcactttttcacaatgccttatatatccacattccacattttttttttaaataagggtattcatttaataaaataagtaattgttagaccttacggtcgttacatagtagttcctccggtacagataacaaaatgtaaccgttagtaggtaaatgctcacttagcaacattatggctaataaaattacaattcttactaacattagaaaagttacaactagaataaaaggaagatgatttaatacaagagtagacattccacattccacatcaaacaatggttgattagtctgacgtttatatatcacctaaacacatatacatttttcaattcaaatcccacgtgtataacagtaactataatttaaatataaaatataaaggaaattttttctataagaataataccccattttaatataactcatattaaagagaaaaaaacattaatcaactcctttcttcaatatgggtttacataaaaaatcaagtatattaatatatatgcaactgatgatacatgcaattatgtttggccaagcattttgcattaacaacaacaacagcagctccatagcaacccacaaaaatagctgcctcaactcgtgtggtgatttcgaaattccgtacccatttggccttgacgacagttgttacttggaacccaagtatcaattccagatctattgtaaaaattcaaagccttacctattcaacaccagttacaacgtcatgaacatatcagtcccagatggcaagctaacaataacagggcctgttgtcagagattgttacagtagcgacaatggtagtcgaaactcaactcctacccgagacatcactcgagccttgaatgaatatttcagtgtttcattcatagaaaacaagttttactccataggttgcgacaatttggcaaccatcaatggcttccgcaatggtaacagctacacaactggttgcatatct

SEQ ID NO: 99725 - DNA, 4045 bp, Cannabis sativa
taatgaccacttatcacacattttataactaaatacttaatgtcgatatgctagcttcgaccagtaatattgtaactgaatttataatggactacgcttgcacacatatagtacaatacattttttttgatgagagagctccagtagaagctaatacaaagctggaactaaagcattccaacagtattcttcatcttgccctaatgccctttgcgccaggttgtgcgctctgcaattattagatctgtttacgtgccggaggtgaacatcagggaaggcagataaagaacatcttatatcttcgacaacatttgagagtgctgaaaaatcagctttcttgttatggaccttgtcaaccagcaattttgagtctgtttcaaccactgctaacgggatatgaatgttggtgcaccactctaagctggcccgcagggacaaagccttagccattagtggctgcaaatttccagccacaggtgcagaaaatccagcaaccacattaccttgccagtcatgaataacagctccaagacccatcttactttgtgccgtgttgatcgctgcatctgttcgaagtaggtactgattttggggaacaacttttgtccccctgcctgaaacctgcaagttatgaactccacaatatctgttgtgttagacatggctgctttgtaatctgaaatgaaggtatcaatccaagcaataatatcagtaggggtcaaatccaaatttgcaaataactttttgtttcttgagtgccaaatagcccatagagttgtaatcaaaagaattaattgatctttatttaactgttcaaaaccgtttatcatgaaatctttgacatcaacatgcctgtttgaaaaataaaaacttcggagaggcgaggccttccaaatttttgaagctctgggacaatctagcagggcatgagtaacagtttcagtggggtttgtgcagaaagagcaagaaggttgagggatggttttcctaacaaacaaattaaggccaacggggagaatgtgatggaagactctccaagagaaatttttaatctttggttgaatatttagattccaaagagttttccaccaggctttaggaagagaggaattagaggaggatggaggaagggatgcattattggcaatatgataggctgactttacagagaaaatacctgagttttcttggttccatatgagagagtcggctttttgaaggcccccaattgggattttgagaatggacaaaacagagtaatcatcaaagtactgttgcagtttatttctatcccaaaacccattgttatctatgaaaaaacttaccttatcagcaggaggctgatcattacttcttaagcatggaaattttatacctggaatccaaggatcttggaaagttctgatagagcaaccatttccaaccttccaaagcaagcccctaataagaaggtctcttccccaaaggagactagaccaagtatatgagggagagtgacctaatttagcctcaagaaaattattaagtttaaaatattttgcttttagaatgctggccagaagggaatttggattggagaaaacacgccaggcttgtttggcaagcattgcctgattatgggagataagagatctgaaacctaaaccaccaaagaatttcgaagagcaaagagctcgccaatttttccagtgtattttagatcctttccccattgaaccccaccaaaaatgagccattagtctttcaattttgtgacagattgaggccgggagtttgaagcaagacattgtgtaagaggtaatggcctgaatgacagcttttaagagcacttccttaccagctttggagaacaacttgctgttctagatagaaagttgagagctaactttctgaagaaggaagtcaaaatttgatttctttgaatgcctaaaacattgagggactccaagatacttgctgatgaaaggcctcgactcaagacctaaagtatcaaaaaaataggtagagatattggtaggagtgttgggcgagaagagaattgaggatttagtgtagttcactttttgaccagtggctaagtgataggttttaagggcctccttgagggcattacaagatgagggggacgctaccgtgaacagaagagtgtcatctgcgaacagcaaatgagaaataggaggggcattgcgagcaacagagatgcccttaaaagatccatttaattcctgaagtcgaagggcagcagtgaggccttcagagcagagaaggaaaaggtatggcgataagggatccccttgacgaataccacgagaaggatgtatggagcttgtgatgtggccattaatactaaaacgaatttttgcagaacatatacattgatggattaaactaatgaattttagagggaacttaaacttagtaagaatagccaaaaggaagtcccactctactcgatcaaacgccttttccatatctcgtttgagacccacccaaccaaacttaccatgttttcgatggtttacagcatggacaacttcctgagcaataaaaatattttcaaagataatccgctcagacaagaaggcactttgaaaaggggagataagacttcccagaacactcttaagacggttggaaagcattttagatatgattttgtatatcgttgagcagaggttgataaaacgaaaatccttcaaagaagaggcattggatttcttagggatcaggacgatgagagtttcattgacagaggaaaactcagttccatgattaagagtgtcaaggatcacagcagtgagatcagtccccataatatgccagtttttttgataaaaggctggattaagtccatcaagtccaggagccttgtctcctgaaagttggaacaaggcttgcctaacttcatgagcttcaaaaggagagtcgagagactgaatttgttgactgtccagagatttattgatggcagataggaggtactgagtagcttcgctaatggactcctgcgacttaaaaagatcattgaaataggaagacacttccctagagatatcgtcaacagaagtgaccactcttccatcatcacacttaagctttcgaatgaaattagtatttctcctagcagtggctttactgtgaaagtatttggtgtttttatcaccagcctgcagccaatgaattttagatcgctgcttccagagaatctcattcttataaagaagggagtccagctgagattgtaaggcagaagcctcatgaatcttgtctctggagaggggcaggttggaatgaatggcattaattgaattttctaaagcactaatcctacgagaaagactgttaaaaccagcgttccagcttttgatatcatccacacacatttgctgtttaagaaggaaagtggtgagggttagaggagtatgattagaagggcaatgcttccaactttccttaacagtttcataaaaggacgattccgtgaaccaaaagttttcaaacaaaaatcttttatgtttcggagacatcatactagcatcattgagagttatcttaataactctatgatccgatccatagaaaccaagatgaaagagagtggtgttggggaaagtattttgccatttgtggttaacaacaccccaatccagcctctcacagacactaccatgcttcgaagtatacttggaaccaatcggattaagaggcaaaagggagaatttattaacaaagttttgaaaatgagtcatagcataagaagggggatttgagctgctagacctgtcatttaaagataagtaatcgttgaaatctcctaaaatcaaccaaggaagtaaaggagcattatcaaaaagtctttctaacaacaaccaagagtgtgttttgtcaaaactataaggggagccatagtagcatgaaacatgagtagtaatattgtcattaaaagttataatacaatcaatatgattagtagaggagttcaaaatatttacatatatatccgaagtccacaaaatcaaaagaccccccctaatcctattctagg

SEQ ID NO: 99726 - DNA, 1098 bp, Cannabis sativa
caattcttttgtatgttttttgacacgagatttatttttagtagttttaataagaaatttcatagtggtaatagttggttcctaaaaacattaatgataaaaaaaaaaaaacagaatttgatcttgtttggattaccattctctttcgattaggattgtaccagcaagagtggaaagaacagcaacagctccagagatatttgtcaaaattacaagtagaatgaaaacactaaagtgtgtgagcttcaaggctgatgagttaaccaataacactaccatagtgcctccagcaactatgaaacacagattttgtgacaccaaccaaagttgaagaacctaccaattacaaatcaacaatttttgattctttctttgtatagttaattgtactgttttagatttggagaataggcaacaactactactttcaaaaaaaagtcaatggatatataaatacctttacataggtcaaactattaacccaatttccaacaatggggccaaatagtgcagttgaggcagattccaatacaccataaatagcagcaaatagtaaagaatttggccaaatcttaatcatgtacaacccaactgagaattcccacatcctaatgaaacaaacatatcaaaatcattaggattaattcaaccaaatgttaacattaataaataggatgaaattaatgcattatgtttactctcttaaaaggttattaatcattagaagtcaaattacatcaaactaagtttacagtataaaattagatactatgaagaaacaaacgacaagccacatcttaatgaaacaaacatatcaaaattattacgattaattcaaccaaatgtgaacataagatgagattaatgtgttctgtatactcctacaacgattattaatcattagaaattaaagtacatcaaattaagtttacagtatgaaattggatactatgaaaaaacagatgacaaaccacatcctaatgaaacaaacatatcaaaatcattaagattaattcaatcaaatgtgaacataaggtaagattaatgtattctgtttacccctacaacggttagtaatctttagaagtcaaagtacat

SEQ ID NO: 99727 - DNA, 802 bp, Cannabis sativa
gaagagcactaacaattttataaaaatactaaattgcatcaagacatgaaaatatactctagtagtagaagtaattgcatggatataaattaaatgaaaaatatgaaaatatcttattagaacaactcgtgttattagctgatttggtacttaatattatatattactatactttataattaattattattttttgtaattattttgggattcaaccttgtaaatccagttgcaaattgacatatggatgccacctcctcctaaattttttcgctctagcgacggatgcttaatggtttggagaggactttgtcggattgggaaaacttgtacgaaatacaacaggtgtggcttagttacaattggcgtagtcattaagtgtgttaggtgatttttgtgctaatgtgggagagctctttgccatttatctgcaattgattcttgtgcatcaatttagtttttattgtaatgtggtaattggttgtattaataatctttatattaattttagtttttaatctaatttattagatatctattttttattagctgctattagtggcggttcttaccgccatttcacaatcgacgaatagtgttatccacacactggtattctctattactaatttaagagattgtgtttgaataaatacttgtccacaattttttaattcttctataacaacaaatttatcttaataaattaaaactttctttaaaaaaagaaaattgaattatttactaaagtttaaaagtataggactgatattgatattaagatgcacacatattaatataa

SEQ ID NO: 99728 - DNA, 553 bp, Cannabis sativa
tacagtctcttggtcacttacaaattaccaagtttcacagaccttgcttgaaaattttcttgggggtattacctagtgtacgcatttggaactaaaaaaaaactttaagaagttatctttattagcaagtggtttagatacaattggtcttacgtgtaacaaaagcttacagcttagtgcctacttttgaaatcacattatggctacccttgcacaacttaccgcgcaacgaccatcacggtagactagtgggaggccgataaaaagaaatgggtactagctcttttatattaagctacctctgtagagctaatcgtgcaaaggccatcactaaggagagatgggtactagctcttttgtaaattcctacattgggaaatgttagaggaacaagtatacaagctggctagtgtgaaaacttacagagatgttctctattctagtatttttctagaaaagaaaactccatgttctatttgtactcgccaggcttgtatgcacctttattgttatcttgttacttgatgcagaccttttatgtttagtccaaaca

SEQ ID NO: 99729 - DNA, 1652 bp, Cannabis sativa
catataattatttcctccattaaaaatgtaacaatattcatgctgaaaaataatactgacacatttaacaattaatgtcatctcaatccttccaacttcactcttaataccaaacaacataaaagagggctaatatcatctccattcaacatattctccatctttcctatgctatgacaggaaaagacaactaactagatggatacttcaaaattaatgttattaatttgaaaggaaaggaacccgacaaacccttcttccttatatagtctagtctaagttgtagagaaaatagccaaatcctatttgccaatataggttttcccaccttgttttcttcatgggtatcagagcccctaaaagaagtagtcgaaaaaaatttgtttttcctttgtattttcttcatggtatcagagcaggttcccaaaaagaaaaatacatggttaagtatacaatgactagtgataagaaaagtcccaccctctgaagtgaactccattttaaaggctattcttcaaccagatgtctaaaagatcaaccacaccaatcaatggacataaataaaaaaggagctcctaaaaactgaggcctcgttgcaatcaaagaacacaatctcacatccacaaccccttttgtcagcaaggaaaagatgaagctacttgaaaaatcatttggttccccatcttgaacatgtcaaacccaaattcgaaacaactactgtaagtactatatgagtagcacaaagaagaaagtgtgagacaactaacacattccccttagaaaagttcacccacttatatagttttatgactaaccaaaaagactgataattaaatatacacaaatactcacagggtccgagtccagtttgaccgaaggaccgaagctgccatcgccggacagaagttgccgcaacctcgagggcaaggtcgatcttggggccgccatagcttcaccccagtttcactacttctgaatactgagccaaaaaaaacataaacattaaaacaaacagaaaccgaatcggtgatttgaataaaacccagttagtgaacactcataataaagtataaatttttttaaaacagacaaataaacaaagctcaaaactgaataagaataaagatcagataaaccgatacagctatagatacagtatatacatacacagaaaaagtagagagagagagagagagagagagagaaatcgatgaaagaataccagaaagagaaatgagtgaggggcggtggatgcatacacatccgaagtttgtagagcagatgagagagaaagtataaaaggaattagagagagagagagagagagaagtgaaaccccaaaagctaagaagggaaaatgagaaaggggggcgtctgtgtgtggggtttgtcaaggtctatgttgatttgtaattgtatcactttttactttttatttattttttattttaatttttaataattttaataagtggtgtaatattttcttgaaccacctagcaaatattaatctataaattattattattattattacgaataaattagggaagcagcgttaattttttatagtattataataaatagttatttaaaaatataatttaaaattataaatattttattttattttatattattattaataattt

SEQ ID NO: 99730 - DNA, 1075 bp, Cannabis sativa
tcaaaggtgcgagtatcatggggaggtaggaccctcccccaacaattacaagcacctgaaagatgaaatcgagatgctagttagagcagaccatctgggcaatgggtctacattcccataatttatctcgaacagggggtcgttcacggacatgtgattattcttggacagcagggtaccataaatcctctgcaggggtaggtcaccctcaagtcccgagaatgcaactttcgacactcccagctcctttcgctctggctacagtaactattatggctctaggacaaggaaacttgtatcccctagggctagctccaccactgtttgacgaacatgtaacaacgatatctggtggaccgtaccttacgggaagctcccagaactctcagaaaaggtacttatgcgagctagatggaggaggagaaacatgtgctttagtacagtcaccaccccaatgtccttagaaaatgattctgcccatcacttttacaaagaggacgcgcgacacgtacatttttcccgtaatgacccattggtcattgaagcccaaatagcaaacaagaaggtttctagagtcctggtggataatagaagcttcgtgaatatcctatttaaattttctttccaagcgattaggctcactaaagcggacatgttaccttgtcctatttagttggaaggccttaatggggatgccttgatgccagtgggaaaaatccaactacttgtcaccctaaaaggaaaaaataatgccagcgccttcaagcattgtacatttgtagtagttaatttccccacgacataccacataatattaagcgccctgtcttagtggattttggagcagcaacttcaataaaaaatttgtctatgaggtttccctacgacaatgggtgcgttagaacagtaaaaggtgaccagaaaagcgcgaggagttgctacaatgtctcagttcgaacaatgtttatggtccaggaagataatgttgagttttgtgccctaaatagaactcatttcaatataaccagatttactaattaataaagatcaaaaactgcattttatattgcatggt

SEQ ID NO: 99731 - DNA, 1086 bp, Cannabis sativa
  modified_base (37)..(52): a, c, t, g, unknown or other
attcatatttatgatgttaattcaacatacttgttannnnnnnnnnnnnnnngtaaaatattcccaacatatataggcatagatggttcaattctgttgtgctagttaggagtcgggtttgttattttcttcccaatttgttgtaactgtaattcttttgtttgttgtaataagtactagtaattgattgggtcaaagtcgttttcttcttgtaatcgttctacgcctaaattaataatttaagagagaatttatccaacaaataaaaataaatgataagaggtattataagtaagtgaatagtaacaaataaatatagaaaaattaaaataatctgttgtgtaaaatatgtattttagagtagccccaatacttgttattaatttctctattgttcatgtttttcttttaaattattattaatttctctactttctccttaaagcttttttctatttttttttttattattattatttttttgaaccttcttcaattatttcataatgaccacttgtaaactattgaaaaattataaatattttataaaatcaaatataaaattcaaatatatttttcacatattagcatttttttcttaaaagtatattagacaactacttaaattttattttttggtaccataaattatttaatatattttaaaaatttatccaaaatgctaaaataaataaaaagtataaatcataaaaatattttagagtgtaagactttcaataaaagctaaaagagaccagtaattctaaaatattaaatcactattaatataattaattattgaatttcatataatttaatataattttttataaaatattactaactaattttaatatcccatctaataatggtaatagctaataacaatgttcaaactttacattaattttaagctattttagagatatatttagggcacttaaagtgaatgaagcacgtatatacatactactgttgatacaatttaatataggacactacatatttttttaatgtaatgattaaaatcactaatgaatttacaacacagacatctgcaaacagcacagaaatctccttgaacct

SEQ ID NO: 99732 - DNA, 859 bp, Cannabis sativa
tgaaacttcggtatgtctcagtctgacacacttatttgttctgcatcctatcctttcctgtatgtcatctagctggaattttcttagacaccatgtaaaatttttaaatgataatgtagatataaatatcttcaaagtgagggatctaaatttggtgaataatatgagaactttttgcgtggtgggaagctgatgcctttattttaatactatttctaagctttttggcttgtaggtttaaagaaacacattgagctatatgattctttgaaacaacttttcaaacagtctttgcttttttttttatttgttattgggatttgcttttccattttcacaacataattaataagtgaagggaagaaaagaaacagttgtattcagaaattcaaaggtttatgagtattttagtgtcgacttcacacacttcagaacttacccttgtaggtatttgctatgccagaaacagctttgggactctttccagacgtgggtgcctcttacttcttgtcaagacttcctggattccttggtaatggcagatatccttgatttacataaattttgctcgatatcttttagctaatcattttccttctgtaatgatttcttttatgtggtacagtaaatgtgaacccaaggccttcaagtatgttaagggaatattgtatttgttgatttatacatggaagaaaatgcattattatgatttatacatgggttctcttgataagtgtaacgaggtatgataatataattctttatttaatttttttcttcaataattacaaagtaacatggaaattttttagattttcattccactcttattctcgaaacattatattctcgcacgact

SEQ ID NO: 99733 - DNA, 1748 bp, Cannabis sativa
aaatggcggccaatggttggggtcgctgtttattgaggcttggcttatataaagatatttggtagcttattatttcttttattttttctatagatatgacacatttttcttaagaatttagtattattgttgttgttggtatagtgtggatctgagattgtttgcattattgttgtatgttggtgtggatctaaaatatatctcagattaatataatttttttattgtgtccgtttaaaatcaacaacaatagtggctcactatagctaacaatttagaaccaacggtaaaggaattgtgagttgctctaaatcgttggatatagagtgtttttgtcaacagttttaaatagatgggatataggaaaacccaattatttccactgatgcatgttcgatcgcctattctacctagttttgcattgatccaataagcatcgatcatagagactgatgacaataccattacccaatttttttttaaacaatcaagaaatcctcttttttgagtggtttcaagatcaagttgagcgattttttgaccctccttgttaagaggttgagtgaagtgaagttttgtcccaacgttactcacttgagtatccaacgaagcccaatattttttttgtttaatccttgaattgcttttttgaaatcctctcccaacactagggctgagcataaaatctcgaaaactaaaaaaattgttcaaactaacctaccgaacaccgttaaaatcgaaaccgatggaactgaaaaccaaaaaaaccactaacggttaaaaccaccattgaacgatcatttttttttgggtaataaaccgaccgaaaaaaccaaaactgacatttatatttatatatatattaatttattaattttttttttgctttattacttataatatataataatatattattattttattaatattaaagttgaaagaataagataattagtttttgaacaattaatttgtatgtttatagttataaaatgtagaataatacatttatagaataaattagattatactttaaagaagaaaaaaagaagttcggtttgggaggttcatactaaccaaaccgaggttcaaaactgtcggttttaagatagattttggattgattggtcgattttcgaatagcacgaatccaaaccgaaaatcaaattctagatttttatatagaaaagactggctaaacggaacaatgctcagccctacccaacactattcgagctaggattcatgacaaaaaatcctcttgcacttgttggtaggttctcagcacaagtttccaaaatttgaggaaaatatctccatcagaagcattgacaaatttactcagtgtttccattgtaaattcatcagccacatgatctcgctcatggataatcaaaattaaagagagctttatcttagcagcacgaattgcgagctttgagtttattttctattttttttggtcatagctagagagaaaacattcatatcatctttaataataaagaattataatatatagaatgttaaaatattgacgtctaaattaatgtgtgacaattcataaaaaaaatcaatgtgtgacatatttataaaggtataatatacataatagattgtaatagtgatagttttggttatatcattttcaagtataaacatcatctttcattacattattattttttgtcttagttttatttttcttttagatttgtactatataataatatgaaatttcatga

SEQ ID NO: 99734 - DNA, 813 bp, Cannabis sativa
cacttttagttagaaatatatatatatatatttatttagatagatctatgatatttatatttcttgagtgttttataaatcctaacaattttagatattctataaaattttaatgccaaaaaataaggttcaaacagtatattaaccggtgatatttattttatatgtacgtaaaataaactatttaaatactatttttttaaattattcggaattttttcaaagtttcacaaaatatcttaatgtcatataaaaaattaaactaatttttttcttccaaatgctactagcgtcgatgcacattttttagtgtgcattgtaaaaagaaccctttattatttactttgagaaaaaaaaaatcacattttacaatgtgttttggtttaatcttaaataattaatatgtaatatttttttcttcaatttgtaactaaaaatactctattcaagaatatttttaatttgttataaaaattaagtccggttagatataaataaaagtaagctctaaactgtaagagcactcccaatagatgagctaaaataactcaatctttaaattatagagaataaattacaaaattgagctttcaacaaaaggtaaaccatagctattttacatatattttagctcaatgaatagtgcttagttaaatgtagagatagctattcattgagttaaacaaattttaaatattattttctttaactgttctatatatatgtgtgtaatattatatgaattaataatataaaatgaataaaatatattaaaaatataatatttaaatgatataaagaaaaaatagagaa

SEQ ID NO: 99735 - DNA, 2190 bp, Cannabis sativa
gcagtggaggagcaagatccaatcaaaaattggttggaattccgcatcacgttattcaattgttgctcaaaaattgataacgatccgttcgacgaattgatggctatccgatatgataactcggtgttggaattttggattcggttcattccggtagcagcaaaattgtcggatatcccccaaacctttctttgtgatttgtttattgggaatcttcctacggagttgaaagagaaggtgcgaaaatataagctgaggacacttcctgaggtcataagcaaagcattcgtagttgaagtacaattgaggtcacaacatccaactagcacatcgaaggaggaagaattgcagaatgatggctcggcactacaggtagtaaatcgacaacaacagaacaatactcacgaggaagctttgattgacgatgaagttttaacagcggatgatttggttcctccatcaaagaagttaggaaataaattgcaaaatcttgactcggaatgggaggtatatcctaggactgaagatgatgaagttgagactcaaccgccactaccaacggagactggaaataacacaatactggaattttcgggggtgaaggatctgaaaacaaaggtggagaagcactgcaatggaaatgaaccaccacctattctgacgatccccacgggaatcgtttaccgatatgggaagctacgaggagacgatgttgaagaaccattgcatttgccattcccgctggttactgagaagttgggggagatgtcgttggtgaatattctatcgccggttcagaggatgaactcgttgaagaaatcaccgttgtcggatactgagggaatcgcgtctgggatcccttcaacaaaaatggcagagtggggaatacagaatttaggtgtgattttggtggtggagtcgccggtgaagatggggaatcggagaagcctatttccatcagatctgggtgtgatcttcttggtggagtcgcctgagaagatgaaggtagatttcctttctcgtgttctggaaaaaggctcttttgttagaatatttacctttgacccacttcacattatggcccaatcaactacaaacatgggcccacttatcattggaggtcatgagcacaagttattggatccaggtcttgcacagttaaggatgagtttaataactttagttcatgggctgattttttggaatcttgatagtgaggcccactttcttaatttttctatcccaatagggcctggatctttcaccaaagggcatgttcaatttaaacaaaactcatttcttccaaggccaacaagaatgtccgattatacatatggggacgctatgaaaatatttttcccttactatcttgtatactctgtttattggccatcaacccttcattttagttcctttcctgttgacaattgtcatgccatggacggtagggaaccactctacttcatgttggagatgatgttttcatttatgttattggaaatgttctctcccatcatattaaatgagttaagctctcaacctttgattgggttcactaaattttacttctgtcatgcaaagaaatcctgttgtaaattcttaaccttgagagatgctatgggatacttgtatgggaatgtgccaaccaattacttggtgttttcgggaatatttaaaagggctagggaattgcaacatgattcaatcaaactttcaacccaggataagaactctatcctcacaacaatgattgctgaattttttctctcttttgcatctcattcctgggatgggtgggagcgaaaacaccaactagatgaattatacatcgaagttgctttattgaagcacagctatcaatctttggtgggtaatctttctctttcattcttggggcctcattgtttctgggtatttgaccgaggcaagaaaatgaatcctgaacataatcagattttggcaaactcagtttttggtccttttcttctcaactggctttcaggagcaccctttgcagccaccacagcgactgtcctttcactttttctgcacacgaagggcgacactatcaatttactcaattggtttttcgatcgaggtcgactcactaaggagcgatgtctctcccctagcttgaacaccatacatttgctggcttggttcttcgacagaggacgagccaaaattgtt

SEQ ID NO: 99736 - DNA, 1023 bp, Cannabis sativa
ttttttttttgttcaaattctttgttttctgtattaataaatatgtttttcttttccttattcttattggcggattggaaatcagcgattgtaattgctttttcacattttttcctttttccagttattttcggatttagcgaacagaaagcaccgagaatggggagttcaggctttaacttcaagttggcggatcatccaaagctccctaaggataagatcgtggctatggttgttttggacggctggggtgaagccaaacctgatgaatacaactgcatccatgtcgccgagacacccaccatggattccctcaagaaggtaactttcttttcctttttggattgatcttatgcgagtggttttttatttttatatgtatattgatttggatctgtgcacgtgggatgtttatagttagtgcctaaattgtattatgtcttgtttcttagttttatgaactgggcaattttaaaaatgagaaaaatttaagctagcattattaccagtggctgtgtgctttgtctaatatctttactgggttttgatttggtgaagggtgctcctgaaagatggaggctagtcagagctcatggcaccgcagtaggactcccaactgaggatgatatgggcaacagtgaagttggtcataacgcacttggtgctggacgaatttttgctcaggggtgagtatttcagagaaaagttctttgtttttagagtttatattgaattatgatgagtatatgaaatcactgtcatcacataaataaataagttgtacacacaaacacatttgtttttccccaagtttttttttttttttttttaatccaaataatttagagtgacaaattctagattaaaacaattttgttgtccgcatattcatttactttttttatcggtgtacgaacagattgaattctaattttaacatcgtaaattattcaaaatatttcttaataacttattagagcaactatataactgtactagacacgccatcctataaaaatcaaa

SEQ ID NO: 99737 - DNA, 1385 bp, Cannabis sativa
attgaatattcgtttatttatatggtacatatgatttataattagactaattatgctacgaaagtcattaattatagtaataattgtttgtttgtgtgtttctttaattagaagaagattaactataccatgcaccaaccaaaacacaatttttgattactttgttgtagtaacaaacaattgtataaatatatatatataaatatatatatatatatgtgatgatatattgtgtatgggggttacaattaaatatatatctgaataaaaatcaaacaataatatgggataaaggtagggcaatttattattatagtaccaaaaggctttgccaagttgttaaaactaaagtgaaggtgtgatgtaagtagtaagatatcattttggaccaaacatgtgtggtctcaacattcatatgcaacctctatcctaaatagagctatacctctataaagttaaaagaaagataacatttatatatttatattatagtatatggccatatgcacgccacttccattccatgccattatttatttattccctttaactaatggaagacaaaacagaactcttgagcctactcaaaatgctaaagaaaagagcattaaaattgtcaagtgagattgtcaatttagtgtaattaagtatatcaatctatgtctttaatatacatatagagtgaatctccttcacccataaattatctttttttgttgcaatatcctatagatatatcttccaacagatatagattaactatgccaaagaagaggtattagcatttgatgctgtgtatttgaagtttatcaagaaaaaataaaatattttaatttaataattagtatataaataattactaataatttacaaaacgctagctacctatgatgaccttacaatactcatagtcatcacttaatggtctttctttccaaatcatattgtttataatgatatcttttatataagtattgtatatgaaaacagtgcaattcagagttagaatttaaaaaagaaaaaagtgtgaaaagtaataaaaagagcaattgaataatgacaaatttctgctccacattgagaaccttcccaagatgtcacagcatagggaaagctttttatattcaatgatttgaaggaaaaaaaaaacctcaagtggctgagttttctttatttataatttcttttccatttatgttcctagtttttcacatcaaatttaaaaataaaccagagacctatagtttgcaattgttatctcaaaattaaaacaataaaattggaacgaattaccgaaaaaagattctaattgagtcgaggataatgttactttgtttacgttttgcggctctgtccgaaatatgcatgacagtctagcaactaca

SEQ ID NO: 99738 - DNA, 2052 bp, Cannabis sativa
tgttaagttctcaactttaccaatcttttccttaaacttgatcatgcaatacttctaagagaattgtgattctcactatcaacgaaagctaaagcaataggaaacatgtggctatctacatctaattccacagcacacaacatttattcaccatacaaagtcttaaggaatccagcatcaatacatataacaggttgacaaaacttgaagccactcctacaaggacctgacgagaaaaaacattacttgaaacgaccatcttctaactcaaggttggtaatggtacctggattcatttgttttagcatgtgcaagtaactaggtaactttgaatacgattcttcaggtgtacacttgactaaatgcaacaccttctctttgcacttccaagatattttataattgatttcaatgtcgtatttcggtttcaaatcatcccttatggaagaagccatgtaatccttcccatgagtagtgtatttctccttaatgaggtgtgcaattatcataggtacttcttcacaattttcttttggtcgaacatcaagagagcatgcgtatacattttcaaaaatagtgacctcaaacaagtcatactgtggcttccttttgccccttaacctccacccataattgcgatccttacacgtaatgtatcacatattagtactagacttccttaccatgaactcaaaatattttcatcatggcaaatagcccaagaatgtttttcaaatgctttttatttatgaaaatctttccaatatgtatctccttggttgttgtgccactcaaaaatgtctaatgattactctcctcaatgtcttcttttgtaaacatttgatctttgaatttcgagtaaactaccaaagaacaaaatggatcactacatcctccagcttcactcgttcaaaaatggccactaccactagtacctggagtttgagtgctttatgcgagctcttcttcaaagtagttgttgctccgataatcgggcaagtggaaccatatgtaacatttgagaaggtacctcagtatcagtgttctctcgtaaatcatcttcaccatctaaatcaagctcattattgtagtatgaattacaatcatcatcaaatgaaatgtctaaattagtttttgaaataatagtgcaccttaagctccagaattacttgtggagaacaagttccaatcgaactgcatgtatttgtctcactatgttccacaatcattttcttctttaccaaaatcacaaagaaaggaacaaatttatcttgatttttttgaagcatttccaaatataaacttacatctttattactcttcacaagtttaggctgatacattaactcttttatttacttgcaattgacttctaattttaggtcgtatttcacttcatcgacctctagttcttagtacagaagctcaacaaattgtgagcaagttatgtttgactccaacttaaatattttattttcagcgccattgaaaatcgaacctcttcccttgctctcccaaacaccattgtacatcaaataactaaacgacattgaccctatcaatttaaaacaaaataaaataaataccaaaacatctacaaaaatgtatagatccaagacacataatcgaagatatatcgagtaccttcgaacaagtatcatgaagcaatcaaatgtgcattgtgtaaaaattgaacaggtactataactaatctatatcaaggagttatcaaacactacccgaaatattgtccctaacctttgaaaatactaatcatcgattaagcatcaaatgtataaaaaaaataatcgaacagagttgaccctattaatttcaagtcaaataaaacaaataccacaaaaaaatatctacaaaatgtataaatcaaagacacatcattgaatatacgtcgaataacatcgaacaagtatcatgaagcacttgaacaaactacataactgttagcccaagatatgtttccaagagggggtgaattagaaatttaaactaatttttcggtaaattaaaacttttaacacaaaattaagcaat

SEQ ID NO: 99739 - DNA, 1216 bp, Cannabis sativa
tttaaccaactctaactattatgattgtacattagcaatacaagaatccgccatgtgctcagagtaacaaaatttggtgtatttgttcttacacatctttaagtaacaatgaaaatgtgagaagtacttacaatacaagagtcaacataagtaagaagcttctcttaaaatatgtcacaaaagttattacaacaataaagtttttgggaattaatacatgtgagagcaagtatttggaaggtagtaataaaataggtgcttttatataaacatacatcaatatcagatatagatttttgtcattatattttcatatatattaatttaaatttgatacccaactaatgttcattttcgaaaatgccaaaaatctagaaactgtagttttcttaaactaaattattatgagagctttttgtaaataaaggtgaaggaataatatatatgtctgcaaattgtctattgatcaaagcctttattttcatgtttggagtacataagtgcaaagcacaatggctacatataagatcccaaaatccaattatgtccaaatcatatgctaattgtggctatcattttttctcttttgtattttacatgaccaaaaaaaaaaaaaacaccatttcactactactttatatgattaaacattattatatgatcacttaattatatacaaggagtaattaattgttgcgttttatggtgtttactttttaattaagaaatactataagttatcataatttatagtaattataaatatgaccacaattcttaaagaaaagcatcacgactaatctataatttgtgaagaaatgagccttagtcaacattattcacttgctgggattgttgtggtcctgcttggacaggtggttctcttttaccatagtgtttaagagtgtgcataaatcgatcaaatctaataaaaattgaccgatccaattataaccgactgtcaaacattggattttcaactgtgatcaggtcagattagatgttatttttaaatatccaattgagtcggatcagatggtaaatggggtgtctaaaaatctaatacatctaacatataatcgtactacttaatattttcatttagtttggatgagtaattacaccttatattattatacgtaaaatctatatgtatatatatgaaaattaacattaaaaatttactctttttttcttagattggatggatccagtc

SEQ ID NO: 99740 - DNA, 1634 bp, Cannabis sativa
cgcagtatcccaagatcagatacaagtatgtaagccttcgtaatttagtaaaaccataaattacaagcaaaagagaaggtattacataaactgcttaaggaaaagtaattctctaattcctattgctctctccccgaagtattattgccattctctgtagccccagaactctcttgaacatcggcagtagatggtgccgtacctaaacctagaagtaacggggttgcttttgtttcagtttgagtggttctatcagccgaaggatttgcagcccatgctcggagaggagattcaaaatgcttgcttgcaacatcaggagctggtgcgggcgcatcttctccaggaagaacaagaagacccttctcttgaagagaagatggttcattaaagtatgtctgccaaagggaatccacaaggtgcctctcttctctggctgctccaagatcttctggagacatcagacagataccattaattctctcttgaagaatttgtttcagtttgtcatcattgacgtcagtcactctaccacttgtctcgccacttttgtctcgtgcaagctcaagaaggcctcgaagagaagcttctcgtacctctgcgtcttcactagaagcaaggtgcaacataatgcgaggaaatcctagctcagatactacgctgcagtctgaactattctcatgcagtagataatggaccaagttcaaagctttcctgaacatgtttcatgtacaggtattataatctccttaggcatatgaaaataaacactaaattgaaaaaaatacagatagttctttatggtacctttgaaatctcacgttttctgaacttaaagcatctctcaaggccgcatatccatttgcaagacgaaatgcaatactgccaggtttgttatgccggattaacgctgcattgcaaaagcaaaccgtatataaaaaattcattcagaaaagcaagggaaggcccaaaacataacttaaaaaactagaaactcatacgtacaagatatagcaccgagagctttggttcgaactgtcacatcaggatcagatgtaaaattagaaagaagaggctctaatccattggcttccataaccagctgttgactccgttcattattctgtacaatagttgttacaacctcagcagcctttgctcttatgttagcatgtgagttcttgaggtaaccaagaagagggaccaaaccgccaatggaatgaagatctgtcacaagatagaagattgcgtatcagctgtattgtactgctgtattgtactgactactaattgaaatcaactcatcaaatagcaaatgaacaaacgaggtaaaacataactcaagagtaatggaattcgtttggtgtgtgataggtgggattagatagcattgaattgaattatactataaataagaggtaaggccagacaagaatttctaaattagtgtctcactaataatatatatgaagaaagaggtacaataatttagtaactgaattaatcaatccaatatattttgtaatttcattcgaatgacctccccaacgggtaaatgaaaaagtcaaaaaacaaggggcttacaagataacttaataggcataccgaccatatacattaaggtggcgtttggttgg

SEQ ID NO: 99741 - DNA, 2051 bp, Cannabis sativa
caaattgttttcaaaaaacaattttctatttttaaaaataaaaaatagttttttagttatgatgccaaacatgcactaaattattttcaaaaatgttatattttagatttatttagaatgatgtgtaattatttttcaaataccatattatagatttttatcactatctatacaaaaaaaaaaaaaattgttaaaagaaaaactcttttttttttttgagtttttataccacatattgaaatttttaactttttttctttttcattgtggggcagaatttgtcaaagatattgtgttttttttttttcaaaaatattgtgtattttttatactttatactgtgttaagttttcactgttgttccacatttgttttttagttattccactgttgttttaattgttttattttgttattttacggttgttttataaaaatatagtatttttgtaaaaatattctgtgtaacagtaaaattataaatttttgcttaaaattcaatatctttgtaaaaaccatttttttgccaagatagggcttgggtcaatcttacctctcagttgaattgttggatagaaacagggactcatgggatgtatggcagtggtgttttgatgatgcatgagaaaattacactacatacctcttttaacttgatttctttaatttttactctctcttttaaaatctattatgtttacctcttttttcaatcattctatcaattttacccctatcacttcacaatagttttcattcttttttaattaaaattttgcctcagctttcctacaaacctacacatccatttacaaagaacacaaatctattatgtttgaaattaagtcttagttatgtgagtatatgagaataatttaggtacaatactcataaaaataagcatatttgaattaaattttatttaaagataaatatagttaatgtatagaaaaagatgatattcttcaacttttccctatttaatgttattgctttcattcctaaatttgtttaagatttttagaggaaatcatatgaaatattatttttgttttttcttttccataagtttggtaaatatgatatttttaacattgtgcatgttgattcacattttaatagaattttgcttcccatattcttattttcatatttttataaagattaattttcaaaataacgtattttagtggcattttatattcagggattatttcataaatatataaaaataacaaaaaaaaactatatctttacggatttagtctttttttttatttattctttatggatttcaattttttttttaaaaaaaaatacggaatattattttttttgttatttacaaaataatgttgttttgatgttgttgcttcaggtaagcaacatgatttttttcaatttttgtaggaaatattcagttctttgtatgtatattgtgttggttttttttaactataaatttcattcaactagaacaactcagccttaacaatgtcaacaaaatcaaaagggagattagactctaaaaaatacaatcagcatataaatgagacgctctagccataagatgagtagctcgattagcagatcgtttgacaaaacgtaaagaaacataactataaaagacaataaaagttgtttacaatcctcacgatgctaccaaaagtggatgacaaaatattcaattttctaacagcttgtaccaataccagacaatcagattcgataatgttaatacctaggaaatcacgcttcaaccatgaaagcacttccttgagagtcacaacttcagcaatctctagaagaactcgcccaactcgcagtctgaaatcccaaccacaaccgactgtggtgatttcaaacaaccctaccaaaatcatgcatttcctccttatcaaataacgcggcatcaatattaccttactgtgttggcttaatatcggtataggtatgcataaatttattaaatgtattttttaattattttttattctatgtatatctttatatattaaaagtgtctatctaacggcatttcttggtttaac

SEQ ID NO: 99742 - DNA, 1006 bp, Cannabis sativa
taagagaattgtaatattgagtatttttgccaccaaaaataaacattaggtattttagtgtataaaatcagaaatattaagtatttatgccgcaatttacccttattcttacatgtatattggggtgaagtagaggttatattaggtcaggattctaatttaacccgactcacattttacatgttttttttttttttttgaaatgacattttaggtatttaatagtgtagattgaattaaattaatttaaatatttttttaacggattcttaatattttttttattttattttttaaaatgcaacactaaaaatttattttatctattttacctcaaatttttatattatactacacattagtttttttttttttattatttttttctatatcatttaaaaatatattttcaatatattttatttattttataaaagtaaaatatataataatatgtatagaaaagttaagaaaataatattaaaatatatttagctcaatgaataactatctctacatttacctaagtactatttattgagctaaaaaaatatacaaaataattataatttatctcacttgttggaagctcaattttataacctttttttttctataatttaaaaataaaactattttaacttatctactaggaatgctcttacatatatactagtgaaagaagccatacaatgcatgggttgttattgtaattaaaaaataataatttatagttattttgtaactaaaaatattatttttaatacactttttttagtttttttttttttttcattttttcttactaaaaaaaaactatctccttttttgtaccccatttcttaaaaattatacatatatagaaataataatttataactattttgtaactaaaaatcttatttttattacactttttttagttttttttttttttttcaattttcttattaaaaaaaatctatctcctattttgtactccatttcttaaaaattgtacatatat

SEQ ID NO: 99743 - DNA, 1348 bp, Cannabis sativa
actcatggaatttaagcatcaattatttaccaacactcaagcaaaaagtgaagaaaaacatgcagaatatcatgaactcacctcctaagaaattgatttaattgaagcttgcatttattagaggttatcttaaataaattttattattttaaatgaaaaagataatattcaaatttaaaaaagataatatacttaatggaataaaattgaccaaactgtaacaactcaagacaagaccagagaaggcctcgcctcacagcgacggtattagctctattgtaagaatttaataaaaaaaataactattaaataatggttaaaatatttgtacaaaagattacgaataacttggagaaaatagtaaaatagtacaaataatttagaacaagagcataaaaatataagaacaatatggaagaagatgatttgaagaaaagaatgtcacacttacacaactttttaagttatagtggaaattaccaacttgaataaggtttaaaatatttgtttaaaatttattttctcgtactctcaaaatacacttaggggtttggttgattttttatattttttaaaccaaatcaatataacggtttttgaatattagaaatctaaacctaccaataaatttcttaaactaaaccaaacccttaataatggtttagtttggttcgaaaccacagtttgaacagaatttataattatttatttttttcttaagtaattatacaattttctcgattaaattaataaattaaaaattttattttaaaaaagttaaaacacgaaatgtagtataagtttataaaatttaaaataatttcaaataaatacaagcaaaggaaaaaaaaaataaaacaagtatcaaatttatggaaaatatttttctttatttttctctctactattttacctcttaaaatttcctttggtaaaatctaaggtccaaattatagagtattttggtattttttagctatatgctctctaaatagaagaagtattacattgcatgctatacatcatgaaaacatatcattgaaaaatcgtgttttagcaaaagccaataaatttttacacaataacagtaaaaacacatttgtaacagtctacagcagtagaatgtaattttatcactgcagaatacagttttgtgaaaacaaaccagaaccagaaataaaataccaaaaattaaaatactagcaaaagataaaaacacttgatgcaagaaaattgtacgtggtatcagtgttctttcaaacactcttaatccatggggtcacgcccatagaatgaaatcaattagtaaagtctcaaataattacaaagacaattgacttaaacaagt

SEQ ID NO: 99744 - DNA, 990 bp, Cannabis sativa
tataaataatttagagccgtcagattagatgactctgttaagttgaaaaaagttgaccgatagttgaaaattgaaaatattgttaggttaggattaggaataggaatataggaaactggagggaataatagaatattcgagaggtattgaattgaattgaagcaatgtagtgatttaatggagattattattagaagggaatataggtgggtgggagtgggaatattcggaggaaggtccagtgcttatatatatagatatatatatatatgattctatggctggctgcctctgctatacgtactcccttattatagcttcatataaatctaaatttattaattataatttagttaatcatttggactaatgtttctttcatattacgtttttataaaaatacaagtaagtgatgagatgaacctaaaatagaaatctaagtacgtctcatactcatagtcgacttaattggtgataaagatgacattttgcgttgtataataatgataaaagtttctttagagcttggaaaataatttattttttctctctgtatgacacggaggaataaaaatcgttttcagactgccagcgtaagaagtttattataagaatgttaattaataatgttatatgtcatctcttatttcaccatctcataatgttatcccttagttattatattaataaaataaggatttaattgaattaattagagtttataattgagatgaataatcttaatgtttagacttagaattgttcaaaattaaaaaaaaaaaataacaaattaaaaaaaaagacttaaaattataaagggatgtacttttttttcatacatatgagcccgcggcggttatttccaatctaaatgtgaaatagagtgggaacgaagattattttttatctctgaatagcaaagagagcgcttactatattagttattcctttttttttttttttgaaataaagtatgttattaactcaaat

SEQ ID NO: 99745 - DNA, 2952 bp, Cannabis sativa
caaatttaagtcccagacgttcccagtgtattcactgcgagtgaagctatcctgggcctccttcagaacctttttcagggcctctacctcagcattccccttcgtgtactccaccgtggcataattgtgcttggcgatccgaagctgggttattttctcatcagcaggaatgggggttaggacgatacccgaaggaacagtatactcgtccgcctcggacattcctgagtctaagttgggagccgaagtgtctactcgccttggctttttagcaacctcagtctccaccatctttcctttgcgcttcctgtccaagggagggagaatctcgccttcttcttccccttcttcctcgtcgatcagaacaacttggttttgggggatactggaagaagacctctcgggagtcaccgttgggtcatgattttgaggcacaccagcctcaggactgtatgtcagggcaagcgcatccaggagctcatccatcagctgggctgcttaaagaaataaacaagtaaagacgttagagcattatcaaaaagtcatccatgcaagaataatgtaatgaaactaatcctaccatggcgatctaattctgccctagcaaaagtatgcattaaaaggctggtgtcgtcgtcccctagaaagttgtcaaaggagaggaaccaactggaagataattaggcagaatgatccaaagggataggtgcgggaggaccggaccccatccgagactggcctaagaagtgaccaaggttggaaaaataaaaactcttggcatgatcaccccatcgaaaagggggcatcctaaacctatgaagtcgttcatcaaactctactggcctacagccagaataatcctgaacggaagggacatgatgaacagttagtgggacttaccagctccggaagtcctggcgtttagagccccagtgttagggaccgggaagggaagcttgggccaggaggtcgtctgctcctttctagcctcaattcgaagggctctccccgcggctgtctgggccttaatgtaggcctactcctgttccctcttaaagaggtactacttgtactggtccttagcagaggcgatgatgtcatcccggagcgccttctccgattcggggctgcaaatgttggggcagagaaccttagacaggttaaagtcatccattgactggctctctgaaattaacttggccctcctgcaatgtgcagtcgtaaccaagtcccccacattcagtctgtccttatgataggtagaaaagaccttggcgtgctgaaggaaaagttgagtaggcgcgctacggtgcatagggggaaccctgacccattcagtgagcagctccgggcactcaatggccttgaagccggaggagaagaaaaattgatggcgatactcttaaaatttttctgaaaaattatgaagaaccgggcccttgatggcaggatgggcctaaagtttggaaaaatcgtctttaagtttgtctcccttcttggggacagatgacagttcataaaaataaagaatttcagccgggctaggcggagcccagcccctggcaacatagaaaatgtacaagcctgagagcaggcggtaagcttgggcgataagttggtaaggcgcgaggccaacaaaaactaaaaaaatctataaaatagtcctggaggggtagcatcgccccagacatgagatgggtttgactccaagccccaaagccaccatagttaaggttgggtgtttcatcatctctgggaagacggtggaagactctggaagcagagagcttgatcccggcaactgggacaatcttctccagttggtgggcacaagtcagagttgagtgcaactcgtccgcctcccaaccagttcgacaagtgtacttctccaggaccacaggtcccttcatcacctcctccagggtggccatggtgttagatcctttgcctgaggatttcactccggtcgtagggacagacatgccttgagataagtaagattctgaaaaaaaaaataaaataaaataaaaaatctagcggttagcccccaaaccaaaccctgacataaaaggagagaatgggcgtcccctaaccgctggaaagaggccccctccggatgtctgccagagatgaaaaatccagggattctcctaggcaaacatcgggtgcaaatctcccaaaggcagcgaaagcaaaaaaaaaggaaaaagagaaaagagagagggacataagtatgaaaaccgtgtcatactctcaacagtccctaagcaaaaaagttgtttgcaaaatgaaaaagaaaggaagcagcagaacacagatgaaagctatgacatacgacggtcttcaccaaaaattttccaccgtaaaaatcaaatacaactaaaagctctaccaaaaattctgccctaacatgcaaatgaatagcaaaagcgaaatatacccaggacacttacataaagataatgaactgaaagttgatgatggctgacggtagaatgtggactggcaacgacggagaaacagcagcaagaaatctatagtttctgaaattttctcaaaggagttacttgggttgaaatggcgaaatagcgaaagtaatccaatgaagaaaaaatgcaggcttttatagaccagaaaaggtgcaaggcagctgtgatcagacaccatcgtacggtgggaatcgtaatcgattcgcattctacgaatccaacgggtgagataaatgggtgtcatggcagttgaaaacgtttgaatacttttctgacactcggattaaatgcgtcggtttctcaatggacaggaagtgaatcgttgcctacaaaaagaaataaatattaattatgaccatcataaatgcagccccacgcgcttaaggcacgtgccgttatatcaacaagctcactggaggcatcaaacaagcctcatttacccttcactaaacgaggcttgggg

SEQ ID NO: 99746 - DNA, 829 bp, Cannabis sativa
aaaaataaataacttaagttaattgaattaaaccaaccttttcaatggttccaaatagggacttatgcctaatgtcccttcccttgagtcgtaccctgccattaatcccgagctgcctcaatacagccgacttcctcgccggcgccggagacggaagcagggaccttctctctcccaatttggaggcttgcccatttgatgatgggctctcacagtcatcgttctctttaccttctcggctcttacgtcgtcgttttgcccgaacaagctctttgctcttcgccggagattcatcatcatcggcaaactttctgagcagctcatctgatgacttctttgtcacatgttgaactttactgttatcggaatccattttcagagagagagagatttaagagtttatgaaatgtaattgtgaaaaatgtgtagatttgggtttatatgaacttagtgtttggattatagtttagtaagtggaaaatagaccgttggaaattataatagaggcgaaaatgatggaatattggaataatttaaataaattgggaatgaaagaaatatagccgttgaaagatataatgtatgattggcatgtgaatttctgtggtgggattatattaataaatcaatcaataataatgataagttttctgacaatatttggattcagtcaatgtaacggtttctaatgaaaataaaactatatattttaattttttgagaggtaaatactaaataaaattgtataatgagaaattagcaacataaagtttattttattttatttttcaagtgaaagttactactattattaagaagaaaattattg

SEQ ID NO: 99747 - DNA, 1520 bp, Cannabis sativa
aatttttgtgactaatactttttaccacggaccttttagtcacaatatagaaataataatttataattagtcacaactttttcagttttaaattttgttgtgactaaaaagaaatttttttatagtgtatagaattagtagcatgaacgacaattaatattgacaataattttatatccttattaggtattagtggttcttagcactttaaaggtgacactttgtaaatagttaatgatattttataatagttattaaattaaattatgtgagatcagatacttaattataataataaggatattacagctatagtggtgttcaacactattaatagcatgagcattgctacaaggcattagtggtgcctagtatataacatgctgccccataacacacccactaggggctattttgtaacataatcaaatcttggtgcttgatcattagtcaagtcttgtaccaagtacctcgtggtgacttttgtgattagcttttcttttataattccattcacatatgtatagagagctaaaatcatgtatgttccttgaaattctttgaaaccccattaagctctttagggggagtggcttatgaaacaccttattaccagtatgataggggcccaactgtgtaccccctttccctatcaaggccatataataataaagcgatgtttatccatacttcttgttcatgctactatgttgcctatgtgatgactgtttgttgcctttgttcgaccattgtgtactgtttgcttttatgtttacttgtgagttgtgtgagattggtccttggggataacttatgttttcttgctcatgcttcttattagcactatacatgtgtgagacatgtatcttgtctatccattgagcttgtttgcctgcatgcgcatttaggctaacttgctagcatggtgtgttatcaagtgccgcacgttctgcctacttgagagtttccaaatagctgacttgtgatagttggtatcagagccaagagaaagggaagcttggtaacacgtttacgatggtaagcaacacataaagaatttaagagcttgagaagcgcgtaggagaactggatggactagacgcgaaggtcaaggatctatcctctgaagcttgtaaattggggccaacaacgggacaacaataataacttgccacgttagctcaagactatgcgaacttgttggctagggtaactgtaatcgagaagagagacgctgctaccgaaatatcacgtgcacctcagatgacatcagggcattagaacaagaaacaacagacatgcatgttgctatcactgacctacaaaatgggcagattgcattataagactccctcaatgatataatagaagattgtcatacgtctgtcacggctctttaggaagagtaagcgggaatgtcaactaagctaaatcttaccatgatagcggcagagcgggcaaatatcgaagggcacggaggtatggagtatggtcgtcctagagcatctgagcccaaatgc

SEQ ID NO: 99748 - DNA, 966 bp, Cannabis sativa
aaaattgaaatatattttccaaaatatgatcatatatcactagctagtttctcaaaaattatataaaagtataatgtggtttttggacttgaagggtttaaatggtcattttgcgaatttgaatcacgaacgacaatagaaatgaaattgaggctcacatatgtgccacgctttgtagtggatttactacacattcattacaaaaatatgaacccaacaaatgcatttagtttatagtcccaattaatttgttcatgtatatcatgtatttgagaaaatgcctcatttgagtaattaaatagatctatattctattcaccattaaatatatattttggtataagacactagtctgaaattgtattttgataatttggatatgtaatgaatctgacgttgttttgcataattgaatttatttgtttttactttggtaattgttagtagaaagatttgatttaaaaatttaaaagttgttcggtttattaatttacttgaaagaaaaaatggtaaatattaaattttaattcaaaaagtggtatttttgaaatttgatgtgtaaggtcgacattaggcccaatataaacccgatccgtacaacagaatcttaaacctgctaaaaatacgataatttaattctggaattattaattaattaagtacgtatgattattattaatttgttctaattgtgaaaattagttgtagttgattagtaaccatgcaaagtcgactttaaattaatatataatttaaactgttatataatttctcccttccaaaactaaaataatataagaatatatatatagtactaattaattataacaagattaatagtatattgaaatatatattgtcctgcatatatacgatgatatcatatctctctatattatattaatatatatatacactaatactcacaataagatcgtacacccatttctcaaaaaaaaaaaaaaa

SEQ ID NO: 99749 - DNA, 2875 bp, Cannabis sativa
gctcataccaggcacgagatgcctatttaagcccatacaaagatttttccagtttgcagacataatggggctcctccttgtcctcaaaccctcgtggttgctcgatgtaaacatcttcttcaagcttgccatttaaaaaggtattgttgatgtccaactgtctcacatcccagccattggtgactgctatagtaagaatgattctggtagttgagactttgacaacaggactaatgtttcaccaaagtccaagccaggtctttgatgaaatcctttagcaacaagtcttgctttaagcctttcaactgtcccatcaggattaagtttttctttaaacacccatttatttccaattatattcatttctgctctccttggaactagaacctaggtcttgttcttcattaaggctagaattcttcaatcatagatttgttccaacctttgtgttgaagagcttccaggacataattaggttcagaagttccctggtgttgtttgatctgtgcagtgtagagtttggatttaaatgtcccaaccttggacttggttatcatggggtgtctagactgtggaaccatttctggttcaagagactgttgtacaaatgtatcggctccaggtgctcctgttgtctcactgtcaacagcatgagtttgagcaaaatccaaatcaacaaataaatggtcagtgagatctacctggtttgtaggagactaacttggactcatggatgatggtgatgcttcagttgacttttgatgatttatattagtaggtgatggacaaggtgtggcagcagatggttcattttgttgattatgtggtggatgtgaatttggtgagataaagttgggatcaggctgttgtataagaagtcaaaactaggcatctggtaatgaaatagtgatatcaaactctttcctataattgttcagcaaacctacagtaaaaggaaactctctctcattgaaattaacatgtctagagatatataatctcccattagagcttaggcatttatatcctctgtgcacttcactataccctaggttcacacacttggtggaatgaaattgaattttatggttttggtagggccttagacacggttaacaggcagcaccaaagacctttaagaaactgtagtcaggtttcttgccaaatagggtccaataggtgacttacccccaagaacaggtgttggaagtcatttataagatagacagagatttgaaaaggcatcacaccagtattttagaggcatgtttgcttgagcaaggagtgttagtcccatttcgacaatgtgcatgttctttctttcagcacggccattttgttccaaagtatgggggcaagaatgttggaaaataatgccattttcaacaaccaaatggctaaatgactgatattcacccccaatcggtctgtaacttcttaatctttctctcaaattgattttccacctttgttttaaactgaacaaaagcccctaaggcatctgacttggctttgagagggtagatccaagtgtatctactgaagtcatctacaaaatgaatgtagtatctcaaattcgtgttggacataacaggtgatggaccccaaagatctatattaatcagatcaagcactttggtggccctgctgttaaaaattttaaaaagtaaggcatgggatttcccatattgacatgcttcacaaaacaatagattttcatttatagatgtttttacattagcattattcaagacttgacttaagaccttagaggaggggtgacccaatcttctatgccacaattctttgacagacacatgactcgaactaacaaaggacttggactaagaaacagactcaacaattgcagaaatggactaagacataaatgaaaagactcgggtctagtgtttggtaaaacaaggcttggatactttaagtttcagggtttggtagcaccttcaagctgatacaaaccatctttaagtttcccccgcagcaccaccatctttgttttcatgtccttcacaaaacaaacatcagaaaagaactcaacaagcactttattgtcagcagtcaatttggaaatacttattaaattatttgcaatctttggaacatgtaatacatcagttaaaaataactcgttatcattatatgattgcaaagttcttgaaccaatatgtgaaatatgtagctgagtaccatcaccaacagtcaagcgatccttaccattgtagatagacttgtttgaaatattatcttagtttgaagtgaggtggttgctggctcctgaatcagcataccagttctcatgatctatcatttctggtgtagccacataagtactgagatccttcttttcattgttgttgttgttggttctaggtgtgaatcccataaaggattcatcatacctgttatggcatattgcagcagaatgtccatagcgtccacaaacttgataggttggtttgggaattctaccacacctgcctcgaccacggcctgaaccacctcctctattgttactgccattgtcattatgatagtttgatcctctgccccctcgaccataattgctattattgaagttgccacgtccagcagggtgatatatggttgtggatgcttattggccaaagctgcagatgttccagctccaaatgaatgtgagttttcccacaagtttactgtcaaagctcagtaaagtttcctgcaactccttccaggtaagccgtatttttgcatgtgcttcaagttgacaaacaattattagatattcagcatcaagaccacttagcacatttgaaatgaggtgagcttcaggatagagatcccctgcaatagcaaggttgtcagaccaagttctttt

SEQ ID NO: 99750 - DNA, 1209 bp, Cannabis sativa
aaataaaataaaacaaataaaacaaaagagctgtcaacaccaatattaaactgttttctttattgaaaagaaataataattaaaagatgataagtgttgacaactcgattagaagcataaaaaggagaaagaaaatatgaatatgtctaccactttgtttgatgagattcttttttatctaatttctttctatctaactctttttgatttgatgcttttggttttttatgggtcaaaaaaggatgaactctttcttacattgtttaaaaaagaaaaagaaaaaaaatttaggtcattaattcaaattaaatgttgatgcggctatatgtgataggtcggatttgttaggttttagggtcatttttcgagatgataaggatcaagtgactagattttttacacaaacgcatttgcttcaatgatgtcatgagatcgtgtttgagataaaacgagctaggcctctacttaagccctatttatatttactttaaatattattacttttaaaaattaaacttaaatatttatctataaccaataattaaaattactgtaaaaaaaaacacctgtctaagaagaccagtcaagaaaacaaagaaaactttttgatattaacaacaaaaagtgaataattaaaataatatgatccttcattatcaattatcattatcatttgtgaaaccccattttttttatttactatttcttttcacactaataaattattgttgttgttttttttttctttttttttttttcaaagtcaaaaaaagaaacaccccaaatcaccgaaagagatattttaattaattaattaatttataaataaataaataaaatctaatctcaatattattcaatataataatacaatgccctataagaatattcttcactataaaattgttgtgaagtagataccctaaactcaaaaccaaaaacattccataaagcaattcattactttcattcaattcaaatatgggtcccattgatataaatatatattataattaattttaagtggattacctcatatactattttttctaatttttctttttaaatttacagtttgggtttctaaagtggttgcaggactagttatattaggggtttctatacgattttttgttataatttaggtgcagcgccagttgcaatagaaatttctatgtagaatttggtaaaaatacaaaaaaaaaaaaa

SEQ ID NO: 99751 - DNA, 2909 bp, Cannabis sativa
tcctcttcctagcattagccttcctgtgaaaaaaatttgtatttcggtccccctccatcaaccataaggcacgacttcgatgcttccaaaatttctcttctttatccaatagcacattgtacttccgctctatttctttcaagtgattccaatcaatgggatctgtgttcctagaaagagtagctatcttgtcttcaaattcttttagctgcatattcatctctttctttttaatcttgttccatctttgaagggcctccccacacttgaccgatttctgcttcagctcataagccgtgacacttctactgccctcccccgggattctgttacgattttcgaacatttttcttccccaagccaagcactttcgaaatggaacccagagtgccactgaacccccaactcacttccatgaatccttttcgaacaggtgaggaggagaggacaatgatctgaatttatacgctcaagatggctgactttagcttcagggaacatttcaaacaaatctgaattcccgcaaactctatccaatctttctaaaataagattgctttgtctcccattgcaccaagtatacttgcttccttcaaactccacctccctgagatgacacccatccaaagctcttctttagatattaatgagataccccggttttgattgaccaccaacttctccttctgcctcaaaatctcattaaagtccccctatcaaccaagggcccgagtacatccgcccaaccctagcgaggagtttccaggaatcgcatctttggcttggatcggggtccccataaaatcccgtaaaccgccaccactagccctcctctttcctagtgaaagtatcaatatggaaaggagaaaaggaaaggatattgcagttaacatctgcagaccacaacaatttgagaccaccactcatacccttagcttccaccacgaaacagccaacaaaacccaaagtaactcgcaaagcctcagctctcaacttattaagcctagactccgaaatgaaaaccagatcaggactccaacgcactaccagggacttcaatgaacggaccgtttaagggttccccatcctttgaacgttccaaaatttattcatggctgaaggcgaccctgactcgaagggtgcgcctcttcttcattctgagcaattttcgaatccctaatctgagaaactctaaccagtatatcatctatcccgcccttccttttctttgcatccttcttcacaacaacctttctcctttgttcttttgggattgtcttctgacccgagccaaagacaaaagattttccttcattcatcccgggtatctccgtagaatagttgaccagaatctcaaagtttctgattcttaacgtattgttttgagtattggccgtcttttggagtttgccaaaccccgtctcttcccgatcatcaatcattcttcgtttaccacaacctccatcatcttggatgcttaatttctcaataaccactgtctcagctagcttttgtaacactaagttagtcttgggcaaaattttcaactctgtcatactgctaagttggccccttccccttattgcttcactcaatattgtctttcccttatccgcttcttccattaatggttcaaaagaattcaaaacccgcaggtcctgcttcggactactcacaccaaggttttccttttccttcatctctatttcttttctaatacccctcctttccccatgaattccatctcgtgccccattatccactttcagccatggtccataggcattagctatctctccttccgcccctttaattttcttggtatccaatgagcaatcttttttaccatgtccaatccatccacatcaaaaacacataaacggtagctcttcatacttgaaggctacccaagtcttggatcccccacatggtaatagaaagcctgggcaaattggtttattgattgtcattcaaatttgaaatcgaaataacccatccgccaccattctcgacacatccgaattgttgattgtgattactgtccctgccactggagctaatcttaatgtgttcttttcagccagatagtcctctggcactcccaaagctctgccccgaattggaaatactgtaaggtcattcttccaagattcactagagttccccatctttcccaaaatcaataaacgatttgataaataccgcgacattcttgctaaaattcttgactaggtttgttcagagcaaaagaaaatgtgaggaacatacctgaatcgtacttcttctgaatcttgatattccattccgcctccttcaacctccagattcttcctagtatgttcttttggaaccccctgctatggtcgaccttagtgcataatcttcccttgagattatatttagcaatcgtggttgatatactatggtccacctcccattcctcttcatccgagacatgaagctaatgggtttttgacaacaattcctccatagcaagggtgagtacacaccagtccggtacaccgaaatcccttcatcaccgagggaaaaggaaagaatagctcagccacgtgccctagcagagaacctagatcagtcatacttattaaatattatacttatgatgatgagtcatcattatgaaatgttacttattaaatgttatttgtgatataaatttgtgcgaacatatatcatgactaggtactattttagttattatacatatgtttctaaattataaatgtttttgtaacgtgtagttttttcaaaagatttttaagttattttacataaattcttaataatttgaataattaagatagtatgatacaaatatttatatgttataaaatcatataaaatagaataaatgagaagaaagaagaagaagatgaagagagaaagag

SEQ ID NO: 99752 - DNA, 781 bp, Cannabis sativa
ggtattgagatttgttaagttattttttgtaattattctatgttttacgtatatttgtgaaaaattccctttaatatttttaaaattaatatttgtagttaaatttgttttagtaaccatcaatagataatacccattaaaaagtgttccatatatatatatatgattatgtaggttaagcttagaataaaaatattatatataatttaattaaataaataatattattttaataagaaaaatatttattttaaggatctataaaaagaaatgtaatagtatatttttgaaataaataaatataagaaaaatttacaatacaaaaagcaatttttattacaattttatttgttggacaatttttatacccctttagttatcttatttaccaaaatacttcttgcacacataaatcatgtaatgttgatgtcattgtttttcaataacacgcaattatttttcctctctattctataacattttttcatgctattttagcttctttctttattttttttttcttgttttttcgtttttttttttttttttcatttttcagttttattttaaatcttctcatcacaattaaaagaagaagaacaatcaagttaaacgttgatgcagcgatttttgaaagagaagaacaatatgagtttggcattgtggcccgtgacctttttggcaattgtttggaggctcgggcaggctgctttggtggagtttactctgctgcagtaattgaggccttgggaatcaaagaggcgcttagttggatcaaaac

SEQ ID NO: 99753 - DNA, 1373 bp, Cannabis sativa
gttcatggttgactctagttgtaggtgtaagggtgttcaaaataattgcatacataaatgttaatacttatataattttaaatttaattatttaaatattaaaaactaacaataataattaaaaataaataaaaattagtttgagcgagtaaacttaaccaaatgagattctcattaaaaaatatctactaacgaaacgagttgaaacaactcaaacaccatccaacaatcccgaccactaaactaatagcaatctctaaaaataaaacaactttagctaagttatgagctacgatattatcattgcgtatgcttacaatagttaaaacttaaaacacgaacattacaacaaaaaggcataaatactttataaaattgagccaaactcagcaagtatatatactatggaactataattattctaactttacaacattacaacattataatagtcttactttcttaggcataaaatacctaattctattctttacttctttcaacattcgaactattatatatactttgaatctacaactatttcagtagcaatttcacacatattaatttaagaatagaagaagaaaagaatgctgaaaaatgctcttgaaaacgcctccagtgttgaatttgatcttcaaaatttgtactcccttgattgcttttgaattgcttgccaaaaataactgaagtccacttcttttatagccaataaaagataaaaaagatagaaaaagataacccacacggaagaatcctaatctgcttcgaattagaggggtgggttgcgacatgcacttcctatgttgctgctcgtgttgcaaaatcctcagtctccaggtttgccttgacacaggcctaggcatgacccttattttgtgcacaattatcttttatttgatctttctatcttttattcatcttattccttcgatattttctattttttattttaaatttgtaaaaataaaagataaaaatcgtaaaattactcaaaacaagagtaaaattaaattaaaaacacactaaaattaacctaaaaatatactactaacaccctaacaattataggcagtgatttttgtgttttttgtttctttgttagtgacactatataattgtccctaataattgtgttagtgttattaataatactatgatttatcataatataatcaatagtgtcaattgaatagacgaatttaaagaaaatctaacatagataaaaattccaggaacgtaatttagtacatataaaaatttgaggaatattatttggtaaatatcaaagtctacagagcatttaataaataaacaatcactgaattagtaaaattgaataaaattagataaaaattcttaaatttaataat

SEQ ID NO: 99754 - DNA, 1499 bp, Cannabis sativa
  modified_base (1469)..(1473): a, c, t, g, unknown or other
aaaaataaaaaccaagcctacatagtaggagacttggatagtttttcttccttggttgcctccttgtcctcttcctcctttttggtctgtttgcagaaagcgagaatttcctcctcagattcttctaggaaacttgtgtccatatccagatttgccatccaggctcgatagatggtacggacgcctacgacgttacatcgatcttgggttttggcctctttcccttcaagtgtcaccttggaagctttaatttcccctttaagcttctcgcaataatcggttttggcctttgtctccttctcggcagcttcgagattcttcttcatcctctcagcttctttgttaaggcgagtaatctctagttgggcatcactccatttcttggccataacttcgcattggcctattaagttctggacctcgctctccaagtatttttccttttccaagcctcaccgctgggcagcaaaagagaggaaagaagccttgaaatcaacaaacaaagatgcatgagtaaaaaaataagaggaataaaagaagtgaacaaataaggataaggaaacttaccaagaggttgtgagaaaaattgcttataagcactccctccaaatccccatggttgatcaaatcccaatcatgtggaaggagagccttgaactaatgccaacaggcagctccaaactctgtggtgaactttgagccagtcttttcggccttgacaggcagtgtttcaatgaccttgctcgaggaggcagaggcttgagtcgctttagggagaggctcgtcggtacttgcggagaccagaggaggaattgaatcctagtttttaacctcagggacctcgaggttagcagtctgggaggctcgtttcttgttagctgtggttttcttctgccttttaacgggctccacctcgacctcagaaggagcctctgcggtggacactcttttcttcccttttttgtggacgagaccctcgaaatgcatttctgcgagacaagataaagtgttaacattacttgaagacaagtaaaaggagagattggggcatgattttccgcctaaagaatttaccataatcactagaagatgaagtatcagtagaagatgggatagaaggaccataatatttactaacatccctacaactcgtgatcctgaatatatcatagggattaattggttctaaattctagcttgcgtctaaatgactccccctatccatcatagacctgtactgctcggcgactccgtagtatgactcagtactgttgtcgagtgaatttcgcaacaccaaattatactattttataaatgtgaaatagaattttaagggaaatgacaagtgcgagtattcaacctagaatggcgagtactcgactaggaatggaaaaacaatcagcaaaactggaaaatatcagtaagacagagaattatagtggttcagtcagattatgatctgcttagtnnnnngtagcaaaggattcgtaggtgccatt

SEQ ID NO: 99755 - DNA, 1620 bp, Cannabis sativa
accaataattaaacccaacattgtatttcggccccgaacccggttcggtccgaaatacccggttgtgactataccgcgcaaacttgtaagaacacacctgcaaaaaggaaaacacaagcattatgagaaatgtgacccttatggtatacagagaagttatggtgtggggaagtctgatctagtagagttaaggaacaatgtgaaggcgctttttggtaatcaaacgaaatttgatgagtctttgagtttgttgactaatgagatgaagtgtaagtttaagaaatgtgagttgaatatgaagtcatatattgatgcaaaaattgatggaagtttgaagttttatttggacatgaagttcaacgagttgagaaattgttttataactggaaatgatggtagaaatgttaaggtcagtgatgaggatacttataatatggtaaggtttacaaattttttttattgatagtgtctattatttttttttttgtttgctatttttggtcattgagtatgtcattagttataatgttgagtttttactgattgtcttttaatttaatgcagaatgatgatgaccttgtattgacaaatgaaaaggagctagttgtagaggtaatattagttaaagaagaaactaataggtttactgttttttaattatttgtgagttgtttttgtgtaaatttttgtatgattattttgttaaatctgttttatttttcatgttcttttataatttattgtttgtaatggaaacttttatgttcttttatgattttttgtttattttagtggtatcctgtttaagattatttttgtggttttatgttctagattaattattggtttttatgtaaactttttttattatttttgataatattttaatctaatgttgtttgttttttgtgatatcctgttttagattattcttgtggtttcatgctctagattaattatttgtttgtgtgtaaacttttttgattatttttgataatattcgtaatctaatgttaaactttttttaggttgaaaaagttgaagatgaaatgtttgtagagaataaggtaatttttttaaatttgaatgttgatgtaaattataatgtaaattattagattatttttgttatatattgtagtgtaatgtgaaattatttacaggttgaaaatgttttagatgagacgattgtagagaataaggtaacttttttttatgtttttattgtagtttagttttgtagtttacttgttgtatttaaacatcagtaacaatttggtttatgatttatttttttattgcggaatgatggtcgtagtcatcctacttttgatataatgtgttatattgcatcacagcctgctaatgataatgggaacgatgataagaaagaactggttgatgatgatcatgagatgttcaaaaacgggtctaacaagttaagggaagatgataatgatggcgatgacaaggttagagtttttgttttatttatatagtttgtggtgtgagttatatatatatatttgcatattgataatttaattttttatgttttattctattttttgcagggtattggtggtgatgttggatattattttaccagaatcttagatc

SEQ ID NO: 99756 - DNA, 1981 bp, Cannabis sativa
tcatgttcttcatttttcaacaaaccaacaagatcaaaatagatgacaatactatccttagcttattttagaaaataagttgtgtagatgaacatattttagatattctatccataaatgataactatcctaaatttttaagaaataaaattgaatctccttcttacaatacttgtaattgcaataagatatacaaggcaagtttaacttaaaattgtaattttactttagtgacggaccaagctagaatagtaactcgattacgttaacacttcggttaactctcacgagttttcaataaccatttcaattaatagatccaaattgtgtgttgaatgtatggaatcgagatttatattctaagactaagaatccactcgcactacacaatgaattctttgttgtaattaaaactaagaatcatatacatcaaaagatcagtaacaattaagaattatcaatgatactttttcttgctcatagtaattttgacaaaatctttctctacaaagagaacatgtgtcagatacccacttggatggtgttttcaaatgtattttgacatataagtgtacaagctaggggtggttataagtacttcataaaattcttagacgattactatagatattcgtcttatgctacaatttgaaaagtttgaaaaatttcatgagtttctagtaatggctataaatcgattaggtacgtaatacgtgaaagatcttgcaaattgataggggtggaaaaatatttgaatatgtagtttaaagatcatttaaacaaacttcaaattgtatgccgacctacctccttagaatatcaaaatcatatgttgattgaaatggttaggtctatgattagttattagcaacttccatagtccttctagggatattccttagagataaatgatattttaaaatgttatcccatctaattctggccctgagacaaacttggaataatgcaatagtcatgtacttagtgtacgccattattacgtctaatgatgtgttatgacttaattagtcctattttttgttaggtttttaaagtatttttaattagttttagttgtgttttgtgaaattttacgcttttggttatcaatattttcaagtttagaatttgagaagaatagagcgaattcaagaaaaaaaatttgtgcaaaaagaattaattaaatgaagttttattactagagcaccaataaaataattcaagaaagaaatctaaaagatctggtgcgatggagcttctaatgttgaaaaattggtaagtgaggagtagcacctcaatattggattaaaacgcaaaaatttggcaacaaagtcatggaactcttgattcgtctctcccaaaaattaggcttcaaaggttgcgacactaccttatagaactgtgacccgctatgaaaaattcgaagggacaaaatagggttgcgacactaccttatagagctgtgacactatactgtaaagtcgcaacccacctgccaaactaacaaaaatagagttttaacccaaacccaaagctataaaaatacttctttttcaacactttaagcaaacaatgaagaagggacaaaaattgaagcaaaattcagctctggagacttttatcaacatttttcgatgagttgttttttctactctttttttatgttcttagttaattgttatcaaatgttttcaattataatgaatagctagactttttattagggtgtaaatgaagattgtttgatatttaattatgataattttaatgtgacttaattcttttcttattttctttgtgtatctatttcattcgtacttaattttttttaattgtctggtcatcaattaactgtttatgatatcaatacatttgagaagtgatcgagtattgattatgctaaacagacacaaattctaatataggacgagagtacctatatagtttgtgtagaaattaggaattttcatgcttaatgcct

SEQ ID NO: 99757 - DNA, 768 bp, Cannabis sativa
ccatccggccccggagccttaagcagtgccatagaccaaaccactttacgaattttctcacccgacggtataccaattacatcatcattcaaagcattcgtaatggtagtaggcaaaagatcaaaaatttcctgatcatagacgggattactagaagaataaatagtcttgaaattttccgcgaagtttgtttttttttttttttgattctttgtttttatgttttgaataagagttttattgttatgggtttagttagtcaacctctttgtatgtgggggtgtctatcatctatttgatagtatgatgttgattttttatcaaaattaatttatgtcactgatttagtgactcaatcctatgaagaagaatgaattggagaagctttttatgttactagattgaaggtgtgtatattgcaccgttgagaatactccatctgcatgtgtgttgtttgaccctttaggtatttgaggtttaatctcttcacaaataaaattgttttcattttagcaaaataaataaattaataaatcagactttttacatgacactattcttttcggatcataattccaaaagtaaggtgatccaaattatctatagtaatcacattttttttataccgtgtatacaaacatatatatcgcctctctcactgcctttctcactctttttcaccacaattttttttttttttacttttaggggatcaacattggtgttttgtttgcgtggcacttgttcaatgaagtagtgcttaagatg

SEQ ID NO: 99758 - DNA, 762 bp, Cannabis sativa
tttgtgttttattggtattttataaaaacacagtatttttgaaaaaatttccgtgtgacaatatttttataaaaattaatccaaattccaatatttttgtaagtttccctataaaacattttaactaatattataaattcatgccaatgagcaagaggcaccgattatctagtccagcctattgacggacctcacttacatacaagatattctagagcactaggttaaaactaaaatctctctacaagatagaaaataaagaaaagctttgaacttaaaattttagggtctttcagaaaagaaaaacccttcaaaaataagcgtatgccattgtgagtgacaagcacacggtattctttagtaaaaggcgaaagaatagttcgctttgtgcttaacacatggctgcttgaatttttcagattagttgccaccaactatatagttgctgtgtttagaggaatgttttatgctctttccactgtgggacaatattacaaaactactactatttttatgattctttctaacaactttcatcacatacagataaccttagtacttcagtagtagtggttactggttaataattagcgtaaaaaaatgcatagtttgttaactatatggtaaatgcaagctttaggctcctcaagtagtggacaagaagaataggagggtatatgggggatgtttttgtaatggtgaattcttccatcttttattaggttttagaaatgagattaaaagttagagtttgttccattc

SEQ ID NO: 99759 - DNA, 1390 bp, Cannabis sativa
atgatgcattgttgttttctggtgtagaactttcttgagaaaaagagtcatcttgcatattagtttcttgctgagtgacatccagctcagaaggtgtgttagtaccagaaatattgtccatattagtaggaaaatcttggacattagtttctaaaatgtgtttagatggtaaaaccagttgagagaaagggtcagttttatcataggtagtgttgaggcgatgaaagggatagatcctttcatgaaagatgacatttctggagacaaagaattctttgttatttaaatcatataatttgtaccctttgataccttgagggtaccccatgaacacacaggttcggtcacgaggagtaaatttgtttctgtgggctgtgagagtgctagcaaatgcaaggcagccgaaattccttaaagcttcatattttggcctttcattatacattaattcatatggacttttgttgttgagattgggtgtaggagtgcggttaatgagatatgcagcggtcattatgcaatcactccagaactgaatgggaagtttagcctgaaaataagaactccagcaacatttaaaaggtgttgatgcttcctttcagctatagcattttgttcagggatttcaacacaagtaaattcatgtacaataccaaatttagcaaataaatctttaaaaactaactcgggtgcattgtcagatcgaaagcatttgatgttgcatttaaattgattgtgcacataggataaaaaatcagggattatatgagcaacatcatatttttgtttcattaaaaaagtccaagtgaacctagtgttatcatcaaccaaagtgagaaagtatttgtgattagagtgtgaaggaatatggtaaggtccccaagtatcacaatgaatcatatcaaatttattcttagcaaaaccagaatgtttaggaaaagggagttttctttgttttgctaaaggacaaacaagacaaggatcgtttttatgaaaagcatcaagtttacaattaagattgttgcaaagtaaagtcaaacgtttatgagagggatgccccattcaagagtgccacatatcagctgccacggttgtgttgcaggtggcagtagccgaatgagtgttatccaatatgtacaatccattgtgttctttacctcttccaatcacattcttgagtggcttttcctgaataatgaaacgatcagtagagaatttaaccttaatagagtcattgttagtcaagctactcacagatataatattgaatttaaagttaggaacatagaggacattttcaagtatgagatccttagaaatatagacaataccacttttgctaacaagaagagtttcattatttggcaagattagtctagtaggggtagta

SEQ ID NO: 99760 - DNA, 1529 bp, Cannabis sativa
  modified_base (50)..(59): a, c, t, g, unknown or other
aatcaaaaaaatcgtaaaaatgttcaaaattccgtgaaaccgtatttttnnnnnnnnnntgcatttgtgaaattaacccttctaaaaaacagtacattaatgcatctttttttatattttaaaaatttccatacttttagttttaattgcaatggaaatcgtaattatttaatatattcaataaaatttaataaatttagaataatttaatacgttaaaaatatagttcaaataatagagagtatttttttattttataagtgtgtaaaataaataatatgaactctattttctatattttaaattatttcaaatttatcaaaactttataagatgtgttatataataatatacattatcaaatgtatatgtaaagagagattataactattttttttgtataagtaaaattataactattcaaatattaaaagatgatccattcttgtacctattttgggaatgcaccatataagcactccaaaatttttataaactacatcataacaaacatgctagtttagattgccatacgttcttaaggcacgtaaaatatttttggttaattatgatttttaccctctgaatttttaacatattggtaatcaaattctcaaacttttccaacagttaaaaattctatgaactattgagattgttggattcaaaaacttctgttcaattccgtttaattttactaatgtgacgattgaaaatgtaccaaatcgtgcccccaattttgatatataccaaattttgtccctaaattttgataatatcaaatcgtgtcccttgaacttccatccatgtcatgtgtacgttagtgaaattataaggagtcgttgaattcaacaacctcaatagtttaagagaaaattttaacgactagaaaatattcagggtaataatttgatacatgtaaaaagtttataggacaaaaatcataattagccaataatttttatatatctttttttataatgatatttattataaattataataatttttttaaaaaataattttataatatttttaaataatcggtagtatgcttaattttgtctttttttataaatccatgaaagaaaaaaaaaactactttgattatagttttgtaatttctttaatttctcaaaattttgtgaaagactactataactacaataaataacgtcataaaaaattagtaaaaaaatttacgtgcctcaaataggaatgtgtcacacatgtatagcgttttagcgtcccacactacaaagatttgaaaatggtaataaaaataaccgatcccaatttttatcaccccgaacatgtttcacctataatgtcatcggtgatgcagtatgagaagtgaaaatatgaaaaaagaaaaaatattaaccaatccacaaatgatcaaagaagaaatctttaatgtttgctgtaatcgcaaattatattgcacctatttgttattttgtattgtgaaatggcacacttaacagtgatgaaatcattaatctgtgtcaaggcagttaatacagtta

SEQ ID NO: 99761 - DNA, 2078 bp, Cannabis sativa
ctctctctctctctctccttcattatctcatacgccagtctaggctatacaacaccttaggctgtccaacaattgagttcggccagacatcgattcatacattataatcctaagggtactataccagatctcacctatagcgatcttgatagtaattccctcagtataatacaactaaaaggggagtaggtcattactagctatcacaagggggctgaatctctataataaatctgcacgaccccactgtcggttgatcactttttaaggtcaacataaggttataatcttactagtgctaattatgagttaattagtgatttttgagaaaatgattgattgagcgtaatttattaattacggagattttattggaacatgtgagtattgtatataccaattttgaaataatttttttttgggttcgacgactgtggaaacttgatgaattggccaaggatgtcacgacaataatacaatgagttttattgggattttaccagattgttttagtattcttgtgttgtcagattattcgaggtagacaacattcaccaaaatacccctagagtataaactagcttaagtgtttaattgagggcaaactagtcattttattaatatataattgttttgttttatttgtaatctagtaaaccctaggctgaataaacttgatttattaatttagtaattattagtttagataattaagagataaagcaaacctaagaaaatttcacaatacttatcaagtctttctctatccctctttttggctcaagaagaacccaacaaaccaaagctcttaataatctcaatcttagtcaagttattcaaatctaggaactgtacaacatttaggtaagtttctctacttgatcttaatgattctagggttttacgttgatatttttttggtgattttgagtaattttgggtctataggtttggttgagttcaaagcatgattttaactttatttcaaggttgtttaagtgtaaatttcttgtttgtacgaatgctaagctttgagttgggtgagttgagttcaagaactcaaacactcatttaataatactgagtttgtaatcttagtgtatttctgtgttttgaatgtttggtaatgttaattttatgttgataaaatgttcttgaaagtttcactaggtttggagaagttttggaggggtttaatctgaaaaactcgagtttgggctgttttgcaagaaaaacttgagtttttaccgttttaacaggtcagaacctagagaaacaatggaccattttgcagtgtttctagcagctagattttcgtgttgtactgatataagttcttctagttttgagtttaggtcttggttcaggattgatttagattatttatcgaatttccattgtcctgacatagggcccgagatcgtcgagcattattccactcaagtctgcctgcacatttgaatttgtacttgaggtaagaaaagtcaattgtaccgcttagcatgtcaaaaataagataaggtaattaccgttattaagaaagagttattactctccttttaaactgctgttaggtttcttacttatcggttgtttaattaagcaacgatcgtaacattagaaactagttgataatgagggttaaggatgctttataaagtatcgagtttggctttccttataggacaaataaattgttataagcatttgattacgcttaataaatgcctaaaccataagttacaatgtatgttctgtgttacttaaattttgtgctatatgtgatgtttgtgttttacctacttttcttgctgagtctttatgactcatggatgctttagggtgcagctaagggaaaggggaaacaaaaccagcgacgagtcagaggtctcccagcaatgtacataacaacccaccatatttttgttttcaatggacaggatatgtcttttgtaacgttttaatatgtaataatattttgtaacaagctagtttagttgtttttagtaaaagtatttaactaaggggatccccgaattcagtaatgttttgaaaaagagtttaagttatacttaaat

SEQ ID NO: 99762 - DNA, 565 bp, Cannabis sativa
ttcattgttactgtggaaaagccgatcagataaatctgaaagaggagttgtagaaatgcctgggatatagtctacaattttgtctccgctctctacgtctgtacattaacaaatcagtggatatacacaaattaagataatataaatcaataacaaatgttgaaatcgacacaattctaataaaaataaaccaaattcaacatctcgaatgcacacgttaacaatgtgggactaactctcgtattacactatgcactagaactatcattctcataatagttaaactatatatagaggccccaaaatataattttgccttaggctcccatgacttgaattacagtgaatgttatttttgaaaaaattgaattgcatgttaattgaagattgataatgatattaacattgtaaattaacgtatagatttactggaagtgactaatataaacgatggttcacgtcatggtggattatatgtttcttagtttatcttataacaatcaaaacagaaacatgaccatataaaacatatataagaaaataagaaaaacaaagaatcaatttc

SEQ ID NO: 99763 - DNA, 681 bp, Cannabis sativa
  modified_base (518)..(518): a, c, t, g, unknown or other
ccactcttatcatataacaaatataaaaaataaatgaggtcagtagatgacctgagactgaaaagtgagagccgacagaatatgagattctgagaggaaacgagattgtggtgtgcaaaggcctttacttgagaatctttcaccaaaccaataagaaaaaaaaaggagtgagactaactgactgagaagagagtaaggatttcattaaaaaataaaaagtttggtagttacctacagtgaatgcaaatgagagtgatgtgcagagcggagcaatgagccgacgattaatttcctccagtggaatgacgttgtcacctgcctgagaatcttgtgcaagcttcagagtgagaagggagaaggagagaatcaattgtactgagagagggaggcgacatctgtggggagggaaagagattgatgtgttttatttgtctaggttagggttagatgtttaaggaaagaaagaaggaggcccaatgtgtctaaagcccatcatataatatgtatatgtatatatntatatatatatatatttagtttagttaagagatgcggcccgggttgggttcatcgggccataaaattttcagcccatttccgacccattttaaacgggttgtcatttttctaacccaattaattttcggcctatagttttatgggttgatcggcccattttcg

SEQ ID NO: 99764 - DNA, 1944 bp, Cannabis sativa
ccaatttaaagacaggagcataattggtaaggaaagctgcagtaataacatactcaatagctccaccatgcacaccaactgaatatagttcctctggcactcgtccttctaatgagttatcattcagtagcctggtaaaaaggaaaaacacaagttatgtatattccactaaaccaaatgggctgtatatcttcttcttcttttctggaatattagagtaaattttggaatctaaacgagctgaagcaatttgaacatgatactaataattcacctaattaagcaattttttcaatttaaaacgaaacaaaatctgtcattctcaactagtatttcacaagaaaccggtttctgcctagggcacaatgttatagccacgtaagtagaattcgcccccaaaagactagcctataagaggagaatgcccacatagttataaaccaccaaccaacccaatgtgagatcctaacaatacacaaccttagagatgacgtccacaacaaccaattaaggcagcccactcagagcttctcctcaagtcactccttccaatacatatccaacataaaggtgttggctctaataccatttgttataatcatttagatagcacacactcccgaaagactagcctatgagaggaagttcttgtttgtcaagtattagaatggtgatgatgactaatgataactaattttcaaattgataaacttaagtttcatactgcaaggaaaacaatgattaatatggaaacgtcacttacacaagttgcagagatgaagaagttaaggtctctggtattgacccagtgaactgattgtttgataaatccctatgaagcataagattcagggaaaaataaataaatagatatttacataatgacagccaaatcagtaccttgtgaaacattgaacaagaaataaaccttctacatttcaaaaaataaggaatagtccaataaaatcaaatgattcagagtttccactactattattttgttcaccacagaaggtttaaaaatgagtttaataaagatcgttaaacatgtaatatatacaatgtctttcagcgtagagtagaaatctaagaaggaaatgtcaaaacatatgcaagaaacattttgtgtcaaatccacatgctagataaactggtttggtaaaaaactgaaaattatataagctgaaaagctacttggagtcctggatacagcaagaatgtattacaaaacttatacttacagccgactaagagatttttgacctaatccatctggtaaagtgccccccaaagaattagagctcaagttcctacattgcagaaatgtaaataattacattaactgatcagaaaaaaaaaactacaaaattgaaagatgcaaatacgcaaaagttgaagaacatgcatacattgagtaattttcgctgtacgcagacaaaaaggtacagtgagaaaagacaatgatggagcctaaagtagcatataattatatcggggaattttatgccttcatcgataggagcgttatattgtagttattagactttcactggtgtatgaaaagctcagaataatttatggtgctaaaaatagactttaaaacaactttcagatctcaaaacaacttgttttgttttctagcactataaattattcaaaaatttgtatatcgtcattaataaaaaaaaatggagctgtagcatatttatactccgaaaacatggaaaaaggttgttttgaatactatttcatacagaatgtacaatgtgcattgtagttatggtgggaggcctactataactacaatgtatattatcatataaaacaatttgctacgtgccaaaacacctaaccggtgggagcaagagtcttgcccttaacaaataaatgtttctgtatataaatatatatatatatatatatatatttatataaacttggatt

SEQ ID NO: 99765 - DNA, 1019 bp, Cannabis sativa
acaaaccaatttatgaatatggaagtgaggactatggtatgtaaggaaagattttagtaacatttatatatgctttcaataaggaggaaggaagggaagttttgtgtgaggatttaacaccattagctttgaacattaactgtccttgttagtgctgggaaattttaatatccttagtcttgaggagtgaattgggaatagagtgaaatttacacggttgataagttttgatgattgcattgctgatttcaaattggaggatgttaagtactcaagctgttatatttcacttggaataacaagcaagggacatgtgacaaaatttaatcaaagttggatagaattatggctaatcaaacttggttagatatgtacactataactgaagtcgttttccttatggaaagacaatttgatcattgtccaaatattttatctgtttatctggagttgaggatagggaaaaaaacctttcaagtgtttcatattttggcaacatcattaaggcttacaagaggtgttgttagagtcttggcagagagaggtctatggcacactaatgtacaaattagttattaaattgaagatgcttaaaggggctttaaagaattttaataaactagttgtgggagatatacaagctacgaaagtaaaatcatatgacaagcttgttaattgccaagaataattacacaagtctcctacaaatagtaatttgatatcaaaaaagatggatgtaaaggatgaacataatcaggtacagaagcaatacatgtccattttagctcagaataaaattccattggattaaaaaaggagatgtggacacagctattgacctcgaaaagtggcaaccgacaacggagtcatacaaatctaatgtttgccacgtattacataacaagaatgataaagtaaatacgacaaaaaaaaattggagaagtttagccctcttagttagcgggtaatgacatactctccttttagttgtattgatactatttagatcactataggtg

SEQ ID NO: 99766 - DNA, 1602 bp, Cannabis sativa
  modified_base (882)..(882): a, c, t, g, unknown or other
tattattattattattattagaatcatataaccatgtgtggttggaatctcatatttgttaatggctactccaattactaccaaatataaaggaagtcacatgacatgactttgtcactattggttttttcttaggccacttttaaattttaaataatagtatcattaagaattaaatatatatttatatatttgggacactagtagaaaaagacaatgtaattaattaagtaaactatgtaacactagagaaggttcatgttgttacactttcacataaattatacaattttatttagtgctaattcttttaattctttatatttgtttatatttttgtcatttttggtttttgatatcatgagggatttgcacatgtttggtgaaaaggggctaagtggaaaacctttaattagattattataattattataaatttatgtaagttcaattattgatacttatatagatttttcctatactatataattaaaaaaaaaatcattataatttttattaacacaacaagtatgagatttcaaactaatgatataataaatttttgggaatttgaaaaagaaatattgagacaaaatagaatggtctaccattgtaccatcaaaaagactctcttgattttgattgagtgttgcttggcacacgtgctatagagttggaaaactatatttatatacacacatcaaaataaactttttaaaaaataaataaataaaaaaaaacttatgaaatatttaataataaatgatagggtaaggtcccatgctatcatgaaattcaaaccaagatttgtccttgcttgcctatatgcaatctcatcaaatccacctttcccctaaaataacactaataataataataatnataataataataataatattaagaacaattctaatccattgatcaaccttgcaaattgcctttttactatattattatttatttattagtctctagtattatcatctattgtaaatagcttttatttgtagagttggcctttggctagagactatagttcataaactttttttaaatataattaaataataattattattatttatcgtcttcgatttaatatacttgtatcttatcagtctttcaaacacaagctttaaatttttttttttgaaataatttgtttagagactttgagttttaagtttttggtttaaacgacttcctttgattctatctcttcttaattttggatatttgtttatgtttaacaaaatgtagtaatagggttttttttaaaacttttaaagacttgttgtctaaactttaggaaggcaattttattaggacaactctaatgataaatattaaatttggtgttaaattaacaaaaaaaaaaaaaatgatagagttctcatattaaattttttctattccaatcacaatactaaaaattacactaaaattacacttttttttattatattattttattaaattataaataaacacaaataatatagatacaaaaattttaattataaatatattattcaaatattaaaaactaataaaaaaagatttggtgtagtctatagtattacactaattaatattaat

SEQ ID NO: 99767 - DNA, 1399 bp, Cannabis sativa
atagttatgataaaattggtaatatttttttatctgtttgtgttagaaattatctttaacttagttatattaaaaaaaatatcaaaaatttatcttaaatttctatttgtattatttttaaaaatacgttgtcatttttatcctttaacaaaaaatcagtagcttttgcaaaaatataaaattcaaaatattattaacccaaaaaatatctcacatataattcagtatacaaagctgacattctccaaaaatcgatttgataatttagattaaaccgatataagtttttttttttttttttgttattattattatggttattggtggaatatacctactatatatttagtgctgttctttgttgataatgcaccgagtaaaaaaagaataaaacttgtttaagcaggtatcgaatataatttcaaatggcgtaatacgaaagatggtaattgtaatatttattaaacatcaagttacaagtatattttgttccaaatcggatcacgactaatcgagcatataaagatataaataatacataataaaacaatgactaaacatttaaagtaaaagtaaataataataatattaatataataattaatggaagaaaaagatgggcattggtctctctcatttttttgataacacaagaataaaaatcaaataatcaaataatgatatcattaggtgcttcagttaaacgttaatatatattctttccgtacacacgtgccatatatgccttgccttgactggaaccaacgaagtgccaaacagaagagaagagggtgggagagaatcactatgtatattaatttatatatatattaaatttcaaagtttaattattctttattttaattaatgaagtgtaaatttgaagtctaatgtggaccttttctttcgaagcaaaccattgatatttacataaaaaaatagataaataactactaccacaactacaaataataatacaaaaaataaaaaatgcacggatgagaatgtaagttttttctaatacttaatttttatttttcaatggtttctacaatttaattattattattttgcactaattaataaaaagagctaaagtggtgaagtgggatccaaatgaaatgaacatatgttcttatgattagttataatatcaaatataggaataataacaattttactcgaaaaattgtttacgggtaccagtagggtattacctatttattgttagggtttagagttggaggagagtacaaaaatatatcaaattggctccattattctactcagacaataatatatatatagggtaaatactattttggaccctgtattttgcaaaagttacagattggattctgtgttttgttaaattacaaaatggaccatgtattttcta

SEQ ID NO: 99768 - DNA, 695 bp, Cannabis sativa
ctgaaggtaggtgacaatcctaaaactattgagattgaaactcttgacatgtgggtgcaaatacacgatctccatactggcttcaaaacggaataggtgatctacaaggctgctaactacataggaactttcatcagttcagatccaaacaattttaatggcatttggcgtgactatcttcgagttagagtggttgttcctcttgttaatccgttgaaacgggggatgaaatttcgcaaacgcgatggtgagtttttctgggaaaattttaaatacgaaaaagttcctatgttttgttttatttatggcttaatgggacattcagagaattattatccaacaatatatgacacacctcctgagaacattattaagccttacgtattgttcatgaaggctccccccaagagaagtaattttctcactgcctcaccatggctacggcaagcaaatccttcagcacacagtcaatcggaggagcatcacagagaatatcctggcattaatgagcaacatgatacacggccacattcagaggatattaatgtgggggaaaatcatcaaggcaatatacatgggatcaccacaaattatggacgtgatggtgagttgacttcggtccttaatgagccaacgatggtagttatggagaataatgctttatttaattctgatatggatttatccattttaga

SEQ ID NO: 99769 - DNA, 1538 bp, Cannabis sativa
atttagtcatatttattcaacaacaagttacttatgtaccataatacccctaaattataaatggatttgttgagctagcaaagggtatcttagtcaactaatgatgtaactataggacaaattgattcaatttaagggtcaaagcacaagtgaatgaatacttatgggattctttttctgcagttaagtttaaaccagagttagatttaagaaagcacaatattgaactaagctaatcacatggttttgactattagtaacaaattagttacttatgtaccataatacccctaaattattaatggattaattcctagagttgttgagctagaagggtatcttagtcaactcatgatgcaactataggacaagttgattcagtttatatatatatatatatatatatatatatatatgagggtcaatgcagaagtgaaaggtgaatgaacacttttctcatgcaaatgtatatatcaaaatttatttatttaaagtatgaaaagttaaaataaatcttttaaagaagctataaaacactccataactaaaggaaaagttgaatgaaaagacaaattttgttatttatgtgaaaaaaaaagacaaatatagtgaccacacacacacacaaaggcacatacatatatatatacatacatacatatatataatatatatacacacacttttcacaatcacataaccccacatgagctaatcatattgacataagtcatgaaatgaaatttaacaagaaaaaagaaaaaaactacttctaaaagacatataccttttatataatagctagatgaaataattgacaaaaattattattttttttttaaattagggaatattagagagaagaaatctcaacaaactaaaattaagctcaaaaataaacaatgaaacagctaaaattagggataagaacagagaagagagtttgcttaattaagtaaaaaaacccattcattttgctctgtctacaagagaatataatatattaaaatagcaataaaaaacagatacacataataagagcattaaatgccataatactagcaaaatattatactaacagatccaataatcaagctcataaatacataaaaaaaaatgtatataaaccattatttaacagtcaaccatggctatttttcgtacgaacacaaccattttcatttatttatttttaagccaaaaaaaaaaattgatcaaaacccagatgaatcatttttcacataacaaaatatacatatatgaacatatttttgtacgtaacgaatataagatgataaaacataaaaatatacatacatatacacatttataaagaattataatctttaacattcaaaccccaaagaacaatatatatatatatatataattactatagatatagttagttttagtactgaccttttcttctttgtagttttcttgagaaaaaaaaatgaaggagagagatttttgtttggagagagagaaaatgaagttattatgagaaaaagaagagagttaaggtgtgaatttat

SEQ ID NO: 99770 - DNA, 1213 bp, Cannabis sativa
tgtatttacccttttcccataatgtgttcctctatggaagagttttatattaaaaagggtatatccatttttgttcaataagaaagcaacagctgctggtagacaaacacacacacacctctcatggaagttgcatattttttgggggagaagttcaatttagtaacatgggatttgatctatctgacaaggattcatgaatgttatttatttatttattttataaaacaattataatgaaagtattattattattatttatcattatatagaaatacacaaacattcttgtacatattcaaaggttactactactgcccagtaagaggaaactgaccccatttactttctagttttgtttcactcctaaacataacattccacatggattattattattattattattctttcagttaagccattagagtttgtctctgaagtttaaacaaagtagaagttgttcatgtggagatagatataggttcaagcatatgcaccaaaagcagttgaaaacgacagtaatcttattaattagtgttaatttgctgaactttaatttaaataatattaattgtagtgtagtagtgggtgattgcatcatctcttaagtgatgattatcatgcattaaaaggttttagggcaattggcacaaatagtagcttgagtggactttagttaagggactaattaggttttggttaggcatgtgttaacgttgaaaatgaccttaattagtggtgccatacatccgtacacccacattatataaagtatacaaacttatttgggcatagaaatgttaactatctaaagctcttataggtgtaatctaatattatgtggtttaatttgaaaaatcactactaaggaatgtactgataatgcctaataacaatcaaaaatattacggtagtatctcttagttgtacgctaagtactattagtacctaatagtaatcaacaacaatacttattatttatttattgttattttaattattttcatataatattctttttttttttttttttctcttcataattatggttagggacttaacttcacacactacactacaacacttgtttgctcatatgtcttatttttttctttcttttattaggataaaaaaattggtaatgtgttagcgctttctaatttctctcgttattttgatgaataaatttattagtatcacacgtggggat

SEQ ID NO: 99771 - DNA, 1321 bp, Cannabis sativa
taaaaatggtccgaatgattgactataatgccaaattcagataggagttaagtcaggtttcaaatttaacatttctgatgggatcctgtagtttgtcctctgaacagtgctagagtgctgaagcaatcagcaactaaacaaattaaataaataatacataagttactatttactctagcaaaagaaaattttctaatttggttagtttttacgagtcaggtcgtcaattataaaagtagacagcaccatcagacccttttcaaaaatgaaatagcagtcttcatgcaaacagtaaatgatgttcggcgaattgtgtaattctgtgataatttgaggattggtttgtacagggtcttaagaaagctgatcagcaaactatcttggatgacttcaacaaacatgggcctgggattacacagccttctatcacaccacaaatggttgctgttgcccaaccagccccaagtcatgctattgcttcattaatgcccagttctgcttcgattggacttattgcttctcgagaggatgtgcttacacgtgcagccgcacttggaagaggtgctgccacaacaggtttcaagaggttccttgctctcactgaagctgcaaaagacaggaaggatgggccttttagaaagctcttcaacgcataacagaatgaggctctcatgtaggactgtaaaccacttctcttttaatcctttcagaaatttttgttcttatctgattttcctgagattttcgacacaaacaggaaagagaaaaaaaattgtatattatttcgttgatagtttaataagaaatcccatagccctttttgttcgttatgtgagtgtgatctaccgcgtgatccagatttggactgaataaaacatctgttttatgttatagttggaattggttattgaaagaggattttccccaaaggttgaattaggccaaccgtgtgtggcgctgggatgcaccatgtttcgatatttatttaaagaggcaatctatttgtatctattatattcattcatctgcttttttcttcaaagctcttctgcttcagttatttttatttattaattagttaagatgatgaagatgactcgttaaacaaatggatgttttcctcttttcttctttttttagaacaaaataggtgcatatattaataagatagatcttaccgtcaatatataaaatatttcctggtattgagtcaatctcaatgatcagtaaagttttgagaattaaactatgtattaattttagaaaaattacaactcaaaaacaaactacaaatccttcttaaatttctaatataattatt

SEQ ID NO: 99772 - DNA, 1280 bp, Cannabis sativa
tttttttttatgtagattttgacacttacacccttctatattttgcaatttagtattattttaatgtttatgctctttttaaatataatttttgaatttttgcctacagttaacaaaatttataaatccatcactgatactttccctacacacatctttctctttttatatgagggtaagcgattactcttttgctcaagtttccaacgcctttcacttgcaactcgcttaaaaattatttctctcttgcttttgagtgagtatgtccacttctagactttcttcaatttcattatttacaagttgggttacttttatttttatgaaagatatgtaaattcaaagcgtaagctcgattctatgagatcttgttaatgttaaatatattgaacacaatatgtttaagttagtgttggcatgatttggttacttttaatataatgtctaagtcttaacacattttctaagttgaaaatggagacaaaaatgaagggatttggataaccacaactatggatacatactattaaagttgtgaactaaaaatttgctttggagatgcatgaaaaattattagctaggagtttgaaccatacattgtaaatctttcaacatgaattatgcgagtgtaagtattttcaagaaactagaagatctattcgactcaaagcatacagaataaattttggtttgatgatattttcgctattcgattgagaagatataaggcgcgtggaagtagtgttgtctaaatttctattttaagcatatttttacaagtttaaacttatgaggagatagttatttaaaaatagtgacttttaaacatgttcggagtaaggaggtcgggaccgttgcccaagaagatccataaattttgttagaaaatctgtttagaaatttatttaaattttatttttatttctcaattaaaaaataaatgtttttttttttttttttttttgaaaatgaatgtttttatttttatccttttgtttgtgtctaccatgttaggcgagatgctaatcaagatgttcatggtttggataacgccccaaaagctagaagatgccttactctctttcattttttattattatttcacttttcaaaaaaacattcaaataatatatttattcctttttttaaacaaatccccaaacatacatataatgcatgtttcatgaaacttattattacttaattattaatttaaataataataataaaattaaatctaatacaatttaattatattttttaaatatataacatttaat

SEQ ID NO: 99773 - DNA, 1224 bp, Cannabis sativa
aatgatacaaacattgttctcataccgaaggtaaaacatccaacttatatgagtgaacttagaccaatatctttgtgcaatgttttgtataagataatatctaaagttcttgccaaccgtttgaaagtggttctacctcagttaatatctaacaaccaaagtgcttttgttcctggtcggttaattaccgataatataatgatatcttatgaggtgatgcactacttaaaaaggaaacgaagaggtaaagaaggctttatggctctcagtcttgattttagcaaagcctatgatagagttgagtggacttttttaagggatatgatgcacaagatgggtttcaattctcactggattcagctggtattaacttgtgtttcttctgtttggtatacaatcaacaacagtggaagagagatgggtcctataacacctactagaggaattcgccaaggtgatcccctttcttcgtatttgttcttgatttgtgctgaaggattttcatctttaatcaagcacttcgaaagtactggtcaaattagagggtgtaaagtggctaatggagctcctattatttcacatatgctcttcgcggatgatagttatctatactgtagagccaatgaaagagaagcttttaatgtgatgcggttgttgaaaacttttgaagatgcttctggacaggttgtgaattttaataaatcttcaatctttttcagtagcaattcctctgctgcaattagagcccgaatgactcagatcatgaatatccaagaagctactggtgcaagcttgtatctgggacttccatcaatggtgggaagaaataaaaaagcaattttggggtttatacaagataagatgcagagaagagtgcaacactggcaaaatcgttttttatccaaagcagggaaagaaattctccttaagacagtagctcaagcagtcccaagttacgccatgtcggttttcctgttaccattggaaacttgtcacagtttggagagaattatgagttctttctggtggaaatcttcaaaggaaaaaagtggagttagttggcacagttggagtaagatgtgcaaacacaaagctgtaggcggattgggattcagagatattagagattacaatgtagctctacttgggaaacaagcctggaggttgttaactgcagatgaatctttggtctataaagtctataaggccagatatttccatgaa

SEQ ID NO: 99774 - DNA, 998 bp, Cannabis sativa
catggtggtcatcgcaaaaggaagttttaccagattctaaggaaatggaagacaatttgtagaagaaaatgggggaagcaaattgttaagttacctctaactgaagatatagagatgaaaagaagaaaacactgagaggatgaggaaccttagaatccatggcaaagaggtgtgcatcaaagagtagaaaataatgtaatgatggccaaccagaatttcggagatcaacatgagcgcgaaagccaaacctcaaatacgccaatgctactgtatccaaagaatagaagttcagagagccaaagtcatgaagaagcatactagaactctaagtggctagaagctatgaaagaagagataagcatgctggaaaagaatcagacttgggagctagtgccaaagtcgaaggaagtgaaacccatttcgtgcaaatgtgattaaactagtaagcttttaataaaattcggtttagtactataggggtggatccacgtagaagtgaagagaataattgcccaccgtaaaaaaattagaaaaaaataacatttatagacataatattaattttagtgtaataattaaattaaattacgtataatgatcatgtttaccatacttagcacatcaaagttgatttgaacttttactttgagttgtgcaatagcaattagatgagaatatgtttaaagtgttattgtcacgattcgagttttaaaatgtgataaatttataatatttataatggtcccactttgacccatatagaaaaataatacttacaaatgaccccttaattatattacaaaatatttattcaaaaataatgaagaaactcttaaatctataatgaaaatattaataacaaaattataaccgctcaacatatataagagaacaataatatctccgtagttatatagtcatcgaataaataaatttaattggtcaatataaaatactaaaataatatctagcatctatcattcctcatttctaactag

SEQ ID NO: 99775 - DNA, 1235 bp, Cannabis sativa
atatatataattatttgaatggattgtatattttaagtcataaataaacttaacaatggaaaatatagttgaatgaaaagtttggtgagaaaaagaaaaaaagaaattaattggttggttggttggttagaaaagaaaaagtgtaggagaaaaattgatgacaaattaggaggatctgcaaatatttttcattccggagactaaaaaaataagacggtgtttgccaccaccacaactgaaaaaactaatttttgtcttgaataaataagatttgttttgatttttgtagagttttgtccctaaacttgtttttgctacaaaaattatttctaaactataaaattgttgcaaatatcttcagttacatcctactcactttttaaaataatttattgatgtaacattaatgtgccgttaatttagcgcagagtctaaacaaacaatatttgcataaagagtagtctaataatgaattatcttttcaataatttgagaaaaggtaattcactttaaaattctaatctaataagagtttcagtaagaagctaaaaggtttaacttgtttggaataaactagtataaaagacaagatgacatcaccaatatacaaccattgacacttccttagtgtccatggtcgcatattaaagagaattcacaaagaaagaaattaaggtgagaaggaaatagctcacacatgcaccaaaaacttaaaccctaaatttaaagttgtgtgattttctttagtttctaatatttgtaaatttgttaatgaaacaagtgatattttaacttagcatttacttatatggttttcatttttgtaaagtatctatattatcaaataatgctttgatctctattttaaaattttacatttttaactctttacactcaaattttctaaataaaattttattaatcatactatcatacattatatgtaattaagtaataaaatttaaattcaaataattgaaaataatttaattatattgataaaattttattatttaaattcaaaatatcaacattgttcacaattaagtttagctaggccaatacccaaaagctcattcgagagaaagatagaatactagaaaagaatagtacatcatgattttttacgaacataattatgagtctgtttaggtggcgtttggtaatacttttttaatcatttttatgtttttaaaattaaaaaggtgaaaatattttcaaaaacatgttctata

SEQ ID NO: 99776 - DNA, 664 bp, Cannabis sativa
aattttatcaaagtttttttttttttttttttttgtaagtgttaagtgcatattttttctgatgaatatttactatatatatacagtacattatcaaaaaaaaatatttattatattatatatataaagggatgataaaagattgactttttaataaaggaggccttgggttatatctaatcacacatcttgggttttgtatttggcacttttgactctattttcttacgatcgaatactagtgaggtatatggtaagataaggttcaatctcaaaatcgattgacaataaatatgaagtaactcgtacatcttacatataatattaattttttttacgtattatcaatatgagactcactagaggtataaaacaaaaaatttaaaatggtatgagaattaagtgtggttgataattttcttaccttgtgttcagctatgtcatccatgagcctacaaatagtaacagatgctctaataatctttcgatctttggagagccactcaaaaacatctttggttacaatactagtttttattccaaccaaagaactcactatcaacatatagtaaccacaattaatggttgcaaattccatgtactcttcaaaatttgggatacgtccactattcaaccatcgagcttcatcaaaatatgatcggat

SEQ ID NO: 99777 - DNA, 1297 bp, Cannabis sativa
gaagaatcagatgatgtactttttaaacaggtaacataaatacttctactgggttaaacacgattcaaaccatataattataattgagtctacaggacttgcactaatttattttgtaggcttggcttacatatttttggagaagagccaaaactcatggagtggaaccagatatagcagaagaacgtttacaatattggattgatcatgaatatgataacaggtcaccaacttcacaagatgctgttgatggtactaactttcctctctttctctatacttgaatttgccttactttataattattatttatttattttttgagagcgaatttactttatggatacttgaaagatatctaatctaattttgatattctattacatataacacccatttttctcaattcatttggttttgtatttacagttgagcgtgggcttatggaactaagaaagttaggcattgaaacccaattatgggaagaatctcgcaaggaacttgagttggatactaatcgcaaatttcaaagtcaatatgatttctaaaatacatacaaacaattcatttgttaaaagaaaaaaaaaaagtccgttcttttttttttccttctattgtctatcaattaataaccactaaaatttctcatgtgaaaaatattgtcttcagatggctattttcaatttgtttgattagctcatatgctgtataattctttaagtatgttttttttcgaggagtcaatgacatttatgactctcgtgtttatccaactgccaatataattgtaatttatcgcgagctaggatatttgagcgaattttttattatttcattgtaatataattgggcctcttttctataatagaggaatttccctagctcattttttacactttaattcctcttaagataattggctttttgtgataataaaagttttaagtaaacgtgctccattactttcgcaataaagggaattaactactgtataattatagtgttctctttttactttctgttcatagattttggccgctatgtcttattagacggtacaaagttgattgcttttcaaccaagaatgttggttggatgacaacttgtacttagagtgagacaaatcgtgtctccactacttgtaattgttatatccattgtacaaccacctcctctctttaggatttgtcgaaggcgtgctagttttaaagaactcacccttagtcatacatccctttagtatcctttcaattacaacctatacttgtaacgtgggagcaacactaggaaattcggc

SEQ ID NO: 99778 - DNA, 2817 bp, Cannabis sativa
aagaataaatatcatattgtaaaaattggtaactttgcaatatatagtacggtgcagtttgaattgcaatgattaaattcaaaaccacaaaccgcatcgcgcgatatagtaaaaatgcaaattacaactacaccgtaaaagatttcaaactgtattttttatgcagtgtggtgcggtgcaggcagtttgtgtagtttaggcggtatgatgaacacccctaattagtagagactaatcaatgagacttgtataagttaataatgcaaatgaaaagactaaaacacattaagtggatgtgtactttaaacttgtatttgtaggatgtgttagaaactatcttaaaatcctaaaacttagttttgagtatattaagtcacctgaaaagttctgtgtcatttgaaagtataaatgcaaagtttggaggaaaatgcacagtactaggcgacatgttgcctagaatatttatgaaattacagaaaataatcaccatcaaagtcctaagatatatgttgcctacttcaaatgatatgtcgcctaatatgaaggtgacatgtcgcccaatgataggcgacatgtcgcctgtgacattatgggatttgagatttgtgattttgatttttctcaatgatgtgacatgtcacccagtgattggtgacatgttgccttaagcagattatgggaaattttaaaattttgtaaaatacaagaaatgacccaaataacctcattaagtatccttataacgtggattagggttaatgatggttcctacagtatataaggggttaaagtgagccaaaataaattaatcactcattttgcaatctctctctaacactctcttttttatctctaaataagttctctagttctctccataattgtcttagggttttactaagcctaagaaattcaaggtttgaagtctcaaatcttattttaaaagaaaaagaagccattagcaatccatgggacgttcggagtaaagattttttggataagcgttatctaacccaacaagtctcttttaaagattcgatctcccaatccaattttggttatctctaacctttgtattttttttatttaggttttgatcctccattgtttgtctcttgagaacttttgtgatttttttcttttcctttattcattaatgaataattaattgttagaatttcataaagtcctccttgatcccaacacaaaggacacccctctttaagactcaaaatcgatcgtcaactagggaaaacttaaacaaaaacatattggattcgagagactcaaccttaaccgtgcctttaaatttccacatattactagtcgcacaaaccactgactcccaaggaatcaatttggccgaagtaacgtagcccacaagaaattttgcaaccttattaaccccttcagaaacaattacgaatcaagatctccccaaaaagcgtcattgatttcgtcaacctctaaagcatactgtaacactgccaacttgtcactgtctatgactactaaagagaaaatgcaataaccactttgaactcagatttattgtgatagagacttaaataagagagagatcaacgagtgagagcaaaaatttacatattcccttttaatagtatagttccaaaaaaaaaatatttattataaatgattactatatagcatagaaatcctaaatgctatacagaccatacgagtactcttgtccaatattaaaatctatatctacagatttatagcatatttaattttcatttttaaattttgaattataaacattaaatcacctaaatggtgatcaaatactcacaattattaaacacaaatttcaaagatcataaaaatgaaaaggaaaattaaaaaattacattaatcaataattagtttcaaaagactccattaaaactctaaaaaaataatttagttcatgttcatggtaaaaatatccatgaaactacaattaacataaaaataaaagaaagagaagaaataaaactctaaagaggcatccattctcctccacggtgttccaagaagtctcccccaagttttagcctttaaaaactaagttttcttgataaaaaacgtaataatctcattgtttttccaaaatgaaaggacaataacagtcttaattaacatattttaaaaaaaaatgacattcgagaacacttatgcggctgcaccaaacatctctgcggttgcacaactcctttagaaacaatattttttagctttttaaaatttttggctcaatcttctatatttttgcattatttctacttcaagtagtactgtatccatataaacttgaaaacagaataaaacaagcgtaaacgcacactaaataaacttaaatcctaagacaacctaaattaacgccctaaagtgagtctaaaactatcactttatttattttttctctcttcaaatttttctttcctcagtattataaacacttacattatagggtgaagggagaggaataaatggattgatggattcttttgtttagtaagagggagaaagaagagagatactcttcctctaaacacgaaaattttaatccttctaaaaatagtagaattcaagaaaaagataagaaaaaaattatataaaagtcttttctatcatcttaaaaaataatacaatggtaattttaatatttattttactttattttctttaaattttactcttaataccaaacagtaaaaatgagagcaactattctctccatctaggagtgaacatagggcgggttgtttgggtttcaagagaaaaaaaaacatgtattcgcccgttcacatg

SEQ ID NO: 99779 - DNA, 2109 bp, Cannabis sativa
  modified_base (388)..(389): a, c, t, g, unknown or other
tcaaaatgtatatgactgaattattaattaagctatattaaacacagtattaattagtcttgtggtgtattccttcaaataaaaaggtatctgaaaggtttttgtcttcttgaaaaattagttgtctcctgaaagagctttctccgaagattatcttgtccgtcaagaagtctcactacagaaaacaactacttttagtgataacttttttagtcacacataatttttttgtgcctaaatgtgatttttagtcgcaaccaaaagttacttgtgactaaaacatagtatttagacacaagttatcactaatttaattttagtcacaacaattagtgatttttgtgactaatacttctagccacggacttttagtcacaacataagaatnntaatttataattagtcacaactattttacttttagccaaagtttttttgtgactaaaattaaaaaaaaaattagtgtctccagggaaagctagccttcctctggaaaggagttctggatggccaattgttccctcttggaaaggattctcggatagtcgactccagctgacaccttttctatccgagaaatccttcagcgtgcacttcgatccttagtcccgaaagcgtatatctcatccggaagaactttgacttatgctgacatgatggagatctcgctcagaggaatttgttaagtttgttaagtcttaactaactaacttaacaataacttagcacttgcatcaagtaactttatagaatctatatcctgaacctatatataccaactcttatcattttgagcataatgaataaatcaagttttaagagaaaattttgagattgagaggtacagagagagagagagaaaaaagagagattgagaggtacagagaaaaaagagagtttgagtttgaattttgtatgaagaatcttttgtaaatgaagaagattcttggataagagtgtgagagattaacatttccaacagagaatcaatctcgattgttgttcttgctcaatcaatcaagaagaattcagtggtatttcagaattggagtatagattacatcgatctatcagacttgaacctgtatatatcttagtggtaattttattgctttattgtttttgattttaaatactgctcatttttgttttttcctgattacttgcaaattgttaatcttgttattctaattgtttgttgattaagtttttagttgatttagttctacaatttaattgtaattttctcaaaagtcatttagcaaaattgatggaattaatacaagtagttttaattgctcttcaaaattaagaacggcctctcacaaccggaaagatcgtttatttaaaagttggaataaaaacaatacaacttttgatagagagtgagtgagtgagtgagtccctcggccaaaggcccaaaagggtgtaatggtgtgtatgtgcacgaaagtggactccacaaaaatgaaaaattatattttaacgtctcatcgatctcataataattaggaaaagcataaaattcgactacttttttcctagtcactccattaacattcacttattttcttaattaatattgcattatcctttcatgcttttgataatttaattaattattactaaataataactacaagtacgtatactcctccctatagattcactttagttatatgggtttgttttgaatcatttatatctattctataaatgtataatttccttcgttagaaaagtctctgtacttgaataatattgcatttaataaaatctgtatgtattagaaacacttggtacattttttttcttcttcttcttgtttcaatatggttatatatataaagctgatattggttatttctttgggaaaaataaattgatgtgattaatcctcatttggatatactgacataagtactaattaaataaataggcacgaacatgttaactaggataacagcagacattaattattattggataaaaagctgggtgttattaaactatatatttaaagtgttttctagcccaatcagctctaacaaatgaaattagatcatatataaaaagaattgtgggaaaagattaacctctagcaattat

SEQ ID NO: 99780 - DNA, 1452 bp, Cannabis sativa
aacacagggtccaattggtaacttttgcaaaacagagagttcaaaatggtatttaccctaaaaattattatatgtggaaattggaatacatattttgatatatatttataaattgtgttttaataagtactaccgatgcattgttctaagttcttctatgcaaatcgataccccctatgaaatggagtcatgtaatgagaatacctaattaaatttctaattctaaatacaattaataactattataattaataatgttcaaaagctaagccctatctacatacataatatatttgagaaacaaacaaaatccgttaacatagttttttcagaaagaagaaattaatgtacacctctccattgtccctacaatcctctttacctcaagttttaccaattaaataataattgaataaaataaaaaatttccctctataaatagaccttgcattgcatgaatgttaattacaacaactacaacaactaaccaatctacactgtcctctctacaaagttcttaattagactgcagaaatacaagtcctctaatataaaataaaaattaagtagtggaggagaaatggaatcggtgtctcgggcagcgggcagcaacgggcaggcagcgggcagagagaggtgcggcgggggcggctactttcagatgccgttgcactacccaaggtacacgcgaggcgactatgagatgatgccggaatggaagcttgattgcttgctcagagagtatggactcccaatctctggtgatgttcagcacaagaggaagtttgccatgggagctttcctttggcctcattaattattaattatgtgattttgttaatatgatttttactactaattaattatattattgtactttaattattattatcttcatgaatttgtaatgtgtgtctatttcatatatatatatatatctactctctttcatgttagttaaactactacatttatagtatgtggttattttggctattattaaagttaatttattagctcgttttgatgtaacgtagagaagttgtgtaaggttttgttcttgttattttccctttggattcatgtatataactatctcttggagaagatattgaagtaaaatgattattaatttataccaaaataagttttctatgatttgtgtgcaaaataaaagggactttagctttttccttgtggagatcaaacttaaatatttatttaaatcatttttttatgaaaattgaaaaatattacattttcaaaaaaaaaaaattgaaaaatcttcttcacctttggattgttgttttaaatgttagctaagttcgtaatattgaggtgatgagatttttctgctccaatattgagtagtgttttcacattttatttcttactagcggagttgttgttttatttttgggattatttcataaatacacaaaaataataaaa

SEQ ID NO: 99781 - DNA, 554 bp, Cannabis sativa
aaatatataaatatatatataaaagtgtgtgaatgtgattcaagttgcacatatattgtatttgtatatggaagaaagaggaacttttagcaaattggaattatgaaacaatctttactattattttgattctcgaattaaaatagtatagtgattggcatctaacatctttgattccattgatgcattatgaattttataaaccaatatgcaggagaatatatatataaagagggaatactgccacaaaattttatttatttatcatcgtaattttcgcacgttagcattaggaatagtcaatatacttaatagtagctaggtaccaacaaaatacataacaaatatagacaaatttaattatttgtttactagataatttatcacacactcatatatatatttaataatgtatgttatattcacacttgcagcgtctgcctgaaattatcttaaaaaaagatgcttttgcaaattaatagtttattctttaaaatgcatgcatgtgtttcaaacattgtatattttgaactttgctaaaaaagaaaaaaaaa

SEQ ID NO: 99782 - DNA, 689 bp, Cannabis sativa
atctatacttattgatgaccatcaagaagagaaggctctaaagtcatctctcatggcagatcatatttcacttgtccgaggtagagaccgcacgcaggcgccattggactcgccgcattcacactcctcgcgttcagaatcctttcaactgagttgtccattatgttttataaatgattgaaaataataataacaaaaagaaaaatagaataaaataagaaatcagtccatctcaaacagaatcaaaacatcaaggaaattaataattagaagaagaagaacaaagccatagaagagaagctcaccatcagctattgttatatctccggtgccaacggctttgagtacaccaacaagtaatcttacctgaatagacaatgtatttgcaatttagtccatgatgttttacaagagtgtagtaatagagattggacaagcagaatatcatcaaaacctggtgataaagaaaagagcgtatatcatcttcaaagacttccattagaatctcattattcttccaagcacctgctgcagattcatacatggtgaagataaaaaggatgttgtcatcaagattgcgggtatccccaaaaaagggagccaaagacatcacaacagaatcattcctgttgtggacattgtcccacatataataaatggtagagaattgagccatatataagaacatg

SEQ ID NO: 99783 - DNA, 564 bp, Cannabis sativa
gtcaacaccatctctgtatgatctgtgttgaattgccatcccaatggcctcgatcacacttcctattactatcgagcaaatgcagaagttaccaatagctgtcaaaacctgatcaaacatttcaacaatggtgaaaatttgtgagtaatgatttaaactaacttgacatgagaaaagaaagacactcttaccttttgaaagtgaccaacttgattagtactatccactaaatgagcagctttcccaaagaatgtgcgtacaccagtagcgataacaactgcttcaatctcaccctgcttgcaggtggagccagagtagacctggctgcccggatgcttggtaacagggagagactcgccagtaagcgcagattgatcaatctttaagggatcgccttgtaagagacgagcatcagcagggacaatgtctcccaacttgatactgataacatctcctggcaccaatattgcagcatcttgctcactccaccttccatctctcaaaaccttcattttttcatgaaaaaaaaaagattagtattaacttttttgtgagaaacaatac

SEQ ID NO: 99784 - DNA, 848 bp, Cannabis sativa
taattaggacttccttcccagctcaagaaaggaatttgccttcataactttgaagtctcttatgaactctatctctgagatatcccaacacaacagacttgttccgactcatagtactaggaagccccaagtaaaagctaccttcagcagcctcctgcatttgaagcagaacagagttgctgtttaaccataggctccgtgttagtactgaagaaaatcgaagatttcgccagattaacttgttggccggatgccaactcaaaaatatgaaggagattctgaacatgggttgcctctgtagccgtggccttacagtacaagtaactgtcgtctgcgaagagcatatgggagacacgaggcgccccattagcaactttacacccatggatccaaccattgtgctcatattttcgaagaagagctgataaaccttcagcgcagaggataaataagtaaggcaaaagcggatcgccttgacggatacctctagatggagataaaggacccatctcatgcaccatgaacaattgtgtatttagctgaagatacgcacttcattataagtctcaaccaggtagaggagaagccgatcttctgtaacatggcttcaagaaattgccattcaatacgatcatacgccttgctcatatccagtttcaaagccataaaacccgtttcccccgctcttttcctcttcaaatagtgtagcacttcaaaagagaccatcacattatcagagattaatctaccaggtataaacacactttgggaagcagaaataattccatccatcagcggtttcatgcgattagccatgactttcgttattactttgtagagcacattgc

SEQ ID NO: 99785 - DNA, 2497 bp, Cannabis sativa
ttattaatatttataacacataaatctgtttttaaaatttatttaattttgattttagattaaaaaaacaaaaaaacaaaatgttgttaccgaacaagacctaatttaatatttataataaccgaagggcagttgtgttaactagttaatactaagtatggaaaataaatttttatttttgagatcttcctaggatataatttataaatattaaattaaaatttatatttagaattctctaaattagtaatttcaattaaatatatatatgttaaaataaatagattaaaataagtatcaaatgaaaatacaactcttttaaataacgagctttagttataagaacattcgatctctattgttgttcctacatatactactacaaattacactatttacgctattatttatagcattgaccgacgtaaatagtacccaaattataagaaccctttgtttaaaaatgatactaataatatctaattagtgtcatgagagtaaaactaaaacctacgtaataaggtgaattattttaaaaaaacttgctttcattcagcgttagttaatataactgtcgattattgtattttcgagagttcaaaacagacgcaaaataaattggtgagaaatataaactgacgctaatttaataaataccctaaaacacaacaaacacatcaccactacatccaaaatccaaactcttcgaatgctctggcgaaaccaacctcgtcccttccgatcgtccccttcgaatccggccagtgctctccgaaaacaagcctcgatcctctcggtcgtcctctccaaaaccagcctctcgtcccttccgatcgtccccttcgaaactggccactcgaaacccttcgaatctagccacatgattttttgggtgtactagttagcttcctaattgaaccccttagattttttggttatggtacactttttcttcttcttatttttatgcactttcatttatttataatcttgtttattgctaccagctctaatctaggttcttcaaatgacgctaactttaaaccaatccaatgtaaattgatagatgattacttcacatttatttgttgattacaattgtggttttgatttacgtatgtttgtgttacatattacacttgatattggaactcgattgtcctatttgtctacttctctgattttcttttctctttttgggtcatattctgatgttctgctattgaaaaatatagggtgtatagtgttgtggttcctatttgagcgagcaggttataatttgttatcttttatggccaatgttctgttgttacttgtaataaaaaaactagaatagagagaaagcttgaagagtatttcagacttgccttttttttttttttttttcttatttggattttgggactgttatgaggtagtgagtgtggattcatttccctattttctcttgttacttcatttggaaagttaaaaatatctcaaatccagttttggtcatagaacttgttacttgtcaattttcagtttgtgtctaacaactatgaaagtaatatatatatatatatatatatatatcaatcttatataagatcttatctcataaatttggaaatcaaaactgtagattggctctatgtggtgttttggagttttgtattatttggactcactaaaccattgaatcttaactatataatgaaccatttttttcttttactaatactaatttatatctgaatgtatttatatatatattttactttttataaatgtataaagcttatttagtttgatttattggacaatgatttatcaagaaaaaagatgatcattaagattttgaagcattggagacgtctaacttatcactcattgtctttagctcttccatatgtatgaataaaccgattaattgctcattgaaaaagcttgttaacgtaattcatcaatagtatatataaatgagtacccacacattataatatgtatatggatatgtatttagtcttgactatataaatgattagatatgtatatagatatgcattttatataataagtagacttgctgaagtggtggatttatttccaagtttaaataattgaaccttgaaggtgatgaaattgaaatgtgatatttcattttctccctataggtattgtagataatgataccatcattggattttttttttcttgcttaaatggaccaataagtggttcaagtcattgcttttcatgctgtcttaattttcatgtattatagaatgttcatagttttttgatgcttgcaaaagggaaattgtcctattcttggattctttgaactttgggacttcttgcccttgctaatttttccatattctattttctgttgaactctgtgtattaaaaacagtcatcaaatatgtttaggttgctaatctgttatcatgcttgatgaggcatgtaacctctctctctctctctctcgctctctctgtgtgtgtgtgtgtgt

SEQ ID NO: 99786 - DNA, 915 bp, Cannabis sativa
attggtacattatttaaaaaaagaagtaaaaatgatagattttaaaaaagatggtaaaaataaaagaggacaatagtatagagtgtaatttcctcaacctcgagtgtgggaaccaatcttatttattcataattgaagttgattttatttgggcatcggtgacaatctgataattatttcatactcattttaggaactaacttgtggacattactttactgagataatctagtaaggtgttagatcatctcgtctgagatttatgaatacttttctcatggccaatagacaatagaattgaacaatcatcacaaatatggccacgagtgtcaatacaatcattggtggccacaggactaatatagtatacacatatatgtaatgactgagctaagagagacttgggaccatggcatggccccatttatgtgtcccataaatgctacagtgagatagataatctgagtggtctaaaagacaccagacatgattgaaagaatatgttctggtgtaagctctttcgagggaagacagtattggatgacagaataataaggataagcatacattattaatattgttgagatttgtcttggtatatagtaacgtctttactagattaatataacaattatataaaaaaaaacattgtattgatcaggttagatttgaacatttagtattatgagtagaaattattatctgaagtataatacttagttgacaatcgcaagaagtgcattctcgttgtcattgatataaggaggttacaaatcaagagtaaataatgtctatttgttatgtataaattatttaatatgaggtatggttactttacagccttgataatataaattggtgtatcacaaacccaaagcataaaccaagacaaactgtttatttgattttgctgga

SEQ ID NO: 99787 - DNA, 1347 bp, Cannabis sativa
tcttgtctctattgataaggatatttatatttttggaatttgatgatattataactcagatttttatgtaagggtctataatatagttagagtaagtatttcaagtgttttttttttaataatttacgattgaaaatagagtttaataatagtgcatactgctaaatatttaaatcttaattttaatattataagttaaaatatatattataactacaatatacacaattatataacaaaatttaggttgtaatttgtttaaatgctacaaattaaacaaaataatgtccctattcaaaaaatttccaatatatctaataatagagctcttactctctttcttactttatctttagtttggctttatttggctcttgattagatcacaaaagtgtatgaattggggtctaaatagttagtggggattagtaaatagtatcatgaccaaatcatttctatgttgttgtgttgctttacgaggtatgtatgtacttaaatatgtatacaatgaagctatccctatctataaaatacttttattgcaatgatcttatgtgtatgtggtgtattgtagatttatttttctaaaaaaatgaaatgaatacctttgttaaattctaattaatctaattattaattttaaggtgaactaagtgtgattacaatttacaagtacaatttacttatgtatatacatttatgtttttgtttttttgtttttcaaaagaattgaaaaagaataccttttccctttttccttttttgggacccaatgagatgaacttagtaggttgttgaattacaactaaagagaactctagtttactactttattgtaggttatgtttgaaaaatatgatgcttgatcttattcaactttgtattgattcaaaataaatacaattattgtagtaatgtatttcatattttaaatttattatagagtaatgatatgtgaaatcatttttaatattcgttagtcaaataaatataggccctgctaaaggatccttttcagctaaggcaagtccctgatcgccaaggtgagtctctcccagacaaagcaatcccttctagtcaagataactcgctctcattcgtgataacatctttatttgaggtaggttatcccaagttatgatagcctttccattctattttcatgcagaaagacagactgtagttcctttctaaaaaaaactctcctagttgtctccgaacatactagatatatatgtttgtgtgggctacacataacactcacaagaggatgattcacacgcatagattgtctcctccataaactcgacaaaataaatcttcttgaataagtatgagaatttgtgc

SEQ ID NO: 99788 - DNA, 800 bp, Cannabis sativa
ggttagcagtttataacaggctaagatagctggattgtcttcaaaagcatgggacccaaattatgaatacttgtttcttatgtggctttggagatggaaacacatgaacacttgttcttcaagtgtatagtaggtaaagtgtgttcaacaaattctctctaggtgtgaaattggttcaaatcagtttcactttaaagaaattcttaattggataagaaggtcaaagaagagcagggttagaaaatgtgtattctttagtggtaaatgcttgtatatgctcaatttggagagtgaggagcaaagttttgtggtaaaaaaatttacaaagtgttaatagctttattcaaaatgtaaagattgtggtgaagactaggattgatagtctgaatattgagaacataagtgatatagataaaaattggataagaaaatttgttgttgtaagtaaatcaggagattgggtgtataggggttgtaggatgttataaatatttgatgtacatattgatcttgaagtgcaatacaaatcagtttatttacccaaaaaaaaaaaccattaattaataataacagcagaattagagaataatcgaattggttggtggtcgacacttacatataactcgaagtacaaaacaatctgcataaatgaccaaaatttacccccaaaatattagtgttatttgttatgaaacatatataagaaagggaattactatataaggtaaactacttgtgtatcttgaattcatagaatttagtatcaggtgtggcatatctattgtaaattaaaatatatg

SEQ ID NO: 99789 - DNA, 1473 bp, Cannabis sativa
ttgtacgcctgagagagagtcagacttgaacgatgctttgatgcagaaatttgacatcaatattgtgtttcgtgtgtgtgttctaacttaacaatttctcaacttgacacaatacagaaacatagtaaagtagagaacatttggcataatctgtaattgctccaaaaagagtaaagtagatacttgtttaatggtcatttcccctccctccgagccgaattctcctcactcactcactccccagtatcaagaaaataatgtgttgttctgaatgcactgcagaattctttgataatctgcttattacttgtttatcaattgatccaaaccgcatgcatgcatgcatgataaatctttggatttcaacatattagatgacatgacaaacaggaagtgcatttctgctagttatgatttcttctccaaataataatcaacctcatcatctccttcctttggatagtttggtaaagctatcctcttggtattgatagagctttagttagagaattagttctttttctgcattgctcagcctgttttggaaagtaataaagattgttcaaaggctgtggttgtgtcctttggtttcgaaagcctttgatattcgaggattttcttaccacgtacaagatctagaggaatgcagggcgaaatgcttgagcaatcgcttcaagagcacgacctgccattagcttcttgtaacgaagcaagaaaatcggcaccccaatgaaccaccaggcaccagctgaagccagaaacaacatattcagattacaaactatacatgtatataaattatgtttaagagagaataagatattctaattaaatctgacttttgttattgttcaagaacattaattatgtgagttttacaaccataggagtactaatcacactctactttacactcttttgcacttatctctttatattccaataacaagtgtcatttttgttagttaattacatttgtgccattctaattattgtatttttctactaatttagcaatttgtttttaggagaataaacatatttttaatattatatttaatttttttttcattatttaaacaaaaattatgattaattatgtattcttgtaaattataatttttataaagtttgcatatcatttgtaggagagttataacacgagtacatagtaattttttttttctccatgttttatatcgatactcttttaaatttgaagtcactaatattatagtggtgctagtatatatgttattgttttcctttctattttttaattaattaataaattttattatattttgatgaatactttaatttttgttatgttaataatttcaattaattgatgatctcatttttttagctttgaatttaataatttattatttttgatttagtaatagattagaactattttataaatgagaaataatttaatacttctttattttttattcacaattatat

SEQ ID NO: 99790 - DNA, 613 bp, Cannabis sativa
taaatcacatcatcatcctataacatgaaaaaaaggtataattatattaaaaatatatctttttttgctaaaaaaagaagaaaaaatcaaggtaatccttttttttttctagtgaagaatcaaatgtaagctttaaaacctaacctacaataaatatttcaacaaaaaatgacaataaataaatatagttttataatatttaaaattacaaaacttacttaaattaattaacatccaaaaattatgtaaagctaaattaatatcataaatgattcactttattcatcttctctatattttcatctcaaactccattatttcttaacaaaaagcacaataaaaataaaaagtaaaaaattactcccaaatatttatttttatttttacattaatcacaccattatcatataacataaaaaaaaatataattatattaaaaaaatatatattttttgctaccaatagtttaatacaaaaaaatattgcgattcgatttttgttactgtaaaattaatcttgtctctgtgacatatttttgagtattttagtcttatctttatgacatagttttaagtgtttcaatcttaactgtgtgacattattagttcttctt

SEQ ID NO: 99791 - DNA, 819 bp, Cannabis sativa
tattagccattttaagacaatttaaaagagatattagtaaaattattataataagaatagttttaattatacgtttaaaataagattgattcacatgatgattagagatggcataaataacattgctcgtgcatttctatactactcaagtgaccgtaaaataaaatatatgaaattaaattgatgaaatttaatattgttattgaataatgatgtttctataggtgtcttttataggtttagtgttgtttaatactgtgacattttgagaattatgtagaattccatatttaaatgctttgttagttgatttggttctgtgaacatttatcttctgattgacattaatggatattttttgacccatcattggctgtaaaattctaggtgacgatatatcattattctgaatttaataccattccactgccacctgtttcattaaagtgagttactgttggtgatattttgtactgtattttatgctattaaaaagaaaaaaaaaaaaagaaacactatagttatctccacttgagaactttttattttttttgataagtatctccacttgagtacttgttgggttattactcaccttcacatcattttcattctactgtttgccaaaatgtcattctttaagctcacctcacttaaataccacccctttatgtatcaataacgatattgcgtaaatctttaagtttaattttcgattattgataaatgcttaagtttaatttttaactgtaataatatttaagttatatttttagaacttaatcgttaagtgtcaaattaatatccacgtattatttt

SEQ ID NO: 99792 - DNA, 1088 bp, Cannabis sativa
ataccttcacagctgtagctatttcggttatatcatctccaatatactcctttccagtccctttaaagggaattttggtgctaacaatgctcacaaaaacaccgattttatcttgtgtctggttaatcttgtaactactccagctgaaaagttattttcagaatacgttagactgatttaactctaatttcgtgttcatcactagactttttctaaccctttcccactttcttacttgattctcttaagggcagttctggttacaacatcagcaccctgctcgaaaagaagtggtatccggtttgcaaatctgaaaatattcacaccctacaaacaaacattcaagcttcattagttgaatagcagttacagaacaaagactgtgaaatcttgagagttaaaagcttacttgcttcacatcttttccgcccatgctgactccagcttccacaatgaatgggtggccttcgaaaacttgagcactgtatacagttattgtcaagagaaacatactcagaaacaaaacatttttccaaagtacattagtgaaattatgttagaaagatacaaaagttagttccccaaaactcatgacaaggagaaagaaacacgagattcaaacacaacctgcctgaataagttgcaaccatgtctggatgcagctcttttatgattccaagccgaagattgtactcccctgcaggactaagacactgaaaacagtttcggagtatgagtccattaacatcagatagacaactaaatgtcactaacgttgtaaaattgtctcaatgattaacgtaaagtgcctgtgaaagcttacatcaccactaggatcatcaaacttagcttggcgaaataattgatgaatgcggacgatttgttgagaagttagagacttaacagccgttttggggttgaagtcgggacccatttcccctttattaagaaaaaataacgagttaggaatcaactttctgatgttagtaatgtaaaagagaaagagtgctagcataacataacagcaattttaacaaattcttgaaatttaacttcgatagaatgcctacatgtaaagttttttttaa

SEQ ID NO: 99793 - DNA, 1647 bp, Cannabis sativa
  modified_base (26)..(29): a, c, t, g, unknown or other
cactgtaaggttcctgatactttatnnnngtttatttcatatcgttttagaaattcatatttaggatgttaataacataccagttaggtgagccaaagccatgcgagtagctcatgtatggttttaggtgagccaacatcactccatgtggtaaaatcaaattaccactcacattcgaaactaccacgtggaaaaacatcacaatgactaccttcatagtgatcgaaaccatgtctccttggaaggtcaacacctagcgacctctgagccatcttacttatctaccacctaactgtgaagttctcgacaatagctggtatgaaccatctgcttggaaaccaaagagtatcatgcaaatgttacaacagatcattgacatttgctaagaagacctcctcgactgagctaatagccgaggggaagtgaaagacctcattgactatgctaacaaccaaggggaagtggaagacctcctcaactatgataacagctaagtggaagtggaagacacccttcgctgtcaagacatctaaggggatgaagaaggcctcgtccattgtgaatacaatagaagggacgatgaagacctctaaggttaaagaccaaggaaaaaatggagactgcacttacaacactctaaggtgcatcagagatggggtagaaatcactcccatctttggtatattaatgtgagagttggtcacatcctcaattgaccaaagaatgaccagctaatgctataacacattgtcaatagttgccaagaatacctcctctattgtaaagctgaggagatgatgaaagccttctctattgcaaagtcgaggagatgatgaaagcctcctacgctgcaaagcctatgggatgatgaaggcctcctccactgcaaagtcgtggagatgatgaagacctcctctactacaaagccaaggggatgatgaaggcctcctccattgtaaagctgaggagatgatgaaggcctcctatgctttactatcaaattaaggagatgaataagaccaccttcactgaaacccagctgagggaatgctaaagaacttcgaggctgaaacctaagagaagacaaagactacacctatattcacataaacacatagtgtgagaagggagtcaatgataagacaacaaccaatgattagagtaaatgttgacattcaaatgttagcatgatgtcacagtatctcaaatcgaaggaaatcactcgaggagtcatctaaattttaagttgaaaagaaaaaggtaaatgataagaaaagaagattatcttttctcttctccttttatacttagaattttgaattctacttttcaatagtgaatggggattcaaactcctactatcagtgagaatgcttgaacaaaaaaaattgtccaagattgtcaaaattgatgcccacttggtagttttgaaagaaactagctcagttcacttcattaagtcaacctcacacaagggtaaagttgacttggggggaaatatttacactaaaagtagccttgatggcagggacatcaatgtttgagatgtggcaagaaagatgacatctcggagttgagtagtccccaaccataggaagtcggcatgggagtggtccctagccctatgcccaagttgactttaagaac

SEQ ID NO: 99794 - DNA, 1534 bp, Cannabis sativa
  modified_base (186)..(188): a, c, t, g, unknown or other
ttcgttattagatcaaaatccgatggtttgatatttttaaaattaatatttataattaaatttgtttagtaaccattcatgggtaatacccattaagaagtgttccatatatgtatataaaccttttaattggattgatcgagttagtttgtgttgattggaagcagtgacggacccagaattttnnntttgtgggggcttatttatcattcaaaaatatttatacttatattataatcattctcactagatttatttaattttatggggttttttttacgattttgatccataattatcaaatttaaaaaattacatttaattttttaaaagacaatatttttgttagtggggctagcccccacattaatacaattgggtccgtccctgattggacgggttgatattattttcaatccgcctaatataaaaattgagcagattatatttttatcgaatttttcgatttatatttttcgtcggattatttgatttggacggattgtttggattgagcgatttataaaaatttatatacatctggttaattggtaaatacttagagaggaagaaaatgtcattttttgctgatgggttattatggcaattaggggtgcacaaaaggtaatgtaacccattaaacccagataaccctgaccgagtttgaccatattggattactatgttagtgggttattagactgcaaggctaataattgttcaaaccgaatttatattggttggctaatggttgagagttgttggcccaatccaacccaacatgcccataatgtatgttaattatatttatatttttaatttatataatatataaataattattttaattttaatagatttttatcaaataatatgctgatttatacaaatactagtaatgttatcaataatttaatattttttaaaatttaatcttttcaaaattaaattttattattttgtatacaaaaatatcaaaataaaataactcaataaaccccactcaacgcaattcttatattcttgtagaaagtagaattggattatataataaagaaatataaatggctcacagtttccaaactgcagttactaggttgggtcactaagatgctctacacccagctaatccaactcatgtgtaagtttcatacaaaggtgtgtggttcttttaggagaattatctcatatactattttttattttttttttaaatttatggtttgggttgttccggtgatttctatatgagttgttatctgaattttagttgcggtttaggttgctccattaattgaaatatgggttgctgtttagagtgtaaagataaaaaaactctttattgtaaacatcacatcgattttctaccacatcacttacttcaaatctttaataagcttatgagagtcattattcatgattgtaagagggactaaatgttaaaataacgattactcataatcattaaagccaagatctagtatttatttagagcatcaaatacaataaaacacatacctcccataccatccat

SEQ ID NO: 99795 - DNA, 1143 bp, Cannabis sativa
tatatatatatatatttttggtaagggtatatttcttttaatttatcattgtatggtttatcatttatttcactttacacttttatggtcaatattacatgcctttcattctcttcttgcataatttgcatttgaaataaatgtaatacattaattatatataggccgggactatggggtaggcctatgcctagccttaagtagattttttatttgaaataataatattatgctattatattgatgctactatattatatattattaatgctatctttttttaaaaaaaaaaatagaaaattaaaagtaaataagtagtgagataataattataattaaaataaataatatattacttgttaaaaaaataaataatatgtgagatcataattgtagtatttttaaagagtgttatactattgaaatatttttaaaattaagagcattaaaatattatatttttaaatagtatagagatttttagcattattattggtgacgctcttagaattttatttaagtaaaattaaatgtatggcatattacacataatagtgtggataatgaatttaagtcttatgatactttttttaatatttttttatatatgtttatgaaaaacatgattcaaaaaatttaaatagttttaggtctgtatattttcagctccaatatatactattatattttatagaaaaagcttatgcataattgtgaaaagataaataacattttttttttatctatttcgtcaatatgaaaagataaattattaatccaatcatttgcataattgtgtattgtgtatgttagttataattatctacatgtaaaattacagtgtgaaaaataaaatttgaatatttaatcttattttttgtattataaattttcccattgaattttttaaaaatttatcaatattcacaaattatattataaaaaaattatgaacttttttatataagagatgaacacaagagtgaactcacataaaagcgagagaataatcccttttaaaaaataaaaaaataatatataaataagttttaaataattataatatatatttataataaaatataatatttataactatattattaattttgttataatacttaaaagtaaattcaaaaaaaa

SEQ ID NO: 99796 - DNA, 1165 bp, Cannabis sativa
tatattcgcattataatcgagaactgtagtagagatgaatgattatttctcttactcacttcatatatacgtaagagttcgatcattctcttcaaagttatacaattctgtaattgggaactaaaattaaatcatttcaggcatatttaactttcattctcttgcaaaagaatccgatcagtttggaaatggataatgagttttaattagcatgtagcagcctgttaacagtccgtgacaaactgacaaggataatagagatgtatatatataaaacaaattaatagtcatatatataatctatgagaaatccccatgcatgtgatgaatatatgatgaggatttcatacttaccatatatatcatttcttccatatatagaaaaggttgtataatgtgacaaagctcgtttcagatttttcctattattgctacatttcaaaaatacattgacttgtatcaatcaatttcgaatcctgatctttaagttcattcccgcgatgtcggccacaatgtttctttcaaaaactactactataataatatatgtatcgttaattaatatattcagtattttaaagtgctgaatactataatttacaataattaggtattattttaaattatttattaaattaaaataagaagaatatgatattaaaatacaatactactagtgtaatatttttatggtatttatgttagaatttagaattaaggcgtgattaaaattaattgggcgctataggagaaatagtttatttatcttatgtatatattttatttccacacattagcaatttagaactaactctatacaccctccttatgtttggtcttaaaaattgtgagtataacaaacgacctttagaaaaccacaagaccgaacgtgacatttgaaagaattccacatggccaaatatcaaaatcatatgggtatacacgttgggaaatttaattatggattttgaaacactgagaaacagacatacattggccgaaacgtcccaaatgaaggctaaagaggagatagcggaagttttttaggctttttagactagcggcactttgggctcacaacggatcacaagcggttttaataccatgttaaaatttaggattaaggtctgattaagataaatagagtttcatctcaaaactaatt

SEQ ID NO: 99797 - DNA, 3577 bp, Cannabis sativa
  modified_base (2465)..(2466): a, c, t, g, unknown or other
gtaagctgcataatcctacatcaccgggagaatgtcaagtgtaataattctaagactgtgtaggtatgagattatacagttgaagatgacttaaatagaatgattagtactacctatatcaacaaagtgcatcttattttctggtagtctatcacaaaagaactccacagggtaagctcttgggaagttttcccaagaagcgtgcgagtgaagacaaagcacactggaaacactcagttattctgcaggaccagtcatcagtccaagaaacattcagagcgacattttcaattttctctcatgtaaagtgcacatctaattaattctatatgctttgttctagcatgaaagcgagagccctatattcacatttgatactcaagcaagatatatatcactttctacttctttgaactccatgaaatcaaattgtcaccaatatgtctagacagcatatccaacaccatgagtcacaaaaggcttcaacattttgagatgttttacttttttcattttgtattggatttggacacttctttttatttctttctttcttaaatctatttatttatattctgattattttcttacattcattaattttttcttaaaatctcaccctacacatcttgaaaaattgtgaaatttcatacggaggaagcaaagactgttgtccatcacttttctattagtcacatttagagaaaatatagttttcaagcactaacaattattttaatcgaagtagtgaaaatctcacatttctgatcgttcctttgtgaaatatggcccaaactcatctcgaaataattttttgcaatagttataatgaatttgtactactaagaagtaaatatgaagattgatttcgcattaaattttgtgaaaacgaccccctaattcaaatattaaaaatatttttcttttcagggtaaatttcaacaagttttttccttattcttacactcgttagtgctctcttaaaatctcaccctactcatctcaaaaaatcgtgaaatttcacagattggaagccaatactgttatgcatcacttctctaccagtcatgtggagatgaaatgtagttttcacgcactaacaatcattttaatcgaaatagtgaaaatttcacatttctcatagtggtaccccattgtgaaatatggtccggacccatctttgaatatttttctgcattagacacaatgaatttgtactactaaggcatgaatatgaagattagtttcgtgttaaatttggttaaaatgaccactagttcaaatattgaaaatgttcttctttatagggtaaatttcaaatagtttttaccttactcttatactcgttagtggtctcttaaaatcttgctctacatatctcgaaaaattgtgaaatttcacagggaggaagtcaagaccattgtccattacttttctattggtcaagtagaatagaaatgtattttacaagcactagcaattattttaatcgaaacagtgaaaatctcacatttctgataacagtacccctttgtgaaatgtggcctggacccatctcaaaatatttttccgcattggtgacaataaatttgtaatactaagacgtgaatatgaagattagtttcacgttaaatttagttaaaatttccccctaattcaaatattgaaaatgtttttatctttaggataaatttcaataagttttttccatactcttacactcgttagtgttctcttgaaatctcaccctacacatctcaaaaaattatgaaatttcaagccaagatcgttctccaacacttttctattagttatattgagagaaaatattgttttaaagaactaacaattattttaattgaaatagtaaaaatctcttatttctgatagtggtacccatttgtggaatttagcccggacttatctcgaaatattttttcgcattaatcatattgaattcgtaatactaagacatgaatatgaagattgatttcgcgttcaatttggttaaaatggccccctaattcaaatattgaaaatgttcttcttttcagggtatatttcaacaagttttttccttactcttgtactcgttagtgttctcttaaaatctcactctacacatctcaaaaatcgagaaatttcacaaggaggaagccaacaccattgtcctttacttttctattggtcacgttgagagaaattatagttttcaagtactaacaatcattttgatagaaatactaaaaatttcacatttctgatagtggtacccctttgttaaatgtggccctaaaccatcacggaatatttttttgcattagtcacaataaatttgtactgttaagacgtgcaaatgaagattggttctgcgttaaatttgttaaaatggccatttaattcaaatattaaaaatgttattcttttgactgtaaatttcaacaagtttttcccttactcttacnntcgttagtgttctcttaaaatctcaccctacacatctcaaaaattatgaaatttcatagggaggaagccaataccattatccatcacttttcaattagtaacgttgagagaaaagataattttcaagcactaacaataattttaattgaaatagtaaaaatctcacttttattatattggtaaccatttgtgaaatgtggcccggacccatctcggaatatttttttgcattagtcacaatgaattcgcactactaagccatgaatatgaagattggtttcacattaaattttgtttaaatggacccctaattcaaatattaaaaatatttttctttttagagtaaacttcaataagtttttttcttactcttacactcgttagtgttctgctaaaatctcacccgacaaatctcaaaaaatcatgaaattttacacggaggaagccaagactgttatccatcacttttctattggtcatgttgagagaaaatgtacttttcaagcactaacaatcattttaatcgaaataataaaaattttaattttctaatagttgtacccctttgtgaaatgtggtctagacccacatcgaaatatttttctgcactagtcataataaattttgggccacatttcacaaagaggtaccgctattagaaatgtgatattataactattttgataaaaatgatggttagtgtttaaaaataactttttctcttaatatgtctaatagaaaagtgatgcacaatggtcttggcttcgtccttgtaaaatttcacaattttcaagatgtgtagggtgagattttgaaagaacactaatgagtgcaagagtaaggaaaaaagttgttaaaatttaccctgaacagatgaacattttcaatttctgaattagggattcattttaaccaaatttaaagcgaacctaatttttatattcacgtcttagtagtaaaaattcaatgtgactggtagggaaaaatattctgagatgtgtctgagacacatttcacaaaggggtaccaccatcaaattgtgagatttttactatttcgattaaaatgattgttagtgcttaaaaactattgtttctctcaacgtgttcaa

SEQ ID NO: 99798 - DNA, 1082 bp, Cannabis sativa
taagctctcttcaactgtgtagtctcatacctacacagtcttaggatcattacacttaaccttccctaggcaatgtgaaattacacagctctcgatctttcttattgcggatcacaggactctgactgtcacaataatattttatttattttattttatatctattttttaaaatccttaattattttcattacatatcaataaatacatcattaattaaagttgttaatatatcattctaaaagtaaaatagtttataattatagcaatttactttattaaaaagaagaagaagaagaagctaacactgaaaaactaagattttgttttagtataatggtttaataaaaggttcatatattttcaatgtaaaaaaagaaaaaagaaaaaaaaaaggatatatagtaatctgtattctcaatcaaattatgggtgactacatagtggtgttctaacaaataataattaatgtgaagatatttgtattgaaaagtgaagtaagaaaaaataaactaacaaaatatcttagaattatataattaagaagatatttatcttgaatccaacacaagatatctaaagtgaaatatgaatgattatgtacgtaaacaattttgaaaaagtttcttcattttctatacatgaataattaggagtagagtcttagagaatacatcaattgtaaagcatgtaaacaaatgtgttaaatcttttattttttccaaaatgtaagatcgactactgctctactaatattaattaatttttttttaattaattaatacttacaaatcttttctattatttatattatgttcaatgttcatgttactaatttagatttacctctaattcaagaaattatagttttttttctcaatatctcggctcttatatatatatatatatatatggaacactttttaatcggatattacccatgaatattattaaacaaatttaactataaatattaattttaaaaatatcaaactatcgaattttaatctaatgacgaataatgaaatcacaaatttgaattctatacttaatttgactacttaattaaaaaatattaaaaa

SEQ ID NO: 99799 - DNA, 682 bp, Cannabis sativa
gcatgacgtcatcaccgggagagggaacccgtcaggggctgacagggcagcgggtcgagttccgggctatggtgtgatcacgaacatcatcaatggtgggatcgaatgtggtatagggtggaatgctaaggttgatgatcgaataggattctacaagaggtactgcgatatattcagggttgggtatggggacaaccttgactgttacaaccagaggtcgttcgccagtggtgtcttgctcaactctatgtaaactaaggaaatggctctttgctttaacttttaagtttagttcttgtgctaatttagtcatcaccgcttctataataatcgcacattgtatctagtgctttaataagagagatgcactttaataagtgagatgcaaatgcaaaacaaagttgactttgttaaaagtttattgtgatacaaaaatctcacataactaaaagtgatctaaatttgtatcataatataatataatgtaaaatttgcatcacttatacttttttatttactattagagcattgttattgggcaccagtagtacttagcaattctatatatgtcgtcttgcgattggctaggggaaatttgaatttctatgcatgcattaggggataatttttttcctaaactaatacttttctacattgaaaatatatgatcacttttccaaaa

SEQ ID NO: 99800 - DNA, 855 bp, Cannabis sativa
acaataactcaaaatataagataaaaaatcagttataattatcaacaagttaaaaactcagacaaaaaaattagtttcgtagagcagccaagataaaaatttacacacaaatatcagttaagtaaaataataaaacaaaaactgattccttaaattaactaaatcaaaaatcgattgacgaaataactaaatcaaagccaattttttgaattaattaaatacaaaacctgtttctaaaataaataattctagaactatttattgaaataacttaaataaaaaatcagctacgacataaaataaaatagaaccggttgtacaacaaaatgattaaaaaaataacacacaataactcagaaactggttataaataaaaaacaagagagaattaatttcaaaatacactaagacataaatacaaaattagtaaaaataaataacacacaacaatttagaaattggttttaattaaaaaataagaggaatcaattatagaaacactgagatataaattaaatagaattggttctacaatgaaatgagtaaaaatatacaacaaacaataacttagaaaccggttataattttaaaaataataatataaatcatataccacatcacaaaaactagtaaactttttagaagatcctcttgaaacaaataaatgaattaacaagaaattattttgtgcttcctaaaagcttatacatcatattagagaaaaagaattacctatatgatattatgtattaatgaaaatgttaaaatactattaaaatcaactcacctttggaaagattttgaaagtcaataaacacaatgataagttttaattagttacttgccagaaatggg

SEQ ID NO: 99801 - DNA, 1492 bp, Cannabis sativa
  modified_base (751)..(754): a, c, t, g, unknown or other
ttttcaaatgtatacatctttaaaattaattttttttcacattttttgtaattaatttaaaataatgtatacatttatgtaaaatgcccaatttttaattatgatccgttctctttcaaaataaaaagaaaaaagcattgtgaaaataagttgtagatcattctttgagtttttcaaaacatcttgaatcgtcttattccaagcaatatcaaaagagttatgatcaaaatattatcggtcatcgcatgaggaagcttgttgcccaaaaattagctacccgggctgcgacattcaaagggctatatcacggcccactacacaatttctaagttttttaaaacctaatttcgaaaattaataggggcttttcattaggcaactttgagagaaaatgaggatttttcttgtacaaccattgttcttcattagttcttttcatctatcatttatttgatgtttctaatttgttatttgcaattgtttagagtgatgataatgagcttagctcatagtcatgagacttctacaaagaccgaagaacaattaggagatatttttacaaagactttgaatggcatgaggattgattatctttgtaacaagttgggcatgattaagatccatgctccaacttgagggggagtgatagaattttagttgtaaatattagggtaaattgtatttactagtctcctatctgtatttagtagcttcccatagtctcctaacattgtatatatatatatatatnnnnattgtatatatatatatattattctatagaatacaacacataattctattcaccattctctacaattaccaattaattttaaacatagtctcacattttttaatggaaatttaactttattatcaaataacttcggccaccgacaaggtatgcaacaatttagttagaacgcactcaaaattgaatcaatgatcaagcactacaagaaatgagactttttattccactttatatacttgtgaaaaataaaaaattacataaaaaaatatgttggaacattttatcccactttttggcacttaagagataaaaataggtacatttaaggacaagggatgtgttgcgttcggccttaaaaaaattacataacaaaaaatgagttcaagatgagttttttaatgaccaaccaaacaagctcctgatggctgaggtattgacctttaaaacaagggccttctttggctggtgctaaaaaaataaatttttcatcatttacctcttctccacgccaaacaagacttaggagcaatcctaccgagataaataaaagtcttcagtaagtaaataaaacttagcctgctcgcgaaccctatacgtaaaagacattggtgttcatctccttctcatacgacaatacccattttttaggtatgctctctcctttatgctctttatttttgtattttcttttcttttttttttttttttgtgctcaaaatctttattttttgtccattt

SEQ ID NO: 99802 - DNA, 696 bp, Cannabis sativa
gaaaaaagttgctataattgacaacccacttaatctagtttcttatctccatttaagaaggccaacaactttgattttgatgatgtcacagtccttatttttcagactttcaatggtttaacttcaaattaaaaattgattcgtaacatgaaaactttaattatccacagtttatgaatttatatagtgaaatcaactcaatgggtccacaagacaaggtgattagcgttacggcaaaacttgttccgacttggataattcaatctcattttatttttattaaaagagataaaaggcataattcactctcattcttatcttcttggaattatctttaaagaagaaaaaaaaatagtcttgagaaacatcattcatatttcataaaaatggtcaagataacttctctttgaagaaaatccaatagagaatacagtcttcactgtgtttcttctccgacaaaataaataaataaataaataggaaaaatgtgtaaaataaataaataaatacgaaaaagctaattagtaatttttctcttaaactttgacatatattaaatcgtgcccttgaatttttttggccgttacaaattccccccgaatttttgagattgttaaatttaagaacttttatctaattttagtaaaaaaattctaacatggataaaagttcaaagagcatgatttagtacatatc

SEQ ID NO: 99803 - DNA, 1659 bp, Cannabis sativa
gtgtttttttattgttctactgttattttgagttgttctgttttgtgttctactggtgttttataaaaacacagtattttttaaaagatttccgtgttacatgatttttgtaaaaattaactaaaatctcagtatttttgtaagtttccctattaagagttaaaattgacagtggaacttaaaattgagctgtttgggaaactttataaagaattaaaatttgtaccgacccaaattatacacattacagtaatttgttttattattattttctttgttaaaaagagagtacaaagaagcaattgtgcaaaatacaaaaatgtataagctcttattttaaataggagacctgcattcaaccacagtggggcatagcctgtgttgtcctgcccataatttgcgcctagattatgtcatctatataatgtaagaatatataaggtaaaagcaaaagaaaaaaggtaatttattataagatttttaatcaagtgataccataaatcaatatggctttctctttatacttttgcctcttacaattacaagacataatccattattccatgccacaaaagtactgcaagaccaatatttaaaaagaaactttttttattattatttttttataataagcaaataataataaggtaaagtttgttgcctgaagcgtgatgagaatttatcaagcgatttgttgtacggctgtggtattgatgttttcgcatttgtggcaaaaatatcccattgtaatatctatcacaaccaaattaatcatgtatattagtaacaataacaaataattcaatattatataattattttgaaaagtaaaatcacaaacttagctagtaattttcaaacccaaactaatgtattgtaaggaataaaataaaagagcattgccaattgctataatgcccaaaacaccttataatgacaatcatatgacataatttgaattgaagtgtgcaattgactaactattccaccttaaattaaaatatataagattattagttatctaatatttaagtaactcatctcacatgttttactttaaattaaatatataataaaaactgatattaaattataccactataacattatttcatatgaaaaaccactaatcctatattgcaattatcaatgacttttattaataagcatattaataaatattattattgggtacgagtgtcaccactttttagttatggctctgcatataattgcataataatattttttttaaaattattatattaaattatataggatttaatacttaattgtactattaataatccaacacttaaataagtattaggcacaatactactttttaacatttatctctttatcaatgacaacaatgctatctcaaaacaaaaaaaaaatggtcaaagcaaaccccaacttctaatttattcaaaagtttatatttatgttaatacttttattaagaaaaactgcctaaaataatttgcactgtagataataacattcaaaaactctatttcatataagggtaaaataaataaacatatttttgaacattatttcaagcacgttaaattattttaaattttttaaaaatttataaaatatcttaaataattactatcatgtaaactatagcataaaactaattaagat

SEQ ID NO: 99804 - DNA, 567 bp, Cannabis sativa
aaaaaaaaaaatcaaaatattagacaataaaatgtttgaatcgtagactatatattaaaatcgactctattaattgttccacatgcgtatctagatggaacccataattcgtctagtgacaatatatcaggagtcatatcgatccctagtaattaagtattcgatccactcctctttagtactgaaaatcaattaatgacatcgtcacagccgaccaatacgtataatatatgaaaaaataaatctatcatgatcgacaagctgcaataatgaatcaataaaatacaaaataaactaatttaatcccaattaatatatctgtctaatattgtttgttaatgaagtaggtttttctcatcgatctcttgcaaatattatattgctgggattttaacaacttttttactcaaaagttaaatatccaaagtatatatagtctaattaactgtacttttagtaataagtatagtaataagcatgttttaccattagaaatttttattatataatatatatcgatcaatagaactttagagtttaattttagacaatattatatatgaaaag

SEQ ID NO: 99805 - DNA, 2008 bp, Cannabis sativa
gtgtccccaaaccaagctgcctttgtcaaaggaaggcacatttccgaaaacactatgattgctcgggagattgttcattcaatgaagaggaaaagaggtaagaaggggttcaagcttattaaacttgaccttgaaaaggcgtatgacaagatggattggaagtttatcatcaaagtcctaaaccaattcggttttacaagtccctttacggatttgataaaggcttgcatctcagttgaggaaattaagctgctcttgaatggttctattgtgggaaaattctcccctgggagggggttaagacagggcgaccctctttctccatcgctatttatcattgctgcggaaaccttatctagacttcttttcgagaaggaaaaattggggttgctaaaaggcttcaaggtggcccgaaatggaactgccataaaccacctcatgttcgctgatgacataattctctttggggaagcgtctattcgggaggccaaggctttcttagactgtctgcagacctattgcagctggtcaggacaatcggttagtgcccaaaaatcagcgatttacttctctcaaggtgtgtctagaaggaaaacacaagccatatcgcagctgctgggtatgaaacaaatggggaggaatgcaacctacctaggattacctctctttaagtcatccaagagaacaaatgacactaagggtatcattgacaagacccttaaacgagttcaagggtggaaggcccgactactatctagtgttgggaaaacatgcctggtgaaatcagtgggttcaacgctctccaattatgtagcctcctctgatgttataccggtgtcggtggccaacaagatagataagatcctaagagacttttggtggggtgacacggaggagagacgtagactacacacggtggcttgggaaaaactctgtagcccaaaagtggtgggaggcctgggattccaatcaactgaggctatgaataaagtctacctcatgaaatgggcctgaagaatcctaactcaagatgactgtctctggagatgaattataaactgaaagtatatcaaaaatgagaacttcatggaggtggaagcaaaatcctcagactcggtgctatggaaagcaattctagaaataagacccctcctttggaagggggtgtgtcggaaaattggagatgggaactctacctctatctggttttacccttggggccctggtgaagccactcaaccgattcccactcgaaatgccactgatggcatcagtctagtaagcaacttcatcagcaataaccaatggaatagagccttaatccgaagttggttctgcaatgaagatgctaaaaggatcctgaacatatcccttcctaattcgcccagggaagatggttggctatggatgcttgaaccaaatggcatgttttctgttaagtcggcctaccgtatagtcaagaacatgcaagagaggacagactcagatgaaaagtggagaatagtgtggggagccaagatccataaccgtctaaaaattttctggtggaagatcttgtctcatagtcttctcacaaaggaaaaacttgcacacatattccctggtatcgatacaacgtgcccactatgctctgcagcatcagaaaactctctacacttgttatgggattgtgatttcgccaggggcatctggtttggatgcaattggcaaatgagaacatcaactattgtatacaaccctcaacatagacaaggtatacaacaattagactctttcttgggtggggcagccatcatatttgcaaacatatggagggtaaggaacaaactctgtcatgaagggaactcaactccaatctgcttagtgatcaacgggattaaccaacgattcaaggaaattgagttgctgaattccaacttaactgctacactccacgactcacagtggtttgctcctcccccaggttggataatttgtaattcagacatatctataggtaattcccaat

SEQ ID NO: 99806 - DNA, 1714 bp, Cannabis sativa
tcctgtttggtctagcttgatataattacttgagtggaaaacaattgggaagcctttgtttttttgttcccctttccatatgtgcattttttttccttataataattcttaattcttgtgctttttgcattttttccagctaatgttttgatgagtgtggttctctttgttggacgagtcttccatactcctgacatttttcactttacattgcaggttattaggagccatcccacagctcttcagctttaccaaaataagttgttagaatctgggcaagtgaacaaagaagacattgataagatatttcagaaagttacttcaatccttaatgaagaattcttggccagcaaagattatgttccacaaagaagagactggctctcgtcccattggtctggatttaagtctcctgaacaagtttcacgaatcaaaaacactgggtatgaaagtgcctttttttccagaaaattgcttacttggtttttggcttcatctgatgttttaaactctattctaatttacttgtatcttatcatgcagggtaaaaccagagattttgaagaatgttgggaaggcaatcacgttactcccagaaaattttaagcctcacagagcagtgaagaaagtttatgaactgcgtcatcaaatgattgaaacaggtgaaggcattgactgggcagttgctgaagcacttgcctttgctacattgatagtggaaggtaaccatgttcgcttgagtggtcaggatgttgaaagaggcacattcagtcatcggcattctgtagtccatgatcaggaaacaggggaaaagtactgccctctggatcatgttgttatgaatcaagatgaggaaaggttcacagtgagcaacaggtaatcatctctaattgtaccttttgctagtgtcttggctctccaaaccagctattttgaaaggtttattacaaaaatttcagctatataccatacttagcacattcagcttgatgatttgggccaatgaatataatctgcagattgtgcaaggttttcccttaatatttattattttcagtgtgaggatttggttatttggaagagattacaactttttcggaccaaattcatttttatgaccaattgtcaagatgatccttttaggtgcagtaaattttaattacgacccctcatcatagtactatcaattgagtgatgctatagagatacaatattttcacctaattttgcactattgatgtgttataatctagtataagcacttgtgtcctaactgaaaaaaatgcggaccccatcatagctcataacaaatactgtttgtcataaagtcataacaacgttcttctaacatatgtgatgtttcctgctttggctctgttgtggctgatgatgtctacgctactgttgattttgcatgttgacattatcataaaaacctttggattgttgtctactccaatacttatatagagtattctaattattgccttactattattgattgactcatgctcacgggaaatgtgaaatattattggattttttgtttgttaaaatctattagtggattattcagggtaccttgtcataatatgcatttagttttcagtaaccactggaatgtatttcctaaccactatactatttaatgtggttcttcaagggtgtttatgctgattagatataccatattttatatgctcttttccacgct

SEQ ID NO: 99807 - DNA, 978 bp, Cannabis sativa
ggaatctccatagccatttcatcaacaaactcttatttcgcatgtttaggcacccgattcccaggcccccttcctctcttggtctgcacacttcctcttaagcaaccaaatgttccctcctaaaaaatctccaccttcctagaaaaagtctctcatcattttctcaagtgtttggagtaccgcctttggtgctttgaataaagagaggtaatatttgggaagcgaagaaagaacttaatggattaatgtcaatctcctcccctagacaagaaggaacatttccatccgtccatcctcttagcacatttctccaagattggtctccataattcaattctattcggggatcccctcaacgacatttcgaggtatttcattggccactttcctatctcacagccaatagaatcagcacatcttaaaattacattctcatccatgcaaatacctaatagttggctcttactcatgttaactctcaagcctgatatcgcacagaaagcattgaccaccaaaaccatattatccaaagacgtctcatcattaacaaaaggtattgtgtcatctgcgaactgtaagtggcttacttgaatcttctcctttccgatcaggaatccaaataatttcccagactccgctgctttgtccaccattcttccaagtacatctgccaccagagtaaacaggaacggcgagaggggatcaccttgcctaagccccctagatcccaatatcttacctctcggttttccattaacgaatatggaaaaagaagttgaagagatgcatcccctaatccatttcctccacacttctccaaatcctttgcgttccagtactagatcgaggaaatcccactcaactctatcatatgccttttcgaagtctattttgaataccattccctctttgcttctacttctatattcttccaccgcttcattggcaatcaaaactgaatccaatatttgtctcccc

SEQ ID NO: 99808 - DNA, 1115 bp, Cannabis sativa
attatttgccattggtatacataattagataaaattaaattaattcgtccaacctagtaaattaatttttttaatgggtcaattttatatttattttcaaaacaaaaaaaataacaagttacataaatatgttttttttaaaaaaagagttaaatatgtatttattatacatgttgtgacaataaattcagtataaattccattattttgtgctaaacaagtaatttgcagtaataatctaagtaaaaacatcaacaattcaagctgaaaaaatataaataaatcacacaagagttcgaagaaaatataattttataatttgaatagtacaaaattatgagccaaaaaataatgtcttaaaacttgtttctttggattttatatagattatttgagtctacatccacttgtattcatttgaagatttcatgcaatggcaaaaatataacataatagattaatcaaacaaataatcaatttttttaaacaaaaataaaatatttagtatttttgctctccatttatttatttattatttattaataaaattctcggtgaatatttagagtttcttctcaaaaaataaaataaaatggaacgagagattatctggtgtggctcatctctttgaatttaagcgtacccataagagctctaaccctaaccttgctcacaaatattcaccaaaatcttttaaggcgggttggctccacctacgatggggtacacattacatgaataaccttgaaatggatgtcaagagtggttagactaatatattttgtcctcacatttaagaattatttaagagccacacagattcaaacttaagaccttcactttagaaaatcacttgggagttagcactttgatattagactattcacttagtaagtttgttcccaaactttaaacactactaaattatatctcttaaagctcgtttggtaggtcatataaaaattatatttgttaaatacgaagaaacgatatgtttgaataaaattttatttgtattaactattatgatcataaatcttaatgcaatatttgttaaaaaaaattacaataagaatcatagtacttaatatgtaaaaaatggtttgtattaattt

SEQ ID NO: 99809 - DNA, 1232 bp, Cannabis sativa
aactaagcggtctttacatttttataggctggaaaagcattccaacaagtcaacttgccccaccatcttcaccaaatatgtcccacacttccaagagtattggttcgtcaccactaggtttccactgaaaagggttccaaccttatccctggtcttttttactctggtaagcactccggtcatttttctttcttctcattcattttcttatgtgttacatccattattcttatggaagaggttctaaccttgcctccaatatagaacaaacgcctccaaccctagccttggtgattaaagaagtgcggtatcagaagattctcgcccaatgttctgcaggtggaaaatggtcactacaaagaatttccaaaaatacaggctcattattggaatatatagcattggaccattcatcaatcatgatagctctcgcgatcctccggaagtcaaagaagagcacatcgcgatggttgctgaggaaatgcaaaaggcagtgaagttggacagagtgtggttggatgattaggagtgagttgatctgaatctcaatagcaaggaggcaaaactggcggattgattcattgtagtggacaaaaatgagggcacttcgggagccagtaattttggaagaagtaaaaaaatattttcatctcgcttacgctccacgttttgataatatggcttatgtcgaccaaggaggctttgatgcttattttctaagtgtagatccatataggtatctaatagatgaatatcttgatagggtagttgagatcataaagagcttagagcacttcaaatactcatcctagtcttataagatagatccattcctcctcatgtcctatccaggttttgaggagtatggtagctttttggacaaggaggatgtatctttgtttgctcaggaaaaaccaaaatatagcaaagtcaacggttgcttctagactcgagtcttctctctgcttttaactaaccttgagtcagatatattcctttaattacatatgtgtctaacttttttttttttttgcattcttccattttgcaaaaactctctagactcatcaaatagggttgttagactcagtcatcgggaaaatcaatgataacatagccatgatcagtgccaaggctgcggcccaaacgcttgtcggtgcagctaaaggcaaaagcaaagcagtgggttcgtccaaattgaagacccaaagtttggcccttctggcttccac

SEQ ID NO: 99810 - DNA, 1360 bp, Cannabis sativa
ttggacttcatttttagatcacattagataaagggattaaagccttggcaaatacctctagaataggaaaataacagcaacacataaataaggatattgaacttatatgtttagttggggcaatgaaatgaaatgtaaaacaatctatcccaatgtgagaatgtattttccatcatttttggtggaataactattggaaagccatcccaacattcttcttgttcaaatatttccattatcccacctaagactgttcatacaatccactatccgaaatttcaaatcccaactaattcggaccaaattatttaatactcaactaaataaatcaggtgtcagtggtttagtcaatcaggactacttaaattctctagttcggtcacagttttagaatttttgcttgcggtgcaaatcaaccaaaccatctaattctttatatataatttgaatgattgatatttgggaacaatcttaagcataatattagtattgatttcatactacattttgaaaatatctttggtttattattaatgcattatgaactttgaaaattgaaaaaattagtataattacaaaatccaaaccaaaccaattcgttctgagtagattggtctgatttggttttgaattattcaaaaaccatagtactggtttgattggtttcatttacagtacagctccaaaccatagaaaaataacaacaatggcatggcaaatatgagtctattatctctattgaaacaattcatgacattcaatttcttcgtttaaatacctccaaacaccataatccactactaataatagaggaaaaaactaagcattaatacaagagaaatgttgtaatatcgctattggtacaactgttgatccaattccaaagacattgtaaaattgagaaaagaaaatggtagaaattaattaaagaaagaaagagtacctgcacgaagagcaggggtgtctttggatgaagctttgaaaagaacgaagttagggtcagaaggtgatgtgggaagataggaaccgacctcaacctctctggcagcagaagacgacggcgttttgaggtcgagaaaaacaggaagcaatgcgagccctttcaagaaatctcttctaagagtagtaaaagtagtagtcttttgattgtgagggaattggggttggggagaatgagaagataaggaaagtgttggtggtggtgattttgaagtggaagaagagtgatgatgatgatgagtagtaacaatggagtggggaggaagaggaagaagacggcttagaggagtagtagccatttttatttttttttatattagaatatgatttatggatggagaaaagagtttggtgtttattt

SEQ ID NO: 99811 - DNA, 6413 bp, Cannabis sativa
  modified_base (32)..(37): a, c, t, g, unknown or other
  modified_base (2848)..(2849): a, c, t, g, unknown or other
caccaaagttcaataatgggattacaaagttnnnnnntagtaaaactagaggctcacaacaacatcaagattaaacaatcttggattactaatacaatcatcatcattatcatcatctcaaaaaatagatacacaaacagaaaaagtttggttctcaccaagtaggtattgtagaagagcaccttagacagggcaattgccaaatcgaaaccgttggatttgaagagcaccttgcaaggattcaccatcaaaaatttaagctaaaatgatgagaatcaaccacttgatcttcaatgcaaaatggtaaaacctctttctctctttagctttctttctctaattttcctcactttttctttccttttctttctgctcacgataccacatgctactttccccttttttcttttaattatttcaattaagatgggctatagcccttattagtccaagcccaacaaataaggggtagacccaacacataaaaagaaacatttcaagaaaaaagacatgtaaacaatatttgagcagaaacaactaaaaccatcacacgatttcacaaaataataataaatttattccctcagagccttccttctctaggaaagggaagcagaattaagtttactttagaactccaaattatgcatgataactaaaacattctaaggttagtcacctaaatttatttataaatataatcacaactactttactctatgtttcaagcattccactgaaaaggttttaaatatgaataacactaaacgaagagacaaattaaattataaaaatgaacacaatcagcaactcatccatgctcttaattctaattacaaaatttcccatatatgtgctatgtaactctattactaaaatagactcataatccccttcactatattactccaaaattgtaaaattagtaatcatatcaacattaagcaccaaaaatacacatcactcactcaaaatatttaggcactatattgttttaaattgtaaaatcagtactaattttatagatcatctttgcattagttttttgttataaaaagattgaggaagcaaaaccatagatgtagcacttcgggtacgttctattaattggctagaatttaatcttttctaaaaaaatgaaccaaagtttgtgttataaattcaacagtgaacacctagaaatcagttcatattattcaaatattgagaatgacaaaacacaaacatgaaaaaagactctgcgatcaaaatgctttaagcgtatcaaattgcggtgttaatatttttagaatagacaaagatcgacaaaaatacagaatatattgatacattgaactcatatagcaagaaaacaacatcgatcgcagatctcatcaaacgataaattgacacccaaaccttagtgatctacataattccacacatttgggatctcacacgatacaaaaacaaaaaacaaatcaccacaaatctaatccagcaataattttaacatcaacaacatatcaaatgaaattaagacagtagatctgagagaatcgtacctacatattacacttgacaaggtcaagatgagtaatagccatgtgagtgagtccacagctaaggattccactggcagtacaagcggtgtagaaagcgggagagtacatctcgatcttcctaccagacttagctggagaaggaacaacgaaatctttccttggagcaacagcagcagcttcgacatcgaaagctgatggtgaaacggtggtgataggacgagcctggaggattctcacgatggccatggccttagtggaggtggaagagtgtaggtagctatggattatagattgatgtgaggattaatcggcgaacgaagagaggtgacgattttaagctctggttcgaaatggagaagaagaagaagatttggtggcggtgctagggttttgcaatgggtattttaaacactcaaaatgagtcaagtttattactctgattaaaaaaattggggttattacaaaaattaaattatttactttggtggatattagttgtaaattttttaacctctgtttacaaccgaagccaaagaaatcgacatcttttttccactgaagcaaaatgtaaaagacaatttttagattttacacttttttcctcagttcctcttttagagtcacgctaattattttcttttagcttcggttatccactgaagcataaaatatctacctattttattttgcctcggccaaccattttggtgagacgatttaatgtgtgtacctgattttatgatatttttgagaaaattattgttgaaaatttgttgtatagtataatcagttttgatttcgatttgtcttcaagctctgttttcttgtctaagcaatcatgtttgcattattttgcaagttcttgtcgctgaagagcatgattgggaggaaatgctgaggtcaccgaagctagagaagatgatagccgatggtcgttttcactcgacatcatcggtagcagttaataatggtggaaaaacaagagaagaagaattattttatgattttttgaaatcaaatctcatagagataattgcagatgaaagagacatcgttgatgagagtgattcgcagaagaagattgtcactttgaggagtgattcgtggagagaattttggagagagattagattctgttatgtttagaaaattatgagttttttttaaggtaaatttattgggataagttgaaaaatacctctttttttatccattaataaaaaatatcctcatattatattttattaaaatataactacttttttgagtgagttacccaatatataccctcactctctacttanntctagcatataatttacattaacttaaggagtctaatctataaaagtgggtatatcttaaagaatatgaaaatagaggtaaaaattaaaacaagtaaagtaaagtgggtataaaatataatttcctcaaatttatttatataagatttaattttccacattttgatcattaaatattttctattcgcatattttttctaattacttttttttccataaaaaagtaaactacaacttaaattctcatatttataaaatttccccttaagcatgtgtacaaacaaatgattgaatgtgacagtaatatgatggaactcgacatttgactcgaaaatgagcaaatcagactgccaacctgacccgaaaataggtctttaaccaggctaaatattaatgggaaaaaaaaaatatatatataggattttaggtaaaaatttacaattttattgccagacacaaatttttacaaaaatattatctttttataaaacaaccaaaataacaaaacagaataattaaaaacaacagtggaacaactaaaaaacaacaatgaaaacttaacacagtacacagtataaaaaatacacaatatttatttaaaaaatataatatttaaaaaaaaaaaatttgccccaaacgaaaaaagaaaaaagtgagaaattgtgtaagaaaccccaaatattaacccaatcaacccaatccgagcctgacccagccctttataaaaaagtaaaataatttgggctttacacacatatttgggcatgctactttcttccccaaacactattaaacctattcccatgaaatgaaacttgcataccaaacggcccctaacagccagccctaacccagtccgattgactctccctcccagacgcaaccattctcaagctccggtggacttcaagcaaacgctgctctgctccggaggtaaagtgtaaccatggaccaagctttttttttttaatgaaattatttctctcttctcaccttattctcattcagtgttactattcttttttttttttatttgcttgagtatttcaatctccatatatattctgatttgtatctttatattaataaaatttgatattgatattatgaataactgatactaatttagtaatttttgatactgattcaatttattcttatttgtttttttgtttcaatatttattcttatgtttgatctccataattctgttttttttttttgttagttgttactatatattaatgattctttgaattaataataaaacagtaatttatataatcagtgaatatagtctatgatactaaatttatagtatgatttggttttgttcatttactaccgttttgatattgtaatttgctgagtttgtatttttttcctagtatgatcgacaagttctttgtaatgttaatatctaagtctacctgacataatggtatgaattggtaaaactccctactctacctaagacacacaacatcttgcaatcaagtaatagtctagatcttttttcttatattctacaaatactgttcttcttctcctttcactttttaactaaattgcctgaaaattcttcaatgttatatatttttgtgttattttcctaagacatgtcttatatactctctgtaagtgttagttatcattattatttaatttttaagtgggtttgatatgatttactttgttacaattttgtttgaatcttagtttgggtacttgttgataaatcaaatattcaagtcctatgctagtcaattttaaagcattagatttacttgatacatttgtttttcagaaactgaatcgattgatattgataatatgcatgtattatagctttatattttgtgtttgacattggtgtgttttgcaattttgtattttatattttggattgagattgatgaaagagctttgttttctcttccttggtttgcttcctttatagtctcaattctacctttgtacaagtggtagtagaaaagatgtggagactcatacccaaaaagttgtactggctttcaactagaagcgccacgcccaaccctatagttgatgctcgcacaagcattaagtattgcagtacacaatcccagagctcggttaaagaaatttgcaacattctcacatagaagaactggaagttccttatggactcatcatacatacccaataagctaaacccaaaactaattcgctctgttattcgccataataggttggttgagccgaaacgcctccttgacttttttatacggtctgaaaccaaagagggtacttcacaggatttggaggtgttgtctcttctttccatttcccttagcacctcaggtttttatttgccttcctgtgatattatcgatcgtatgattaagcaatggaagtcccttttgatattttgagctgtgttgctaggtgttttagagaatgtgctggctctagacctgtcattttgatatgttggttgataggtatatgaaattgggtttgtttgatgaagttgtggatgtgtttttgagtctgaaaagtgttgagttcttgcctagtttgccttcatgcaatttattgctgaaagagttattgaggactaccaatatgtgattgttttggaaggtccatgatgggatgttgaagatgaagatatcctctgatgtgtttacttattctaatgttattgaggcttattttagggctagtgatgttgatggggctaaaggggccttcttggaaatggatgaaaagggttgcagcccaaatggggttacatacaacatgatgattagtggtttatgcagagctgtgcttgttggtgaagcggttgaaatgaagaagtcaatggctgaaaagggtttagttcctgacaagtatacttatgtaacccttattaatggatattgtgggaaaaggaaactggtagttgcaagtaagttgttaagggaaattgttaatgcatgattgaagccttatgaaattgcctacaatccactaattgatgggtttatgaaaattggtaatgtggaagaggcttgtaggattaaagatgaaatggttaaatatggtataaggttaggtcttatcaattacaatactattccaaatggagtttgtaaggccgacttgatgtccaaggctagagatattgttgatgagatgattaaaatgggtagcataccagattctagaacttatacctcgttgattgagggctactccgggaacgtgatattgtcaatgcttttaaaatatttgatgagatgaagaagaaaaacttggcacctacaattgtaacatacagaatattaattaatgggttatgtcgtggtcgaaatattgatcaagctaatgattttctcaaggaaatggtttcatttgggttgaaaacaaattccgttatctataatactcttatttcagcccaagcaaaggcaggtaaatttgaagaagcaagagggcttttagataagatgaaggaacaagggattttaccgaatgtattttgctacaattcttcaataatgggtttgtgcagagaaaataagttggaagcagctag

SEQ ID NO: 99812 - DNA, 1832 bp, Cannabis sativa
ttaaatagataaaattatcatttatgaacgaacttagaatgaaaaatagtatttgtaaataaaaagaaagataagtttcaataaaatggaaaaattaaaacctattgggaccacatataatttcaaccaacatagtttaaataaggccattttttttattctatttgaaattctaaacctaaccctaaaattacaatataaataaaatataatagctcttattttgataacattttgactaactttttcagacaaaatagaaaataagacaaagctctcataatttcaaattcccctcttattcttcttgtaattttcgagtcttgagtgattgagtaattgcccacataaggcaatattcaaaatagtgtgaaaagttgtgtcgtctttttgttacttgaaggagaatccaggttcagagatcatactctgtaacagaaaggatcaaaggttagagatttgaacgaaatgagtcatattattctgatgtcattaatgtaagattttctaaacctttatgtgtttaatttattattttgggatattcatatttaggatattagattatagaattataatcaacatacttattagtaaatctagattcttgtaaaatatttctaacatgtcagtcttctctctcgtccactctttctcgtaacttctttattattatttttgatttggagtttatgtatttttgagatttttgtatttcacagatcatcggagatctcaaggttgtggtttcgacagaaccgtggcccagatctcgactctttcgggctctttaggccaaataaaattcccatcttgagtgctcgtcggagaagacgaaggatcatgtgatgaatgaaatgctagaggggacggttttacaccgtcggctatgctattccctgactattttcaaccgtcgcctattctacccaatattcgtgacactcgtataggcaatggttttatggaccgacatgaattctttacctgatagtgtaaaattgtcaaaaattttagatttttagtagtgctaacacttggcctttgtccttctaggatcactaagactagcctatgatctataccataatggtattatatacctcctcactagagaaaagaaagctccattttaagattgcaaaagtaacaatcaaggtgctcaaacaccagttgttattcatccctacaatcaacccaggtgaaaaaatctcatttgcaatgcagatctctcatagtgcaatcttcaattattgatctgaacaccatcatttgcgaattggaccttatagccccactccattttttctataaaataaaatttcattgaagtcactcctaactataaccacagaagattctttaatttcagtatattatacagtctgcatagtagatctcatgaacaatctcgcaatgttatcacaagtagaaattagacaatctacatgaccattcgagtaagatagaagattcacaacaactgggtccttctaaaacgagatcaaactgccactcctacccgcattttaaccacaatcatactaagagtgtaataaattacgcaatattgtggagtgacttgcttaatttttgattcacaaatgaacaataaagaatgatccttttctaccattagccttcttacattcctaaacgccttgaagtctaaaattccatattatacaagtccatttttttatgctatatttatagtagtgtgaattttctatgtttatacataaaacttaacaaagaaagaaaaaatgactttttttggagaaaaaatgactatattatatacgagaatgttgacaatcatggggttccat

SEQ ID NO: 99813 - DNA, 1240 bp, Cannabis sativa
atattaatatttatatatattataaaactaaccctactaataaacattattcttatattcttaaaatattatgttaaattaacaaaaaccgttaaataattacattttatatataaaagatattataaaaaagttatatgtacaattaatattttaatgtaaaaaatagtaatttaaaaatttaatgcatatgatataaatatattttaaaatttaataggttaaatttgtattcaatttttgtgtaagggaaatataatctaaaacaaatttatatacaatttttttcttccttttgaatttgttattttattaattttaatttgttgttagagacataaaacaacaataatttatttaattctgttgttagttttgtaaaaaaaaaatatttttttgataaatattaaataattcaacattagaaagcaactaatctaaaataatcaattcaatctgcacttttactgattgaatttgggttatggtgtggattgaattggatccaaaatataaaatccgcacttagtgcgaactaaattggatgaacacccctatgtgcttcaccttaaaaatgttgttttttttttgttttctacggtttatcacctgtcaagaagtagtggttcatttggcattcaaaatcttataatctaagtgttaattaggggtcgaaaaacggatttgggcactgcacatgaacatgatatgaattttacgggttacggtcagaaaaattagacgcggatcgaaaacatgtcgacatgactagacacaaaataagaacaggtcaaatacgatacgacccacttaacacgaatttgacacatttgatatggttttttaactaaaataaataataaattattgtttttttttaaaaaaataagacttcatttttattaaatcagagcaaattactcataatgatagaaataagtgcatggacattcctaaaactaaactcaagatcagcaagacaataagaatgttgcgctacaaaatgcactgctcaattagcatatcgcttaataaacagtaaataaacattactcaaagactttaaaagtaacttacaatcttcaacaataagtcaaaaacgaggtaacatcgctatagagttacggatagcttgtatgaccacaaggctatctgattccaccactacttatgagaattgaaacctcttcaacaagcttagaccctcacttattccaatgatctcgatcaaatggggaga

SEQ ID NO: 99814 - DNA, 571 bp, Cannabis sativa
cagccactttttggaatagtaaccaagcttccttttcatgtagctcctctaagtgatatagttggttcttaccagtaatctctgcaacctttgtatgacgagtagttacaataattctacttccatttgcaccaactgatagtatctcacttgttagcacctgttcggaaaaataataaactttaagcgcagcaaaataataaaaaagtgaaataaataaattttactcagtatacactatctcaatttacttcttccttactctgattacactacactcacactcactcttttttcacacacccactgaccacacactcctctctctctcacacacatacaagaacaccatagtattatgaatattgtcccacatggaataaattgtaaagtattgaaccatatatataagaacatggactactctactcatcactaattggttttgagatagaacccccataattctcatcagtgatggacctaggatttttattttatgggggcttatttatcataaaaaaatatttatagctacattataatcactcttactaaatttatctaattt

SEQ ID NO: 99815 - DNA, 1580 bp, Cannabis sativa
acctgtagatggttcatcaagtatgactataggaggatctccaatcattgcgatcgcaacagacaatttacgcttgtttcctccacttagagaaaatgatggtttgttagcatgcttcaacaagtcaaactccactaacttttccattacaacctgtgcagggtagcacataataagagtcaattatttggtcattacaagtacgccatagtgaagaaagctaatgttcagtgtaaaacttaatttcaatgcatcaattctagactaaatatgcactgtaaaaaaacttaatagcttaaaggaatttaaataatcaaatttcttgcggtgtttgtaacagaaagcagccacactttacaaatgtatagccaggcaataaaaaagatgagaaacccaagttaactggatagaaacgttgagactgaacacaatatctagtttaacaattttgtagcaacaacacgaaagaacaaaaatttgagatgaaaacatacatcatctatacgataatctgacactccttttaattttgcataaagctcaagatgctcttggacattttaaaattctagcaaaggcatcaaactgtgggcaaaacccaatctgaaaatgaataacaaaaaataatcagctttcaacatttaaaaatattttgagcaccaaaaaaaaatatatgacaacatacctgctgacgagctgcctttggattggtgcgaatacttttcccaaatatgtaagctgatccatctgttgtagattcctctcctacagtaaaattgactatggtttcagacacaagcatagtatagaagcctgattgatagagtattgggacacaagaattattcatactggtaaccttttgaaatcgttgtagtattcttttaatacttggaaacacacaaaaagatagcattgccaccaatgacaaaacaatagaattagattgcacagttcagacatttcaaataacaagtatgaatctcttggttaaaaactaatgcataccagatagcattgacagagtggttgtctttcctgctccatttgtgcctaaaaagccaaaacattccccctcttgaactgagaaagtcagagactgcactgccacttttcctccaggatacacctgaaatttccaacatatttaaagattaaagaaacagattgtggaggggtccaaaccaatagaactcactttgagtttcatgctatttttttcctttcttttttctctttctgttagggacacccaattctctacttacttgtactcttctttattcttaacaaaagttttgtttctataagagaaaagatataaagctcagtttgagaactatccaaatactgtgaagacatacctttcaaagattacgcaagtaaatgatagcattctcaacggaacctgaaagtactctgtttctttccattgccacatctgagtcttcatcgaagtcaagagcaaccttttctgcagaggatcccaaaagtggttctaaatgaggagaaccatcacgtcggaaactttttatactccaccattccttgtaggaaggcaagagttcaagcccaagtgt

SEQ ID NO: 99816 - DNA, 1454 bp, Cannabis sativa
taactaattaatatagttttatcgaataaaattaaataattaaatactatttaaatacacaattcataattgttataatgttcaaaataatgattttcacaaatttattactttttcccttaagaattatttctcatagaaattaattcttactcatatttcctcatcaaattaaactttcccctataaaatgtgcacagatgtgacttagaaccataaaattatatttcgaagcttcaataaatacttagttattatcgatctcgtcaatagaataatttaatttattaatttattattattgctctataaatatagaaatacactctttcacaatataaaattatatttatagaattcttactggtaatccattgaaataattattataagtagtttgccctccaattattagttcataattagagttggtccaattactattttacccttcttattatctcttgattccttttgtatcattaattcaatgtgaatagttaatctataacttattatagatttagatccaattgttaacactcccaaaattaacactataaggaaactaatatttgatcctttcgaaagcttgaattccattattgtacaacatgttcccagctactcatattattaagctctaaaaataagaatcatcttctctgagaaactttaacgagtgaatcaaaaaactcaatgaagacaaataggaattcgtgtatactcaggattcaaactgatctactaataatcatcattatgatataaataactctttcatgataaatgacacgttaatgtgatatgttattacatatcgggtcagtcatgtataatcaaattataaacaacacatttactacatttctatccacatatgtaatctaaatcaaaatcacacacactagagtatattgtatagtaaactactcttagtagttctataataaagattcatttactttagtacactaccaactaattttatttatattgtacaatattaatcctcttgtacatccttacaagattttacattctccatatgaataaacaattctcttgtacatccattttaccatacttgaactctattttctcaactttttcaagaatttatcgccctgaaagtgggaaaggagaaacttctcattctacagtaccgtcaaatgcttgtttttttttaattctatcagtgtgacttaggggaaaatatcgtctatggtccatataacacattttgcatccatttgacaactaacgagctcgtgtattggtacaataaataggacaacttgagtagccttttgtgctcagccctgataaattactatacgcaggaaaattattaacaatccacaacagcaaaacctttaaattgaaaacttctttcttaaaaccatcctatgcatcaacaccattttctacaactctttcaagtcatcaactaa

SEQ ID NO: 99817 - DNA, 721 bp, Cannabis sativa
aacgtcaacataaatttaatgtatatagcattgctagtaaaaataaaaagtgcatgtaattttcatgtttatctaacattactcttttaataatagtgatatactgacatgagatatattgggatgtaagtttgatttgaaaaattaattgctcaacatttataattatatttgggtatacaatagcattttaagatgcaaactcatttaacaaataatttatcattgataatcatattaggaatttttttaataacatatccctgttgttgcattgtaattagtgaaaaactatattactcattttttagcaaaacgagctttagatttagatgaggttcgggtgtggtagccgagcttgcccactgatttagctatttaaatttgcttatcttttgtatctcattttttttttggcttgatgtgttttaatggaattcctcagtttccttaaaaaaataaatatcattgatgttaattaattaactaaatatttaaaaaaatataaatataaatagcaatagtttaattaaaacgatattatgaatattaaaattaatgactaatgttaaaagtgtaaaaagtatcaaatttatatatgctaaaatataacgatattacttatttgacactctactaaaaatgcgctgaaatattatcatcttttacagtaaatttttttcatatgtggatcatatgcagatcggttattaaagtagtt

SEQ ID NO: 99818 - DNA, 682 bp, Cannabis sativa
taggtgtctataaaagttaataccacatataattttacataaaattattgcataaaatacaatttaatataatattatataatacaatgcagtgtaataccgcatatcaaaccaaccttttattttttttgaaacaaatttaattcaagatttatacaatctattagaaatggtctaatactacactaatatatcactttataattggttaattattatttttattatttattagcttgtacacaaaaccatataaggttttttttttttctcaaaacaataataataaaaaataataaagcatactaccttcgagactcctcctcgcctattccagactcaactagattttccttcattttatacaccaaaagcacgaacgatctagaaattaaatcaaacacaccacccatatctatatataacccccctgatccctatacattactccatcaacataccaacaatcaacaaatctcaaagcaacaatttttactcatccatatatacaatacaacctctctctatagttgcctcggtttcctacaagccaaacaaacaccccaatcaacactaactaaaatggccaaaccaataatgaaactccccattgcacttctgattctcctaatcatcacagtccaatccactactgccctagttccctacacgggaggatcgc

SEQ ID NO: 99819 - DNA, 2918 bp, Cannabis sativa
  modified_base (328)..(338): a, c, t, g, unknown or other
  modified_base (2615)..(2631): a, c, t, g, unknown or other
gagatattcggggctgacggtggcatcatgggagaagagaatcccaatgaaggagccttgcctctcgtgatgggttgaggtagatcagtagcggttggcatagactgagactgagctaggggcgaagtagactgggaagccactattttcaattgacgaggagatagagactactgttggcatgacagaggtgcttgtccagacgatgagtgtggtaggtgttgttgttgtggttattagtgttgctagtgttgttgttgttgttgcagttgtttgtgttgttgttgttgttgcggttgttagtgttactgttgttgttgttgttgtnnnnnnnnnnnttgttgttgttgttgtagttgttggtgttgttgttgttattgcggttgttgttgttggtgttgttgttgttgttgttgttgtgatggctgggactattgctgtggttgtgacaatgacgggtcggtcggtggtaccttagtcaccctaggctctgagaccaaagatttggccctcttaacgatgggatcaggagaagaccttgatcccttacgctttgacttggtcggggtcccctttgggggaaagacgagtgtgtctaaactatcattagaaccccccgcatttggtatagtgtccgggattgattctcctatagggggaacaacttaagaagattattctcctagagtaataagaacttcatgagatttctaagagttatcagacctcttccccccactacctaacgctgaatgtccaagtgtgttacgcccagtcttggtggaagaagaaatctcccaaacgtccgacgataaggaagtcaatgggggaggtggtttgtgagtccgggaagccctggtcttggtcttcttcttcccctttccatgggatttcctagcctcgtccatagcggccacaacttggttgttccatgactttaacatctcagattttggtgtgtctacacaacaaggcaacaatgtgggtataaaacaaaagccatggcaagtcatgcaatcatgataaacaataacaatggcaagacagaaaatctagtgaggaagcttatgcgtgggtgcaaccattcagtgaagtgctataaggttgcccccacgcaaaggctaaaatgctcctacgacccatgaagctgccatattcctcaaattcaagcagggacataaccatcaaaggatcaactctaccgatgtccgaaggattccctaagttactagggctcctaactattaggtctactctgtatatataatccttcatggggaacttatgacggtttatgcctagaaaatacttgtcaaatcctccctgatttctctgggacacgcgactcaggggtacagaagatataaaagggcccattacctcttcctgatgtactggcacccggtgcccccatgtcagaatatgcagcagcacatctctctgagatttcttcttcctcagcctgaggatcaggatggcgtgacatccactcggagtgcaggacgtggtcatttttagccgcattggtgattataatagccaaattggtggcaataacgtccttcacttccttgggaggttgacgctgtccccgaagactgatagtgtctatactctagaacttggtgatcaggcccgacatacaaagaagctcggttgtcactaagcctttgaccttcaattgctcccctgagaaggccctgaattcgccctctttcctggctatctcttccatattgacactctgagggggaagttcagctgaaaattaaaaaatgttaattcaaacacaggaattgacgaagtttgaaaataaacaaagcttggaatgaattgctaaaatacctgggagttggaagctcaactgaagggatggcaccctgctggtaggaaacctggaggaaaagaaccaatattcttgaagatcgtgggtgcgatctgtttgacaaatagggcagtaggagtccggacgcttatgtaaagacatgagagctcaatatccagagttgtttaagttagattttgaggacgaaatccttttaagggggataattgtaaagaccgcttagctttattttggaaattagcagataattagggtttaattatggaaattattttttaattttgatttatttatttatgatgatttatttgaattcagaattcattttatatgtcatatatagaaatttcatagctttgcatgttttgtgcccgacaacattggaacgcggtgttaggttattagaatcacatactagtatttttagtatagcgggacaatatagttagacactgggaatgtcgggaatagtcgagatattagaatttcccaaaatacccctaagtgattttatgcgggttttgtgtgggtaagggcattttggtctttttgcctatattgtgttttgtactttagtggacttagtattaagtcaataatctgattttagttttaaaagggctaagatttattcagtacaacaaggttatgtctcattcattcaagaaattagaaaaaagaagaaaaaagccactctctttgaaactctctctctctctctctctgtctctgtctctgtctctgtctctatatctctctctctctctcnnnnnnnnnnnnnnnnnctctctctctctctctcgaaatccctagaaccaactagggtttggtctgttttcttcttctcaaatcatcaagttgcagcaagtttaggtcgtctcaagctttaggtaagctcttatcaaccttctctatagttttcttgaattttaagaaagggaattttgcatgaatttagatatttgttgttgttattcctgttgttgtttgaagttggtttctgaaattaaaatatgtttatatgtgttgatttgaagtggttttaggggctgttgtgtggattgagcaagct

SEQ ID NO: 99820 - DNA, 679 bp, Cannabis sativa
gtttttttatatttttatagtaaagtgtaaaaatattgaaaaaaaaaattaaatgtaaaattgtaaatattttgccaaaaaataacagtttgtaataattaattttggctaaaacacatggttttattttatgggtgttgatgttgacataaatgttgtccagtactggcaatacctacatttttttcctctaatatcagttctcgtttttttattaggagaaatgaggtaatgccacgtgtatggtaaacggtgtcgtactgaccgatgtgtggaaaaagtgggattaagtgattagtgttgtgacttgtgagaacgggcaaagtagatttagggttcgtggcactgtaccgttgctgactttttgaccttcacttcaccatgcgttactgtttcgtacacattgttttttcttttgaacagtttcgtacgcattgttgtttagttaccttttcttttttaaaaaataaaaaataaaatttaataataaatgatttttttttttttgttaatctgttactttttattgcaacaacaatttttcacctcttaacaaattccaacaataattttgttattatttaagtaatttgcagtataaatacttaaaattgttaagtaaattgtcacgtggtaattcttaattggtccaagtcattaaatttttatttttaaaaaa

SEQ ID NO: 99821 - DNA, 1153 bp, Cannabis sativa
agggcataaaacccaacacgcatgtcattggccaaagatacttcaccgacatctttagggttgtattatattaaatattaaataatattatgtttggataaaataatataatgtattaatttttacgaccaaaaattttaatacaatgtaagttgtattatttaacataacaaatagtctgtattaacttgtattataatatttacaaaaagtccaggttcaaccccaatcttcaacccatatcctgagacctggacctaaactagaaccctgacccgaacgcggatctggaactcgacccgaacccagatctgggactcgacccaaacacggacctggacccagatttgaacctgaacccagacccgagatccggatccaaacctgaacccgacttggactcgagacccgacttgagacccaaactcgatccgaacccagatctgggactcaacccaaacccaaacccagatccaagactgggactggactcaagacctggatccaaactcgaacccaacccggactccggccccgactcgagaccaatacccaactcgagacccgaacccagtctcaagacccggacttggacccgggatctaggaccttacccgagacctggacctggaccccaaactcggacccaggacctggaccgaacacggacccgaacccagacctgacccaagactcggaccccacactcacacccgaaccaagaccaaactcaaacccgcacccgcactcagacccaaaccccaaacctagatgggacccaagtcctgaacgggacataacagtacccgggacctggacccagatctgacccaagaccaaacccaaatcccaaaccaatccaggatagaacccgaccccaaactcgagcccatacctgacctgatgagaacatgaatttaataagcataggagatcaaatctaaaagtaaaaaacaagtgataagagtgaattcacatgagatatcataggagatcaaatttatacatgaaaaataaatgataagagtgaattttgaaaatttattatgttccaagtttgtatctgttgggattttatgccctaaataaaaccctttacaatctaatctgatttgtcaacaataaaagattagaaatcatttatgcttacatg

SEQ ID NO: 99822 - DNA, 3700 bp, Cannabis sativa
gtttttagctacaccatcagccacggcattacaactacgcttaataaaggaaaaacaacataaacgaaactttttagccaagtttaaagataaataaaacacactagctactctccagtcaggaagagaatttgatgacaaagcctgtactgcaattttagaatctgaaagaacacacacttccttccaccctgcatcataagccctgtttagagcaagtattatagctgagaattcagcttccaaagtcgagtccacccgtaacttttgcgcattgacaaaccagcagcctgttgacacatccacagttatagcagctacaccagcagtacccttcacccacgatgcatcagtgaagacaaaattgcaagaaccagtagggaagttgttgtacatcgagtcactgaactctcccgatccctgcctttccaaaccatctgaaattccaccattgcgactgggagttgcagacatcgcatgcctcagctcctctgccttcttttcgatttttgccaaaaccatttgcacattaacaacttggcccttaatacagaaggaatttctctggtgccaaatctcggtcatgatgcagccaaaataacttatcaattccttcctatcagtatcccccagtgtatcgattaaggctttaaacatgctaatcatattatcagatggaatatcatccaatttcagagccaaacgaaatccaaaccatactgctttcgaaaaactacatttccagagaatatgacaagcactttcatcctccacaccacataagttacaagttttatcctgcaaaaaatgaagacgattctttgtaggaatagcctcggtcaaagccctccataagaagactgaaatcctgggatgaatgcccgcctcccaaatccatttccaaacttcctcttctggtgcaaatctgtccatagttgcagaaatgtaggcagcacgcacagagaacttccctgctggattttgtttccaaaagacttgatccttgtgaggaaaaggaattctaggaatattaatgatacgatttcctaattcctccccaaaaatctggaaaataacctcaggattccattcatttcccagggaaacatcccccaaagtttgtgttgtatagccttttcctctcaaactatccattagaactacaaaatctgagtagtctaaccaagggatccatggttgactctaaaaattaattgtagaacttgatgcagcaattgacagcgagcctttgagaatcgtagatctagtatccagaatgcacttccattgatagaaatcattacttttttgcttgacacaccaaaaactatcattgttgcaatactttcccagtaaacaagagacccacggtttgtcctccttagttgcaagactccaagccaattttgataaaagcgcttggttcatatcttcgcatttcctcaaacccagacctcctgaactctttggttgacagattttatcccacgctttaaaggccatgtatctgctcttgtcgacatttgccagccaccaaaacttcctcatcagagaatctaaatcacgacaagtagacaatgggatctttgaagtggacatatcatagatgggcattgctgaagtcactgactttataagagttaattgccctgcttgagacaatagcttcaccttccaaccttccaatttcttcatcagattttccttgagttttaaataatcctcccttttccttcttttaaaaataaaagggtttcccaagtgtctttcttccccactcacttgagcaatattcaaagcttttagcaagctatcttttttgctgctacagagattactagagaataggacacttgattttggtttgctacaagtttggccggaccatctctcataggttgatatacactcgattaacgtccttgcttcattttcatttgctcgagcaaagagaatcgtgtcgtcggcaaacatgagatgtgcaactggaggggcaacatgagcgatctttataccatggactgcgcctctttcttcagctctccgaatgagttttgataaaacctcctgacacagaagaaataaaaagggggacatggggtctccttgtcgtaaacctctctgcgggattatctttttaagaggactgccattcaatagtactgaataggaaacacttgtgacacaagacatcaaaagcttcctactcctctcgtcaaaaccatttgcctcgaggactctgtcaagaaatgtccattccattttatcatatgccttctgcatatcgagttttactgccataagccctcccttacctttcttgtgtcgaatcttgtgaattatctcctgagtgagtatagatgactctccaatccacctaccaggaataaaggcggattggaaaggggagatcagatcattcatgagtggtctcaatctattagataagatttttgcaataaccttataggagaaattgcacaaacttatcggtctaaattgatccatactcatagggaattccacttttggaatgagacaaatgaaggtattgttgagtttaggattcatgactcccatagtgaagaattcctggactgaggctactatatttgctcccacgatatcccaatatttcctaaaaaagcaacctgaaaacccgtctggtcccggggccttgaggggatgtaaattaaaaactgcttccttgatttctatatccgaagggaccttgacaaagttaacatttgcattgttgtcaacccttttaatgaacagctcttcaaaaactccatcaatgcttggcctgcccgaagtaaaaagctccttaaaatgatgattgattacttctgcaacatgttttctgtccttccatactttaccacaactatccttaatcgcccaaatattattccttcgtttccttatgactgttgcggcatgaaaaaacctggtatttcgatctcccaatgacagccaagtctccctcaacttctgtctccacatgctctcgagttttgaccaagaggcagccatctttgcatgaatagctaactcttcttccctgaaaacttccggccacggctggttctggatccaagccaatctactctccatctttttaatgtcactctcatttgcttctctgtgagtcttcttccaagcttgtaaagcaactttagcattatggacattacggattagagaattagtagcattatcgcccgaataaagccatgttttttcaatttcctgcttacaagattcttcccacgaccaagcttcatagaatcgaaatggaatgtaaccccttgctgcaaataagtgtgaatcaaaaataataggggcgtgatccgagatagcaataggcaaatttctaacccctactgatgcaaattccaatatccaatccggggagcataaagcccgatcaagtctctctctaataagtcccccggagaacctattattttgccaagtaaatttatttcctatgaattgcaaatctattactcccgtgctgtccatgaaatttctcagccatttggtatccatagaagacacttttctgccacttactttttcctcttgactacctgattagtggttaaaaatacacttttatttattttaaatgataaaataaattgagttttaattgatattttcatgaaattattgtaatatattttataaatga

SEQ ID NO: 99823 - DNA, 880 bp, Cannabis sativa
aaaaaaaaaaaattgatcttataacaatgtagtatccataataaattaaaaaataataataaaaaaaaatagagttagataataagctttgactttcataataaatgaaaaggaagctttagcaattatttgttttaagtgcaaagaaaaaatattgagcatatgattctttaattatatatataagtgcaaatatattattacataataattttgagcctcaatggttagaaattgatgtactaattaccctctattcgtgcaaagcctgtcattgagagactacgcactttgggtgaaacggcaaggttggtctttgatgttgagtaactatagtgtttgatgcgtctgctgtaattccatgagattattgtattttttttttttttgagcgtagcgtaatggtttttacaattatatattagcttaatagcttaaagatcttaggtttgaacccatgacctctccctttttcccatccctccctcaccattaagctagccttagtggcttattgtactataactgtcttgtattgatatactgttatggtgccttcggttccttgtatatttacattactatgttactttggaagttgatcaacatttatggctttaatcattagccgatcacttttttcaaagttataaactttagcagaattttgaatcaaaacaaatcaagtaaaaaaaaattaaaaatatgtagatatatatatttatatatatataaatcttaaatttttttttttaaaaaaaaaggaagaagaagtcgtgacagcaaaaaataaaaaaacaaagcaaaaaattagtgacaaatttagagataaataaattaaaaaaaatgagagaattaaggagaaaataaataaatgcat

SEQ ID NO: 99824 - DNA, 788 bp, Cannabis sativa
aagataatcctgttaaaaataactacgctgaaattaaaaaaccattcaattgaagcagatccatattcagaagtaactgagtatccaacgagctttaatctaaagtacactgattttctttccttctccttttctgtacaacttcaatatctatgaccatgttagatgtctttgaaaaagttggtgattatatcacaaaaggacccaaaaacttcaatttctatgaccatgttagatgtctttgaaaaagttggtgattatatcacaaaaggaccaaaaacttcaatttctatgaccatgttgtgattatatcacaaaaggaccaaaaactaataaccaattgaagagttagaacaatcataaacaatggggatgttgtagggtctaagtatggctgtttgcattttgcaaaatactgacccagtgaactctgtccaaatacaggagctttataagctcccggcaaactaagaatttgtgctttttatatggcactatatattcgctgaaagagtaaacatccaactccacaaattctcatcaacaataacaaagaaaatgtaccagataaagacggtgtcaatcattcttaattaaactaaatttggactcgagtgaataccacaaatgatttctagtactcacccaacccaacatcaaggttttcctgctggaggctggaacacaaaacatgttcagtctctacctgaataatttacaagtgcaagctcaccatatccggaataccggtcacacactaaggctaaggagcatatggttgaaggcac

SEQ ID NO: 99825 - DNA, 790 bp, Cannabis sativa
aaaaaaaaactaattaattgaaattaaatttattattgaaattaaaatttacaccaaaaaaatttgaaaagaaattatgcgccaacacaatttttttcatttttacattttaaatttttttattaacaaaaatataactttagtaaaaataataaatttttttagttgttttatagtttatttatagttgttatgaaattgattttttaattattttataattaatttatagttgttgtaagattaatttcttgttattttttttattttttattgagcaaagtgtatttttataattttacaaacttatttttataattacaaattttaaaccataaattgtaaataaaatataaaaaaatattttagaaaattgctcactgttgttataattaaataaggataagattattcaatcatgcatgtgtatatacaatattgaatagaaatattgagaaatttcttggaaataaagtgatgtaattgtaatagtcatggatattaattaatttaatttctattttttttaatttattttttaggggaaaacattaattgttattgtcaatatataaaaataggaatatgattttgtctcgtgatgtattttcacggaatgtattccgtgtagtacattagatggatctcaggatacactacatgagtgtcagggcacgtttctactttttaaccctaattactcttagatcaatctcaatcatcagatcaaataactcactcatctgacggctgccgtacatcacggattacaattcgtgaaagtataata

SEQ ID NO: 99826 - DNA, 2164 bp, Cannabis sativa
  modified_base (2102)..(2104): a, c, t, g, unknown or other
ccattcaccaaagttttgactgcaactacatttgaaaagcacagactgaatttaggattaattgaaatgtactgattgttttatgttagtacaaatgagagtctgttgggctttgtgccctaaataaaactttatttcaatgtaatcttttctattcaatcatcaataaagaaacagatttattttcattacttatttaatatgtcatttggttcatgtgatcatttatatgtttatttgatttataaattcatggaaatccttatcacattgatattcttgtttattgtgtcgtcacactactagaaaaatcggttttagtgacacacaatgagtgactctaaatctgtttagtgacagttcaacgcgtgtcactaatgaaggtgactggaaagacaatttttagtgacactccacacatgtcactgaacccttttacattaactttctgcgcgtcactatagccctataaagtcaggttttgtcagactgcaaaagtaacagcaacaaagataaagtgtcactatatcctttttttctttttatatattttattaatatttttaaagatatagtgacacgcaaaaagagccactatattaacaatatttttttaaaaaaaaataccaaaattaaaaaagaatatcagtttttttttaatttttattttttttaataaatacaatacactaaaattaaaataataaactttctaaaaaaaataatatacaaaaaagaaattaatatagttaattctatacgacttaatttaacacaaaatttaaaattcaacagcataactgctgcaaaatgagcattcttcaaatttcaggaaaacttgtacaatggacagaatatacgtttttatcatatgcagataagatgcacatataaatagtcccaaacaactacatattgcacaaatatgatccataaaaaatttaacccaaacagtactgtatacataacaaccaaatcaaccaaatttgatttgttcattctaacatggaaaataatagactcttgctgcaattagaactatgaaaaacccctcattgaggttcaatcgcgaccaccgactggaaacacagactcttcaaacaccacaaaccagggacgagcttcaatcgcgatcgaccaataaccaaaaccggaaccaaacgacgaacttcaaacattgtcgactggagacgagcttcaaaggttgtcgacatcaagatcctgcatagagagagagagagagagagagaaacagataaaagaaaaaataaagtagagatgatgaaacatcgaggatcgacgatctaaccttagactttcgtggggatcttcgatcgtcaacgaggaaggcggagagacagccaccgaggaggagagatatatagtcgacgattggggtttcaggtgatggggaacgcaaatatgtggagcatcttgcccgtccttcgccgaaggagggtttttttagcagctgcgcacgaaggagaagaagaaggggagaacgacattgtaatgtgtataagcacatatgataaggttcatgtacgcttaatatattatacatttttttttgtttctttttatttatttattaaataaaactcttttttttttttgaaaacgtaattacagctctttcaaactaaaaaatataaattacagctttttcaaaaaagagttattaattacagctgtttgtttttttttaaaaataagaatatgatatagtgacgcactatgagagtcggcacatacttatccagtcatgcctagtgtgtcactatagactagtattttttaaatttataaaaaaatataaaaattttgttttactctttagtgacactccatatttttagtgacacacattacatgagactaacaacgaacatttagagtctaattgtgcatgtcactaaaaatcactcataactctttagtgacccgcacaaacatgctcgtcactaaaggactaaattgtagtagtgtcagcacagtggtaactaatcaagattatgtgattaaatgtattcctagaattattagtacacggggtttaactcatacgatgatctacaacgtagtttacttgcaccttggannngtgttatgtcctttccacgacattggttaaagtaagcttgggctggatgtatggagtatg

SEQ ID NO: 99827 - DNA, 1210 bp, Cannabis sativa
  modified_base (46)..(49): a, c, t, g, unknown or other
  modified_base (1164)..(1171): a, c, t, g, unknown or other
atgtgaaccatgcaacataatatgatttctgatctttattaattannnnatctgattatattgaaataggtttaatttagggcacaaaatccaacaaaaacttttcccaaaggccatcttgcgttctatacagacttgtcattcagatcataaacctctttgcctattctttggaggagatattgaaaaattcaaaagaacctttaaatttgaggagggttggactcgcgatgaaagaagtaagttggtggtcacacaagcttggaactttgtggtgcataattgggccacgactagaatgtttaaaaagattggggccactcgggtggcttttattcactggcataagactcaatatggtaaagttgatgcttctattaaagatttagaatgcaagcttaatactctgcaaagactatctgttggctctagagactggaaggtggagtgtgaggtccgcaaggccctcaatgaggccttagatagaagagagatctactagagacaaagagcccgtgtttcatggcttagagaaggggacaaatgttctaaatttttctttctctgcgctactattagaggtagacgcaacgccattgagagtatattggatagtaataatgtttggcttactaagcgtagggagattggctctgaattcacaaggttcttgaaagatattttcactgagactggatctgggtcggttcttaattgttctaacttgataaatgactgtctatccctaatggagaaggaggagttagttaaggcccctaattttgatgacattcgaaaaactcattttgccatggcttctaacaaagctctcagtccagatggattgccaattaccttctttaaaactactgggaggcggttggggaggacttttgtgaggctgtctcagattttttctccacaaatgttatgcataagaggatgaatgccactaacttagtgctcattcccaaagttcagaaccctaagaggacaaatcactttagacctatttcccttcgcaatgtgtcgtataaggtgatctccaaaattattgccaataggatcaagcctatttttcctagaattatctgtctgagtcaatttgctttcgtcccgggtaggaactgttgggttttatgccgtaaataaaactcatttcannnnnnnnagatttacttattaatatatatcagaaataacatttaat

SEQ ID NO: 99828 - DNA, 718 bp, Cannabis sativa
atcacaaatcttcaaatatcatatacacatcttacttacaacaggtgaatctcaataaaaatcatgcctccgatgtcactgtaaaatagtatataacaatattattcaaattaatttagttatctaggtcaaataatatataatacaatttgtgtgttccaaaatgttgttggcgcctctatgtttaattttagatagttgtatatgaagaagagaacttaattacccttttgactctctcattatctaaaagactataacgctaaaaaaagtaacaacaaaaaaaggtcatattgtgttgtaagttgtatgatcataccaatcactcccaaattgtcttttccaagtaacaataaaaagtccttgccaaatgaaatcatatatttttcattctaagtcttcaccatcgttatcttaaacaaattagattgattccttgattacagattccctattagtcaattgactgtaagttgaaaaaaaaaaaaaaataggaaattttttaaaaatatagctcttttatcttttatttacatttttaaaaggtctaaaatttttaattataaaaatacgttgataaaattttaaaattacaaaaatacattttgctcaacaaaaagtaaaagaacaagtcaaagacaacgaaaaaataagggattatttcacaaaaacataaaaacaacaaaaaaacatttttacgattttttgattttattta

SEQ ID NO: 99829 - DNA, 2533 bp, Cannabis sativa
tattgttttagagatattcatattgaagatgttaatcaatatacttgttagtaaatatatatcctggtaaagtattcccaacaatacgatatgtctcctttgcctttcactggtaaccgttggagacatggtggtcttcttgaacgccttgattgtggtattgctaatcaatcttggtctgactctatcccactgctaacattgtccatcttctcttttatggttccaatcaccgggctattaaaatgatctatcatagtaataccattaccaataaaaagaaccgtagatttttctttgaaaaccactagcttttggagcctaattttttcaatctcattaaagaaagttggacttctaatgtatcttcgactacctctactcctaatcttcattgctttctctgcaagcaaagtaactttatcaattccacgaagacctcgtctaaaagtgaaaacactttctagttccaaatcaataatattcaatctgccattgatagtgtattatccaaaccctctatctctaggcttgactccaatcatattaattctctttaatcctctcttgatgttattttgcttaaagaggaagttttttggaagcaaagagctagggttaattggctcaaaactggggataagaacactaagtactttcataataaagcttccacgaggaaaaaaaaacaatgtcattaatagtctcactctcaatgataatttcattgttaacaatctcactgacatcaccaataattttgtccagttttattctactctctttacctctaacggtactgatcttgactccatcaacatggttcttaggggtatttctaaacgtatcgatagcaaccattttagtttccttgctagccctttcactttcatggaagtaaagagtgctcttttttcagctgtcttgtgataaggcccctgagcttgacggcatttaccctctcttctaccaaaaaaattagtccactgctggcactgatctttgccatgccgtccttgatgttttgaatcatgaggccaatctggctcccattaattagacttttgttgtccttattccaaagaaaactcacgcttgtaaagttcgtcatttcagacctattagtttttgctagaccatttataaaattgttgctaaatcccttgctaatagactaaaggtcgttctcactgatctcatttcccataatcaagggccttccttagcatctgttttattcatgataacatcattattgttaatgaaatcattaatgccataaccactagaaaaaaaaaaggtaaagtgggttggggtgctttgaagtttgatatggaaaaagctttcgataaggtggagtggaattttatttacaaaattctctctcatctcgacttccctaccaagtttgtttccctcatttataattgtatctcaactgtttctttcaaactttgcattaacaacagtctctcctctcccattactcgttctaggggaattaggcaaggtgacccaatctctccctaattattcctccttgttgctgaagggttgtctggtctcattacttccgaaactcatgccaaccttttcaaaggaatcttcatttgttgtgttgcccctcctatttctcatcttttatttgccgatgatagtttgcttttcacccatgtcaataatcaacattgcaaaactattcaagacattcttagcatctataataaggccaccggtcaatcaatcaaccttgccaaatcctctgtccttttctcgcccaacactccacctcatgataaaacttcttttctcaattctctccatatggaggataaaccatttgttgacatatacttgggtgtccctgaattcttctcttgatctaaaaaatcttccttccattacatcctccaaaaagcttgcaacaagctttcagtctggagccaaaggcttttctctaaagttggaaaagaaactctgctcaaggcagttatccaagccattacttcatatgccatgtcttgttatagaatccctatctctacctgtaaacgcttgggggaaaatgatggcaaacttctagtggggatctctgggtcaaaattagcacaaattttttggaaaaaatggtcttccatttgtaaatccaaattttatgagggtctaggattttaggatattgtttaccacaaccaaggtatgttagctaaacaagcttggcgtatttttacaaatcctgactctcttgttgcttccctcctaaaagctaaatattttaaaaataatgattttcttcatgccaaaactagtcatcttccttcatttacttgtcgtagtctccttcaggaaagcgatctccttcttaaaggtttagtttggaaggttggggatggcaaatctattcacatcactagcccaaattggattccaggttcaaattctctttatttcaagaacaacaacactcctccggatacattgttgggttttgtgccctaaataaaacccatatcaatataatcagatttactta

SEQ ID NO: 99830 - DNA, 2341 bp, Cannabis sativa
tgacttggttcaactttcatttgaaagttcttttcaagatagatctaagtgtgtcttggtcataggtcaattctaaagttattgggctcaaaattagggttttaagataggctaacacaatttactctggaattcatgggtttattaagtgtgagatacaatgggatgttgtgggatgttaagagagtcatgccacaacatgtatgactctctacatgtcttatttgagatgtgccatcccttggtcgtctctcactactttttccattcgcaaagcatactgccacataagcaagtttaaaacaagggaaagaacaactcagcaacaatcccaatgattgtgggatatttgcttatgaataaggaatgttgtagattttatttattaatactttttttattcattatttagaataacatatgatattttaaagtgagacaccccaacatgtggggatcactaaccaaccctaaacctatataaagatagtgatacgctagggtttaagggactaaaatccttgatcgcattctaagagcttcctagaattcgagaccgttgaagaatataattccttctgcatcttcttttttgtgctcttcacgacaccatgttctcattattatacctttaacaaacaccattacctcagacacatttatcaaggaagaaagaccattctctatttcttatttctattaatttattgttcctaagaatattacaaccaccatccttatcagatttatgaatgttgggtctcccatgagctttgtgttcataagtctcaatacaaattttacctagagatctcttttgtacaattatccacacactcttgtgaacatgactctcatgtgtagaatcaaattaataaaaataaagtagacgtagccaaattatcatcgtgacatggagggtgaactactataaatccttggtgtccttttttatttatcgcggttttatttagccaaatcagttcattgtaatccttttattttttacgattttcttagatcagttgacgaaaaaccatgtcaacacgttgcatacctaatttagtatcataataccaacaattggtacgagagcagttctgttaatcctataaattagcgctcctaattctcgaggttagttggctaaggatcaaaggatcagcaagagagtcacctaacatgcacacccccgagggttactaagaatgcatcctcgagggtcactaagcaagcaggcaaccttaggttactccaacatgaacatgaaaatatcactcaatatctcaccttgcatctcactcaacatgcatgaatgtcactcaacatctcattttgcatgtcactcgacatgcatgtttgaatgtcacttcgcaacataagcatgcaagtatactcggcatatcaccttgcatgtcacttggcatgcatgtgtgagtatcactcgacatatcaccttgcatgtcactcagcatctcaccttgcatgtcactcggaaacatgagcatgcaagtatcactccacatctcatcttgcatgtcatgtgtgaatgtcactcgacatcttaccttgcatgtcactcgacatgcatgtgtgaatatcactcgacatctcactttgtatgtcacttgacatgcatgtttgaatgtcactttgcaacataagcatgcaagcatactcggcatatcaccttacatgtcacttggcatgcatgtgtgagtatcactcgacatatcaccttgcatgtcactcagcatctcaccttgcatgtcactcagcaacatgagcatgcaagtatcacttggcatctcatcttgcatgtcactcgacatgcatgtgtgaatgtcactaggaatctcaccttgcatgtcactcggcatgcatgtgtgaatgtcactcagcaacatgagcatgcaagtatcacttggcatgcatgtgagaatttcactcgacaacatgggcatgcaaatgtcactcagtatgcatcccgagggtcactcgacaaacatgcaaacacaagtcactcgacatgcacatttggaatgtcactcgacatgcacattccaaatgtcactcgacatgcatctttggaagttactcagcaagggcaccctcaaatgtcactcggccatgacattctcgaatgtcactcgaccatggcattcttaatgtcactcggccatgacatttctaaatgtcacttgcccatgacattgtcaatgtcactcggccatgacatttccaaatgtcactcagccatgacatttcaatgtcactcggctatgatatttccaaatgtcactcggccatgacattgtcaatgtcactcggccatgatatt

SEQ ID NO: 99831 - DNA, 711 bp, Cannabis sativa
tagtgatgattggtctgaatggttgaaatatagtagggatattaaattgtcaaaattagcttcccaataccttatctctctcctcctcaactcccatttatcagaaaatttctgaaaatgttaaaaaatttggtaagagattgtgagtctgctttgaaattttagtttcaaaaatgtttattgatataaagatgtttgactcatcttaagagttcattggtcatttataataattaattcttatactaataaaataaatatgagcttcacttcatttgtagcaagtcttgagatttcatggtattgttgggtttgggtagttgtttttgttttcagcttgtagttatggcagtgcagagccaaaatgctggttttaggtaaattgatgttgttaatcaataaaattgagagacaatcaaaagatgtgaaatggtcaaaccatagttatgcccaaatattattcagaacaaatcctatttatatgacacatttctattatactcatatcattaataacagtaaaaagaataaaaaaaagcaatagcaaaagataacaggacaagtaaaactcacataagccaaaatttaattttgaagaatgttgatgacccaagcctttttgtcccaaattttgtagaatgatagcagaatatttttttgctgaaatataattagagtaaatattaaaatcctttaatcccaaaaatcact

SEQ ID NO: 99832 - DNA, 1788 bp, Cannabis sativa
tataaattatctatattcttttagaaatacaaactttttacaaattcttgaaagcacaatgcttgttgcaatcctaaaattgggtttctatgaaaagatgtggagtgacttcatggatggcagcactttttttttttttggataaactagttactaaaattataagattaagaagtggcatcaacttcacttttgaatccaaaaaaaaaaaaaaggaaaactggagaattgaaatggtctaacttctcatttttcgtaattttttatagtaagtctaaggcatcgatcattaagtataactaagttactaacagtgggagagagatgatcatttttgatggccttatattatgtattagtcaatactcaatacttttatttagctgaagaatattttttagggaacgtcattgaccagctttctaaaccttttcttttttatttattttggcgaattaaatatatgaaagctccccaccatcaggacttgttgtacatgcaaattacaacttttacaatttaaaaaggtttgatatgactgacttttcattaattaatttataaatgatcaattatctacaattatatctaactagcttaatttaatgtgtacaaattcagggagcaagggagttgtaaagaacagtggaggcatgtgccactcaaattttaaaattactatatatataaccattttgtatttatttatttttttttttgagaaggagccattttgtaattaaaattgatcccttttaaatttttaatttttaagacttacacataattatctttctatttttattttttgtgagagataaatgaataattacacttacatttatatggaaaaatatgacgttataatatattgactattgagatggccgtctttcaaaaaagaaaaaggtggtattgatagaatacaattacattttttttaagaaggaagattttattcaaataaccaccaaataagattaaaaaaaaaatgcagccctgacaaataactcaaaaattatttatcatgtgaactatatctttctctctagctttgaatttagaaacattacaaacaattatagctttaagactaagcttgacctaattgctaatatagttttagccgagtaacaaacattatcaaaaataaaattgttattataattacaccaaatataataaactacagccgctaaaatcgctgaagctaaatcaccaaccaacactatttctactttgttaaatgtgagtttattactcgagtgaatgatttagctgtccaagctaaaatgtaacgttgttgacttttgttgtgtaggagaaggattaccgcctgtcaatcctaatttctttttttaagttgaatgaactgatgttctcttaaaaaaaaaaaaaaaaaagaaaaaaaaaaccgaacactattataaaaatgcttattcttgttagttttaaaatcagattcttttggtgaccgtcactaataaagttaagaaactgtttaaaattgtcagtagtactccactatttccagcaattttaaacggtcagtttagaattcctaattgtgcaaaataatcacaattttaaaattaaaaaaatgagtacagtatccccaacaattttaaacagttggagatagcgtgttaaacatacaaaaaaattaaaaaaaaaatcattttgttcaaacattcggatctcactctatcatctctctctccctctcgtcttcaaactcgcaatggaaccaccaccactgccaccatgaagctctctctctctctctct

SEQ ID NO: 99833 - DNA, 1077 bp, Cannabis sativa
gccatgaaaggcatgactacccaaagaaattgaccattcacaaaagagtagtaaaacttcagtacattaggattttccaccagtgtcatagtctgtgcttcacgaaaaatgttatcctgtaagataataggattcaaataaagaaaataaaatataagaaataaccaatttgagctccatatattccttaagtcgtctctgcagcaggcttcaccattgtcgattccttcacatcgatcacaagcttttccatatttttcttccttcattgagcccaaatagataatcataataggaaaacaacataattaaataaaggtatgctttttgttatcgtttttaagatttaaggaataaagcaaatgaaaattaagctatcaaactgaaattaagctagtgatgaaatgttatttgttttcaagagacccacgaagagtttccttgaaacataccatcaaattaaacagtccaattcaaaaacttcaattgtgtctcatgttattcgacgtgatgagcttcagaatttgtataagttggcaataaaggtgagtgtggcccacttttagtaaagtacaaattcatgaaagttgaattatttttacaaaatcactatccaaaatagctaagctgcttctttattttaaaaccccagaaagtatttgcacaaattggtcaataagaacgatgtcaaccaacaactgatataagcaaacaaaccacaaaatagacaaaacctagcgaaccattgaaaaatcaacaaggtaacaaataaaatcaataaataaaataacaatagaatagaaatacaaaacagggtaacaaatcatagataaaccaacattaatacatatacatatacaatacctatatttgctaaagatgacgatgtggccttggtcgaaaggggaagagggagacacgcgagagagagggaaagtgagacgtcgggctgttggtttcaacgatctctgaccggaggtggatacatcgattatctgttggttcgtcgggcgttggataataagaaggcttactttaccatcgacaacatgataatcgttaacttccttcgacgat

SEQ ID NO: 99834 - DNA, 835 bp, Cannabis sativa
agattacaacataaaaaaaccgtaaaaataaaattaaaaaaatcgtaaaaatatttaaaattccgtaaaaccgtatttttgtaaattttttgttgtttttatatttttgtgtaataatctcaattttttttagatgtctaaataggtaagagtgcacttttaaggaagtgcatcttagaatcacatataaatgattaatttttttttttttttctggaagggtataaatgtttattttgggtaattttaaaaaaccccaattgaaaagtccttggtgaaagggtggcgccaatgtgagagtgaggagtgtggagtaagggctttcatttaaaaggttgccgcgtaactgagagtgagagtgagagtgagagagagtgtgtactctttactgtgtttgattggtaatggcagagagatcagaatcttccatcagagccactcacaccgaggtacgctacatatctatctaccttttcttcatctatctcttaatcgttcagctctcatctgtcgcttgattgtattttagctttccagtgatcaatttagggtttgatccttcctttggaactctctcttcttactgatcagattcttgaaatggatgccaaagatgataacaggaagcgattgaaaccagctgtatgttgaactccgactccgacttcaactcgaatgactcggtactaatttatgtccattaactgattgactggttgcctttgttataaggtggaagaccacggagctattttgatggctgaggctgaaattgatcagactaacggtgcatcgccagaaatggaacttcatatcactcaaattcttgaaaaat

SEQ ID NO: 99835 - DNA, 2263 bp, Cannabis sativa
  modified_base (58)..(59): a, c, t, g, unknown or other
  modified_base (405)..(407): a, c, t, g, unknown or other
tattttatttttaagtatattctgttaaaccaataaatgccgttagataggcactttnnatatataaagatatatataaataaaatctatatataatataatatatgtacacctattaccctcgaaattaatccaattctctccttttaaagatatttagattcacccacaaggaatataaaataagagtttttttgctttttgttaagttgcacttaattgatctaagcttaaattttgagaattaaatcttctaaactactaaattagtaaaattcaggtgtgatccagtttactatcaatatgacctgcttatgtgtacacttttgtacatgtgacacgtttatattggtatacataatattattatttaaaattatttcgaaatttattttaaaattaaannnaattataaaaataaaaaatataatatttaaaaaataaaaaaattataatttttaaatattaatattaggtgtattaatataaaataaatatgagtgtacacataagtcatttaagttagtaattaactataaaaaatagattacaccttaaatttattaatgaatgtgtagtttaaaggattttgctaccataatttatggattaagtaaaataaaataataattgagagaatttaaccgaaaaaaatagacttcataaagcaaaatttgatagtttattgactaattaaagtaaggtgaaacttcatggtaagttaaacaataatagaattagtattaactcctacaaaaattaaaaagttggtggaaaagggattataataatatttcaactaccctcctttatttattttattattattattttttgctaaaaatttcagctacccacttggtcttagagtcttattattagtggatggtccatcaagtactactaataagaacctaccaccatatgaatttgagccacaaattcattaatttgcttttaagtctaaaataaaataaattaatgcctataaaagtgctctcttttttgaaagaaaccctatgatactcattattataagcaattttataacaagcaattttttttttttcatataaactaagacatgtggggcaaagcaaaagaaatttggaattatggagctaaattaagaaaacgtttattaaaaaattgtaataataccggatatcacaaaaattaacttttatatatataaatatatattttttgataaattaccacgagaatcatatgagaaaatcaattataattaaatttattgtaattattttagttttctttcttcaatttattttggaggattctcctttttcttgtatattggattatatttgtgtcataattcatcatctatttcatcttttatactcttctaaacttctacatttgcttggttttaatttttaaaattcccaatacataaatctccaatctaataacaactcactatatatatgatacattttcaatgtacgtaattttaaagtaaaagtgagtcgaaacacgttataataatgagggtgatcaaatattccaccaatatttgaagcactaaacaattctagaggtataatatacacatatacacaatacactgtaacatgcatatacatgtaatattgctattggtataaaccgtataattaatattagatttaatataatttattataataatttgtatggaatatcgtgtgaacattgtttacatatattatatataaatttgactcaattatatagtattttataaacggtgatattttataacagttattaaattatgtaaaatttagtatttgattagtaataacgatataatatattttagagcattaattgctattgagcactgtctaacacttaaagaagtggtgcctaggggcaaatccaaatagaagctaggcaggacagttgcttctgaaaaaaaaaattgaaaaaaatatatatgtattttactcaattacagtatatatttgtaataaaaagatgatatttatagacatattaatagttttatagtataatggttaagctagtattttttttttctttttaagtttacttttactcctgcattattgaaaaaaaataacgtctccttactttaaattttggactcactattagttagcaatatttttcaaagttattatactaaattgtataaaatttaatgtttaattgtaccaataacaatataatactaagaaaaatattaagcaccactaataaattcatattctagtggtactattaggag

SEQ ID NO: 99836 - DNA, 1196 bp, Cannabis sativa
catctatctctagtttctctctctagaaattagagcacccagacttatctatgttttttataatctatctcgtgagaaataaaattcgaagtagacgtagctccattactgtcgcgatatagggagtgaactgttataaatccttgtgtctctcttatatatacttaacttataattcattctcgtcaatctagcaagcgggtgtggctcagatatctatgtccaattttttgcgtcaatacatttaataaagtgaaaaagtccttgtaatgttaagctagtgatatgagttttccgttaatttctaagtttgctttttaatttttatttttaagattgtcattctaatataactttgttttttggtttggtgttgcgatattttttcagatttggtgacaactattattaatgggaaggtgttctttcaatgtgatgaggctctgtttaaagatgttatagcttttattgtctaaatttctagagcggttttgtcccatgtggctcgcgattagttttttgcagctcatggtttgacaaaacatgcccttcggttagacaatgagcaatcctagttcgaggatgttctaccgctgattgtagtttgctgcattgttaatcatgtgtgattctgttcatcgcgtcaacaaaaaaaaaaaaaaagtcctttacatctctcctcaaggtcaatgtttatatctttgatacttcaaaaaaatccaaaaaattaggtgaaagataatattaaaaatatgtacatattaaagattaaaacattgattaagtttgccattagattaaatttatatatataaataataggaagcgtctggagcccagtatattttatttctagtacaaatattcctaaatactggcacaatttaaatattttaatcctaattctttccatgatagtgttcaacataattatagtgttatagtgaaactcgtgtacttttttatttttatttttaatgctagaaataagatttaaacaattcattattttcgtgatttttttttcttttacctgagtaaaagaagttgtttcaaaatctgaattcgacggtacaaactattcacaattttttttttaaaaatattcgtaaagttcaatgtaataaaccccatcataaaaaataaaagggaattaccccatatactattttcttaactttttttttttttttaaa

SEQ ID NO: 99837 - DNA, 1120 bp, Cannabis sativa
ctcaatagtttatgagatagtttatgagaaatttttcacgaccagaaaagttcaaaagcatgatttggtacatgtcaaagtttaagggcggggcaaaaatttaatttaactagccaaaattttaatattaatatattttttattttactggtgttctattggtgggattaaagtcacaaactctcaagtttgagattttatttttctgatattaaaatattattgtttagttttcttaaggtatctctacatagacaataaacttttatagatgaaaaaacatttctacttttgtgtaaggttattacatttgttattttaactttcatttttccttaatatatgtaatagaaaatcctaaatcctagccaatattttccccactaaaaaccctattcaatttttcttatgtgtttgtgggtcttcattgaaatatttttttttgcttaataaattttattttatccaagtattagtaatggtgttttgaccatgccaaattctttataggatctttggctatttgtttcttgagatgatttttgggttcttacctttttattattacattttgacaaaattctcgtatttgtttcttgcacaatgtcggaaaactttattttttgtttagaagaaaataaatatttttgcacattgtttattgttaaaaaaaacatttttatactatatttggtgagaagccataggaatagtagaagtttgagtgataatatttgtttggtaagataaataaagtgatgtaatgataaacaattaaatattatgaaattattatattaaatttataattaatattttcctaaaaaaaaccttataattttaacctatactttttgtaactttaaacaaataataaagaattatcatcactcatctctcactcttccatcataccaaacataacaaacaagtttttaacttcatttatgagtgaaatattgacggctaaagcatctgaattttaaatttttaacacaaccacaaaaatcaattttttaggagtaaaactatctaaactctcattctcttttgctctgtactcctccgtccaaaaatcacggttaagtgccacagtagactgtccacgtgtacacacttg

SEQ ID NO: 99838 - DNA, 968 bp, Cannabis sativa
acagcagccacaaaacctgaaaaatgacacgtcgttttccacaagaggaaaatgacacgtcgtttggctgtttcttcaatctctatccgggtcaaaattgacccgttttcagccacgtgggtccgacggacccgacacaaacctgatcgcaaaagcttattccgacgaaaaaattaggtgttttcaaataaaaaatattctaaatccaataataaagatatccatatagattttatgcacaaaaacacgtaaaaaatatgagctttaatatcacaaagttgagtcgggtccgaaaagtttttacagagaattttttccatctttaagtttttcaaaaaaattgtacatacttagatcgacctataatactatatgaatatagtaaatgtataaagaatttaaaataaacaccgaaaaattaaaactgaaaaattcaaacaatcagaccgaaaactccaatcatgtttatatatataatataccacataaaaacattataaatatataaaaaaagggtattataaacattattatgcgataaaattatatatccaacgtataatatatacaaacatatatacatatacatatatataccgagaaaaatatatattataccgtataaataaatgtatataatatatatgtacgtgtgattgaaatacctccagccattgatctttgagctacaatctatgcaatagcttcggtattagagttcgggcttcctcgctctctcaactctctttagatggaatttgctgtataaataaaatgagtaaggagttcggggaccgagccttatatttataggtgagatactccatcagtatctgcgtcacattaattgtcaaaatattttgataattaatttaataaatcaaattgggtaataaatatagaaatttgaccatatatagaatattacataattaattttgtcaagattcaatgaatataaaatattc

SEQ ID NO: 99839 - DNA, 2407 bp, Cannabis sativa
gctaaaattcaaaagcatgccatttttcaaattgggttaagacaaatatacccttgtaatcatttaaaaaactctttttaataaaatagaactttttaaggggaaattgttatacccgaacttcggctacacttcagaaggtgacacgtgtcaattagtggaatatgaaccacctaatataataacgttatatcatttaatgcaaaaaaggaatggctcattgaaatatagaattaatagagtatattcataactcgctgactatatagtcttaggcgagacaagtataaaaaactattaatgtctatactgacgagacaccatcatgccttggaagacgcatatccaaggacaagattcgttttaaaaagataaatgaagtgatttgaagtattcatgaacaatatgtagcaagacatccacctcgctattcacaagacatattgacgagatgaattagttgttatatacttagcgtattttatacattataataactaagtgtaacaacttggaaatatgtagcacatgattgtccatgctacgagaccttatggtcaaagagcagttcttaagtttgctcagtacactggtgctcataccattgctggaaggcatatgattgtccaaagtcagcattaatcatctacaggcaaagcgagatgctgttatccaaatcaccataaaccgtctttaaggataagaataataagcaattatacggttatcaattgttatccacatgtgtttaaatgaaacgtggtcaatttccacgtttcatgaagcggttatgtaattcgaatttaaatgtaaataactgtcaacctatattcttataaataggacacattccacagaaaaatggatggaaaaatctgtgagacaaatactatcagttgtatattgtattaaattattcaaaaatatcttgaataagatagactcgtggagtatgtagatttaactacaaaaccacgtaaaaatatctggtgtttttattatatttattatactttattaatctttataattcctgtattagatttattacgaaaaaagctcattattggttaacaaaaatctacgttaacaatagggtacatccttcatgtcttttgtctcttttttattgttaggacattgttcctttaacaaaatgaattgtcctcctaaaggaacggatgtacttttttcatctttcatgttaaacttttgaataattttcttgatgtacccagactgcttcaagctaatagtgaacccttctttccggtttcgtgagacttcaataccaagtatctatttaactcgaccaagctctttcatctcaaattctatctttagcttggctttaatacttttgatcattgattcatctttgctcatgataagcatatcatccacatagagcaataagaatatgactgaagattgctccagattcttagaatataggcagtgatcgtatacagatcgtttgaacttgatttgatgcgtgtacgtatcaaatctcttattccattaccttagggactattttaaaccatacaaatatctattaagcttgctcactaattcaaatcctttcccttccacgtgaaacccaggtggttacttcatgtagatctcttcatccaagaatccattcagagaagcagttttgacatcaacctgttcaacttcaaactccagatgtcctgctaaggacaacatcaaccttatcatcttttattttaccacaggtgagaagatttcagtatagtctataccttccacctgagtaaaacccttagccactaacctggctttgaacctcactagttcattctcatcaattccctctttcaccttgagaatccatttgcactccacaatcttcttgttctctggcttcagcataactacccaagtcttgttcttccttagagaatccatctcctcatccatggcctaaagccatttagacttgtttcctcccaaaattgcctcttcatagctttttgggctcttcaatttcagtttgttggactacttccagtgcaaatgctattatgtatgcttccgcgaaccttatcggaggatgaatctctctttaggttctatcacgagccaattgataaccttctagacctgtatgtccaagcccttctgacacctctatttggtttttgttatctagttcttctgtctccacaacaacttctggctgtgcattgtcttccgattccacgctatctttcgcccgctcgtgaaccttctttcgggagcttaattttgtactccacttccacacttgtagtgtctttgtttcccatttttcctgtaacacacaaagacacactgcccttctcggaggtcaagtgaggatattctaactcattggaaacaatatttctagcaatcacaa

SEQ ID NO: 99840 - DNA, 2512 bp, Cannabis sativa
atttaagtttatatttttttttttaataatggggtgtacttatcattttgtggggtgtaaaaagaactcccctaaaaaaatataaatcgtatcgtgtcgtgtcaatatttttaaaggataaacccaacacggttataagactgatatttttgtactatgatcggatttgtttcgtactgctcgtgccaaccaaatgttttgaacaggtctacctcttttcattgaattcgtgttttactttgctatatttttttccaattaataaattaattactaaattatacgtatactttgaataatattttacacaaaactgtatcaaagataattaaaattattagaatttaaataattacttataaatactaaaatttttactcatactctaaataaattaatatataatttttgttttacatattttaataattttaattataaaattataataataaatgttatatttaaattttattattattttatctaatttataattgacaaatacatatatattattataattattgaattatagggttttttaatgtttcgtgccatgcttttcaaatttatcgcgtgtcgtgctttttggacttgtctattcaggcttatatgctgtgtctttcgtgcttcttgtgtcatgccaatttatagtactatcatatcatatcgtgctgaagcccatatttttttgttattatcgtgtcaaaaaattcaacccgtatttacaacacgatctctatcttttatggaaaataaaattttcaactatttttttattaacaaaaaattatttttgaagacttatagactaatgtaataaaaaacaaaagatattaggaggcctcttaacctgaggggctttaggcaaccgtcctatcctaaagacactctgttctaaataagaattgagattattaatattattaattgacaaaaattagaattaagaattttctatttattgactttaaaatgcccttaatggagtggagtatacatgaaattagagtacataatgcattgttgtaatgcttgatctcttaagtaatggcgccaatacaactaattttttatctttattaataactcatgcttatgcagtcatggttatgcacttatcgaatcaatttggtttattttattgatatcaattctcatttaaatatgtaatgataaagaatattgatagtacattagtactagctaataaatatattatgtaggtacatatataaacatgatactacttgtagagtatcatattgggctttctttatatagtatataatagtacggtactgttttccatataagatgacttttttatgtatatttgtctaaacaatggatgggaaacatataaaatatagtttgtttgacatcattcattgcatcatcttattgatactttctatttctaatccttattattttatttcacttaacttatatttgttggtctatctagcaaaatctttcactttttaattaaataactaaatatttgtactatatgttgcaaaaactaatgattttaatacccttagtacaatgatatgttcatataatattaaatgtcaaaccctaaaccaaagagagggagatgaaaattgacgaagattcatatgatagttttcattattttacaattttttttcctccactacgtacctctctttgatttcaacttagaaataaagaaagtagttaattatgaagacaattgtaacagtgctcttctaccgagaacttccttgacatgaatagcagggtattaccagtaatttttactaactataaatgtttacttatcaccatttttaggttaccatcgggaacaacatctgttattataatgattttcgtgccaaagaatatatatagggatatgattttgtcctgttattgtactttcacggattgtaatccgtgatgcacggcagccgtcagatgaggaagttatttgatctgacggctgagattgatctagggtaattagggttaaaaagtagaaacgtaccctgacactcatttaatgtacgagacccatttaatgtaccacggaatacattccgtgaaagtacatcacgagacaaaatcatattcctatatatatataatgcaactgttttgtatatttttatgaatgtatctattgatgatggacttggacaggtattccttttatttttctgattagaaaggtaacatcttttggttttgtggtacggaatactgagtacatgtcgcatatatatatatatagatatatgcaatgagggaatgtctttccccaacaccacatatatataataagagctctttatatcatgcgagaactcgtgtttaaatatttatgtgtaaacttgcgaatataggttatactactctaccaaatgatgtatctgcgtaagttaacacgttggctaacgcgcgcccatgactaacgcaactaattagttggcaattgcctcgtttgtaagtactagaactaggttgcatcagt

SEQ ID NO: 99841 - DNA, 1213 bp, Cannabis sativa
tggaggcttgaagcggggacgttacaaggagcctctcgggtttcttgcaggaatttcaccgctccttcaactcgaagagccctgtcaactatttcagcataggttgtaatgtcattagtggtgatgactaaatcatgtctgatcttggtgttgaaccccaccaagtacttttcctttttactaaagtccgtaggcacaattctagaggccagtttggccaagcgatcaaacttggtcatatactcggtcaatgacatattctaaccctataccagcccaacaaactctttccactttacactgtggactgcctcattataataattagcattaaacaagtcttggaattcttcccaggtcattctagtcacgtcgcgtgtgagggacaccatctcccaccacaccaaggcatcttcctggaattgaaacgtggcacacaccacactgtcattttcagttatcccatgaaattgagtgtcctctcgatcacagtcaagtattgctatgcttttaaaacatcaagacctcccaaaaatactagaggttcttgctccccaaactgctcatacaaaggctccatacgggtgccagcaacaggctgttctgctggcaccgcaggaaccacaacaacaggtggttgcgggccaggctcaataggagcattccgctgtctaagtcttcgaatctcttcctcttgttgagtgatttaggcctgcatctcaacaaacctttgctcccaatcaaaaggatcctggggtggattctcttggccacctatatgagtacgaccacggcctctgtcgcgtccactgggattttggagatttctaccatcctgaccacctccggtctcaaccatttcacactgtcttcttacgttttgctaggcgtccattatttaggacttagcctgtgaacccacaaggcatataggttagacagtgctcaatatatttctaagactgcatttgagggtttaaacagcatttcatataaacacaatacaacatcaatagtttgttaaaaggtaaaagcttacggaaccgtgagttgagctcaacactggccttgattgtacatatcttgacgatcttcagtgaatatcctggtgtctctgataccaaactgtaatgctcgtatttgaaaattggctaattcagatttaaacttattttattatatttattaaacctcgtaaatcgggatcctgagt

SEQ ID NO: 99842 - DNA, 642 bp, Cannabis sativa
tacacattacccaaaatttatatatacttctttttttgagataaaatattcactattattataaaacaattgtcattgacaacaaacaatgaagaaaataaaatgaagaatttcaccaatccaacatacatcttcatctaacattagagcatattttactaactcatgtgcagcttgattaacatgtctccgaacatgagaaacaataattctacagagaaaataaaagataacaaacatcagctattaaataagaaaaggaagacaaatctaaagatgttgcaaataatgcaatagaaactcgtaaagcatcagtttaaatgaacgtgatagaaatttgtagttaacttgcccaattgatactatgaaaaaaggtttttgcttccatctcgtcttatcgaaaacaatcttggactaatttagataaggcagcaataacaaacccattgtgatcttgaataacagctccaatactcaaggttttggtgttcataatgaccgtagcatcaacattcagttttaaggcatttagatcaggtggcttccataggactccctttaccggcttgggaagctaagttgattgaaccaccacggagaacgcagttcctttccgtccaaataacccacataatacaagta

SEQ ID NO: 99843 - DNA, 1045 bp, Cannabis sativa
gtggtggttatggaggtttatgggttatttttttttctttttgtatttgaagagagagaaggaaagaaagatagatagatagacagagagatagagaaacgtgttctgtatgtaacttaatttttttttttaatatacatatatatattattttatatatatataaacatatttgactcggtcaaaccgagtcgttacacacataatcaacatatctactcatttacatttctattctaaggctagtttttcaaatgtaattacagaagaggaaagaatggggcacctttggcagttatctcactatacttctcaaaataactgaaaaaaaagaaaaacaaaatatatatacatatatatcatgattggtaaaaatgtataagaaaataatataaatgcaagtgatatcaatttgtaagaaaacctcataaaatcccaaatcatgaatggaagcaagcaccctcaaaacaaataaaaattatgaatgaagaaggaatttaatatcgtgagaaagacacattgcatggctgccaaaattaacaaaaattagatctatacatgacaccaaaaacagtgatctgcttctcagcgaagagaagtgtcctaggatcctttgccttacaatccaatcatttctgttaattcgaaaaattgatcttcttgtcaaacgttgctcatcaaaccaaaaaaaaaaaaaagcatgaaaaccaaaaatttttagattgaaaaatacaaattcaagtgcaaacactcaccatcgatcgatagaaaaaatcacgagtaagaagagcgctcactcattcatatatttaaagttagggttttaggatttaagaatattttattcaaaattaattaagaatatactattaaataagcttgggatctctgaaggggtcatttacataataatagttagtggaaataagagagtggtgtagagagaggagcggaagaagaagaaacaaaatgcgaaatcgtaaaactctggcctgcgattggaatttgactcctttaaatttctccgattggaatttaactcact

SEQ ID NO: 99844 - DNA, 1664 bp, Cannabis sativa
ttggattggatcagttggagaaatccaacatccaatgtgtaattggattggatctggatgggtccaaaaacattggatgtgatccaatgaacagtcctaaattatatgtgtatgctgccatgtttttattatttttaagtgctttggttatgtgttagtaaaatttgtggctgactccctcaaaaatatggcttatatatatatatatgtttagttctcttgatatatatgaatgagttctgcctgattaatgattacaagtcaggtaattgattataatttggtctcactttgtgttatgttgttttatttttatcatgtacatttgaactgttgagtattttttttttaaaatttgaatggttggacatttttgtattagaagttagatttatggatttggactttattatggattggtgatcaggtggtgaacttttaattgaaattgaatctaaaaaaatggctgcaactattcttttagctttattatggtgaccatgcttaattagttgatgatgttatgttttggtttcagattaattggacgaactgttctttcaggtgagaatggctggagttcgagaaatcacgacttcagaattcttgcaagtatgaattatgtaccttttgcatttgaattttcattgatatatgtagggagattgatatgtgtactgtatgtatctactgtattatttttttgagtaataaaaataatattgtaacattttgttttttcattcattttgatttcagggaatacataagcaaaatcttgtttttcattgtaattcgcgagtgccaaggtcaaatcctctatggggcatgattttgcgccctagaagaggaattccattgaatttgaggtgtcgcgctcaggcaaagcccaaagctgtggtttctgatggcttgggtagtccgacaactgagcaatccacaatcaagcctggtgctggagttgtacatttttatcgggtgccactgatccaggatagcgctacatctgagcttctcaagtcttttcaaactaaagtctcaactcaaattgttggtttaaaaacagaacagtgtttcaacattgggcttcagtcagaactttcagtcgataagttatccgttcttaattggcttcttcaggagacttatgagcctgagaatttgggggttgagagttttcttgagaagaaaaggcaggaagggttgagtatggttattattgaggttggtcctcggttatcatttacaacagcatggtcttcaaatgctgtatcaatttgtcaagcttgtggtttaacagaggtgaatcgattggaacgctcgaggagatacttggtgtatagcaaaggtccgttgcaggagcctcagatcaatgaggtagctgcaatggttcatgataggatgactgagtgtgtttattctcaaaagcttacatcttttgagacgattgtggttccagaggaggtccgctatgtacctgtcatggagaatggtcgaaaagcattggaggaaattaatcaacaaatgggtttagcgtttgatgagcaagatctccaatattacactaggcttttcagagaggaaatcaagcgtaatccaacgacagttgagctatttgatattgcacaatctaacagtgagcatagcaggcattggtttttcac

SEQ ID NO: 99845 - DNA, 1548 bp, Cannabis sativa
cttagatatgtcacatgatgagttatctaattcatttaaggaattatttggtgattttggtaaattttttactaaaaaccaaacccttagagaaaagactaacatgttactaaaagaaattaagattttgaaattaaataaaagaaacttttacctaaatctcaatgtgctacttgctcctcatataagaaagaaattattggcgtacatgctaatgtgaaaagcctaaaaaatgacatatatatatttactagaggcaaagaaggttatgaacttatgctaggaagttaatcatgcgattttgcaaaaagtggcatgggctatgatcctagtaaaatcaagtttttgggaaacttttttataaaaccatctagtctacctcactttacatgtacatatggtagccaagatgatcatactatctcatattgtcatgtaaagaaatatacacatctaggtaagactaaatgggtaccaaagggttctagaactaacaaaaaaggacccaaagatatgtgggtaccaaaagtcaacaagcatgtttaattttgtaggaaccaacaaagaagaacaaaagtctatggttcttagataatggatgttcaaagcacatgaccggtgacccttcaagattttcaagcttcaaaggtaaggaaagtggatttgttacatttagagacaattcaaaaggaaaaatcttgggtattggtgatattagtaatgtatattctccttgtattgaaaatatgcttcttgttgacaaccttaaacataacttgattagcattagccaattatgtgataaatattttcgtgttgtttttaaattctcaaaatgctccattgagaatgcttcaactaatgaagttatttttgttggagaaagaaagaataacatgtatgttattgatgttgaatctttgtaatagcaaaaataaatatttaactgttatgaatgataattcttagttgtggcgaggagattagaatatgatagtatggattctatttccaaattagttagaaaaaatcttgttatttgtttgacatctattccttttgtcaaagataaactttgtgatgcatgccgatttgaaaaacaaattaaaatattttttcattccaagaaagagatttcaaccactagacatttataattgcttcatattaatttatttgtccttttagaatttctagtcttgatagtaaatattatgcatttgtgattgttgatgatttttcaagatttacatgggttactttcttgacactcaaaagtgatgttttaaaaaattttgttaaattttgtaagagtgtgcaaaataaaaaaggctattctattgcctccattaggagtgatctagtggtgagtttgacaatgataccttaaaattattttgtggtgaacatgattttaaccataacttttcagctccaagaactctacaaaaaaatagagttgtcgaaaggaaagtagaacaattcaagaaatggctaggtcaatactaaatgaaatatcactaccaatgtaacaccctaactaattta

SEQ ID NO: 99846 - DNA, 1062 bp, Cannabis sativa
gtcgataaaaatatacatatatatgggtattttatattattttggtgtaaaaaataattaagtgaaatgtattatatgagtataattaaatttttaatttaatgatgatgatttatcaaatatagcttaatttaaaaatattgtggtattaatttaggtatagatatgatattaacatataatgatgtatgatatattcttatattatattgttatattgttattatatatgatttacatacatatatatctagatgaaatttagttaggatttgagaagctgatttgtttattagcgcataggtagtttagagagagagagagaaatacgtgggattagtgtggaagtggtaatctaatttattaagttaaagatatttaattattaaatattaattcttaaatagttttaaaggaaaatttattccattgttttcaacctaataacagccttacatactagaccactgatccattagagacccgttcagtttcttctcttccatattacattacctcatgagtcaaaatcctttggtaatatcatctcattctagccaaatacacacctaagactatcatcatttgtctctgtcaagttattggacgaatcaagcattgatcacaagggtggaataggattctaaggcttgtggcacatcaaggatcggctgtgacaaattttaaaaataataataaaagaaaaggttttgggtgatttaaacttttgattgaagggctgggaatttcaattcaagggtttactgctcacatattcaatcattaaggtaagaagcgttctcttgtcatatgttgaagtagggctcgtaatcaaaaaaaaaatttttggttttcttaaaatcattgtcctactaaaacagccacatctctctcaatgtttatccaattcatacaatcttgttgtctatagaaagcttattaaatttcccataattcttatgaagaaaggttttactaaatcataatttattggtatcgaaaatttgtatttatacgctctctgttgtaaatcgttttttttttcatatttcctatataagt

SEQ ID NO: 99847 - DNA, 1898 bp, Cannabis sativa
agtaactgcttcttttcttttgatgccgtaaataatggttttttatttgtccactaataattgctgatattatataataattattattattatttaagaaaaagaaaaagaaaaagaaatgaactaataaatgaatgtggctcaagctgagtaaattaaaaactcaaaactcagcgtgtggagactggagaggggagcacatttttctttttggacactaattattattattttaactatatattgtttttgtgatatgttttttaattaatttctgtcgttgtcgtcgtcaccatcatggtaataaatatttaagtaatactcctcaacagtctaactataatagctagtttcgactacatgaatcacgttattgccaaacctatctatgaatgtttctttctatattaaattaatcatagaattatatatcattattgttcaaaaaaataataatagaattttatatttggtagattattaataattaaaattgagtaggctcgtttaatttttattttattttctaatctcttctcttgtttcctaatttcttggacaaatcgttgtcttgataatttcttcaactagaaaatgaaaaggatttattttatttttattattttgtttattttccatatgataatgaccaagaacaaatatcatatttgtcttatagatatcaaattaatgagatgaaaagacatcatacataagtagctatacgatttttttcattgaatttattcatttcaagctagttacatttaattaataaaagaaaattaatataacataaataatatacaattgaaagatcttattttacttgaattatctaaatcgaaagtaaaataaaagtattcaactctcagcataattcttaaaattaaaatatgggtaaaaaattatctcaaaaatgataaattaattactatataaaaatataaacatatagaaaacatgcatttcctaaagtcaaagttttatctcttaatattaattaattaaagacaatttaatatgattatataatatatatttggtagaataacattttaatattgttttcactggccgggcagtcgacaaagaggcatgagtaatcatctatatatttactgtagtgaaattaattaaatttatcttcgagtaatgttttattattattcaaaaagtaagggaaaaacattgttcgatctatatatgttgattgttgtgtgccatatttagagagaggaaatttgtgcaagagatataatattacgagttatataaaaaatgtaagcgtctgaaaaattgtattctaaaaatttgaacgcaaattaatttttgtagtttctgtaaaacaaaaattgtttggttataatgtttattttaattttaataataataatatcttttaaaaaataaatagaagcaataatataaacatatattttgtatgataaatatatttaatagtaataactaagagataaacaaacttgaaaggaaaagtagtaataaaaacttcaaaaaaataattgttgtcaaaattttctaattttttgtagctttgtttttagaaatgtttcctaaaaaacaatatgaaatacatatacttgtatatagagaaaaaaaaaaaacagtttgattttcaaagattaaaaaaaaaaattgtaagttataattaaccatctaacttttcccaacgtttctaactacaagtactcagccaaagtcaatttgccttccagtaaatggttgtttataactttatgtatttggaatttttttatatgaacaatttttctttttcttttttttttatgaaacttggaattcattgaaacgaaattaaggtgaccaaggctggtcaatacaaaagagcccacttagctgaacaattttttttt

SEQ ID NO: 99848 - DNA, 973 bp, Cannabis sativa
caccaattcttgcctgcctcttcatcaaaccagctggtacgtattatatttatatatataatatatatatatattataattactgcatgcatatgcatggcttttattattatttgaggtataaattaatatatatcattttcatctagtacttattatctatttaattaatttattctagagctatcataattacattaaatcggccaaatatattatcatttatggaaaagtttaattgttcaatgagtatagttttttctttaaattgtttaatttttttttaatatatatatgatcaaacctatagtaatatatacttttgctatttactaaatatatattaattgctaattaataaagatttttttttattatttttttgttggctcaggttataagtatactttgtatataaatatattttcaatggtttgcttaaaatattttcaaacagataaaagagatgagctctaattatatggtttcataattttctactttctagttaacacatatcaatacttttttatactaattattattaattttttaaattatttttgcagcaatggcactaatcatttattacttcaccatcgtaatgatactacttcctactatcttagcccaatacaatcaagacgcacataagcaaactaacaacccctttagtcaaaaaactgaaattttgctcatgatgcttttaatcggggcatttttcttaatttctattattaaatgtatacatatattatatcacgataattttcacggtaatgaagaaaatccatctgtgcaattatctgtgcaaaatgcacccgaagataatgcagtggatgtggatttacctgcacaaaatgcaccagccgtggatttatctgcacaaaatgcacccgaagaaattacacctgtgcttactatagatgcatttcccgaagacaagtatccgtgtggagataatacaacatct

SEQ ID NO: 99849 - DNA, 1135 bp, Cannabis sativa
  modified_base (50)..(73): a, c, t, g, unknown or other
  modified_base (910)..(945): a, c, t, g, unknown or other
caacaatctcaatagttcagtgggtattttcaatgaccttaaaagttcannnnnnnnnnnnnnnnnnnnnnnnaagttcagggggcaaaaatcttaattagcctataaataaaaagattaaaatgttaaagaaaaagaagatggaaagtgaagagagagagactattaaaaaattatttgaagaatgaatagtgcttctctacctaaaaagaatggaggcattttttggcactaacttctttatattttacatttacatttgagtgctcttaaatgtagagaagagttaaattgaaatagctcaaaaggaaaatagatatagcatttagctactatgatgtatgtcatttttatcactttaagctataattaattttagctacaaaggtatttcaccttcattgatgggagtgttgttagttatattttttttattatttttatactatattttgtttatatgtataaaaataaataaatattatgtaattatataatattttattatttttgtattataaatatattatttaaagggtatagagaaaattgtaaagaaacttagatatgatgtaatgtaaatatgtgttggtaaactaggaaaaaatagacttttaatgagttattttagaagataaaatagagaaattgttgagagtactaatatagctacaagtaagaaaatatatgtatatttgatgaatagtgcttaactaaatatagttaaaggaatttctaaattttagttcttcacattagctcatttaaaatgagcttttctttaaaacggagaagagattagttaaaaaatgacatacatgagctattttaattttttttaaaagcaatgaattgtgtagataatcattattcattgttctaagcgtattctattattattattattatnnnnnnnnnnnnnnnnnnnnnnnnnnnnnnnnnnnntattattattattattttgttttatatatgtgtgcgtataaattaatattatatatttaaaattaataaatatatattttaaaatataatattttagtgatgtagagaaaaaattgagaaattaatgtatgatgtaatattaaaatttgaggtaaaataaaaaaaaaaaaatagaattttagtagggaaa

SEQ ID NO: 99850 - DNA, 1658 bp, Cannabis sativa
gccggaaggtacaagcataagaaggcttcttaagatgttctccagaaagtgtggaatggctggatgtcccatattacactatgcaagagttatgctcccactagtttgtatataaccactgcaatgcaatctccacaaataattgaatttcttttcctttgattttagttggaaaaaatgaacctgtaaattatttgtttttttctgtatttaatcaagaagtctttagttttagctgttgattaaatacttacttctgtggagattataaaagaacaatctttggctttttatttcaagattgggtatcatattttatacttatgttggttccaaaatttccatcttaattattccaaagtttgtgtttttattttgacaaaatagcattctagtttaccttttttttaattattattattataactaatgtcaaagatttggagaaaatattactgtaacaaaaaacacataatatataatcataaattcatgattatttacttcgatgtaaaaaaggttagttactcttactccgttgttggtggaacacagtggactggagacataagaaatgaagatgagagattttcttaaatctccaatccaagtagtggcctttttatttttgaaaggccaagttgtgtcctttaaaaaattattataaatcttctatggatatggaaataatgcaggtgttttctggtgtagtgatttgagcaattacactgatattttgtgaagtaacggctttgctaactgctagctattcactaccagtctaccactccactataacaacactcaaaattcctttttttttctcccaaaaagaaaaaggcaatccaaaatcactatcatggcttcccaggtcgatggcacacccctcctcgaaaatacccaggttcttgttctttctctctcttatatatatctgggttttgaaaaaggtttttaatttttttttttgaaaaagggaaaaaggaatgatctttctgggtttactaggtcagtgttttctgtttctgttgctcagacccaatatctttataattataatgccaaaaacgaaaagggtacacagaagtgtgctgggtaggtccccaggattatatatctgacccaaaacatagctaaggagattttgaagtgagtgaagcaaagagttgaccttttttgttttcttatcttcatctgtactactttgtcttatatgactctacaagaatcagtggctttattgattattttcatataagagagttattaattgtgagcttcaaagcttagacaattaataatattattgcagttattaatatttgcttacactttgcagtgagtttagttcatttaggttgtcttagctttttgtgacaagtgccataatctcttgaacaatggaattcaaatggaacttcccatactatttaatggcatttcccaaaatttatattgatcagttctgttccattaagaccttatttaagtgcagttcaggccataccatcaattgttactttttgcctatttggaggcatcaaaaaaattttgttttctgtgaatgagtgatgggattttgtgttttcatgaatattcaccttcaggatgaagataccggactgtatgcaggagacggttcagtggacattcgcggg

SEQ ID NO: 99851 - DNA, 2263 bp, Cannabis sativa
tatacatttatttatgtaaaatcaagatgtaatgtatgtataatatagtgcctactgtatacttattcagcagtaaagggtaaaaatattttttagataataggtattaaggaaattttattgttattgtttttacattagataatttttggagttttaattgtttaaattgatccaaaagtgttgttagatggaggttttatggataactacttagctcttgcaatcactaaccacaaaaccattttgttcattgcagcttaacaatcttgccagtatatggttcttagctcttttcctttccatcatcgccacgggcattctcgagcttcgatggagtggtgttagcatcgaggattggtggcgtaatgagcaattttgggtcattggtggtgtctcagcacatcttttcgccgtcttccaaggccttctcaaagtcttggcaggagttgacactaattttacagtgacatcaaaagcagccgacgatgcagagtttggagaactctacctcttcaaatggactacactactcatcccaccaaccactcttataataataaacatggtgggagttgtagctggagtttctgatgccattaacaatggctatggttcatggggtcctcttttcggtaagttgtttttcgccttttgggtcattctccatctctaccctttccttaaaggtttaatgggaagacaaaacaggactccaaccattgttgtcctttggtcaattcttctagcttcaattttctcattgatttgggttcgaatcgatcctttcttgcctaaacaaactggaccaatactcaaacaatgtggggtggaatgctaagactgttaatttgatgaatttgtgtgtacaagtgatgaattgttaataagtttccaaaggagtgataatgatttgagcatatagtggattatagtttggggaaatggaagccattcactcatgatatgtagtagctaggaatatactgaaaatatattgaaactacatataactatgtattatgaaattttgatctatatgccaatacaataaccttttttttttctaattaatttgactcattttgcttatatttgtatatgatctcttaattctatctctttttcattattaactgaataattaggaatttttcagctcaaattacctttttttagtattttgttctcagaaaaattctttgttacaaaaattccattgaattataaaaagattaattaggatttttgtctctaaattttgacatgtactaaaattattttctctgaacttttgagactgttaaaaattttttccgaattattgagattgttagatttaaagatttttgtcttattttactaacgaaaatctaatgtgaataaaagttcagagtgcataatttggtacatgtcaaaatttgagatatatgatttagtagatatcaacgttcgggggcatgatttattacatggacaatcaacattggtaaattgaataaaattggataaaaatctttaaatctaacaatctcaatagtttaggagaattttaaacagcttggaaaattcaaggaatttgatttagtatatgtttaagtttaagaagaaaaattctaattaattctataaaaatagttataaatatctatcctctttagtgatattctgctcatttttggaagcaatttattgatatacactagtgtgatgttaatgtactctaaataaacataatgtaactagaaaagatatttggatgattttttatagttaagagaatttttttgtaataaaaaactttgagtaaaattctacaatagtctaatttggaggaggacaatccaatttattctttagttttcaaagatgaataatctaatgatttaactcaaaaatgtaattttgaataacattgaatcacatactcatctagtgatttaagtcaaatatatcagagtttatttaatggtcaaaatcaaatatactctgctgtaatatttattttgcaattgcagaatcataaaagaggttgttaaatgaaaaggatgagcaaagggtccactcaaatatgttacattgcaaaaaagaaaatcatttactttaggcattaattgagtgatatttttatctcttatgactataaactttgtgatgatgaatcaaaagtatgtcacaatcttcatggaccacaaccatgtgactaaataccccaaaattcaaaatttcattaaagaaaacaaaaatagtccatattttgact

SEQ ID NO: 99852 - DNA, 1375 bp, Cannabis sativa
  modified_base (27)..(36): a, c, t, g, unknown or other
aaaatagattacattgaaatggagttnnnnnnnnnncataaaacccaacagtttaaacaaaaactagccgtttataattgttaacacatttttcaaaaaatcttggaaaaaatgatctgtcgttttctgagaaaaacggtctactgtttagaaaatagtagaccgaaaatatagcagtggcaaaatcctattttttggctctaaaatatgcataactccttactcgattatctaattttagaaattctaattttattctcttagttaaatgatatgtgatttaaaaaatttatatatggtttggtgaaaaaacttgtcgcacaagttagtgggccaaaatttgtacttaaaactttgacttgaaaatcactatacaagattaagaaatgtaaataaaccttcgttgagttttttcttgagttctttgagtcttgtaatccacttcgggtcattattgagaattttggtaaaattactattttttttctttggagttaattttgccttagaaaaatttattttatctttaatttgttctataaaatcaacaaatcattagtgacaaataataatcaaatatttgttaatcatcaaaataaggagacctaagagtttgagttaacaggtcgcacagtactataattccatcatgagagataaaaaattcaaacttgaagatatggtcctcagaagagtattcttagccaccaaggacgcattagatggagttattggtcaatcatggaaaggaccttatgtcatcacaaaagtgttagaaccctagacatacaagttagcatgctatggcccaacttggatttggtactagtagcgaggtactaaaacggggagtatctaggacgatattataaataaatcacattgtgtttttatcagtggttagtatgcacttaataagtaaataagaaatcacctattgatcaaagagactcagtacattctctctctattgctcagaggcacgatttttgaaataaaagcgtttatatcatagattaaaataggattagacctcatggtcgttacaaattatattgtcaggtagataggatatcgggatggacccacacacctgatgagcaaacgcccatctagccacattatgggcagcgaaattacaattcctactaacataagaaaaattacaactaataaaagagggagaagacttagaacaaaatgagacatagttatcaaggctccaacgagactccaccccattgagagcattgataaccaccctcgagtcactctccactattacaaacttggatccgatttctacagctacagaaacagctaaacagcaggcagccggttctccactaagaacctccgagaagtcttcccgagc

SEQ ID NO: 99853 - DNA, 2162 bp, Cannabis sativa
aattcatactctcttttttattagcttccttaatcaactatttataagattgaaaccatttgatttctacattattgaagccaaaaaaatattatgtaactaatcaatcacatactatatatataattttggagattgaaaatgatttaattttttatgttttgaaaaagaaaaaaaatttaatctcctataatatatatacattaatgtttatttttctatacaaattaaattatggtgtacataattaatccaacaagtacacaatacaacacgattaataataattcaaaaaaattatagggtgtcactacaatgtgccttttataagaagaatatcgatgtactttctttttattttgacattcagaaaaaaattttaattttatttttttttcataatcgtgtacgttataataataaaacgttataattattaagaaattcgaaataatttatgatataaaaagcagtgttcgagatattttacttgtatataaaataaaaagagtcacgcatgcaataaactgtttaaacactattttttggccttttaaatttttctaaatttttaaaatttttctaaatttttaaaattttgcaggatgtcttaaataattataatgtacacgactattttttttttaaataacgatatagataaaggtatattaatgcacccatttaagatgtaagatgtgcattgtaattttttttttcaaaattatatatattaaaatataattattgtaaaaatatatgtacaataatattcatatatatatatatatatatgggaatgacgtgcactacacaaacaaagatatataagaaaaaaatctagtaatcttctaaaaaatatatttgtatagtatatgtagaaaaattatatatcatcatcaaatatattaatcttgtttttcttttctttctctttttcattttttttttaagaaatattgaaaaagcaaaagcgtgatctgtttttgccttttcttttcaattaattagatcgtgcccatatccacatgcttgtaaagtactaatattattttatatatttatatatttatatataatttttttttagtaggacttgcattttggcttcttatttctttttgagatttttttttaaaaaaaatataattcttttttatttttctagttaagatctttcacaaatttttataaaattttgaaaatagattttaaaataattttaatattattattatttttaaacaagcacattgtaattatttgaaacatccaactaatttttagaaaattctaaataattaatttgaataaattggtttggaaatgtattttagatagtgcattttggccttttatttttagatttaaaaagttataattcaatagtaattagataagtgttatgtttagtgtgatttatatataaaaaaaaatttgtaattcatttttttagttaagatcttccacataaattttgaataatttaaaatattgaaaatagatttcaaaataatttttttttccataaacggttcaaaataatttttaaaatcataaaaatccatttttgactcggtacattgtaattatttgaaacattctaataaattttagaaaattgtgaataatttaccgtgttgaaaattcaaaataggttgacttgaaatttattttatattcttgtgaaataagttatttaatgatgaattctccttttggcttttttttttaatgagaatatttttggtttagttgttaatgattgccgacaactacttaatttttgtatgagaggagtttatttagtgtttgtttatcgttctgctaatagtatttttgttcggacttctttcttgttctttcttagattaaatatttagtaaaagtgttgtttatgactatattgttagacgatttgtgtaaagaccgcatatgattaatactttaaattattaaataattagggtttatgtgtgagattttattattattgataataatacaattatgtgaatttatttgagttcgtatatatttattatgctatttttctcaatttctgcgattgtgttcggaagctgtggacagcgacgttgggcctttagagagttgtatattatatgttatagaatattatcggagtattatagttagatgtt

SEQ ID NO: 99854 - DNA, 659 bp, Cannabis sativa
aattaacttagatatttatttgcaactgcgagttaaacttaagtatttatgccgcaaattactcaatttagatttccctattcaaattacctttagtttctgcttcaaatttttctaccaactttgagattgcaaaatttcagtagtaatactctaatgatttgattagacatgatcatgatcacaagaacaagtcctcttaatgccattgccatgtcttttcaatttggtctttactttcccatcacatgaccatactaacacgtgccaaactcttattagtacaaccaaaataaattagtatacaaattgtaattttcaaattcaacactcgactaagacctaaaaaaaagaacatagattttttaaaaagtttatttgacccacaccacgttctggtccaccaaatcacccgactatataatatggacggtagaaaagaaaatgttatatttttaaattcctaggttataaataattgagtgtctatcttaattaggatattcatttaatttaatttgtattattttattcatagtgcaaccgatctacacttacgtgtcaattttatattttagattttatctgatccacacaataacttaaatctaatttaatttaatccgcaaaaatacagattaaatcgattatgttagatt

SEQ ID NO: 99855 - DNA, 616 bp, Cannabis sativa
aagaagaatttcatttacggtggagttggtggctttgccgggatgggtggttacgctggtgtgaacggcgtgctgccaacgctgggtggttccggctcctttaataaatttggaggaattggtggtgctggcggaataggtggtgttgccggcataggtggtttgcctggcactactggtggtttgcctggcggacttggtggaggttttccaaccatgggtggcgttgcggttgctcctcccggcggtggcattttgcatccttaattaatataagtacttaataatgattaatatcatcaaaatataatggctattatgattagggttttgtgtgtgagtttaattgtttttctacgttagggcatgtttgtaagttttttttaagtgttttgtatctctttgaatttgaagtaactaatattattgtggtacttattatttgatattatcaacaatattatatcactacaaaaaatgtcacttttaccagcacagttcgctactactgtgctagcaaagaagtcaaagttttaccagcgtacatttgcagtggctaaaatataacttttactagtgcatttacgtgctaggaaaagtcatctttgccagcgct

SEQ ID NO: 99856 - DNA, 748 bp, Cannabis sativa
tatagggtccacattaatataggcattgtccttattaaaataataatggaatctgggccgatcacgttatttctgatctctataatgatttggtatatatatatcaacatgtttctctgcatatattatatatatattgatcacattataactaattaggcacgccaatttttctattattttttcttaatatatatatatgtcatgtaaatatatatatgaaaaacaattataaatctctgattaaatcagaaacaataatgaaaattctccgaatcagtaacgaaactgatgattataatgacagtgtgtagacagtgaagtgatgatcatatataaatataatatatatatgtatatatatcggatgatctatcatcctggctttttggaagatattagtgcatgcatgtgatttatcaaattgtggaaaagctgtccagctatattatgcactcacctccaatttgtacgtgtttgctcattcttttttttgtctatatatatatatataccacactaaaactaattatattttctctatataatatatatcaacgccacttccagctcagagattgagccctagctatatagtactggatatatattattattggatcattaatttgattatatatatattaagtatgcaattttaaatgaaatttttacatgaaaaatccattttacacaatttattacaaatttactcacacacgcttatgactacatttttacttacaaa

SEQ ID NO: 99857 - DNA, 1754 bp, Cannabis sativa
gtccccaaagggactaattaatttatctaagttataaaattaaaaataatgtgatcttagtatctttagtgttactcctattataagtatatacataaaaaaaataagaaacaaaaattttattatatatattcacatataataaaaaaaaaaataacaatataaatttagcattgatatggggtatgaatgaaggtacttagtatcactattagcagtgtattttataattgattaacggttttttataatattattaaaataaaataaataggacctaatattaaattgtataaattatagctagcagtattatatctcgcaaatatatattaagtataccatgaatttcttttaatatttctcatataagtaagtattaactatcaaaatatggaatagatgccacgttattgtacaactctgtatctatataaatataaaaaatattaaaaaatatataattaaatatcgaattttatataatttaatataataatttttataaaatattagtaattattattaatacatttgtatgaagaactttgatttttattaaaagaataacaatctctattattaaagatataataattacatgggactataattaatagaataaaaaagttgaacgggtaaaaagaagaaaaacatcatagttcgtgtgaacttgtatatatatgactcgaactttgaatctttgattgactttttaaattaattaatctttaaaagcttcttaccaatcattaatgtcaaactatttatgacaaatgttaaatgtaacttgcttattcagaatatatataatattattagtaaaatttaatatcaaattttatacatttaattaaattataattatgaaaaattattaattattcaaaacacgatgtatatcaatagagtgttgagcattttaaagtatttcgaatagagatacaaatgatcaaaagctaaattatagctcacgtagcaacaaaaaaaaaatactctaatagtatgccaaaaagtgatacaaatttagcacataacaaattttgtatcaatttttgcataacatttgttatcatgaaaatttgcattaccataaattcactactctttttatttacatttatgttttgtattattttattaatataattaataattataaagtacttatacttttttttattgttttacataataaaattaagagaattatctcatatattattttttattttattttttcaaatttacaattaaggttgttttggtagtttctccaatggtttctatgtgggttgctatacggattttgattgcgatttcggttagtccgttagttggtataagatttatgtgtggaattctctaaaaatgcaaaaaaaactgttataaagtgcaaaattgaaaaaaaaaaaatcattgtattatcttttgtatttttaataaaaacataaactaatcattaaattttgcatcatgttttgcatgtattagagcacatagtcaaaattaagttgatacaaattcatcacaaaattattttttatgtcaaatataacactacaagaatatcacttttgccattacatttacgcgctgaaaaaagttatttttaccaaaacttttattttatgctgataaaaattctaatatcaacgcagatttaccaaccccccttaccaagtgcaaatatgtgttgacataagtagaatcttttttgctagcgcaaaacttaacttttgtcagcataaaaa

SEQ ID NO: 99858 - DNA, 966 bp, Cannabis sativa
atttgcatttttgcccttaactccggaacatttaagatcaacttcatttctctcttggcagagtttcttttgagtttcaacacaacgtttgtggacgatcaatatatgctgaaggaactgtcgatgctgtgctctttctcgccaagaaggtgccaacaatttcttaagttacactgctcatttgttatgttatgattgaagtgttgaacagctctaacagtaatttactttcagtactattgtctcataacaaatgatgcaatattcttatcattaatctcttttctgaagaaaaaagttttcatgtaacaatttcagattcaatcaaaggcagagaagcggatttacgacatgattgatgtcttacgagagggcaacatgcgttgatattcgtatctcggccactaccagtgaggagatgtaggcggaactcgggttggtagtaataatgattagcaaattttgtaacttgtctagtttttgttaatattcttatttctagctgtgctttctgattaaatttagtttatggttaaaagagaatattaacttcgttatgagaagtaatcaaaggttggaatattcttgaaaccttaaccatggaatgacacactgaagctgggcacagttgagagttgagaccaagttagacctttgacctttttaaaggatataataaatcaatttttattttggtagaattattatataaatatatttaattaatgtataacggtgttaccacatcttgctgaaaaaaataaaataaattaatgtattttttttaattagttaatttaaagtcattgtctgaattgagatttgagaattgagaacattgtatttgtattacattccaaaaaagtatttgaagttaactcaagtggttatagagtgtataggagagtgtgttgggtcctgtgaatgtgatagaatttgtgtaatgtataaataaatattttaata

SEQ ID NO: 99859 - DNA, 1305 bp, Cannabis sativa
gtatcactttcaactaacataaaaaaaaaactggcataaaatttagtatacgtgccttgcacgtagctttttgctagttaataataatatacatgtatataaattatatcaattaatatatatatatatatttgaattgttagtattttttagtattatattattattagtataattaagtattaaaacttatgtaatttaaaaaaaaaaaatattaaaaagtatctcctatatctgtcaatattactattagcttaactataagtattaagtcttatataatttaatataataatttttaagaaatattatatcgatagagaggctaaatacataatttttaaagaatataatcactaactaatcataaaatattacttataaaaaaatattaatcaccactaatatttaataacattgctgatattattttggtaaataattaatttttgagagttgaattgaattgaattgaattaattaggtaagagatagagagatggaagaaagaagaaggcacgtggtgggtcacatgcatctctggtttaacaaagttcatgcattgggtaatagtggaggtgttctctgttcatatctcatgcatatcaactttcttttcttttcttttcttttcttttcttttctttctgccacaaaaacactctctcatcaattctgacaatatacatagatcacattgaatttcatgcatcactcacaacatcacatatctcttctcatttatttcaccataaatatcattttaaaacttttattttgtaaaaattaagaatatctttttagtttattaaataataaatttaattaatttaatttaaatgtgttatgataatactgaatatattttctgtatttgtttagaaattatatatatccaaaaaattaaacttaatgtgttatatctaacacccacataatttaataataaatttgatcgaatgcggtaattattttttaagacgcacttaatagtaatgttatttattttttgactagtctataaatattaattatatgaacattattattaaatattatactgatgtaatgcatttactaattaacacatggagaaaatttaaattgggagggcaaattgtgaaaagaattaatttgggagaaggggaaattattagtaatagtaattatatataatctttttcttctacaaatttaataaaaatttttacatcaaaaatataaaatgataactttattacctaaataccattaaacggtaaactaaacatttatatccttcatctttattttattactatttta

SEQ ID NO: 99860 - DNA, 1120 bp, Cannabis sativa
tacgtttaaaaatcacttaatacgcctatgctagttagggtgttacagttcatttcctcttatatttcattttgtttacaaatcctcatttcacattcgctcactcctgtctctctataataaaaagaattttttttttcatattttttcaagacagatgcccaaagcaccacaattctatgtaattttcaatttttttgacgattcgattgttgctcgagcatccacaacatttttcttcagtgggtaagtcttcaaatctgggatgcgtggttagtgtgttggataccacgaatgatataccaaaggaaccgtgaaaggctcgagtagtatgtgaatttccatatgtattcctgaaagagttactaggattaccacaaaagagagagattaaatttaagattgaattagtaccaagggttgagccaatttctaaggccccgtatagaatggaagcagctgaattgaaggaattgaaagtccagttacggaacctgcttgatttgctgttcacgaggcggagtacctctccttagggtgcactagttttgtttgtcaagaagaaggacgagacattacgtatgtgcattgattatcgagaactaaacaagttgacaataaagaacatatatcctttgccaaggatagatgatttgtttgatcagttacagggaacgactatctgctctaagattgaccttcgagaagaagagatacccgtgaagagaagatgacacgtatatatagagagaagatcaaagatccaaaagcatgccatgcaaaagccaatgaatggctagactaggctgctcaacaaatactatagacaagacgagagctaggaagtccctatccgaccagatgttcgagaagggacttggggaaaaatgttatcccaaatttttctacttgacgtggcatgtccacgtaagccaaagatagagtacaagtggagtacaaccctgccagtagaagaacaggacctccatgcaatatataacaaaaccatcaagcagcaaccgaatggaatgaagcgagccctcaagcagcggtactaactgttggaatatgttttacctggatctagatttactaccatgtatgtgttgggttttatgcc

SEQ ID NO: 99861 - DNA, 1323 bp, Cannabis sativa
acacagggtccaaaatggtattttaaactttaataatttttaattccatatttttttatattatttatttatactataaaaagtaaactctattatattttataaaaaaatcctgatttctattcataaaatatttagccttaaatcaagtcaaaggcctatttttaatcgctcacaaaacatgattttttatttttttgtacttttaaaatactctttaaaaattaattaaaatatgcaaggtccaaattagtaaaattataagagaaatttaattaaatatgcgctataataaagacattatactcatgttgaacaccatagctattctaggcaattttatgattttattcccaaaatgcccctcacatacactaatgccattttctcttccctttctcttcttttaatttctctcttttctcacttcactatctcactcattctatctctttctccctaaccaaatcaaactaacatcttactaaaattgaatatttgggctgctccaagcccatatcagaggtggattggaggtgagacattttttcttaagcaaccaagggaagcattgttttgagcaatggttaagtgaacttttttttatttattgttatatttattttatagaatgttatttagatgttcgatttgtggtttgttggtattttttattgatattttttgtgtgaatcgttgttcttcaaaaattttgtatatttatggtttctaagtttttttttattaatccggatacgttaggggtataattgtttgttcagtttagaggttaggggtgatgtgtcgatgtttttcgatagttgtacaatagcagtttgattgtttgttcatgttagaggttaaggttttgggtttgatgttgtctaatggctgtacgatagttgtcttattgtttgtttagtttagaggttagatttatgtgtctgatataggtcgatggtatgtctaatttgggtacgataggatattgttttaaatattattctttgagtacgatttacagctcgattgtattcgatattttttcgatattacacatgatcaaaaattattttagcctttttgttgtgtttttgtttttgtttttgttttttttcaatggagtaaaaaatttgacattcgggattgataagaacacaacctactcacaactggttgagcatttgtacgatgagctcatggttgacaaagtgcaataatacttgatgttagatgtgaattacaagtacatgaaatggttaatgtatcagcctgaagttataagtaatgataagtgtctaagtttatatttgtcaatgcttt

SEQ ID NO: 99862 - DNA, 3718 bp, Cannabis sativa
tattatttaatacaatacgatccttatacaacgtaccgaactaacccttataaatcattctctctcttactttattaagtaacgatggtttcgtactttttgtaaaaaatatatggtcttcatcaacatgtgaaattggcatatccatctctctaaccaccaatcacgtgcttaatcccaaaataatatacaaaaaaaaacgttgaaaacacaaccaacgatcaagtaatggttttatttatttattttgagaaagatcgagtaatggtattgatcgtgtatgtcgtatacaattaattacgatataataaattatcaaagtagattggattatgatattttgaaaggcatcatagcttccttttctactctatgttgagaaactcacaaaatgctttattttattttgttaaaggtaaatcaaatttaaattcatatgtaaaatcagacataatctattatatgtaaatattatttatcgagcagaattaataataataattcaatcaagtcgcttacaataattagaacttaaaaccctaacatcatcttcgactaaatgactcttaagccgtctatcaaaacaatatgaaaaatactagatttttattttgaatgaacatacgacagatcacacctatcaatgacaataagataaaaatcctccaataaaaatgggataaagacaccacaattattcaaactagaataaaagaaaataacacgagaaaccatgttcaaaattctcattattaaatatcaattaactataaaatatagtgtcaaaaaataacaaggaagacctcgaaataacatgtgcatctaaattcgaaaatagctacagatcaaacaagtgtgtaaaaatactgttaaaaacataaatacaactaacaacctcacataaagttaaaccagacacacatgagaataaattaaaataggactaatcaccaaagcatcattatctacgaaccatgcgtaaatgaacacaaacacaccctttttgaccaacacacgcgagaccaaacctagcaagggagacactaggcaaggaattacaagaaatgtcgcttttaccagcacagttcgctactgcgctggtaaaagttgtaaactgcgctggcaaagaggtcaaagttttaccagcgtacatttgtagtggctaaatctaacttttatcagcgcatttacgcgctggaaaaagttatttttgccagcgcttttcattttatgctggcaaaaattctaataccaacattgatttgccaaccctctttttccaacacatcacaagtaaattctattttaccagtgcaatactacttttgccagcagattttaaaagtgacatttcttgtagtggaaccactgccattgaccatcctgcaagagacccacccaaaccacagattacacaccatatatttgagaagatacatcgtagaagaagaagccctcactgaacgactcaccttagaagcagcacccaattgattccttgtaagacacctaatagaaacccactgcccagaagtcaacacaaaccatccaaaggaaatcttggatccatcaagaataacccaagattgaataaaacaagcctactaataaccaccattaaaattagtctcatagtgcaaacccatcactacccccttgcccacccgaccatacaaactaagcccaaaaaagggtcgaagagggagaaaaaacctagcagcggtggcaaggaaaacacctagagtacaaacctatttaaaaaaagattaagttgaagacaataaaattaaagagagcaaggtgagagttttacgtagttgcggtgttaattaaccaaccttagtccacgagtcaatatttttaactctaaagcaagagagtatttttcttacaagccttacaaaaaatttctaacccttagggaaaatgtcatatttataggcttattaattaatgggttgggctaacccagacccattatggtttgtaatttaaaaaattcactaatggggtaaaatacattaagatattaactttgggccgatttagtgaggcccacagttggggacaactagcatccatacacggaggtacgattgatagtgacaactaaggcataagccatcagtacgttgagggaatgtcagagtagtggtggttggcccaaaaagttgatctacttttgttatgtgcctttccaagcctcttgattctttaggatttttttcgggagtgtgctatgtaggatgcttcctagaaactcatcattctcgaacaccttttaaactactccttcccaaatgacccttgagggcatctgtctttgtctccttcgatatttattgaaaacatcaatgtttgagatctatacatccgacttagtcattataaagttgtagttgaacctgcactcttcgttcgacttttctcatgggttgggcaatcattcttcataggcttagtgattgtgacagttaagctaattaggcatactcgaatgtacacatgtcatttgtccaaaaacaacatttaccctccaaacctttgtgacttgtgttgcgattttatgccctaaataaaacccaatttcattgtaatcttatttactttcaataaagatcggaaatcatatcttgaccttgtcatatgctttgttcacatgttttatgcatgattataggtttaatatataagttctattaaatcttgaatatatagttattcacaattacagtgatgtcatcatagtggaaagtaattgtgattatatgcttcaaactatttagtcctacgatttatcagtgcactagatttatactgacatgataatcaatgataaagtttacttacacactaatatgtggaatgtcctttccaaggaattatcatcagagtatactagtatcggatgtattggctatacatcagactagaccgatattagtagtgtaaaagatatcataaacttactgttatgtcttttctaagtcaatgtcacttagttgatcttagatcaaagatcttagtcctgagacggttaggttctggcttaactgtattgcatgtgttctttgacttgtacaagcttaccagaggatcatctcaatacttacatcttggtaactcgataatataattgagtgggagcgctaatcatagatatggaatccatagcttctaaactatttagaagtgaaataatggtttccttagagcttggctaacaaacataaatagaagagctcttatttcagtaattatattagtttactgaaagattatttataagaatctaagtattttaaggataaaaaatattgaacggtaaaatggtaaatttatccctactcgatctaaattatctatagaggatctttgattatttagatttaaataatagataacttgtagtatatctattcttggtgaatagagtgttctatgtaatcaggagtacaattctaaatctatagtggagttggaaggaagtaataagatacagaatctactcagtaaattctagaactatttattaggagcttggttacataggtccatggtccctgcactatctgggataatattgttttgctgtcagaatcaactgatttatttaatcaattaagattctaaataatgactgtatcttatttatgaattttactaagaaatggcataattgagaagaaaatacaaatagaggtttatttgttaatta

SEQ ID NO: 99863 - DNA, 1880 bp, Cannabis sativa
  modified_base (1409)..(1409): a, c, t, g, unknown or other
gtaaagagcttttgttgaaaggacttccgtggaaaattgaaacagggtagaatgttcgatgtgctattgacccatggttgtcgagaaatactactttcacccccttttcctaatgtggtgatccccattttacggtggctcattatatctttactgatagacaggtgggacacaaggatattgaaatatcactttggtaatattgacattagtcttattcctagagaggataagcttatttggcaccactcaaacatgggcttgtacactatgaaatcgggctaccacttagctgagagtttggaagctatgaatattaattcctcgtcaacttcacaatgccaatggtggaatcgattttggtctttaaagttacccaaaaaaagtcaaaatttttgcttggcgatttattaatgatgctctccctacttcggtcagcctggtgcataggaagatcactacttcaactgcttgttctcttcgtgtgtgtgcttgggaatcagtcgaacgtgctatattttgatgtgatcgtgctaaagttgtgtggaaaaggactcattttcaagtgttcatgcccaatatcaataatctgaaaggctatgatatattttctcatattgttgcaatccttaatgatgttgatttagagaagattgtttgcttgatgtggtgtatttggtctgaaagaaacaaagaattgcatggaactaagccaaaaccagcagaaataatctgttgtttctctacttcactcctggatcaatatcataaggctacccagcctactacaattagacacaacaatgcttctcaaccttcaagtacccatactgttatgcacacgacttctctgccttagtcaagatggtagccacctgatgttggattttataaaatgaatcttggtactgctttagatgttgttggtgcaattatagggataggagctattattcgcaatcatgatggtgaagttgtagcaagttactctaaaccgattcatggctgctattgcccaaaggagatggaggctgctgctatgtttcataatgtgcaatgggccatgacacatcaattgacaattcacttcatagagacagattctcttttagttgccaatgcagttaacaatttatcctctacgagacttgtaactcattttcatgacttagtagatgatatctcctatcttttattctttttcctagagcaaaagtatttcatgttaaaatggatgctaataaagctgcccatggtttagctaaatctactttttaattggatgaagatattatggattcctacctttagtgataacagttttttctaaaaaaaaaaaaagattgaatttatatgtgtaaaaaatattattaaattgtattagattaatttttattattattattatntaaattaataattaggtaataacaactctaaggaaacatgcactacatgttactaatacttagtgtgtatatatattggaggaagtttcaataattacatcaaatatgtgaccataatagttacatttacttttagtcattagatcattattaaaggtgttgaccgaggttttcggcaaccaattaaataatatataagaaaggctgtaagaagtttcatgcatgagatttttacgtggttggggtatcaacgagccttagtccacgagtctttgttattaatgagagtatttattacagataatgttcttggtgtgtttctctcctattttctctccttgattactttgaacccagaatcctcgacccccttttcagtctgtacgtggggtatttatagtatttttttggggtgatccctaggaatggatcacttgtctttctgtgttagcttcataggggcacatattc

SEQ ID NO: 99864 - DNA, 902 bp, Cannabis sativa
tttttttaattttaaaaataataacaaaaataaaaatgttctctaaattttatttttattttttgcttttatttaagtaaggaataagaaattgaggtgagagaaaatagctcgagagccaggagcaagggccgaggtcttgggtctggatccagatctggggccggggctagggtctgggagcttgattcaaggtttgagtcctaggtcgggactgggtttgggtctaggtccgagatcggagttgagtttggggtctatcctggtgctagggccacagtccaaatctagagttgggattgtggtccaaaataatgacaaaagaaaatacaaatagactataattaagaaaaacgtttatgtttttttcaaaaagaaaaaagaaaaaatttaatttttttcgatagatttaataaagctggtttaaaaattttgaaagctatttttttattatttttaaatttccactcattttaaaatgaaaaaataaaaataattttataaaacttattttttttttaatacttttacttttctaattaagaaaacaaaaatgagattagaaaagtataggaaacatataaatttcaatgctaaaatctgtttgtccttcatttttgttaaactaattagaaatttttacactaaactttgacatgtagtattgagattgttcaaaatttagagtaaaagaaaatcccaatagcctttttattattcaatttcctgtctctcctcctcttcattttcatgagacactgcactaattttttgtctacttttctgatctctcaatgcattgtcatgtaaattaatcacgagatcatccccaaaaagaaaaaggaaaaaaatcataaaagtaaaagaataaatactttgttttattaagtctcaatttgcgc

SEQ ID NO: 99865 - DNA, 2067 bp, Cannabis sativa
  modified_base (2016)..(2040): a, c, t, g, unknown or other
actcacatttagtcaaaaaaaaattatactatgactaaaaaattattgctaaaagtagcaattttttgtagtaaaaagaccaatagtgtttagttgttatattgctattggtgcaaccaaatatcaggtctcatataattcaatgtaataatttttaaagaatatcgtttacttatcatagaacaccatctctagatagtgttagacaccactgatgctcaataaaaatgctcaactttttatgatatctcttattgttgaatattttatatactaataattttttttattttttacattttcaggaacaatggggagatcaacacgcaatccttacttgcctcacctaagagtcggccctgtaataatttaagtactcatgaagaagagagttggagatcactacttccgggtgggtttgaggaaaggattaagggaatgggaattgtggtgagggaatgggtaccccaagtagagattttaaggcacaaatcaataggtggatttatgagtcattgtgggtggaattcttgtatggagagcataagttttggagtgcctatagcagcttggccaatgcattcagatcaacctattaatgctttgttcttaactgaagtgctcaaagtaggagtggcagttatggaatgggagcaaagagatgagttggtgagttcggttatgattagcaaagctgtgaagatattaatggaatcagatgaaggttgtgagattagaaagaggactgtggaattgggtgatgaagttagaaaatctacagatgaaggaggagtcactcgtatggaatgggattctttcattgctcatatcactagataatttgtattaatatagttaatgtagctttgcaatccataataacctttatgaaaaatttgattaacaatagagtaaattaaatgtagttattttacaaattttactttggcaaatttcacaaaaatgaaagtatttaaccaaaaacaagcttcagctgttgtgattatgttgatttttctatctcaaccagcttttgctactttctttgtattattccttcttgcattgtttaagttcatatgaagatttactagaatgttgtggactaattgagacacggtttgaattctcaacttctcatcaatatcttatcaccaaaatggtgtttttactctaaatcttgtgtttaattataggactacatataatcattattgggtaatatatgtgatgatgaacattgtaaacagtcacctcttgcttgtgcaaacttttttcaaggagcaaaaaacatcatttttgtgtaaggtatctaggccaaaccaatatattttagcacctcctagcatttttcatattcatataaagtatacttgaaatgtctagagtaaatcattctaaaattttgaagaaccttctaatagactccactaatctctaatattaatgtgattaccatgtggaaaaagacttgctattttttgccattgtttcctttcttttactttcctatcaataagactatgtttccttcttatgcacctctttgattttgttttgaaattgggtactcttatataattgattgggattttatcaagaaatcttggaaataataaaaacaaaaaaaaaaatggattacatttagaaggagaaaataaaagggtaaataccattttaaattctgtgttttgcaaaagttattaattggaccctctattttgataaatgacaaaatggactatatattttctaaattggtaaaaataggaccctgagctcaatttgcaacaattttattttttaatataaccaactttatgacaatttataacacgaacagataaaaaaaatataactagttttatcataatatctctagatcagattattattaagttttattttaacaaaaaaatcacttcaagatcctatttgtacaattttagaaaatatagggtctattttgtcatttaactaaatagaaaatctagggttcgtttggaacgtcgtatnnnnnnnnnnnnnnnnnnnnnnnnntatattgaattggattatatatcatat

SEQ ID NO: 99866 - DNA, 944 bp, Cannabis sativa
tggtttgcttccatttcggttacaaccatcacacatggatctaagttccttaccactttcattaaagattccattttatcaggctctggaagcaagctcctaagtacatgtgaagagtaaacagctactgcctcatcagaatctagctcgaaaaggtcttgtttaagatctgacatgtctgataccatcactatcttaaaagacaaaggtatattaatggtcttggcaaaactcaacaatctctctcctgtttcctcaattgcaggttttgaagtagttccaatagcagtaatcttgagaagctcaagttgagattcatgacaagatgaagcaagagcttgcatcaggatagtccattgtgaaccgctccttattccaaggtcgattatgtgaatcttcttcgcttccttgacattctcgataatggcttgaattcctgcaaagatagaaagctgacaaaatggaatgtcctggtgaattgcatggtaagtggcggttatagtcaccatcgcttcatccagattaaactgctgaaatgtctgctgaattgactgcaaactcaacactatgtgtcgtccggtttctctatcaatcctttctctaagagcttgacagaaatagtaaaccactctttgaactggatttcctgttgcagaacataacagctcacaatggctaagcaatttgctccctcgttcgaactgttgacattctactttctgagcagatgaaagaagaaactccacaagctcaacatctttagtatcttcaatggaaaggccataaaaggatgattcaaaagggtgtctaagcatcatggaaggagctttatcagcagcatgatgagaatcgaaacattgaatgaatcttgttccagcaattctcaaaatgtcatctgttgacaatttcatcccttcattgcttgttgtatcacaactcggttc

SEQ ID NO: 99867 - DNA, 1499 bp, Cannabis sativa
ttggtactcaacacactataaggacgatttctagagagtggagagacaattcaaaaattaaatggagagatatttgagtactctaaccttttattctcgttcaattaactactccttctattcaattactctagccctttattctcgtttgtagcagaatattgtcaaataatgagcctggatctctttcttgaatttccaaacatttcttttacacagtgtttcactagaaatttgagtgtaccaccttgaataaaatgggttggtactcaacacactatagggctaatttcttgagagagtggagagagaactcaaaaattcaatagagagagggagagagagctttttttttatttattttacttaggattttagtgtttttagcataaagctctatcatattctatttataggctctctactggacttggattaagttaaataggctaagaaaaacataatgagttgtaaatcacaagcgttggccaaattccctataaggcccaaggacttgaatttttgttattttatttcattaaataaaataatcttatttttttaaaaaaaaaatacaatttatctaatcattttatttagatattaattttttatttaataattatattatctatttaatttaatatttattaaaatattcacttaggctgattgaaaataaataatttattttccatctttagtatatgttttaaataaatattataaaaattacttaatttaaattagtctaaaattatttaaaaattaatttttaacttaaattttatactctataaatatattaatatatttttaaaattctatgtatttagaaattaaatacattttttgaaaaaatatattaaataaaataattaaaattaattttcaacacaaatataatttcttatttaagtaaatgtcacaaaaaattatccaatattgaagtatcttgaattaaaaaaaaaaataacttaaatattaattttccatttaattgtatactaattagaaaaaattcaaaatagttaacttaaaaattaattatctaatatttatttgtagattttctaaattaattcaaaaataatctattaaaaaattaatttcaaatatttttataattaattatattgctatgtaattttaattgagttaaaactaatataattagtctaatacaattatttaaacaaggtaggattgttcaagtgagagaagattgggttccatatgacagtattcactactaatggcccctaactctcacacaagacccaaaaaaggaaaatttaacctttatttaggctatgtttggtgggagggagggagagtaggatggatggagaggttagagaggatggagagtaagagggatagagaggattgttaagtttctttgtattgtttggtattaagtgtgaggtgggaaggatggagaaaaaattgattagtaaaattacaaaattgtcattttaaaaataaaatattttttt

SEQ ID NO: 99868 - DNA, 732 bp, Cannabis sativa
agatatgaaggtgtttattagatttgatctaataaatttaactcaactaaattaattcaatctaattatttaataaatgttgttttaaattacgaaaaaacttagtgatcaaattgaaaaagtgatgaataaattttggtagggattgaatgtaaattaaaattctctatttccagcaaaatgtgaaggaagcttggacttctgtgactttgttcattttaatgaggcaatattggtaaaagagtaatttgtgccataaatatttacattttatgtcgtgtagcagataagtacttaagttgcattttttgtggtaaaaataccttcggttacactcttggaacttccgtaggtacctctccgttaactgacaaatcaatacctacgtggcagcccctgatatgtccatgtcattaaaatttttatattttttctaacaatttttaaaaattaaaaaaaaatacttaaaaattaaaataaataataataattaaaaaacaaacatatatttttccttttctcttctctaatctctctctttcctctcgacttcatctccttcaatcttcatcccatttttccattaataattatatcataatacaaaaattaaaaatcattaaacagatcaaatcctcatcctacaccatgttttctttttttttttctctctctttttcttttacactctcttgaacagtcaacaaaatcccaaaaaataagtatgaacag

SEQ ID NO: 99869 - DNA, 706 bp, Cannabis sativa
aaaaaaaattaatttgttaaaatacaaggtttaaatgaaaataaatgcaaaatataaaatctcaaattgtataaacccataaattaagaccaaaattgtaattgaattgccatatgggctattttcataaaaactcaaaaataacgaaaaaatttttaaatatagatttataatttttttttttagatttaaatattttatttaataaaaatacaaatagctcattttatattgtttccacacatttattatagataaataaataataaaaagagaaaaagaaagaatagaaaaaagcatatgctaacagatcttagtggtcaagagaaaatgattatttgatacaaaaccaatataaatatagagagtagagagtccaaccaaacacagtcagattagaaaatcaagtgttttagttgttgaactactacatattataaaccaagatcaatactttatttagagcatcacaaacaatgtaaaaacacatacctcccatgtttgcattttccatattgctatgtcaccaagttcttcaatgtgtctcaagatggtagaagagaacctatgagagcaaacccctttcttttcaccacacacccacacaactcacatactaaacacctattacccttttatagacaacacttaaccctaaggggttatattaggcttattggggtaatgagtataattagtggtggac

SEQ ID NO: 99870 - DNA, 683 bp, Cannabis sativa
ttaagtgtataaaaattaaaccatcagagaattttgccacaaattgttctatatatgtaagactcatcactttgtttttttttttttttcaatttaattcaattaatgaattcaattcactttaccacttctcttactaaaactgacaaagaaaccagaactacaaatatctaagttaaatatccaaaaacacaaaaaccttcttaacaaaacccgactcgtggaaagtgagtgccaagtagtcatgaggtattgatcaatttcactgtttatgtagctaaaatttaaacccttttatatcgtttcctcataatttattccaataattacttggataattgatcatggtagattatttaatatacttatttttcttttttctctgaacctctgcttgtcacatataatagaggagaagaatatatttactttcttattgactgtaatatggacaattagtcctcttgttgcatgcatcagcactgttttgctcaattagaataaaagaatatattcctttaaaatttagtgagtacgtattagtcaatcctagtatggtatggcatcatatgccttaattgagttgaggtttactacttctctctccagacctattgtttgtttttgtcaagaaacaataggttttatctcaaaatcaaaatagagtagctcatatttttata

SEQ ID NO: 99871 - DNA, 1611 bp, Cannabis sativa
taaaataaaattaacatacgtgagttgggacgtaacatctatctagtatatatatatcaaaaaattctcaaaaatcaaaatctcaaatattattttaattttgttttaaaaatacattatttaattaaaataattaaacttatatatattgcacttaacattatttaattaaatttaattaaaaaacttaattataaatttattgtacgtaatatcaccttaataataatatataagagagaattttaatgagctaccgtccaatgatgattaagatggggtccccctagagatgatttgcttatggacaatttcaggaagaccttagatcattgtcatcttagtgcaattccttgtaagggtgatgtatacacctggactaataaaaaccaccgtggaaatattgttagagaaaggcttgatagaggtttcatcaatcacaagtggtctgaattcttcattgaagatcctatatctcatcttgatttttaccactcggatcatcaagctttagcatatattgtatcacaatcggtgtctactgctcaatctcatcagaggcatactcggtttcgttttgaacaattttggctcaaggatgttgactgccgaaacatcattcaggagtcttggcaccatatggcttcggacaatcctacctcttcgctgctgcataatattgcagcaagttcggctgctcttcaagattggaatcttaggaagtatggacaaatgggaagagatatatctgcagctcataaaatatcagtacaccttcacaatagccataacaactcggctgcccatcttcaacaagtggaaaatgatgataaaatattggatgaattactggaaaaagaggaactttattggcagcagcgagcaagggtcgactggcttcaaagtggggattcgaataccaaatttttccattctcgagctaaaactagaaacaagaataataagattaaaaagttacaagctgagaatggtggtgttgttcatacttaggaggaaataagtgttgaaattgttaattacttttcacatttatttacttcaaatggagttgatgaggaagctctcaattatgttctctctgccattccaacgtctatcacaccagagattaatcagcatttgttaatgcctttcactgcctcgaatattgaagaagctctcaaatcaatggcccctgataagtctccacgtattgatggaatgtctgcaatgtttttccaacaacactgggatattgttggtcctcttgttactcaaagtatgctcaaaattttgaatgacggtgaagacatgggttctatcaacactgcccttatcactcttattcctaagattgatcaacccaagttagtgagtgactttcgtcctattagtttatgtacagttttatacaagttggtatcaaaggccattgcagctagatttaaggaggctttaccccatgtgatctcacaaaatcaaagtgcttttctccccaatcgtctaattaccgacaatgtgctccttgcttttgaactagtccactgccttaagaataaaaaacgaggcaggatggggtatgcagcattaaagttagacatgagcaaagcg

SEQ ID NO: 99872 - DNA, 2245 bp, Cannabis sativa
  modified_base (27)..(30): a, c, t, g, unknown or other
tctggattacattgaaatagagttttnnnnagggcataaaacccaacaccaataccattcagttaagtgtgtgtatctcggatatagtgagaaccacaaagggttataagtgtttaagtagtacaggttgcttatatatctcaagaaatgtcaagtttaatgagaatgaattcccattcaaaaccggtttcttaaacacttataaaccagaacaaagaacctcttttccagtcacctcgtggtctgctacttttgatgtaaatccaccatcaacatctcaagttgataaaggtgatcactcaatccagaaccatcctcagccatctgtccaagaagaatcacaccatgatcatgaagaagagtctgaaggtaacaactctctctctgaaattgaacatactgctgctggtttatctccaataactgacagtgcagctgagctgccacattctgactctgaaagttcaccagcacaattaactaagctcgtacctacgcatcctatggtaactcgaagcaaggcagggatattcaagcctaaggtgtaccttgggcagtcgaaatggaccaacattagtgaagaacctgcctctgttgaagctgcacttgcccatctaggatggaacaatgctatggggagtgaaattgtagccttgaaaagaaacaagacttggacgttagtgcgacaaagggctggtatgtatatcatatcgaacaagtgggtctataagattaaaagaaatgcagatggaagtctccaacggcttaaagcacgccttgtagccaaatgattcacacaaaggccaggaatagactttggagagacgtttagtctcgtgattaaagcctctactgtcaggattgttctcactctggttgttgcaaaatcatgggatgtaaggcaactagatattaataatgccttcctaaatggaaccttggaagaagatgtgttcatgtaccaaccaaagggctttgaagatagtgagaaaccagatttcgtatgcaagcttcataagtcattgtacggtcttcgacaatcaccaagagcttggtttgataagctaaagactactcttctcagctgaaactttgtaaattcaagagctgattgttccctattcttctacaaaacacagaagctgatcattatagttctcatctatgtagacgacattatagtcacgggaaatgatgcagaaatgctacagcagttcatttttaaattaaacaagatgttctccttgaaagatctcggtccactccactatttctttctcaaattttgtcgtcccctttcccgtgaattctaccgctatttataggtacataggctggcagttattctttttgggattggttcattcataattgttcatgaaatgtggacaatctctacgtttcatttaatcacacatgggataatatctaataactactcaactgttctttattttaatcctctagatgattattgttgacttggaaggttatgcctcgtcagacatgagttctccttcttggacatcttaatagaaatgaatgctaagtgttgaagaataactcatcacgttatatcccttcattaatattagcaatgtgaggtgatcttcgtgctatgtgtgacgcgaggcggttgagtgttgccacttttaatctacccgagtaagtgagtatcctcttcatgtatatttatctgagtgtatcccacggtaaatatatgtctcgccaatacttgtttaatagtcattatccttgtctcgcgtaaggccacacagggtcggcccaagcattttgggggcctcgtgcaaaattttaaaattgggttttttttttttaaaaaaaaaaacgtgcacattaaaactacaattttattactagcttttttttaagatttatttataaatttttaattataaattttttatttatgtgtatataataggaaaaaaaaaagaaaaaataggccttttcttttaaaaaaaaaaattggaccttaaaagatgggggccttgtacaatggcccaagctgcccaatgcttgggccggccctggctacacagtaagcgagtttgaataattttctattaaacttatatttaattgtaacaagttatttaattgctttttgttgtcctcaaaagtgagtgttctaatatttatactcgcaagtgcacgaatcgtttcggaatataatgttcatgtaagtacaaggtcgaacccatgggagttgactaacatcaaa

SEQ ID NO: 99873 - DNA, 1199 bp, Cannabis sativa
gggcataaaacccaacaacaaggtggttgcctatgcttctcgacaattgaaaccacatgagaagaactaccctatgcatgacctagaacttgacttggtaatctttgtcttttaaatttggagatcttatttgtacagcgtaaactttgagtgatactcagatcataagagcctgtagtatctttttactcaatgggacttgaacttgcggcaaaaaagatgggttgagtatatggaggactatgatttaactttgcagtaccacctcgggaaagctaatatagtagctgatgcactaagtagaaagcctcatggtactttggcatgtttggctcttgaggactgcaaaaatacaatcacaatgggtgattataacttgcaatactatgaaggagaaaaattatcttgtatctctaacatagtggctacactagtggtacttcaacaagttaagaagcgtcagtgggaagatgaaaagttaagacttatctggagctgaatctaggatgatgagcaactagatgggtggacagttaataatgaagggtacctatatcatatatgaagactagttgttgcaaatatctgtgatcttaaggagtccatttttattgaggtccatagatccaagtttgctatacatccgagaagtaaaaagatgtaccaagatttgaagagagaatatttgtgggaaggcatgaaaagagatgtggctatctttgttaactaagtgtatagtttgtcataaagttaaggctgagcatctaagaccttcatgtttacttcaacatttccctatacaagaatggaagtgagacaagattataatggaatttgttactggattgccattgacaccttagaagcatgacactgtttgggtgattgtggatcgtttgactaagtctgctcattttattcaaattagaaaggattacatgcttactaggctagctccactttatgtagacaatatatttcgactacatggagagccttcaagcattgtttttgatggagatcctcaaatttacatcaaggttttggaaggccttgcaacaagctttaagaactgaacttcacttgagtactttccatcatccatagattgatggacaatctgagaggaccatacagactttggaagacatgcttcgctcttgtgttttggattttggaggtagttggggagaacactt

SEQ ID NO: 99874 - DNA, 1239 bp, Cannabis sativa
taaaggtggaacaatggaacctaaatctactcaatacaccattgccttctgttaattggcaatatgaagtttggagaagattgagtattcctaaacatcactttatactctggatggcaatgctaaaatggctaaaaaaaaaaggcaaattgtgcagaagatgaacatatatctgtagatgagaaggtaatgaagcaataaatcatttgttttttactttgtccatatagccacaggtgtctaactcagatcaaagaaaactccagcaataacgatcaaagctatattcaggggtattcataattaagattaatagaatacaattcatggtataattagaaatgtacagattataaaacaaaagttaaaaatagagtcattagcgtattactaggggaataagtttctctgatagatatatagaatatgcgtagggactatttaaatgagatgtaaatatagaagattaaacaaaccttttttaagaggtgctaatagtttgtaattcaattgaaagttgaagtaatatgtacatatgttgctgatttatacaaaaaaaaaaaaaatgtataaaaatttataattgcaatatttactgatgataagcggatttttgtaaggttttttttttaaaaaaattatatttttttatggagcttgtgaaagtaacataaaatcaacttacaaacaactaatattaatatttttgtgaaaacaaaataaaaataattgtatgcctttttatggaaaaaaaaaataataatccgtatgagtattataaaacatgtgcgtccgtattatttttgtaatatttttatctttttagataatcataaaaaattcattttttttgggtcagataataatattttcctttgtttctatttaaacatatacatatcttgtttgaattatgataatcttcggcacactttctctatcttattcttacctcaatattctatattcttagtttcttctcctattgcattttctctatctctcaatgtttttgtttatacatctttcgttcatgcatatagttaattaatgattataatatacatatttatataataagctattacaggcattcacgggatctggagaaaagctctaataattaatgcatatgttaatttattatgcttcaataattaaggcaatgattagggttaactttatatattaatgggttgatcgaaggcatgaacttctatttactcttttaaaatttaa

SEQ ID NO: 99875 - DNA, 1493 bp, Cannabis sativa
  modified_base (30)..(31): a, c, t, g, unknown or other
tactccactcattgccaattggttttgagnnggaaccccatgattctcaacaccactcagggataccacggcctacccaataaggcacacacacacatttgttactcccaagaatttttgaggatcagtgtcacttttaaaaccccaaataagtgctatcatggggaattgatctccgaaaaacaaccaaataagagacttagcataaagtcatttaactaactacaccacacactctcaatagttaaataaatacttatctgctacaaacttaatagttaattattttgttgaagaaagaaagagcttgaatacttaagtataatttatgtactttcatcaactatgtccaattaaaataaattaataaagttcaatttgaataataaaacaatattatatatttgtcttttttcttaaaaaaaaaagtttatttttttatattaaggggggagattcgaattggagagttggtactttttttttttttgtaaaattactatacattgtctataaaaacaaataaaaataagatttattaaacataaaaaatgagagaaacaattactctaatcattgtattctttttcaaacgaataactaatttttctttcccatcaattccccttataggtgaggaaattcaaccaattagttaagatattaaaagtgatatacagatcatatgttataatgtccttatcttaatatatttccttttcatttttagtcaaaaataaaatacattgtactataacttacagtcaattattttttaaatttaaataatatcaaaaatggctcaaaattctgataagtattttctatattttttatatataaaatgtaattatgtaacaaaattttttggtgtaataaatatttttttttattttctttattaattttaataaaatatgttattatttaacacaatatttttaattaattttataatattatttatgtatttaaaaataataattatgtaaatatttttatatgataatattttaatttaaatttaaatacagaaaatatgatatatatatttaatcatacaatacaatatattttatcgtatatcttctatatctactcaatcgtatatgtacctcttctataattgtatattgccaagtcacacttacatttttgttgtttaattagaagatttgttcgtgaactatttaataatactcgaaatttagtacaaatagtttttatagaataaattcaataacaatgcagtattagtttctatatagaatgaatcaataacaaaatccatatttctaaatgagatttattttattaattaattagtgtaagaatctaagttcacattacccaaaaggtaaagtcactacatctttagaaggtttgaaagtaatagagaaagagtaattatagaattattgatttatggagtttatctaattttagtcaacaaataagtggaatggaaaagatttatttctattatatgcttt

SEQ ID NO: 99876 - DNA, 926 bp, Cannabis sativa
ttgccattaagaaagttttggacatttatcatgaagcatctggtcaattgcttaacacagcgaagtctgtcatgtctttttcacccaacaccttgcaatcagctcataattttttccatcaaacactaggtatgccaataagtgattgccatgaacgttaccttggtttacctgctttttccgagcgagataagaaagagatgttcagcgatgttaaagaacgtatatggcagaaacttcatgcatggaatgaaaaactcttctcagttggtggtaaggaagttcttctgaaggcagttgttcaatcgattccaacttacgctatgtcttgttttcggctaccaaccactttttgcactcaattggaatccatgatggccaatttctggtggggatcaactaaggatggttcaaagattcattggaaaagttggaaattgctttgtaagtcgaaatttgaaggaggtatgggatttcgctcttttgtacactttaataaagccctccttgctaaacaagcttggagaatatttgaaatgcccaattctctacttagccgactcttaaagcatagatatttttccaacaatacttttttggaagcaaggcttggccactcaccctcacttacttggcaaggaatccattgggggcgtgagcttttgatagagggcttacgttataagattgggaatggttttaatgtgttagctggtgtagacaagtggatccctggtaataatgttttcacaccagtaagttataatggccctccaaatctgcccgtttcctatttcataacagagcaaagagagtggaatttgcctctcctttgtgaacacttccagccgattgatgtggatagaatagtctccattcctttatgttattttcctagaaaagaccgttacatttggctcatacaa

SEQ ID NO: 99877 - DNA, 748 bp, Cannabis sativa
tgatataattaattaattatttaaaaaatttaaaaagtgaataaataaattaaaaataaataaataataaataaagtatttcagtcttttcaaaattacacaatttgtaaagaaaagactaaaattataattagggccattttcttactatgttaataattagagggcccttttaaaaatttatgagaacaaagggtccaaattagcatttaattgagaagaaattatactctatattttttattatttatggaccataaaatgttattatctattttaagaattttattttacaaattatgaattacattaagtattttactttctataatattgattgtttgttatgaatattaaattatacattaacttttataattgtacattaaaacataatattaaaaattgatgtaaaatatgttaaaaaaaattgatgtaaatatatcacaagttattttttgtgtatataatttttacattatgtattaaagatggtttaacattcattcgatacaaaaaaaaattagttatctaaaaagattacaactattattacaccgcgtgaattaactttttagtatttaaatgtttttttattattataaattaattatttaaatttattaaaattttaggagtgtgttttttgaaacaaagattgcaactttcattaaagcaaatcagctaacaaaatagcttccaaaccagaagggatagaccccctactggaaatacgatcaggacatga

SEQ ID NO: 99878 - DNA, 1599 bp, Cannabis sativa
aaaaaaaaaaaaaagagagacacatgttaattcccacttaattggactcgagtaggaagacaattagaaagcaacgctccaaaatcaaatccttaactttaggcggaactcttaactctcacaattaatctttcttaaaaaattgagttaccacttccatgagattctcctttaagatcctgaaaaaatcgataaacactctaatttattatattcatgaattgacatccaatccttaacgtatttacaacatttttattttaaaaaacaaaatcttatcagaaacttcaattaaagtagctaactaatattatattattatttcaggaataatatcaatccaacttttcatataaaatgtaattaatggtataatcttgtacaaaatatatcattgtatatatatagtaatacaaaaaacaatgtaatccactttttctaatttttttttttttttaaaaaaaaaaaagaaaagttgaaaatatttgtataatattgtgcaaaaatcctaaaatgttaattcaatattaacacaatgtgatcctcctaatagtggaaaaaaaaagagtagaatatttcaccccacaaaaagagaaagaaatatacatatgtatcaatgatttttattttgtaaatctcaaatattaactaggctaataaattgcaaaaattagatatgttctccactataaatataatctccaaatacaaattatttacacaataacaatatattagatacaaaataatatcataaataaatatataattatttatttacaatgggtttgtcctttgttaatgttagagtattgtttgtagccatttttgtagctgcagtgatgaataatatttgttctgcaacagagatcacagttggagatggaactggttggaccacttcttttgattaccaagcttggtcaaaagacaagacttttaaaattggggacacacttggtaataattacacttatatgtatatatttcttcatcaattactatatgtttatttatattgttgatgagattttgaaaatatatataatttttttcttaattatgttaatacagttttcaagtatccagttggagtacacaatgtagttgaggttgatgaaaatggtttcacaaattgccgtacatcaaatgaattagggaagacatttacaagtggaaatgaccaaattaccctcgacaagcttggaaatagatggtttatttgtggtattcctggtcattgtgatttgggcatgaaactttctattaatgttattcctatttagttaaaaacacactgtaatttattgttttcagatttgagatcaataataataatgatggcacattacatttgttactcatgtattgatatttttttttgttgaaaaggaaatcttcattaataacactaacacaatcaaacaggattagacatgtcaagagagatttcttgacttgcacatgagggctcaaccccaatttacatggcactagttttgttagtcaaaacataattggctaaaacatgagctactctattggcctcacaaaatacaaacgagataccatcaacactatcatacaacaataaagttc

SEQ ID NO: 99879 - DNA, 593 bp, Cannabis sativa
ttctaggaatgatattggagacctttttatttggatgaactataccacaatggtgttgtttttttttttcatttcaaaaaatatttttgttgtggttttaagttgtcgttaattttatttttttattttaaattatatatgctactggtttttattttagttaaattttttggtgtagatttttatttatttagataattgaaagatattaatataaatataaatctaaaattaaaatttaagtagaattatagttataaaaataataaataacatataataatatattattggatgatatatgtgtagttgaataaaaagataagtgtagtgtttgcttcaataatgaaggagcatagtgaactatatgagtatttactttaaggtgtttattttatttggaatgtttatgtaataaacttttaagtatttatattttgaacttattatgttttttttttgttaatgaagtaatgaacatttgtcatcctatacacgattctacaaataatggtgatgatatgtgtttggtggatagtgcaaccactcatacaatacttagaagtgataaatatttttcaaatttatcaaga

SEQ ID NO: 99880 - DNA, 2350 bp, Cannabis sativa
tttgatgtaaaaatttctataattaattttgaaatatttggcactatatgttgctacctttagttcaagagcacaatccaaacattgtatgtaattaaatttataaccatatttttgattataggtttacaagtttaaattatatatattattattattctaacgtctaaacaaatgtattgtactaattatttagaaactcaaaaataagctctggaactttctagcgggctgtatcccgtctctctggtttctcctgcattctcaaaattctggatccaatcctgcgtttctcatcttggtgatgtcgttttgatgcttcattcctgtgttttcttaattctcttttccttgcattgggtttgacttttctgttgctctgtttgttcatttattgctcttcccatcaactaattgtcattaattgctctggtgttttagatttcttttagatctttttcaggagagtttatttgtctcttgtttccttctttggttttgttttggttccatttaatgcatgtcgtcgttttgagcagcccaaggatggaggcgatcattgctcctaccggctatggcgatcctatagggatactgaaaggactgatatggcatcttcagataaccttcctctgcaagtatcctctctccaggtatttctctaaatttctctatttaaggttttggtacctgttgcgttctcttctcatccaactctttgtccctagtctccttcctgtagctattcctttctctgtcctcttgagcctgttaatggattccctagcccttaacatttctgaagttttaaatctcactgaccgtgaagctgttgttcatgatcttgaggatgacactgggggggttagtcaacctagtagaactttctgccttgtatttagaatcctttcccctagaaccatcaagcttgagtggttcgaagtggcaatgagaaatgcatggattacccgaggccctttaaccttctctgaatatgggtcgggtatgttcatggtgaagtttcattatgagggagacatgcaaagagttcttgagggccagccatggcactttgaccattgtttggtcacctgtgctaatcctgcaggtctggatactcttttacctaaccagcttaggtactcacccttttggatacaagtccactcgattccttttggccaaaaatctctgaaacttgccaagctgattggagacgaagtgggggacttcctggaggttgacaagattactcttttcaaagtctctgagcttttccttcgagtctgtgttctcattgatatctctaagcccatcactcgtggaatcatggttgattttaagagtatccaccgtgagaaatggctcactttcaaatatgagaacttgccaaatatttgctttcattgtggcctgtttgatcataccctcacgaagtgcattgtttaccttcaaaagtgcgatgatcgtgcttacccacctgatcttccttataaaatacctctcaaagcccctccgaaatcgaattttaaaagaaacccgtttgatctctcaaactctctacctttggatgaacctcctgcacaacaggaaaatgttgaccagtcccttgcagctgctgtgagccaatttcttaccactgaagatattggcactggttcctcagatgctgcctctcgtggtaatgttactaccatgggatccctgggagttgaccatatccaaaactctactggtctaactcatgagagttcacctttgagccatgggagttttcactctactgttatttgtgaccttcccttcacaactacccagcatgctacggttatggccagtgaaagtggcagtgaaggcactgctgtggagggtgttattccaagaaccactgaaaaagctaaggggaaagcagatgttggggctaaaaggactgcttttcttcctcaaacggttgtggttggtgattctctcaggaatatcctcaagcgtgctcgagctggtcctaccattgctgatgtttctactgccattaatctctctttggaacaagcgggtgttgcagggcaaccccgcccagaaaaatgagtctcatgagttggaatgcccgaggtttggggagttctcgggcattcaaaaatctctccctttttgtcaagaaacacaagccaaattttctcttcatcatggagactaaagctgttgccgcggccgtggacatagtttatgtcgtagtcttccttttgacaatgtgtttgaggtgcctagaataggtttggggggggggggtcttttggttttgtggacttcggatatttatgtaaatattttaaactcctctactaatcatgtt

SEQ ID NO: 99881 - DNA, 2922 bp, Cannabis sativa
  modified_base (2374)..(2401): a, c, t, g, unknown or other
atatttcgatacatacgtgatttatgcaaatcctctctgtcttgcttatcttacactacgcaaggtatagtatgcgactagaccctgtcaaggtcgcatcatctcgcgagttcgaatcaagcgagattaactctttgagagtcatcaattaattaacagctcacccattcctcgggaattggatccacgtatcaattttataggagactgctctcgagtttttaggcgaaaaattcgcaatataacatcaatccatggtggctagagtaactggatgacactttaaatttgttaaaagttcattagtttagaaaattttaccgctaaaatttaaatttagagaattaagtgtaagtgaaacgatagttgtaaaggtttagccacaaaaaaaactcaaaaataaattaattttctttgtatataaaatattaatgggccggttcggggcggccagcgggttaaattgcaaccctacacatgcaggaaagcagctgagcttcaaacagtgaaatcagaaatggagaaagctttgagagtatacggtggggttctgaggctggtgaggcgcttacccaaggaaaccagaccttattacgcgaagtacgcccgcgagaactttgtcaattacagagaagccgaagttggcgattctaaagccctcgatgagctcttccacagagcctataaccattccatctgggtcctcaacaaggtactaatttctggttctttctcaacattatatgatctcattatcttgtctcgattgtgaattaagattctttttcttctttgattgcagtattcagtggatcaatccgttgcaaataatttgaaggatgtctgttacaattaaattctacatgcccaccaactgtttgttggaatgttgaaaagaacactggtaataactaaaagatatatacatttcttcttttgctgttttaataattttgttattgtatacttaataatacttaatgtatccaataaaaacggtttcaaacctcttctttcatttaatttagctacagtggttttgattatggttacggtttgaacttgttgcttactttagcttataactttcattatgagtgaggtgaggccatacagagatagatactactagctttgctaaatggaaggtataactagttatatgttagacttgttgggtagtttttttatgctttttttggataagcaacaaactttatagcaactctaaacaaggggtccgtgatggaaacaaagggtttcatgtccttaagaagaaaacaaccgaaagaagcaaaagaactaacccaatttgcaatatcatgagctgctctattaagttctataggatccaacataacttagcattaggcgacagatcaaaatttctaaataggttcaagaaaagaactttatccttccaactagggacattcctcatttcaacaacctgcactaaagtaaggcaatcagaaaagaaaactgggtttacccaacaacgggataaacacaatggcaatgcaaacgcatgggcaagagtcaaggcttcggcttctaaagcactatgataccacgaaaggaagatttgataccacaattgtcatgctgtgagagcctaggaaactaggaaaaagatgtgattgattctcttgagcttcccttggtttggcttggttagtgcagtagtgtagtgagttcaatcttgtcactggataaatctttatccagcaggcatagctaggaggattagcttgaaagttcttaaattcaaggtaagtctatctcaatctcgctatatttgtaaggcaagggaacatcgacttacaaatctggtcacaaaagatcttttgcgctgccttttcttgctatagtctgcaaattacacatggttgtgtaatggactttttacattgatgatgctgaattctgcaaattattgatacgtagtgcaacatagagagtttatagagatttatattactaaagtatgtgtcatttggtgaagtgcaggagtatatgaagggtgataattgtttttagaatcctttcttttgtgcagcatctctaatcacatttacctagaatgttagttgatgaggaataaaacaggaataattactatttactgtgattatgttatatttcgaatggtaggaggcgctatttacttttgggaatatagaatgtctatcaactaatttttttttggggtttccaagccaagtttgggttaattgcctattcttatgttaattgtttattgcttatgcaaattatttagatcctctttaaactcttttattcttatttaggaaacatttattctctgtctatgtatattttacttttatttgttctctctctctctctctcnnnnnnnnnnnnnnnnnnnnnnnnnnnntatatatttatatatatatttgtacaccagttagtatcagagattatattgtatatggtgtgttgctatgatgaaaacttatgtatgttagtgaagtagattttgatatttcaattgtgtgttgtagttatagggaagaaaacttgtatgcagtttgaattgattgaattgtttaaatttatattacacaaggtcaggttacttattgtctattttcaaatttaagcatggtagagcttaaataagcaagtcatgtgcctaaaataagttcgttgggtgaatttacaacacaatcaattatatcaataacagtgagtgagtatgactagattaatcgtaattaaagtaaacgaaaacccaaaaattagggttagaagaatttaactaattttggggaacaaatgattattgtccaaaatttattttcccaaacatctaatgatgtttgaagcttttttaatatgaaagagaagtgagatacacaagtctttgaagttcatacaagtcaaatacttcttgat

SEQ ID NO: 99882 - DNA, 595 bp, Cannabis sativa
ctccaatctgctttactttcagccctaatcttcgaaacagacttaaatgcttggaagctaaaccttaacagcaccgaactcctccttattgttctaacagtaagtcaataatattataatatatatacttgtttcactttgaccaaccacattcaggcaaataaaagaatgcatgcatattgacttattaattatgcgtattatataggcaagctttatgggtataatccgaagttgtgttcatctgtggtgcatgaggatgaaaggtccactatatgtgcctatgttcaagccctttggtgttgtttttgccactatttttggtactagcctccctgcaagtactcttcgttacggaaggtatttattattaattttatataattatgaatattgaaaagattctcataattaatttgcatacgtacgtacgtactaattgtatataaaataatattattgtagtgtgattggaacggctatagttggaatggggtactttacagtgatgtggggtcaactaaaccatgaagatgaagtgagtactaatagtaataatactaaacaatatgatgttgagtcacctccacaagag

SEQ ID NO: 99883 - DNA, 719 bp, Cannabis sativa
aagaagaggtgctgctgaggctagtggataactatcaggtatcttgaaacagtatctatagtgacagaaatcaaagattattacccaaccaattttggtgtcagcatactgttaagaataaataggatttattcccccgaacgatgacccttgtagatttttgtttttctctgttgcaaaaattttccttgaacaatacaaatcattgcaaatattcttttggagttgcattttgctcattttgttaaacaatttgttgatatagcactaagacaactttaatttaagccagttcaagattctaaataaaaataaatgcataaataacagtttaacaatgaattatgagggtaattatgtgtttttttagtgttattatttgtatgtttaatgccaattaagttaaattttaagttgcttaaagctatgaaatactgcaattacacttataagttatagcgacataagcaaattattaaaaaaaatgagaaaaatacaagtagaggaaatattcaggggcagtgcaaaaatcgtatttattgttatgttaatatgtatgtacctttgatggacaacaatgaaagaagaatagcctcctttggtgatggtgccatcagcatcaacatgattgaaagtgtaaacagatcccttttggcaatgattttctaggccttgattacagtagtggcaatctctacaagagttaacgtatgttccaa

SEQ ID NO: 99884 - DNA, 846 bp, Cannabis sativa
tttttaataaattattaaataagcatttaatgatattaaattttgtttcaagatttgcaattatacattggagtataataataaaaattaataaaaaaaaaatatcacaaaactattatttgtaccacatataaatcaattttttcatttttcattggagaagatctaatcttacacagaattaattggattagtcacccagcatgaccaaattagttcgataaaattatccagtctagtccaatcatgtgtgccaaacaaagaaatttttcaaagctgttaaactgggcttcattaatcactcatcatatacataagaccaaacagagggtaataatctttggtcttccaaactggacagtactaatcttaacatttaattaagccttgtttggaacttgaattttatttggggggaaaaattaaatccaagataattccaaccccaacacaactctcaactttggctccacctcaacaaagaagtgtgggaaagagaaaactaaaactaatcataatgcagaatcatgagccggagttactagttattgattaaaattgatcatatacatatatatgatgcctatctacattcaatgacataaatttctgcttctcaacaagcttggcaattgtactcgaaaaaaataaaaaaacaacaaacttgtcacttggtcagcccgctacgttgcatcacagaaatcaaattatacaatatattcaatgccgcacacaactaagtatttaacataacataagcttatgtacaaaaactcttgacaccaacaagatgaagggaaaggaggggaaaacacacaccagatcatattaagcctataaagggac

SEQ ID NO: 99885 - DNA, 1207 bp, Cannabis sativa
tgtgatataaaatttaagtatttataaataaatatttaaattttattaataatttttttatataattatttgtaaaatattatttaaaatttatataaatataatataactaaagtttttaaatatacatataattttgtaattgtaaaaaaaaatatagaaaagtaaagcaggaatttaagtctgaatatgaaaatgagctaacccatttaaaaaattaatacgggccgacaagttcaaagcacgacacaaatccgagcacgacacgaaaataccgagcctatggcccgtgttggacctaccctttaaaaatattgacacgatacggtacgacccatttttttaaaagcacgaataaatactacacacacgaacttacaacactacctgtctacctttaacttattgccacataagcgaagttttcaaaaaagatgtgtaattaaaggtgaaaatttgaaacaatttgaacgtaaatttttgtaaaaaaaaattgaagacaaaattttacaaaagtcacaaggtactaacaaaatatattatataatatatatataatacatatgatatataggaggtgtgctattatcaatctctcttattaaaatctattagttaatattcgtgcttgaaaatacataaaaaatatttttaaaattttttttatgacgataatcgttatagttacaatattattatctttaaattttaattttttttttaaataatttacattactgaaaaaaagttcaaagttttttgaacactattttcaatgtaaactatttgaaaatttttaaaaatttacataaataatattgtcactatatataatcaataccgctatgaaataaattttgaaaaaaaataattgactaaaaaattatataatagaaagttgtaatatttaacactcatcaacatataatagcaaccaagaaaaaaaataaaaaaaatacagttctcatccgtttaagactcattgcttcgtttcattccaagttttattcatccatatctctttaattagttgcttatttaatatatttatatattattttagtcttcgttcatataatataacacagctatatatgatcagaaatgtataataatcaactttctcaaaaaattatagtagaaaaaataaaaacttaattattccctttgtaattatattgtgtttatatttatattatatatatat

SEQ ID NO: 99886 - DNA, 740 bp, Cannabis sativa
ctcaaaactactattcaaaacccattttccacttactttgacttttaattccttaagaaaagtttgcatttcgttatggtcttgtgttgttgccaaagttataacaatcaattaatgcttaattcacatttgaaatgttttttttaagaatagctaagctagctagcagtatactgttctttccaatatattataaaatgaaatattcaaatagtcgtaataagagtgtctctaagcaagtaagctctgactttaattgttcatattcttattttttttattcactttattaaactattgcctcttctttaatttacaaacaaaatctttggtacgttggaataaaaaatcatatctttttagtcctcatagattttatatatatatatatacatatatataattaaatatcacttgtagtcttgattaaaaaattgtaactatatgtcatatttagtcataaagttgtccaactttagtgaataaatttgttgtgatcatagaacatatatttaatcacaacacaacaaattgtaattaattttcgtgactaaaatttataggcttgtctttttagtaattataattgatacgtatttgttgagaatcatgaggttccatctcaaaaccaattggcaatgagtgaagtagtccatattcttatatatggctcaatcttttaccatttattctatgtgggctaatgttcacgatacaaccaaactccaccatagagtttt

SEQ ID NO: 99887 - DNA, 1228 bp, Cannabis sativa
  modified_base (1198)..(1202): a, c, t, g, unknown or other
aaattatataaaactcgatacttatttacactaataaaaatataacacggacaaataatattttttatcatttctcttttctatgaggacgtcactaatagttgcaataattccaccctctcttgtttgcaactacattaatcaagaaatgtttgaatttaatacatatatgacacttcaaactaaagttacttaattaatcagttccacttcaacttaataaaaaagaaacaaaaacaaaatacgtccccatcagactataggacaagagatcaccactcctcctaataatagcaaataaatataaaaaaaaaaaaaaaattcaaaatctgattcttctgaacactacccacatgggaatttttgtgtgtatagctacaatatgtggaaacagcaaatacatatacagtcaaacctaatgaatgaatggtcactaatatccataaataaggatatttattgatattattatttttgaaaatatttaatttttattgggttgtggtccgttggttgaaggggagacaacataagtatatttctgtacccaaacacacattaatttaataatgatatgatatgggaatatgcagtaagtccacagattttcttccaaattcatcagtttgatagcaatttttcatagcagtagccgtgcattgtatcgcctgcaatattattttctgagtggtccatttattattattaagatttttgaaagagtagctagaaaaaaaaatataaacgaaaaagggatcatgaacataatgttatatatatatattggaaaaatgaagagtgatttttcattgtttttaactttattcattgaagaaggacgtagacaagtcgattacatttctggctatagttgctgtttgggaacaaattaattaatttcatatatatatgtacattgggttggttggtttataatgttggaaaagtatcctcaatatgttggggggaacatatacactttcatatgtctttttttttttaccaattttatatgcttatgttttgtccaaaacaataccaacaaaatttgtatttatataaattaaaataaataaattaattaaaagagcttctatgcataccacatatatatgtatgttttttctatataaatatatacataattacacactacttacataagtgttcatgctatttatttatatatatatatatnnnnnactatttaatggttacatttttattg

SEQ ID NO: 99888 - DNA, 1768 bp, Cannabis sativa
atcttgtgccttctttagagttttccatttattccaatcccaacttctttgacttgagtactatgtcaaaccctcgtttggtctccacacatatgccatatgcatctctttctgattctatcaagtcttcttctaagtctcgtattgtctacattagtcgaaaccctcttgatgtcatcgtatcgtattggtattatgtaaacgatctttcagaccatggtcacacaaacaaatgtagtattgaagattttgtggacatgttttgtagtggagagaatagttttgggccttattgggatcatattttagggttttggaaagcaagtttggagaaccctaaaaaagtattatttttgaagtatgaagagatgaagaaggatagtattggtcaagctaaaaggattgcaaagttcattgggcttcctttcactcaagaggaagaaaataataatggagttatggaccaaatattggagatgtgtagttttaataaactaaaagatttaaatgtgaataaacaaggcaaatttaagcctcacttagataataaattcttctttagaaaaggggaaacaggtgattggatcaatcatcttagtccatctatggtagaacgggtgaacaaaataactcaagaaaaattgaatggttctggtctatcattcattgaaaatatggcctagctaatatatataatttctagcttatatttatttgagttataatgtgtgtgtgctttgtatattatgatcatttgcaataaattaacattatgtacgtgcattacattgtataatgagtattattattagcacataattaagctgtattggagatgtatagtaaaagtgaaagataagtattaaaagtcttgtaaatgttcagaacttcacatcagcaaggtatacataattaaacttggttgggtccaaaaatttgtaaattaagttaaatgataccaaaatttttttgggggaaaatctcgattcctaagcatcaatttgttctctggttagcaacattgattgtctttatctcaaatctagacttttcaaatttggtatatgttcaaacaattatctttggttactttgtgggaattaatgtagaggaaaacaatattgggtcatattatctttgattgtcattttagtaatagttgtttaaggaaatcagggagtggattacctagaggactaagcatctatttggcagctttagttaatttggaatcgttacacttacactacaggaacaaaaataaatttctttggaatcattacatcagtgttaaagtgtctagccattagtaacaagaaaatgaaaaacagaggaaatgaaagagaggaagaaagagagagcatagatatgagaaaataaaatgaagtcaccattacaaaataaaataacatcattggcaaagcaaaagtgattcattttcagcttctcacatcgttcaggaaacttaaagtcttctcttgcaccaactttcatcataattcttgacaaatattctattctcaacacaaaaagcaaaggcgacatcagatttccttgtctcaggctacgctttgcttcaaaaaaatcatgcatggtcccattaatcaataaactgtaattaggagttctcactcatttcatgataaagttgatgaagttagtagggaaattcatttcaactagcatttcctctataaactcccattctgtttgtatcatataacttagaattgcactctcagtagatagaatgctctatatgttccac

SEQ ID NO: 99889 - DNA, 1097 bp, Cannabis sativa
aaaaaaaaaaaaaaaaaggtaaagtatcttcctttggaaaagttagaagggagaatacgaaattaattagaacaaataattgaaaaatcacataatataacagaatttgtattgttagaacttcccatctcatcatccattttcatataaaaaaacacaaaatacttgatgaattcccactaatatattggaggagatcgaccactctaatctatacattatacatccataaatctagagtttcaattcagcaagtcgtttgatatcaataggataactgtctgactgaagttgagagttataatatctttttacaattaacacactagcagcctctgttaagtggaaagagtcccaaaataagtaggtttttctatcaggacatggacttgctgcagtattacacagacctaaaccatttaatgggcagcagcttttgtttataactttcctttctgaaaacagaaaaaagaaatccatgaatatataaaactacactctaattttttttatatagatatagttactaatgtcatacttttctcaaactaaatacaacataattaattagacttaaatttgttataataaagaagagaaggaaataaaattaatttcgtacctttaagaactggatcgctagaacctattccaaagtaattgagataaatgaacttggcttttgggtaatggatattgaaatgttcaactaataatataagttcatggttaaaaaattgaactgcttcgttgactttttctgcgcaggtgcacccattccttgaccctgtcttttttgccaatgaatttatagcaaatggggtgcacccaagtgctcctattccattgagggcaaattttcttgcaccattgttgtataatctctggcaaatttttaaaattgaaaataaattagtaccaaatatataggatagctgtctcacgtttcttataccttattaagtatgttaattcttctttttttattttatatacgatgttgcacatatgatatagcaactcttttattagttttcaaaaaatgtaaataatttgtgctgcattaattaaagttcaaaacaatttgtttcacactc

SEQ ID NO: 99890 - DNA, 1079 bp, Cannabis sativa
gagaatggaattttgaactgttaaatgaattttttcaaccaatagatgtggaaaaaattttgaccattcctttaagtttctttgccgatcaagataggttaatatggcaccattctacatcttcttacaatgtaaaatcaggatttcatttggccacacaattggaagatcagctgcaatcttcttcttcagatgcaaaccgagactggtggaagttcttctggaatttatctttgccaccaaaaattcgaatctttgcttggaaagttatccaacatattcttcctgtagctgctgctctttttaagcggaaaatcattgattcatctacttgttctctttgcacatcaagttgggagtcaataggacatgccctttttggtggtcaacatgccaagaatatttggaaggagtcaaaattcacaatagatttccataaagcacagtccatgtttaatggagactacctgcaccatctttcggcagtttatagtcaagaagacttcgagcttttcatatgtttgatgtggggtatttggactgacagaaacagagtttttcatggtggacaagcacgtaagagtttttccataattgcctataccacagggtttcaccgtgacttcagccgggccaagaaattcaccataccagctgctgctgctgcaacagagcagtcactcccacaccagacttccaagcaatcggccttccagcagcaaattccatggtctccacccaacaccaatggcttgaagttaaatgtagatgcaacctccaatcatgaacaaaaaaaattaggtattggtgctattattcgaaaccatgatggaatggttgtggctgcattttcaaaagtggttcaaggtagttttcgatcagatgaaatggaagccaaagcgctcttccatgctctcaattgggtatcgcaatcacaactatcaataatgcatattgaaatggatgccttgagagtctctactgcattaaattccactgtgagtgatctatcatgtttttctgatctcatatttgatatacgttgtctattatccttttttcctagtgttttagtttcc

SEQ ID NO: 99891 - DNA, 5471 bp, Cannabis sativa
aacctttggcacgaatcacatttaaggacatagtctatacaatattttttcattgttggccagaagtatccttgtctcagtattttctttgagagactcggacctccgatataatctccgcagaacccctcatggacctcttgtatgatctgtctagctttagggtccgatacacaccttaagtgcggcatgctgagtcctctttggtagagagcattatccatcatcacatatcgatgcgcctgatactgtagccttctcgatagggccctttcttgaggcaactcacctttggttatgtatctgatgatggggtccatccaacttggctcttgctcaattgtaaccaccgtatctttaattctaatgctcggctctgtgaggtgttcaacaggcactacccccagtctctctatctcactgtccaaggccaacttagccaaacagtctgtgtgagcgttcttttctctggggattctttccactttatactccctaaactcatggagcaactcccagagagcaattcccggataatagctatgtacgcagccattttctctccacacgtttgatattctcttgcgacttggttgaccaccagttgcgaatcactgaagacttctactcttgcggctcccacagcttttgccaaacacagggcttcatattcagcttcgttgttagaagctgggaatgcaaaacacagggctgtctagaggcggagtccgtgtggcaatatcattgctatcccaacaccggatccgttcgtttgactcttcgtcaatcaataccttccatgctggggttcgcggtactggcacgcttgcactagcttctgcttcattgcactccgttatgaagtctgctagagcttgtccttttatggaaatacgtggtacgtagtgtatgtcgaactggctcaattccattgcccatttgaggagtcttcttgacgctttcggcttctgtaagacttgccgaagcgggtggtttgttagtaccctgatggggtgagcctagaactagggtcttaacttccttgaagccatcaggaggcaaaaaactaacttttcaatcaacggataccgtatctcggtccctatcatacgcttgctagcgtagtacactggatgttggaccttgtcctcttctcggactagggctgcgctgacagcattctcagagacagctaagtataacagcaaatcttctccgtgaactggcttcgatagaatcggtggtttagccatgtgctcttttagtttttttaatgcctcctcacattcttcagaccatttaaatttttgacatttctttaagatgttgaaaaagagatgcacttgtcggttcatcgggaaatgaatcagcttaaggcagcaacctttccagtcaagctttccacatctttgtgcttcttgggggaaggcatgcttagtaaagcttgaattttttcacggtttgcccctattcccctttggctgatgatgaatcccaaaaatttccctgacttaacctcgaaagtacacttctttgggttaagtttcattccatacctccggaccacttcgaagcattctgcgaggtcgtccgcatggttcatgcatgctttggacttgactagcatatcgttcacataatcttccatatttcttcctaggaggcctttgaacatccggttcaccattctctgatatgttgcaccagcattttttaattcgaaaggcataaccaggtagcagcatcctgaagctagtgcactcttgatctgcaacgtgcattttaatctggttgtagctggagctggcgtccatccatgatgaaggataatagcttgaattgaacccaaaggtggcatccaccatttggtcaatccggggaaaagggaagcagtctttttgacaagccttgttgagatcggtaaagtctatacatacccaccatgtcccatttggctttggcaccagtaccggattggccagccattccgggtagtacacatctcggatcaggccattggttagcagcttgtctacttctttttcagggagtctgcttttactgggtcaaggggacgccgcttctgctgtactggcggcatatctggattaacgtttaggacatgggtaatcacatgcgggcttatgccggtcatgtctccttggcaccacgagaaaacatctgcgaccgcccttaatgcttcaataattttgtctctctccttcggctctaggctttttcctaggcggaggatcttggtagggtcgaggtcgcacacttgtacttcttcgacgtcctccataggttctacgattttttcggttcccacacgaggatccaactcgtcctcttctacaaatcctggctcaataccctcacggaccatcaacaccggcaaatgtgttgtaacattataccactgcctgctctttccctggtttccccttacagttcctactccggcctcctgagtggggaatttcaggcacaagtgccgaatggatgtgattgtgccaaaatcaaccaaggttggtcggccaaggattgcgttgtatgcagttgggcaatctaccaccacaaaggtgcagtacttaaaagtactctgaggagtatccgggcatagggtgactgccagtctcacttttcccattgggagaagcgtggttccattgaatcctatgagttgggagccgctgggcgacaaatccctgtccgtgaggcctatggttgtgaaggcttctttgaacaataaattcacagaactcccattattcaccaatattcttgccacaattttattggcaatgggagtctctatgaccagggggtcatgatacgcaccagtttcgcatcttctttcgtgaaagtaatgggctgatccatgagtcggggcctttgtgctggaagctgggtgacttcccacacttcatcatgctttatggccccgcatagcgcttcaattcttttctggtggttcccctaatatggggcccaccaaagatcatggctactctcccattaggtctcggtgggagcccagggacctattgagggattgctcctccagaaggtacaacgggtccaccccctagtgccgcttgaggcaacgggcctcctaccggaaccaggttgagatggggtagtcagttattaatccactcatacaaatggcccaaccggatcaagttttcgatctcgtccttcaaatttttgcattcaatggtactgtgaccaatatcattgtgatattcgcatctcttgttgggatcccttcgcaaactgtccctgtacaggggcggagacttccggtagtgtgtgttttgccttgtggtgaaatacactcgctcctgcgtgtccgtgagctccgtgtattgtgtatattgaggggtgtacccccttcattgtcgcttgtcctccgcctggttgctaccctttgatgacctcttgctctgggagctttggggaggccttgtcaggcttgcggtaggagcgaagtgagatgggacttgaccactaatccctgaggggttgcttatgggattcctaaaatgtgatgatgcgggagccaaggctaagctctgattatatcctggtgtagaggagaattgtatgccgctcatttgaggagtggccgggggtatggctcccgatagctgagctccgggtaaatatcctgatactccggttggatagtatcccccgtaggccactatttgagcttcttccaagttaatgtatttttcgaccctcttctggaaatcttggagattggccgctccctcctgttgtaattcgttccagaatggggtccccgtacagatcccagcttaaagcagtgcaagttgttgtccgtcatccactttcttagtctttgaagcctcctctttgaacctttttataaagttcttcaaggtttctgcgggtagttgctttatgttagtcaagtcgttgactttgagattaatctttctcgctgcgacaaactgtctccggaagctgacttgcaacttgttccagcagtccactgatcttggttccaattttttgaaccattccttagcgaaaccgcttaatgttagcagaaagcatagacatttggcatcattgctgaccctcataaccgtcattactcggttgaaacgagataaatgattgctggggtccgagtctctggtatacgctgctatctcaggcatcttaaaattcttggggagctctgcctccaatatgtgttgggcgcatggctctcggtcctcacaatcggaatctgagtcgtcccctttttgcctccgaaagacccgagcaatgtccttgtgcagtattaaatatttagaattaactcattcataatttaaaatacaataataaaattcatataatttaaaaaattatggacaccaaatattgttcaaataatcccttaagaagctcttcgtggtttcctctgtcaaggaacctcagtgtaatcagagtgaataaagttgtagaaattttgtcttgtataagtataaataataatttttgttacgtaggtaactttaattttctttaaaatgaaaaagaaaatagtatatataaatgtacattatgcttatattataaaccactagagcataatctaccattgatcacaacgtcttttaagttaaagtcactggtaacagtgaaatgaacacagcctaccagaatattcaaacgatcatagttttggtgtagccaatcagcaaatcatttgtccaattagcatggtccaaccatgagctactttacatatataattacactatggagcttatattactataagatctctggctttctcaataaagcattcttagcatataaatatgtatctaatgagaatttccacatatctattagatacaaaattcattaatcttttgaatttttgttgttactctgtgtctagtaaaagttagcgctcaataaaattattctaacatattactattagtgtcactctgtgcagtgtaatgttgaatcattgattgaaagaaaagaaaaaaagacatcaataaaaagaaagcttgtaatttggaaggttgcttcaaaagaaaaaccattagtcttactctgcttctctgcttcctcaactatttctttagcttcaataaattatctctttgagacattttatcaaataattgtcttgcaattaaattcaagaattttcaagtatataactaaattgaagaactcctcacaagtacatctacattcaaactattaatgcaactttctgatgttcaattttaatttaataaacattacattgctcaaaccataagcacaaactaggattaatgaattaacataaatcaactaaaagcaagagaagaataaaaattaagaaattgatcgaaactgaaaaactatatataaaaagaaaaaaagatgataattactatcgtcgcatgtatgtacaagtctggcaacatttcaagcacacc

SEQ ID NO: 99892 - DNA, 817 bp, Cannabis sativa
  modified_base (28)..(31): a, c, t, g, unknown or other
  modified_base (573)..(574): a, c, t, g, unknown or other
atgcaacataaaatgatttctgatattnnnntaattagtaaatctgattatgttgaaatgagttttatttaggacataaaatcctaacaaccagcagacacgtggtacaaaccattacaaccagataggtacatttcatgtagcttccaagtgaagaacaaagacagagatatacaagtattgacaagaccctagcaagatgaccagcaggccggacaacttacagccggcagaataccaggtagcttacagcctgcagaaggctgggcagcttacaacctataaaaggttgggcaacttatagcctgctaaaggtcaaacaacttacagccttcacttcgttaacctaaatggactgtgtttctttgtatgggccttctagaagatctgcaatagctcctacaaactctggacaacttaactgcccacgattttagggattcaacaccagaatgtaactttcctattttctagggatattttatatctgttataaaatgacttgtaaatcctaacactatatgaaaggccttaaccctacgtgaaagagacctctctctctctctctctctnnctctctctctctctcttaattcattttatacatgcacttaagagttcaaaattactaagtctctctccttttcttatcacttcacaagttttctcatactttttcttattactgtatcaatgaagagagccctagcttgaaattgtaaggtttcagcctttaatttgcatgatattatctcaagagtaaatacaacaaaaagggagtatgtcattacctgatcaaaggggccaaacctctata

SEQ ID NO: 99893 - DNA, 1111 bp, Cannabis sativa
gaaaaaactatcacaaagctctaattataccaacacaacaaataaataaattacaaaggctttaaagccccaaaccaatcaatatctacacttatagttttaatgggaatgtacctaatagcttatcctattatgtacaatagtctttattacattttttgacaataattagctctcttcttgtgactttgtgctcctaaaaccaatatttctagccatccatattatgtacacagcagcaagaataaccgcaaagaatacattcttcaacaatccctaaaacactttttcaaactcaaaatttaacagcttataggaaaatgaaatattgtaagtacctgggtcaacatttcggatgctcttcaactaatctttaacagagacaatcttacgccaataccaacttgcttcaagtggggcgcattatgacgaagaaggtgatgaaatacatgcatgtatatgaataagaagaaaaatgttctctatgtaattttttattttgtgtgaaattacctgatgagtattcttcatctttggtagatatatgatcaaattaaatttgcttaagttagagtcttacaattatgatcacatattgatttaacatattctacaagtgattatccactttgttttgccgacgaaattataagttcgacatctattatgatcacgaggttatatttgtttttcaaatttttttattataaaatggttgatgtgacaaagttagaaaatctcaaagttttgtagtaacttaaaacaattttttaatgttaatccaactaaaggtggtcaatatatgatgattagggtactattacaataaagagttttagtgacccacgcaaagcaacactaaagatttttagtgactcttcattgcttgtcactattgtgagtgactaaaaaaatagtatatagtaacccttcagaattggtaattataatattttagagtctctctgcatacatcactatagcctttaagtgttgcattctgtcaagctctacagcaacctaagcgtcactgtatctattattcccaatgcttttgtgaaaaagctatttagttatgtagaagaagttgttatgactgtttttatgagcc

SEQ ID NO: 99894 - DNA, 1299 bp, Cannabis sativa
acaagcaatggttgatgtgatttcaagcaatggatggctgagcttagctcttctcgcaatggaggttagccagatggttacacaaggcatgtgggaacgtgattccatgcttttacaacttcctcatttcacaaaggagctggcaaaaagatgccaggaaaacccaggcaaaagtgtagagacagtgttcgttcgatttggtggagcgagctggaggatgatgagaggcgtgacttactccagatgacagattcacagttgctggatattgccaagttctgtaatcgcttccccaatattgatatgagttatgaagtattggagggtgataatgtgactgccggggatgttgttacgttgcaagttactcttgagcgggatctcgaaggaaggacagaggtggggccggtagatgctccacggtatccaaaggcgaaagaagaagggtggtggcttgtagtcggtgatacgaagagtaactcattgatcgtcattaaaagggtttccctccaaagaaagctaaaggtgaagcttgattttacagctcctacagaagtgggaaagaagaattacacactctatttcatgtgtgattcctacttgggttgtgatcaggaatataatttcagtgttgatgtgaaggaaggagggcctgaggaagaagaatagaactgacaattctgatttttgtttctgttaaactcccatatagtagtcttttgcagttaagacagcaaaacttttgacactaatgttttcttctatttaaatttgtaatgttttactagaacaagtgatgcaacttttcaatgaatgaattttcttctactttagcaatatgtttcttgctcaagtagaaagaatggaaatcccattttcaactagctgactgaaattaattttattcatttgctccttcaccattttcataatttggagggaataacaaactaataaatctatctcattggatgcacctctttttaatcacttttttactcattatgagattagtatggaagattaatttttgttattggtaagaattttaacatatcactaatattcactaatcttttcttgtgttagattggacaacattcttattaattcaacttgataaatcagacaagaataaggatagagtaccattctacaacaatggaatttacagtggaaaatctgtcgatttaatatagaataattatcttttttacctcttgtacttatgacactatactattatgccccttaatctattcagcttgttacaaatagtccttgtataattttatatgc

SEQ ID NO: 99895 - DNA, 994 bp, Cannabis sativa
  modified_base (936)..(949): a, c, t, g, unknown or other
ttcttggattcaaatggctcacatggatggctcaatgggaggtatgtgtgtattattttggatgttctaaaaaaagtattgatcttggatttaatagttatgagcaatgattaatttttaatgtgtttatggatagcttataatctatgtgatagtttagcaaatagatcttatatgacaaaatactcatataatcgtaatgtgaaaataattaatattaattgtctactaatttcatatcttaagtatgagatcattacacctagtactaatccaagggttacgctatgttaaggatgcggcgaacacgttcctcccttggcctaaatattgtttttagcatcggaggtaaatttctttattagaaattatcattataaatcatacatacatacaaattttgatctattatggtattttgtataagatactctccttgcccaagtataataacaacgtattatgtcgaatgaaaaaggtcctatattttatcgaaaagtaggtggagatcatgcagacctattattcactccagaaattattaattaggcctgaactcatgtgtaaagactaatcacttataatgagatacacagaataataaagttgaaaatttctttcttttgtctaagtgttattcgatttcggtgtgtgtgtgttttttgagtgtagcgtaattatattttacaatcaattaatagttttaatagcttaaaggtcttgggttcgaacctataacctccatcttttttccatccctctctcaccactaagctagctttaatgactttgttgtgtgtgagttcgtgtaagttgaattggttcttaacccttttttcttaagtttaatgaattggtgcgtggtggcagaatggcacaatccttttgttagaaaaaatatttatatatagaatttttttgggtaaatatcatttnnnnnnnnnnnnnntgtaaaagttacagattggaccatgtgttttgttaaatgataaaa

SEQ ID NO: 99896 - DNA, 632 bp, Cannabis sativa
cgatcgctcattcaatcaaatcctgctcagttagattatgaatggttgtatgacctacatcaacaaaagatggattcaagttagaatttagcataacctgtgtggcagttacctgtgatggtgggagtccttcaagaggagacgtttttggaggatcagatgttgcagtgccaacccccaatttgctagtcgatgggaggctgactgtaggcaagctagttgtaggaaggctgaccgtaggcagaccagttgtaggaaggctggccgtaggcaggccagttccacgaaggttgactgtaggtaggccagttgtaggaagacttacagtaggcagcttagaggccacattgttggttgttagacctctagagtttgtctcatctgtttgcatatcagtaagttcagattgttgaggttgagaacctcctacgacagaatgacttcctaacgttggagtcgatgtcactccgagtgtttgttgatcatagacttgggtctctgttcttatacgagctgagtctagtgatgccattggtgcaattggaacttggaatcgactttgagcaacaccaggagtcgtcatggtagccttcagtgactccatttgtgattttattgcggcattttcactc

SEQ ID NO: 99897 - DNA, 1181 bp, Cannabis sativa
atatatatatgtgtatatataaattttggttttacaattttgatgatagagctgccagcacaattggtgagaaagtgattatatgttagttggtggatgctggattcgattcttgactttctcaatttatagaaagtttttttttttttttaaaaaaaagtacattatttaaaaaaaaatatattatattataaatatttttggtaaggagcaaagattatattattttttttgacgaaacaaagattatattttgtcaaagtctaacatgaatgaaagttcaggggcataatttagtacatgtcaaagttcgagcggcatgatttggtagatatcaaagtctggggagcatatttagtacataaacaatcattgaaatagtagaattgaatgaaattagacaaaagtcctttaatccaacaatctcaatagttcaaggggtatttttcacgactttaaaagttcaggaggcatgatttggtacatgtcaaagcaaaagtcctaattagcctttaaaaaataactaacaagaatattataaattaaatgaaaagtacatttattaattattatttatcttcttaaatttataaaatcttataacatatattaaaaaaaattaacaaattttttgacatactattatataaaacttcaataaagatgctattaactataaacaaatattaccttaagttaggttatgtgttagaaaaattatttattatatagagataaaatagtgaattatattgtgtcaaaatttcaataataaatgacatctttgagcaaaaattgaaaaataaataatatttatttaaattttttatataaaaaaaaagctccgtttcaaattttgccctaggccacacaacaccttgagacggccctgactcgaggaaatagagtgtgggagtggagagagataaatgacaacttaaatttgcttgaaaaattttaccattaaaatttgaatttaaagagtaaaattatagtatgagtgtttagagggttaatgtctttttttttttaatttttttaatttttacattttaaaacagttttttttttttttatgaaagtttacaaagcaatttacatatcaactaacgaaacaatttaaatcacaaccaaaataaaaaattactgaaacaaatgaaattattattgttttttttttt

SEQ ID NO: 99898 - DNA, 2548 bp, Cannabis sativa
  modified_base (2468)..(2471): a, c, t, g, unknown or other
aaaaaaaaaaaaagaaaaccctaagaataaaaaaaaaaaaataatattttgacatcacttagccaatttcttggttctggtgaagctgtccaccagttatcagagatgttgcttttttcgcaaaatcaggagacttgaaactacctaatttgcaactaagtcactttgtcgaaaaagtgaaattatgaagttgtgaatttgacttgtctgagtttatagctctcgtttactatgaaaaactagacgaacgctcaagacaaaataagaataggataagcagaacccaccgcaccaagtcatacgtaaacttgggcattgggtgccctttttggagcttctgagatattgttttgatgcttaattccaaggtcttcaaaatcaaggcggaggtcacctaccccgtttttgaccatgccagagagaatgcccgaagcagaatttgcatttgggtgataaaaaccagtgcactaggttgattgtcaacctgggcgctgggcctagcactaggtcaacctgggcactgggctcatttttcagcccttcaggattctcgtttttttcctgagtttacttatatcttcgttattttttatgaaaaaaaaaatgtctagaacacttttttagaaaaatgattggaaacggcttaggttgacaaaatatcaacttgggcgctgggtcctgtttctcgccaccaaatggcttttcttgattcccagaaatacttgtatcttaatctttgacaaaaataaagaatatgcccggaagacttcattggaattgttgatggaagtcgcccaagttgacaaaatgtctacctgggtgctgggtggctagtgccaagtcaacctgggcactaggtgcccagtgtcaggttaacttggtatgtttctctcccgaaagtgcttatttcctagttttggatgaagacgaagaaaatactcgggatagttctttagtttgatgattggaagcgccctgggttgacaatatgtcaacttaagcattgggtgcctggagcacctgatgctctgagtgctcaaatttaaagttgccccgaatctgattcggatgcctcaattatgtccgtgacatgtctaattcatgtatttgtacaaattttgacctattttcactaagaggatcctagaaacaaaaaccttagttggaatgtcaatctaggtgctaggtgaaaaccctaagcgcccaggttgacttctgaggtgttgtttcgtgtattttcaacttctaagccttagactttgattcttcatgtcttattaagatgcaaaatatgaaaaatagtgagttgaagataacttgggaggatccaaacactcattctgaatttctcgaagtcaacttgggtgtagggctagggacccatcccaggtcgactgctatgaatttggactactcaactctatgatgttttttttcctgtcacgtgtcaaatattgatgtttatgtcaccagggtcaatttccaagtaaacagatataaattttgaatttgtttttcaaagtaattgctttaaaaaataataaataagatgagtttaatatatatatatataatttaattaattaattaattaaattttataagtttaataagggtgaaatatgtaaccatttttaaagaattttttgtttttcttattaaaaaattgaaatattttttttaaaaaatatattttataaaactattttttaaaaaaacatgaaaatcaaaatcttaaaaaaacaaaaataagtgactctcaaaatgttaagtatatattctataagaaagcaaaagaaaatacttagttgacatataaatatattataaataaatatattaataataattaataaatatatataacaattaagtgataaatgtattataactgacataaattaaaattatataatatgaataaaataagtattaataaattaaagtaaaaaatatttttaatagttactagtacagtgtactaatcagtttattagtgcaagttggtttttattggcatcactaaagtatgtgaacattttagtaaaaatattttgtataatagtaattgtacattactgatagtgaattaatatattttattaactaacactatgtgtggcagaagagaaagataggtggatagagaggagtagagctagagtgataggagagactaaattacttgtttggcaaaagaaagaagagggaaaagagaaataggggaggcattcttcctccaaaccttaagagtatgtttgatgggatgaaaatgtgaaagaaaggaaatggtaagagggagaggagtgaaatgagagtcaatttcacttgtttggcatgacagaaaattagaaagaaaggatagattgatttggtctccctcaaaattctttattttcaatctctccaaaagtgagaaaattgatgataaaataacaaattaggatttttgctccctgaactttgannnntaccaaatcatgccccatgaacttttaagatcgttaaaaatgccccctgaatcattgggattgttggatttaaggac

SEQ ID NO: 99899 - DNA, 1160 bp, Cannabis sativa
tatttaaaaatgttaattttgaaataatttgtatgaatacccttaaaaatacgtatataaataattttatagtttaagtgagatcctaggtttggagtagggacagatcatgtacataataaaatagaaataattaatgagattcgttagcctaggtatatatgataaattagtatagtaataattttaatattttaaccaagtgattacataggtgtaataatttttagggattataaatatagagctagcaaagcaattatttgaatgagagaaaaacaaggatgtggtgcaataattatggtgcaccactactattacattctcatgctctaatgtatgtaatgattcaaattcactactcatgtacaatattgaattcattttgttccccataaccaaaatatatattgacacacaatttcatctttctaataatgctttgaattctaaaaagtttgattgaaattattcaaaatatataaataaagtttgattgaaacaatacaatacgtgtatattatatgattatatataatcatttggggtttatacagtttatagacttttttagtggtatttgaagagcttatcagtatagtccacccccaatcggctatatatatatatatatataaattataatagctatagattatgatttatgattgaagagttaagaaaaaaaaaagcagtcaaatataatgatagtgcatggaatctcatgctcatagctcatatcatatcccagtttggattcatttattattgagtttagattcttgagtgtggtgtgtgtggctactccacttcttatatatcacaatcataactgctacttataatttatttttttattttatataattgtgcacaagagtttacatcccaatcatattatattttcagaaatattaaacaactaattgtacctgtacattttttaaaacacgttgtaactgtctattttgaactaaaatttcagcactataaatcattatgaatattttaagaattagtggaatatattatatatacaactaacatacatattattcctttgttgattttcaatagtactttgtaaaccatactgccatgcagatagagactagagtcaataaaatattttgcctaaataaaaagtttatttgttaatt

SEQ ID NO: 99900 - DNA, 961 bp, Cannabis sativa
ttatgctattattttgagccctcagacttgatatttttcaatgatttgattgacgacaagctcagaatcactattgatctttagtgattcagctttgatggcgccagtgccaatgaaagtcttactaggagtgccccatattctggttctttatttgttacagtgaattcaaaccacagtgtacggtgagtgcaaagtccttcgagagttacaaggatgaggcctgcatcagagccatcctcattggaggatccatccacctaaagcttcaaagagtgtctagaaccttcctgggctgtagtcctaggcatggggttctggtcttcacaaaccatgggatcatcttctttgaggccagtgcattcaacaatgaaatcagctaatgcttggcccctacttgtcgtgcgaggcttgtagaaaatttcgaactgaccaagctctactgcccattttagtaaatgtactaatgcttctggcttcatcaagacttgcctgagtggttggtcagtcaacacttcaattggatgggcttgaaagtatgaccttaaatttctagagaccaatactagacattaagctaatttataaatggggcaatacctagactagaccctaatgagacacttgctgacgtagtatactagttgatgtgtcccttcttccacacacactagagttccactggctccatgctcagtgatagccaagtagatgaataattcttcgccacttactagttttgataggattggtggctttgatagatgatgtttgggagcttggaaggcttgctcgtattcatcagtctactcaaatctcttgttacttcctcttagtagattgaaaaaataatacatttgttaatggacttggagataaattgacttagtacgtcaatttgtcctattaggccttacacatccttcactcgtgatggtgactttatgtcttgcagtacctt

SEQ ID NO: 99901 - DNA, 1730 bp, Cannabis sativa
gaatatgtaaacgttggtatgaattttattaagttcaaatatcaaattaaatataatgattttaccgtggtgtaggaagacatctttttctgcaatttagattttcacattcagtttcttcattgtcgttgaagaatacaattttcgcattacatgaatcacatgacatgtaatagaaagattgactgaggttttttttatatcattttagcctcaatccaaaagtatggtttctgcaaaatatgagttatgtatgttaatagattcaatattatatcaatttaaaaaaattaacgatatttatttaagtttatatacctgggggtcgggttaagtttcttcatgaaatcgataatttcgctgttctttatatattcccgttttgtagcagatgaatttggagaatatggataagacggtgtttgaatagtaatattatttattgcttctttgttattttcaacccttgtcaatgtaaatttaatgttaaataagtaaataaagtaataatcattcaatagtatctacataaacataatattaaatgaaattacattatttaatgtatgagtattaccattcatgtagcgttgttacttcgagattgtctacattgatttcgatagtacttgattcacgagttgagaacgaaaatcctattttaaattaatattttaagccaatattagttgacaataatgttagcaatataaacggtgtttgttagtatataaatatctctcttggtttgaacaaccagctttgtgcccattattattgggttggttccgacaacttcagacagtttttcactattatcttagaccaaagcaccccatagagtcaaacatatcgggttgaagctacaactttgattgaaaagagaaatgacatttttttttgttatgtgtaatcctttaaaattcaaaatatattattagatgtgttataatgaagattatctttatatatacctgtcatcaattagatatagttcttgtatagtctgctgtccataaactatgttgactacttctgttaggtttatcttaacacctacacctatgatgtctgaaaattgattgcaatgttagataaaacattataaattaatcgttacgtgtcatatcgtggagatctaaaaataccttgtggtttgttggagtatttgtcagatgacaagttattaaatggaacgaagtcagggattggttcagaaatttatatgccttcttcttggacttcaacaacttgtgtttttgagttcatggtccagatgtatttgtaatttgtgtcatttttaaggtatcttgcaggtattttgttaccacgagcatcactgatgtagtaagagtgtaacacatgcaaagtgtcttctaaagcttcaatatcttcaccaaaaattactgcatcgattcttgttttatgtgtaatgtttattaataatacatgcaacaagattttgtatgagatattaaaagtagtacaacattgtgcaactctatggtgtaaaagatgaatttatctacctttggatagaataaaaatagcttttgatatcggctggcgaattcatacttattcgtggtggaaatttatgttgaactgtcattttgaatttccatccaacggtagttggagtaattttatcagctaaaaggtgtagtgtcggcatctgatatgcacacttaatattgatattttgaaaattaaatagaagaaaaaaactt

SEQ ID NO: 99902 - DNA, 2717 bp, Cannabis sativa
aaagctgagaacactccaaatgtttctgatttttcttttagaaattaaacccaagtgtaacgagaataatcatctaccaagaccattacatatctcttcccactcaaattttcattttgcatgagtcccatcaagtccacatgcattagttccaacactcaagaagttaaaagtatattgatttaaggatgaggtgccttggtctatttacctagctgacatggtccacaaatcctatccctggataatttcatctctggaattgcttttactacttgaagtttcattagtctttgtagttctttataattcaagtgccccggcctatagtgccacaagtcaggtttatccaagaaagtccgattgcacacaattgtattgcataaagcatagcattgatctccagtcatgttccctattaagactacatatccactagttgaaactagacactaagttttagaaaaacttacaaagaagtttttgtcacacaactgtccaatgctgatgagatttgccttaagccattttacgtatagaacatcagttagaggagccaaaccatttaggtctacatctccttttccaacaatctttcccttgttttcatcaccaaatgttacagaaccttctttttcctttttatagttaaccaacaactttttgttcatagtcatgtgttgatcagaacatccactatcgaagcaccattgtccctccacaaaaacagacagagataccttagctaccaatccaacatttagtttaaggtcagatttttttctccattcccggtgagttttgtgcccttaagttctatttggttgtagaaagctatttggccgattgatcacagctttcaagtagttctgtagtttatagcacttgggaaaaatgtgtccctttctgttgcagaagtgacatactgggatgaatttttcaatttgtgacagatttttagagactattcttcttcttttgaatttcaacttaataggtccagatggattatgaccattcactgaggaatctggagccttgattatagaagtaacgttgagtttctcgttatccttttcaactaatttgacagttaaagtatgtggatccttaactgacaaattattcccttgtttgtacaacattttgtatccaatggaggttcgatcaccatagggtttctgaagttatagagcctaattgatagcagctgtgcctggaggaataaattcaagtgcatgtttagttctcaccagatcagtagtaagtttttatatttcattattcttctcatcaagaagcatgttgagattcttaattgtatcagtctccacttgctccatggcacttttcagacctctaatatgcttagtcatgtattcccattgggcaaatatttttgcgtacgcattccgtctacctttgctatccccttctgatggagactccatcatcttcagactcaactgaatgactactttgggccatgaatgctaccacgtatttgtcctcatcataactttcacttgcagtagagctcttttcttcctcactgtcactccaggttgcaacaagagctttcttctttttgagagtgtttgcacactcagcctgaatgtgtccaaaatggtcacactctctgcacttgattcctcggttcttttggtcaaggggtggttgaaattgtttgaagtttccccctttgtttttcttgggagcattttctttacaaatagggaaatttttcttgtagttctttttcaagaattttacatagtttctggttaatagggcaactgcctcatcagagatacgattgattatctctggagctggttttttatcttcttgatgaattagagcaaagctcgcatcagatttatctttaaccatatccttctgtttcttcgatttcttccatcttggcagtgacagctcatatttctgcagtgaaccaataagctcatcaagatcaagttcctcaatgctcttcatttcttcaatggaagtcaccttagacatgaatcttcttggtagtacaccaatcaattttcgaaccagctttgatttagagtaggtttttttagagcataagattggaaatataacacaacttagcctgaaatgctgccactatgtcatcttactccatggacatattttcaaatgccttagccaacgcacgtagccttgatttctttactgtatcacttccctcattctttatttttagtttctcccaagcttcttttgaaatttcacagtttgcaataacctttatttgatttgtgaagacatcattaaacagcccatccagggccttcgagttcaaattttccctctccatttcatcaatggtccacatgctcatgcattttggtttaacgatttcattctcagtcatcgttggacttatccatccttcttttatggccatccagacactttcatccaccgccctcaagaaaggtcgcatcttggtcttccagtaagggttgttagccccttccagcattggaggtctcgaggtagacccaccttccctgaacatttccacatggcaagtagaacagaaagaaaacacaaacagccataacgaagctcttcgagatgaaacttagagaggattagtggtaacagaatcaaccaagaaagtaaatcttgaacaagagacacccgttttgtttcgaatcaagcaccaagcaagtagaggatct

SEQ ID NO: 99903 - DNA, 1451 bp, Cannabis sativa
  modified_base (1396)..(1402): a, c, t, g, unknown or other
atgagagctcaatatccagagttgttcaagttaaatttctaggacgaaatccttttaacgaggagataataatgaccgcttaattttagtttgagaattaaccgataattagggtttaatttggaattagacttttaattgtgatttatgaatttatggagatatatttgaattctaggtgtgttatttatgttatatatgaaaatttatatttttcatattttatgccttgtaacagtagaacgcgacgtttggccgatagagtcacattttcatatgatttggtattttagtaatagcagggaaatttagataggcattgggaatgtcaagagttatcgaatttatggtatatgaccattttacccctaattatgttagttgcttcgtaattaagaaagggtaatttagtattataccctagattaatactatttaagttagtgggaatttacttatttagttttgtaagctttagtaataagcttatagtgaatttattaagttactttttcatttaaccatagttgactaagctagaaaaatccaacactcctttctctctctttcccttgttcagcctcaccctaaagccaagaaaaaaattagactttttacttcaacttaaagatgaaaaatcaaggattcagctaaggtttctatagattaagtaagggttagctcaatgtaaacttctctccctttttctctttgaatttcaagtttgaagttagattttcatacatgaatcctgagttagggctattgtgcaaattgtttaagtttaaatctattttctgaggtgtttgtatgctggtatgagtgatttttggttgcattttcagcttgttgtggaagttaggcaaggtttgagcttttgagctcaaacttttccctttaatggtaggattgatttttgaggcttatacctgtttttgttgcttgaattatgttccttgtgacttgtttagctgctctagatggtttgggttgattttgggttgatttgaatagtttagaaggttttttagggttcctgcaccggtcgaccagttcagtttggacctgtaggaactggaatttcggttcatccccaagcagatcccacaaaactggtttttcgattggtaactggtctacaagttggggcaatttagagcaccctatattttcctgtttttgcaatatttagggcattgccatgttatccatcgatagggaaacttttagttttgattttaagtcccaaaaaagggatttagcacatcactcatcagttttatgaatattgtgacttaggggcctataaattgtcgagcagcaattccactcaggttgaccatgatggaatattttaccaggatctagattaactaacaagtatgttgattaacannnnnnntatgaatatctctaaaacaatgaaattaaacatataagagtttagaaaa

SEQ ID NO: 99904 - DNA, 1120 bp, Cannabis sativa
tgagatagaattaagtaggatgtaaaagtgagtgtagcgctacactcactttctttattaattgctatgtattttaaaagtgtttggtaaacgggaaagagagagaaaaaaaaatataataataaaagaaaacacagggctagatatggtcctaggggattgcatgatcttccatgtgtggttcttgggtcttcgattccgctactgttgccaagtagcgggatcctcggcgtcaaatataggaagactatctagtacggggacagttccatctagtatgggcgataatttaattttaaagagagttgccatagttttctttgtttaaaatgttttgtgttattttattttcaaattttatgtgtcacatttgaatggttaataggccatatttttaactatttatgttcatttcgaagtagagaatttataatcgttcaaatttatgagtcatacgaaggagcggtagctgtttacgtttgctaataattgtagtcgtacaacagtgtaggactaggagtaaattgtattttcctttataaaatggtcacgagagaattattaattcattttgtcggtaacataaggaattggacacttggtagcttggtatttaagaggggtgtacttggatttatattctaaattataagtaatcttgtcatataggatttcagtagtgaatattaattccaaatattattacatagaatatttaaattagtataagttagttaaaaataaatggtacaagttagatatatatcatgaaaattttatatgaaaaatagagattgtgaattttaaatgaaaaagagatatttaatatttattgagattggtgatatatctacttattatgaatataaaattgaattaaaatcttaaaattaaattccccaattcatattattcttttatatgaactcatattcatattatgtttgtgattaaatttagacaaatatcctttaataggtcttatgtatgattgaacctaagtcaacagtcttggtatataccaatctagtctcaaggtatatataaaataaatgaactaattcaatttgcacgatccaattcaattcaatacacaaagtatggatatccgtacttgtgc

SEQ ID NO: 99905 - DNA, 927 bp, Cannabis sativa
caaacaaaagggacaatgggtggccccaacttttttttgcttttgtcccctatcacatctccctatgcaccaagctccgcgtgcccaacctcctcgcgcccagctacccttgtgcccagcctccccgccctacacccctcgtccttttaccccttttttctcctcacacttaaacgtaacctggacgtcttgaatgtaaacataacctgacaatcacaagagatgatgagcaatgatcacagctagggccgtttgagcaaagatgttacagacgagatagcgaccacacaataaatacatataatgaaaacaaagcttacctcaaccaaagtacaaatagaagagagaatttttgtcctattaaaagtaccaggacatcaaactatctgagttactagtctacttagtatgaaaacagcttgacactcaaaactagaagacgagatggaattcaaaattgcatgaaatacactatagataggtcctttaaggtatttgtaaaagggatattttttaaaaaaaatcaatgaaatagtaattttttggagtgagtttaagagttttctttgattgttttttaactaaaatttctgaatattacatttgatttttaatatttcgttaacgaattctcactgtcaatgatgacttatactaaaacactttttgttgtagtgtggaaaaggtcatggggaaggcaaaaaatgcaatttactttgacaaaaggatcccgagaaattaaaagattcatattaagcttcacatgattggaaaccgtgtagaatgaacttggctagacaccactttaattagttggatagtacttatcaaatttgtgctaattaatgaggttgactccactttacatgttgtgtgagattgtaagcctaatagggaggtcagaaaactcttcgagctcaattcaat

SEQ ID NO: 99906 - DNA, 1718 bp, Cannabis sativa
  modified_base (1633)..(1633): a, c, t, g, unknown or other
ttattaatatttttagagatatagggacacacaaaaagttccactacattaaataattttctaaaaaaataatatttaattgttttaattcaaatttttatataactggttattttttattatattttttaaaaaaaatcaatttgttttaattttatatataggggtcacggaagctacatacatataaaattaaatgggtacatatatttttatatataaaaatgataatttaatttatattactgtagcaaaaataatatatttagattaaaaaaattgaaataaatacatgattttatttttatagttttctttttttttatttgaactgggattagattaataatcaaaaatttaaaagataaacataaaactaaaattatgtagaaatctgtgattctaacagtacaaatcttttacctaaaatattcatagaaaaatgtattaacattcatttaacccaaataaataaaaaaaaaaacctgaataaaaatccaaaatgagcatgaacacatctgcaaaaaaaaattacacatctgtaaaaaaaaacacaaatatttcatcacaaacagagagccggcgtcaaccacaaagccatagtcactggcgaccaccgactcggaaccaagaactcaattccatcttcgaccaccagcccataaccacgaatgaagatcaaacagggagatccagagccagcacgtcaaccgcgaacccaacgtcgtcgtcgaccgctacatgcacagatcagagagagaaaaacaacaatacataaacaatggactgaatcacctgtttcgacggaggtggtagctgatcccaacttcatctccaccactagcgtcggcgtcagcttcgacaaagggaatcgaccaagagagtaagagaaacttagagagaaagaggtggatctgaaggtttttggggtagggatatcgatttggaccacctgccattggattttcttaggataaaagagacagcaagagggaagaaggtgaggaggcttaaatgaatagagagagagctgagtataatagctgatgagaggatttttaggagagagattaggtttaggaggttttgagaccccctgcctgcaaccggtggtagagcccaatcggatgatgtaaggctggatggtcggactgctggtggaggccaaggctgcgtatgaacttcagagagaatgagagggaggcggaagagaagagagatagaggaaaagtgattttgattagggttttttttttctttcttcttatattcatttattatattttattatttatttataataatcaattaaattttgtttaattaatgaatcagaaacaaaatataagcaggtttttttttaaaaaaaaaaaatatatacgaaactttttgcataattaatgaaaagatgtagctactttttttctaaaaaataaaatatatttaattattacacagaactttatttgttatttttttaaaaaaaaatagttatgatatagtgacacgctaggagtgtcggtaaacatttacccagtcacgcttggcacgtcactataagttaatatttttttaaaaaaaaattatagaaattgtatgatttaccctatagtgatgttgggttttatgcccnaaataaaacttatttcaatataatgagatttacttattaatatagatcagaaataacatttaatgtagcatggttcacatgattt

SEQ ID NO: 99907 - DNA, 1663 bp, Cannabis sativa
ctctctctctctctctctttgtcgtcccttatatctctctttcaagactacatcagagttacaaacccacgccaaaacggacgagcccaacaacggtggtcatcgcctctctctcactcgaatctctcttgtgctctaagtcactctctcttctctctcgactcaacactaatgggtcaccttcgatgaagagtggccaaaatggaagccaccactgtccttcccaaccattgaaaaccaaaccttaaatgtctcaggccttctcctctcccagcgacgacgcactactcctcctctcccagcgatagtgggcgacggtaaatccacgatcttccttattttttttcctttttttagtgggatcttttggtttcagctccgacaatgtagatcgatattttttaatgtaaatgaattatgtattaattgttcaagcattgtaacgatttatttgatgtttttagatatgagtttgatatattattctttatgggtttgcttttttttttgtttttaattaagcatgggtttgttgataatgaatttttagctgtagagttcaaatttggctcaaagtaataatttgtggtcggatttggaagttttttttagtggtgtcagtttaacaccaagagttatggtgcaaaaatagatttcacactcgtaagtctcaatttaaaactgatacctatgcccaaaatattgttctgaaccaacaccaaaacatataatttatgtcctagtggtataggtgtcgcttcataaaactaacactacaggtataagtctcagtttaaaaccaagtaggttttgtatttaaaaaagcagaaattttatcatcataaataaatattaattgtcattatacatatatggatataggaaatatttggttggggcatcattttcgttccttactgtagaagaatttttcgtttccagaacatagttgctgacacagtttgtcgtcaacggatataagaatatcgcaaacaagtaagatgaacataagtgaatgtcgatcaaagtaaatcaatatatataaagcaaaattagcgatgatgaacataaagtttttatagtggtttactccctttcggcggtaatagactagtccgatttgatttttatattggtattttttgccctaattaaaatagaatttttatataattttaattttatttatcaataaaagaacataaattattttactacttttggtataatacttagttcacatattgctttcatagtcatatatttgatatataaattctactaaattcatatcatattgttattcatgattatagtgttgtcttaagtcccgtgatttatcaaggtactggacttattgtaatgccattaacttcatatcatcgctgatttttgttttggcggccgcttcaatcattgtttgaataaaagtcttcaggctttcagtgtgttgttgtttaacgttggtgagcgaaccaactttcagatccttgtcccgtgtggcaatgaattgcttgcgaaaggttaattgcagatctttcacgctgtcaatcgatttggaagttaatcgttttcaccaatcctccacggacttaatcaaggtcagggagaaacacaaacaattggtgtcagcactgatgcgagcaacttgcatcatcttgtt

SEQ ID NO: 99908 - DNA, 688 bp, Cannabis sativa
gaagccgaagccgatcattcggaatgtccagtttgtttatcgggttttgaagaaggagaagagattcggaaactgccgagatgcaaacactctttccacgcgccttgtattgacatgtggttacactctcactcagactgtccgctgtgtcggacgccggtgactgtaacaggcaacgaaaggtgttatcgaattctgataagtccaaccgacgagatttctagacaatagttttgcccaattctgcaaatctctgttttgagttactattattattattattatttttgcaagtgggttgggtgttagactgttaggaatgagaaagaatgggtgtagtaaaagtccaatgattttgataggtttaaagtggggacaacgaagacgatgatgagttgactaagaaatgtaaaatgaggaaagcaagtgttggagtggatgaacagtctgaacaaactaagcaaattagtttaacgcttcgtttttattatacacatttagtttctggtagataagatttcattttaatagtaatgcataggttttttttttcctttatatgtaatcgttactgtgtggatggttgtgataatttgaacttcatttgtatatttatatcagtttgtttccttaaaatatacagactaaataaaataggactaactaggaaaagaagaagtttaaactt

SEQ ID NO: 99909 - DNA, 860 bp, Cannabis sativa
aaacccaaagagaaaaacttctcaggctctgattttgcataattcacaattgagcaaagtgcaagagataaaattggggatgcaagtagaaaatttggcaactgtttaaattggaagtaccgcaagaagcctactcccctgttattcattaacacaaagcagaatgagaaagaggaagattaattatcaataacaaagttggataatcttccaattttatataagaaggttgtgcaattgaaactctacacatgtaaatgaagatagtttattcgttatgtcatataaactaaagttaattatatagaacctgtatttatatgttcagtcaatcgagttttcaactatgctattcgattcaaccatccaacccaaaaaatgcttaaaaaaatagccatgcatggtgataaaagataataaatgaaaatgatattataatgaaaattaaaagaaggaaaaattaccagtaatgactttgaatatagttgtataacaaaggcacctttgctttgcaccatggcctcatattatttggagaatgtcccacgcaaatattgttgtatccgtacacttgaaatgcaagaaatggggtgaaaataaatatacaatgcaaggctccaccagtaagaatcttcatggtcaactgacaaagaaagcaaaaataattaatgagaagaaataaataattaccatactctacttatacttgagattaatgatttaatgtgatatccccctaagaattctatacttccaaaactttaatccatttaataacaactaggatattaccaaagaatagaagcacatatctgaattgcaataaacaatccaccttgacaaagaaaatgcaacaccaa

SEQ ID NO: 99910 - DNA, 542 bp, Cannabis sativa
  modified_base (496)..(498): a, c, t, g, unknown or other
tttaactattttttaatagaccaaacatgtcaattggtattggataaagccagtgaggctagtttagtgatacccaaacctctaaaacattaataaattataatatgttacactaattttttttttctagcagcctatgtgtagccacataattttgcagcaaattatcattattattaataattaattaattacatttaaattattagtttaaagacatgtcaaaatttaatacataaaacaccaagaatgtataataataatcaagttaattaaaatatttatctctttttgacatatactaaattatgctcctaaactgtttcaaatcactaaaaaaatttctcgaattactaagattgttatatttagggctcgtttggcacagcttttggaaaagctaaaagctgcttttcaaaaaagttgtaacaaaaaggtgtttggtaatctttgggattaacttcagttgtgctaggcaaatttccttgagggcggnnngctacctgagttgctagctggcccatctgagtctgcaggtcttt

SEQ ID NO: 99911 - DNA, 789 bp, Cannabis sativa
  modified_base (27)..(34): a, c, t, g, unknown or other
ttcatttttacactttaaaacaatttnnnnnnnnttttgtatttttatagaattctatatagaaacatctattgcaactaacgaaataatctaaattgcaattaaaaatcgtataataacctatataaaaactactaaaaaaatcctttcaaaaatccaaattttaaatttgacaaaaaaaaaaaaattaaaaataatatatgaaataattttcctaaaaattattactaaccaatcgtacaaaaaccaactataaaagtgttaaaacaatggtcttcctttacatggtataggtgagctttgttttcaaaccattcaacaaaaccggctagcaagtcaaaggagaaattagatgtgggactccaattggcaattgggtatcatcacttaacaaaagtcatttaaatcatgacacgtgggtcaccaactggggcccttggttgtactaaatcctatccagaactgaagaatttgccatttaacttttaatggttttctcttagtaaaaaaataaaataaaataattaatggttttcttcacacacacaccaacaaaatactgtctagaagtttaaattaatgatttttctccaaagtagttgaatgtaattaattttcaaaacgatatgacttaagaattgggtggagttccctttcatagaaaaaacctactttatacacttttactttcagataaaaaaaaaaaatatcttgaattttcttttggcctattttctaccattgattgatatctaacatgccacagactttattcaaaaaaaaaaaaaa

SEQ ID NO: 99912 - DNA, 749 bp, Cannabis sativa
  modified_base (696)..(698): a, c, t, g, unknown or other
attactaaaatcttattataaggttataccttagtagctacttgatagcaaaattgactttcctataaaaatgctctgtcttatatgtttatttaaaatgttactgtttagtaagtaattaattagtgatatgttaaccattagtcaagaccctttcaaataataataataagttaagatgcatatctagctgtatgtgatatttggcaacataaatgtgatctgtagtaagatcaaatattggcttaaaaaattagttggcaaacgaataattattctctatttcttcttctttgtgttaatttgaaatatatatgtgttcatatgatgaatgagtgaatatatttatagttgagtagggtcaatctagtggaaaaaatttcacacgtacctaagattattcattattaagagtcaaagatgcttggccaaccaaattaatgactacatgacatgtgaacaacacacacaaatattttatttatatatgacatgtgtgggacatatatattgtagcagggtgagttttgcccccaccggtagaattaaatcatatttttttatatataatatacattaattataattatttaagatatgatactttgataaaattagttaatgttttgttaatatatcaagtatgttatggaggaattaaggtgtcgtttggtaatacttttgttttttaatttnnnaatcacaaaatgaaagtaaaatatttatttttaaaaaataaaaatgcgttc

SEQ ID NO: 99913 - DNA, 2031 bp, Cannabis sativa
taatatttaagtaatacattgaaaagtttatgtgatgatttattagtttggaatgtatttatattactaaatattagtttaattttatttaaaattacatacatagaaagaaatacatattcaaaagggcccatttttttttaatttgctaaaactgtcttgggcccatttttttttcagggccggccctgctaatatttatacaaaaattatattttaattataaggaatctattagttttacacttttattaatatcatataatttttttattgttaacagataagttcctttagtttattttattttggagaagcttattcattttttgtcatacaatttgtttagttatgttttatcctctaaaataaaaatatgaaaagattgatgatatatacattaaaacatttacgtttttattatcaagaatttattagctttaaagttatatttatatagtcattagcctatatgaatcttttgcaagtatatttcattataagtaaataatattggagtcttgaagtaaaaaaaaaattatgagattttacttttattttgtgattaaaaaattaaaaataaaagtattactacgacacttataatatatcaatttataattttttttaaattatatcataataataactggtggatatgattaatcagattacactattttatttattttatttttatttaaatttagaataattaattaattggaagagtagttataactagaagaaaatcaaattagtgataaaaaaagtatagttgtgaaaattaagtagtgtataatttttgaaaattacttaagtatatcacttttgcttttattgtaaggatgtcttttatattcaaaaattatatttcaattttatatataacaatgtacattataattatataattcggtatattttcgatttttaggaaattctaaaataattcaccgtactaaaaattaatcaatgtataattttatgtatatgtgttcgtaattcgctattttaaactttattttcaaaattgtaaattattttttttaaaaaaaaaattaatgtttgttataactacattatacattgtcataaaaagaataaatatacaaatatttttgtatatgttgaaaataaaaagagctcaataaaagtaaaaataatatccttacccaaaaatctccttataattttttatatatatttaaacaactacgtatagcacctttgtttacaagtataaatataaagtattggtcccatgctccattcattcagtttatatatattaaattaccatgaaagaaagtaagagtttggaagaactatatgtttcactaattcattaatttctattaaggatctattttattcgtttgggattaccttatataaacggttgaaagtacacatattcgattttctatttttttcttttctatattttctatatgtataattaatgtagcgttttgcatttttataccaatatttatatatgtctatagattaattttaatctaagattattgtctttaagggtattaatacaacataaggaacagtcatataattgaccttgataagattaataatgtgtgctagattggtgcacgttaactaggtaattttctacccaaacccgtcgcaaataataataataacaaatcttatattacaaaaggattaccacattttgttaattattatatttcattttttatttattgacaaaagtaaggtgtgaacttcctaattattctattggaataattcctaagcatgaggacaacataatataatcaataaacaagactacaacacaaaattaatactcaaatccccgcatgtggtatgtctaggaatgtctattccaatattattataacaaataagataataaggggttcattgagacatataaaagctaattattagcctgctagtatatttgtgtctgtgctatgtatacccaggcacaacctcctttaagatcctaaaagtaaaaactcattatatagacactag

SEQ ID NO: 99914 - DNA, 860 bp, Cannabis sativa
aaaaattattagactatttatttataaatatataatatttttaaaaattactaaaatatatatatatatatttttttcttagattcttgaattatgtgagctctaagtacgggtttaataatctgccttgaaagagacgcgaccctgaattgtattgaaacttgtttaatatgttataacttatatgacattatttagatttaataataaataataatgtgcttaatttggtgctataaaataagaccaattaatggattctcttctttttcacactttaacaaatcttttctttctttccttgtctcctatttgtagctcctataattactaaaaaatatatatatatttttaatagaaaagtatttttcttagtcgtccaagttgggtgggttctataattacagatatctaattggaaaaaattgtgaactaacatattttatagcacattaatcaaatataactgtaaaataattttaattaataaatatttttttttataattaaagtacccaaacataacttatcaaaactagagtagcgaagctgcataatgagaatgggacctataaaataagttataaattaaagaaagataaaaattaatataagaaataaaaagtgagtatactgcataattttctcggtctaatctgcctttactcaaatacgatcgtgagttatattgaaacttgtttaatatgttgtattacttattatttagatttaataataaaaaataatgtgcttaatttggggctataaaataagaccaatggcctctcttatttttcacacttttaacaaatcttttctttctttctttcttttgtctcttattttctatagctcctata

SEQ ID NO: 99915 - DNA, 662 bp, Cannabis sativa
  modified_base (26)..(36): a, c, t, g, unknown or other
tattttcactttttcaattttaaaannnnnnnnnnnattaaaaaagtgttaccaaacggcaccttaatattctatttactctttaatttggaaagagggagaaaaatggataatgatgaattaatgaaggtattaattaacagtaagataagactcgtagatacgccggctgaggtgggacgcggtagagtatgtgaactggtcagactcggcacactacaactacaactacacgcttttattctatttttaattaaatcctaaaacagtgaccaccaaactaaactcactattaatttcttatattatccctatcttctttaaattacgctatttttttaattgttattttaattgtcactatcaaaagggtcaagccaaagtggactaagatagaacattctcaaaccaattactgtaacatttgaaagaaaatgagagctataagaacggtaaatatcattttagattctctgttttacaaaagttactaattggatcctatgttttgttaaatgataaaatgaatcctgtattttctaaaatagtacaaataggacccaaaattaattttttgtcagaataaagtttaattataattcgatctaaaagtgctatgacaaaactgttcacattttttgtatctgttcgtattaagcatt

SEQ ID NO: 99916 - DNA, 1327 bp, Cannabis sativa
ttttttttttttttgttagtggttgttttgatccgtacatgatgatgattcatgattcataatttcatatggcatgagccgtagcatatgagttccaacataagcatagtgtgtcacccactagtggattaatggttaccgagggacccaacacaccacaccaacattatctatttatgtatatactatgttatttttccacatttatgtcaagaatttcccacaatttgttttgaaacaataacataaaaactaaaattatggtgtttattttatttattttttgtttataacattttaaattttaaattttaaatgcagttatattttatttatttcaaataaaatatatacacctgttttaaacaaaaataattattgaaactcaaaataataaataaaatatatttagaacaataaatattattttataaataaattttaaaaaactctaaatgaagaaataatttaaaacatttgctgtaacttatttttagtacggttcgttaaattttgagttttttgcagttaaactctctcaactataaattcaaattttcacagtaaaactcttcaaattactgcactgcttgcaaatttaaggtgtcatccattttttataattaattaccaatatgtacacttttgtatatgtgtcaaattcatgttggtacacttaatattattaaaaattatttcaaaatttataatattttttattttttaaaatatttttattttattttttataattttatttaattttaaaaataatttttaaataataatattatgagtactaatataaacgcgtaatgcgtatgagagtgtatacataagtagctcatagtgacaattaacagaatgacaccttagtagttcagtagtttagaagattttactgctaaaatttaaatttaaaaaattaaatacaagtgaaactataattaaaaagactttgctgcaaaaaaactcttaaattttttaaaacttctggaataactattaataaaacttctagaataactattaatacacaataagttaatcaaatttttgtcataaagcaagactaaaccaaaataattgtagctagttaatatgatgttctaattatttaccaacgcgtttagaagaatttaggtgcctcggtttgaatttaatgcacaactttttactgtacggatatctacaattattcattttactaatacactacatttaaaaaagaaaaaaaaatatgggtgtaagtatatgttgcggttgtgatcaaggaaactcccagttaaattatgtcaaaaaaacttgcatcgaaaaaaattatttt

SEQ ID NO: 99917 - DNA, 1147 bp, Cannabis sativa
acctgtttccattccaacaccaatattgttaagactttataattagtactgtttaataatcgattgggttatccaactacttgagttagattagctcaagtgaccatataaaaggtattaaagtgtgtatgtatgtgagtcatgagatcgaatcctaacaatgtacgtaactcaaaaatataatttaagaacgcttctattattaaaaaataaaaagaaaaaaacaaccttattaatatccctacttattacgaccgaggtcattgatcaatgaatgatcattgtccctcttctttttctctagagttatttgctctagttggaggctttttaggatctttttctcaaaataaataaataaacttaaaaatattataaatttaattgggggataaaatcatggatcaagtttgaggtaaccaaaataaagaaaaaaaaaagtatggtggccatatatatttttaagtgaagattacatcaattttaattttaattgtgtaattgagattaattacatattattatattattgtgtgtaatttggtgtttatcaatctcttatgtaaaaatcttgattccaaattaatattaagaaaagcatataatggccaaagttgagtgaaactaccatattaatattgtatcaaagttggtcttaacataattttgtatgatatagtcttgttttgatttaataaagattaaaattgttgctacatattctttcaaaacaaagaaagtaaatcttgacaaaaaaaaaatacaaaaacaaaaacaataatgtcaataaagcaaatgataattatataaaatataatgtttagtattttgcttgaccaacaattttgttgactttttcaagcaaaaagcaattttattgacttattttgtttgtaaaatattatataagaatataatagacctaaacaaatgtaacttgtctagcaaatactctcattatatagaattgaccaagtttatagtagatcttacttaacccatttgagtaataataatgtttttcttaaaataataataataataattacttactattttaattaaccccattgtcaattaattatcagatttagctactatgtttttttatcttcttgtcatttcttaaaagtaaatttcaccaaaa

SEQ ID NO: 99918 - DNA, 1425 bp, Cannabis sativa
tatatatatatttatatatgaaagtggtggctaaaaaaggaagaagataacaaacttttagattattttttcttttgtttgtttgcttaaaaagaattgaagaacaaactaaattaatagcaaataaacaagataataaaagaacaaattaacttaatagcaaataaacaagataataaaagaacaaattaactgaatagcaaataaacaaataaaaaaacaaaagaaattaatagcaaataaacaaatatagaaataaacaaagtaaacagataaagaaaagtacaaaccaaattaatagcaaatctataatttaaatatatatatataggtaataaatgatataataaggtaatattatatttattgcatatatttgtgtaaattaaaattctataaatagcatcgatcgatcaagtgaacaactcaccttaccaacaaactacaaatcattatacatttataagaatatatatataaagatatagccactgtttcaggatatccaaatatatatataaggtgagtccaaataattaaatttttcttatatataagctgattaattattatatatatgatcatcatctcagtatgtgtatataatatgtgttgtttatatatatattaaatatggttttttaagaaaaatgattagttttttttttatttttttaagttaacagttaaaactaacaccgttaaataaattgattaattaatttctttaaaaaaaattagttttaaatatatatctaaatttgttaaaatataaattaaataattatttaaaattattaataaaattaaatagttattttatttttataaattttaatttaaatttaaataaaactttaatacaattaattaatcacatatactatataataaatttattgatgatattatatatacatgattatgtttgtatatgatgatcatcatctcattaaggatgtgtacatatatgtgttgtgatacatatatttatatataaataaataatatatatatatatacagtaacggaacggaaggttagatggccatggtagaaaagatataatttaaattttattgtaataaaaagtccatttttatagaatttttttttataaataatcaattgagaaactcttattacttgttgaagaaaaaatagaaacacttgtatatatattttgattataatacatgtctcatttgcaatattacttaataaaatattagaatagaatttagatatatttttaaagaaataattaatcaatttatttagaatcctaatcttcgtccctgctctttcgttgttgtgtataagtttttcttcatacgctatttttttttttctttatttatcaaagcaggaattgtgtgtatcggcgttgtgctaaattccgtgcacactttccgaaagagtttc

SEQ ID NO: 99919 - DNA, 2005 bp, Cannabis sativa
acagtatttttaaaaaaaatttcgtgttataatatttttgtaaaaattaaaccaaaatccaatatttttataaatttctcataatatttattggacaccatttttttaagcgtgcagctaaatgtgtgaattatatttttgaccttacaaattgttaaattttataaaaacagatggaatatcttttataactaaaatgtacatagtcatataaaaaaattgaactataatttttgtaagtgttaaaaatagaaatatcttgtaggaacaaaagtgacatcataaaatgttccaataaataaattgttgcataatattaaatggtacctaaaaagtttgtccattttaggtagtagataaacctttattttgtttttggcttaacggtagccacaaaaagatataaaataaattattacttattatgattgtaggcaccagaaatttctcatggcaatcctgaaatattcaacaacttgataagaggcctctgcaatgcaaatacctccgaaggatttcagcccaatagagatgtctcaatacctgaacttaacttgccccctggaactttaggcccaccaaatttgggcctggctcctagtaatcgctcaattttggccttctttgcaggtggagaacatgggtatgtgaggaagatcttattccaacattggaaggacaaagacaacgaagttcaagtccatgagaaggttttgggggcccaaggttacactgtcttaatgggccaaagcaagttttgtttggtgcccaagtgggtatgaagttgcaagccccaagattggtggagtcaatcaatgtagggtgtgtgccagtgatcatctctagtaattactcactacctttcagtgatgtacttgactggagcaaattttcaatacatattccagtttcgaaaataccagaaattaaaagcatcctaaaagggatctctaatgaggagtaccttaaaatgtataagagaatttcaaaagttaagaggcattttatggttaataggccagcccaaccctttgatgtgatccacatggtgcttcactcaatttggttgaggcgactagactttaagcttaatcttgaatcttgaatagttaaacttgagattcaacttatttttgttgacatttttgtttgtttttaaggttacaattgaatttataacttgtatagtgttaaaatataatcagttttatattttgttctttccctttttacccttttggacagttgtccattctttatgtgatactttattgttcttatatatactctgttttagtaccatcttaaggaatacgcatttttggtcctatgctttaagcataaccatttaccttattaatcgcatgccaactcgtgttctttcttctcaaagcccctttcaagtcttgtatcataaccttccttcttatgcccacttttgtgtttttggctgccaatgtttttccttcctccgattttataatcaccataagttagagcttcgctctgcctcgtgtgtctttctcggctatagcagccaacacaaaggctatctttgccttaaccctgtctccggtcgtctattatgtcgatcgtcatgtcattttcaataaaaatcacttttcttttgccagtcacttagggaacttggattctagttcctctgcctccaaattacaaaattaatggttgtaagtgggtgtattgtctcaagcttaatcctgacagctccgttagttgttacaaagctcgtttggttgccaaggggtatgatcaaactccgggccttgattttcatgagactttgagtcccgtcatcaagccgacaactatccgattggttctctccattgctgtctccatttcttggcctattcaacaactagacatacaaaatgctttcttacatggggacttaactgacactgtctacatgcaacaacctcaaggctacgttgatgcttcttttccttctcatgtatgcaagctcactaagtctctttat

SEQ ID NO: 99920 - DNA, 2546 bp, Cannabis sativa
  modified_base (210)..(213): a, c, t, g, unknown or other
gcttaggtaagggtagatgaaatggtcatttaggcttgtctataccataagcttctccaatcatatcactcaaaagaaattttcacacaatctcaatacccccttttctaattgcatgagagatatttttttttttcttgttttcctcttttttttttttccaataagattgcaacaactgatatttatcttttttttttctagatttgnnnntggttgtcagatttttcttttttttctttttttttttcccttttttttcaagttgctgtcaatctaaattttttcatgttctctcaattttcacacttattcgcacacacatacaacaacttcccatccaaattctcccaaactaaagatctacttatggtataattagggttaaatctttggataaaattacagagatggcttgaaaggaaaaatcgatcaaaaagaatgcctaaatcactttcttagccatgcataatttattatttcatctcaaatagcaagcaagcaagttctataatttttcaaacaactttccacaagtcacaattagcatacataaactaattcaattactagaatattacctaatatgatttcatgttcttttaaagcacaaaattgaaattagtcaagagtataacatcaccaaacacacggatttttttctcaaaaataaagttttcaaattgtgctatctacctacttttaaattgactcacattaagcaaattaactcacattaaaaaaaaaaagataattttagaactaaaaattaaaaatttaagttcacccccaaactaaagtgacacattatcctcaatgtgtcatttaaaactaaaggaaagagaacttacttgcgcaccacgtcaatatggtggtggtggcggtggcgggtagaatccacctcttgcatccattagggcccttgtgccaaacgaaaaaaactatcctccaacgttgcattttttaaagctgtccttaaattgagagtcaccttcataatttccacatagtagtctttccatacgtcgtcaaaaagttcgatagtttagacttccctttcttcttgttggtagttacttctcgaccattctttacaacttccactcgacaacaagtaggaatttcagttgtggcaaataccttgaaagtttcttcttctttttgaacacacaactataactccccttctgtacatcaattaacgctctccctcttgctaggaatggtcttcccaaaatgataggagtattctcatctttctccatgtcaagtattaaaaaatcagcagaaaaagatgaacttaccaacctttaccaaaacatcttcgattataccccgaggatgagtcaacgaacgatctgccatttttaaaatcattgttgtgggcttggcttctcctaattttaatcttttaaacatagataggggcattaagttgatacttgttcccagatcacataaagtttttgtttgtatcaaaccccctattgagcatgggatattgaaactacccggatctttaagcttgggtggtagtttcttttgcaggactgcgctgcactcctcagtaagtaccaccatatcaaactcttccaacttccttttcttggataggatgtccttcatgaactttaggtaagttggcatctgttccaaagcctctatgaatgggatgttgatgtgcattttcttgaatatttcaagaaatttcgaaaactgcttatccatcttattcttgtaaagtctttgaggataaggaattttgatgtgatggtcaatgctgatgggaggtggtgtttctttttgttgaagaatgtcagtagtcttcttctcctcttgtggtgtaggtgctgattcttcgtcttcttcctcttttggcttatctttgtttggctcatcataggtcttaccacttctcaagataattgcattacagttctcctttagcttgacttcagtagtgctcggcaagttaccttgagtcctgttagtgttttgcgcagccaactgccccacctgggtttccaagaccttaatggaagatttaatctccatcatgaattgcagtaacatgtctaattgaggattagatcctccactagagtcttcttgttgtttatattgttggctttactgagattgattttgtttgaggataaaactgcttttggaagttcggccgacgaccaagtattcttatagtttccaatggtgtggggttgttccattggcaaactgtcgacatctatagggcaggtgtcagtggcatgagatcctccacacagcttgcagacaacttgagcttgtttggcttgtgcagtcaccagctttgttaatgcctccacctgggttgtgaacttggttatggcattgacttcatgcatacctgcaacctttttagttggacctctctctgttgaccattgctgattagttatggccatctctttaagtaattcaaaggcctcattagtacttttcctcataaaagctccaccagctgcggtatctatcagtgttcgggtgttgctcattaatccagtata

SEQ ID NO: 99921 - DNA, 1936 bp, Cannabis sativa
  modified_base (48)..(54): a, c, t, g, unknown or other
atatagttttacataaaaatattgcataaaatacaattcaatataatnnnnnnnaatacaatacgacctaatacagcgttccaaacgagccctaagtggttagactataatttttctaagacttagaggttgtttagttttaaagcttattactgaaactttgaatgttattggataaaaaaaagaaaagaaaaagaagtgtactgtgtactaatacacgttactaaaaaaaatacatgtgagtaaaataatttatcagcattataaatggtagaaagtatataaaattatcattgacaacatatatttcttttattattacactttgtcttattttaaataaaatgaaagcaaatatttttaatatgcaaactacaaacacactgccttaattataacttcaattgggaaatggtaacctgcaataaataaagtaaaagttacttcttgtaccattatttgtgagtgagatctaatttcaatgcatttatataaatgcttcaatttaaaagaaaagaataataatacatacacccaaaatatatgtgataatttttttaataaattatatatttataaagagtaaacttaccataaacaacatttttttagagatattaataacataatttattcaaaattttaaatttttaactagtataaattcaataatatgttttagtgaatgaaatacctaatattaataaacttataatttttgtctagattcgtcaatacagagtctgttagtacatataacacatataaggccctaagttgtaaattattgagtctgaataaaaatgtgtaatatcgttacttctaaaggaatcttctttcatcaaatttaaaaactatgtctggttataaatttataatactaacaaagataaaaattacaatttcactaacattaaaacttatgtcgttataaaaatcaatagatctacattatttacaaacttaaattttaagtactgataccacaaatgcttatatatgtataaaaattgaaataaataaacagcaatatttgtacaaaaagaaagttttgggttcagctctttattttagtagaagctcttaagagcacttagatcatatgcaaaattaaaaaggaatctttaaaaaaaatttaaagaactaaactaaaaacacgttagatcaaatattttaaattctttcattttaaagcttatttaaaatttattattcatcctctacattttaaaatatcgatccattattttaaacatattttattaattgtttgaaatttaattttactttttatatagggatatatgttaatattttatatttaaaatgaataaaatatattaaaatttgaaaaaaaaaataaagtattggtgatgtatatttaaaaatataaatgtatagtgtaaagtaaaaatttgaagtaaaatagaaaaattaaaattttggtgatatattttttaaaaaaaattacataatagacataaaaaaattacaaaataaaaatgcatgatttgaaaaataattataatattagaaaattatatattaattacgtacccgagtttgagagtagtatctgaagagtcaaagtgattttgattttgactttgattttgatgatcttgaggttgtggttgattgaatatatgactcttagttgaggttgagtcaattaagcatttctcaaatgcatctccaacttttacaacattactcttctgtcatagaaaatttaattaatcctctataccattattaatatataattatgaaatatcacaataattaagttccgtttggtaacatttttgtattctaattgtttaatcataaaatgaaagtaaaatttttgttttttaaaattttgtttttgtaaaataaaaatgcgttctgtaaccatttttgtttttcaagaaaacaaaagtgtaatctgtaa

SEQ ID NO: 99922 - DNA, 1456 bp, Cannabis sativa
tattttaaataatatttaattaatttctattttattatatataatggtgtatatattttggttctcagggtatacatattttaattatggtatgtaatttggttagtagagtatgttagacttttatttgggcttacattaacttttattattttcattaaaactggagttgattgaatagttctttgttgtgttagcccatattgttagtgatccatagttgatgggcttagcatttgtgtgtgtaaagtctagttaaagcaaaagtgtgagcttttctagttaactgaagcctttgatgagcaggcccagtccaactagggttatgtagctcagtcctctccctaactctataaatatgtattgtctcatcacaattgtatacttttgataatcatataaataaaactacttttgatttagagatctagaaacctctatcccttgagttctttaagctttatgttggttgtagcatgcaatatctaattttaggtgttcttagatttaggtcttgttgtagtttgattcttggtttatgtttaagttgactcggattagtttttgttggttttgttgatttagggtgtgttgagcaactttaagtttaaaaaactcaaacttgcctcaacaatggtgttttgagttgttatggttatttgctactgtttcttgttggattctattattgggtgttattacatgtgttctagaaagtttggtggagtttgggtttgttttgagagagttgtgaagtttttgggattttctgatatgaaccagttaatcggttatgttggaactgtagaactggttaaccatttcactggatagaaccctagaaactgattatccatttaggagatccagtttaccggttcaagaagtttttagagccttattttttatgtttccttgatatttagggtaatgccatgctatttatcgataggaaaaattttagtttttagtttaggtccctagaaaaggctttaccaagttgtttaccaatttaactgaatttgacataaggcatcccttcaccacatgagtttccgttcaggtcaaccggcacacttgaatttagaaacaaaacagagtagcatagagtatgaatatgtgtatgtgcaatatatgcaccatatttgtaatttgtatgctaccgacactagtatagtagctatattgagtgcattggtacagtgtatgatgtttcaaccagtacatatggtcttaccaacactagtacggttaactacgtagtgcatgtggtacaacactaagtgctactcgaggtacagttcaaacccaaccaacactagtacagtagtggtacgtagtgcatgtagtatagtggtcgtatcttagtcgagaacgttcttactcatctaataagctttgtggataggtgtatgagcacctaaatacaagccgataatgttgggttttatgccct

SEQ ID NO: 99923 - DNA, 772 bp, Cannabis sativa
ttacgtaaaatatgaaaaccctgtccaacattatccttatgaacccctaacttctcctaagacatctagtgaatactcctacttggagagcctgaccgccaccaatatttatacatgagttgttccttttcattaggaagaagaaaaatattcatgacataacttggaagagcttgagcaatagacttgagaacttcttttcctaccctcgaaatctattttccattctaactctgcaccatctttctaattttctcctttaaaaagcccaacaaaaccatttttttatgttcatagtgctaggcaaagcaatatatttattatgttcatccaccacttgtatgccttacacctcctaaacccaaccccgattataaacagatgtattagtgctgaaaaaaatatggaagatataacaacattcaccttctgacctgaggctctttaaaaaatatatagtaatttctgaacattatttccctttctatcatttgctttgcaatatagatagttgtcatctgccaacaacatatgagaaacactctgcccccctaagcaactttacactcatgtaaccatctttacattttagactttctgatcaaactagataagccctcaacacaaataataaaaatgtatggagataattgatcaccttgttgaatacctgttgtataatgggtcccaacctttccccaccatgtgcaattttataacgaaccgaggtcacactacccaaaaccaaccccactaaacgactaatggaaac

SEQ ID NO: 99924 - DNA, 966 bp, Cannabis sativa
cttaccataaatataattaaaattttgaaacaaaaatactgctcaatttcaccccaaaatagttggaaattgagttaatataaaaatgtcatattcgttgttataaagaaataaaagctttactaaattattattaatttacgtctcttgctacaaatgtatttttctctaaatatgcctaaaattatgaacaaataatagattttatggtaggaaagttattatttaaagcaagtatttttcccacccacaatatttaattatttatttttcaaaatatataagagctattattattgtcccaaaggcaatgagtgttttgttttgctttgttctcttccgttaaaacactattccctcaagtgaatcgaaccttgttatctttccaaatctcaacaccccaaacctataaggaccgtcggattacaccctagattcctgcatggaaaaatgaacggtcaaaattggatatgcgaaagggtactgagtaaaactgaatgtagtggattaaaacatcaggggtcatattccgtttagcatcttctaatctctctcccaattgttccgttcctcacgcttgtctcttctctttctctcccttctgcttcttcttccagagctttctacctttcgattactgtcttccattggtttaaatatcattacaccttttctttccttttttatcttttttcccagttcttttttgtttgtgttcttccgaaattccagaagagaaagaggagaggagaggagtgctttcctcttcagtttctgaggattgattgcggtattttggggctgaaatttcggcagattgatcctaatcatcaacttttttttttgtctaaatttgtgtctggattcatttcctcgtgttcctgaattcgaagctttatttcagtgccagtttctccattggatgttgcttcgaattgtctcggtaagcttttttttttttttttt

SEQ ID NO: 99925 - DNA, 1616 bp, Cannabis sativa
  modified_base (41)..(49): a, c, t, g, unknown or other
  modified_base (99)..(121): a, c, t, g, unknown or other
gccattaatattccgctgcaccaatgtaaggtttcctaaannnnnnnnntgtttatttacattgttttagatagtcatatttaggatgttaaataacannnnnnnnnnnnnnnnnnnnnnntggtaaaacatattccaacaaatcgtttccccagggaagatcctaggaaccagcttaccatttgtagcagttttttagaaccctagttttttatgtgtttcatcgatgtttagggtattaccacgctatctatcgataggaaaaacttatagttttcaatttaagtccccgagaagtgattaagcgtatcacttatcagttttacaaataatgtgacttaaggtcttgtaaatcgtcgagtagcagtgtccactcaggttgattggcacacctgaatttggaatcaaggtaagattagtataataattgcatataatattacatgtttagtgtgcatgtttatgaatatcagtaattgcatgtgtacatagatttgcaatgaatactgacggatatatgtttggcatagtactgattgatgctattacatcagtacgactagagtaccgagtataggctgatattgtagttaatagtactttcgtacaaacattctagactcagtacgtgtgggacacaagataagattataattgggtgtatgggcgtctagttataatctgctttatgttatgttatgattatattttttcttactgagtcgaccctcacatatattatttacatgtgtaggtaaggagctgtgagctcgagctattgaagattgtacatattgaggtagttagaattggagcgttccatcttcagggcaacaaactttgttttgatagtcgttaggcgaaaacttttgtagttgaatattctgtaatacagttataaattttaaaaacgagatctcaaattatgtaaagtttttatttattaaagtttaaatgttaatcaagaacattttaaattatccacgttttacatacaccttttgattagcaaaagagtgcacaacatatagaaatcacgtaacacgcctaatctaatagagtgttacatatgctctgctttgcacgtagattgagctttgcttacctctccttccttccaatgaagtgatgagtttcattttttattagcacatcatttcattaagtcttctatattaattataatgggaattactcttttacaagagagttattttttacgacttacactaacttaaaataatagaaatttgagtacttttactaatatttttgaattttgagtatgttttccattatttttaaatttttgatatttattaataactgttatcccaatttttgaattctgacgtagcatcacatgttgctgacacgtggatttaattctccataccttctcgaaagagatgttctgagcagaacaccgcatatacctgcacggacgagttcctccccgaacagtggacaatccgagcagcatatcaaaacatagcaattccataagtggcatcgtaaagcacaagagaaatccctataaatctgggatcatatcacagagatatggcaagctatccaaatcccacaatctgtgtattctaaatatgtaatgtgta

SEQ ID NO: 99926 - DNA, 976 bp, Cannabis sativa
taataagatatgcctcggtatctccgaggtaatcaaaattgtctgatgggtttgccttccaaaattcgtaaaagacatgacttatttatgtaaattttgaggacgaaatttctataaggaggcgatagttgtaatatcttgagaaaatatattaatatttaattgacatattttattcaatatgtgattatatgatattggagtaagtttataattatgagttaattagtgtaaatttagtaaatgaataaataaagtgtaatttattaaatacagagattttatcaaattatgggggtattgaaatactatttttgaaataaaatattttcgagttcagtagccgtggaaactcgacagagtggtcagaaatgtcaaggcaataaaaaatgagttatcttggggatttacctgactagtttagaaagtggtgtcaatttaaattaggatagttggtttgaccaaaatacccctaggttatatttagcttaagtgttaaagggaagggtaaaatagtcattttggaggtttttagattcttgtcctatatggtttttctaggctgatttttaaagtgttttaatttattttatttaattaagttagaagataaaggtttgaattttaggattaaatcaaaacaaaaccaattttgcataactctttttctctctccctctttttggctcaatagaacctagcaagaacccaattaagaactcaacccaaatcatcaaaatcttgtcaatttcttcggccctaggagttgtttatcttggatgtaagttctttattcattctctttgatttctaaagttctaggttaggttttgttgggttttgtgggtgaatttggggttgtaaggattagttagattcagaatatgatttctaggtttaaattaagtttgtttgtgtgtgctttgaatgatttcatggttgttaaagttataattgaaagaatgaagtttaagaa

SEQ ID NO: 99927 - DNA, 1212 bp, Cannabis sativa
taatcctggtaaaatatattccaactgttatcaatactctaagtggaacaggtcccttgtaaagccttgatgatgatctagagtcgctctcaattaacacaatggtttagattttgtctcaagaggcagatggttgtttcttcactaataaggggatcaagaaagcaagtctatttgaagcaatccataaaacaattcccaagtgatctcgagccaatgctaccacacacattgacctactccctacttttatgtcgcaattaatcttaatctagtcttccagaggaggggacaaaaggggagtagcagcagcaggagtagaagggagtaaagaggagccataatctgcgtatagtgagtgatagagtcaatataattttttatgctattcggattattattatgtaccttatcattacgggtctgccaaatagtatccaacacaatggatgtataaaggaacacatccttgacaaccacaacctttgaatttaagccccataagaatttgacccagttccacatatgcccacaagtctcaaaagccgagattagaccccaaggggaagacctccataagtggtaagcaaagttacaataaggaaataggtgctccatggtttcttctcccgtcctacataaaggacagttagtatcatttatctgcaatctcttagctatagtagcacaaattggaaggacattggagagaatactccaccacgtaaccttatggcactctaacactttcagttccacagtttgttcaaaaggaatggagccacatcacagggaagggcccagtcaaatgcttggagtagatagcagacttggacgaaaagtttcccgagtgttctttagtccaaatccacctatcatttccttgaccactaggctttcctcctttcaagctattaccgactgtctcagagccaaagagggagtaaagctttggaatatcccattctctcgaatctaaaagcaggtctgcaacccaattgataccattaagacgatgggccacgggggtaggaacaaactcttgcccatggaaagctcgcatgtccttccaaatattggtatccttcccatttgagaccaacttaccagtcttttttttccaaaatagatctatctttctaccataactttccaaaatcttatagtgggcctcaaattcatgtattctatgtatttagcccaatagtaggc

SEQ ID NO: 99928 - DNA, 1241 bp, Cannabis sativa
ttattaaaaataacaattgcaatagttctttcagacccaaacacaaagagcccaacaacaaagagtcaacacaagtcaaagattctctttctactcaaaatgggtcatacacgagtagcccaacaagaataaagatcaacccaatattctctgtccaatcaaaggtcaactcttttccttttaatattaatttcgacccaataacaatatataccagcccaatctaaggaaaccctaatatcgtaatataaaagactcattcttgatcaaaccctaatacttcactattcggcagctgcactatttccctctcaaagaatttcaaatatacttctttttcctcataactcacggtaccactaaataatattctagggttttggctttctttctttctcttcttcttctatcaaaacacaaatgacagctagggtttatggggttatattcttttcttcttcttgctacaaccgcacacaatttctagggttagggttcttaaattttttatcttctcttctaaatggaagcaacaaaatagttagggttttctaagttttattttcttactcctcttttctttttcccgaaaatactaaacccaaaaaacacacccctttaatctcaacacaccaaaaccgaaaatagcaagaacacaaaactcacacaaatacaaataccagaatgaataataagagtgagatgagagaatacaaataaaaatggtaaagacggagacaccaatttgatctcggagttagcccaataatatcggctacttctccgtcaagccctcaaagcttgaatccatttatcaacaatcaggttacaatatttgatttacaactttatgatttctcacttattttctctctttttgatacttacaaatctctctttgttttcaattacaagaacacaccaacaacactctcggaggatctcactcaaactggctctgatttttctctgttgttgtctttatttttctgtgttgttctctaggattgcacacaaaatactgaacatcctactactgacatatgctaaattaactagatttccttttaaatgatgtacgggctgttgtctttggtgttaaaaaactttaaatgagaaacatggccaaagtcatagttttttgcacattaaattaatcgaattacttgttcatttggcacgtgaagataatctcatatcattatatgtaaatgatcacgactaatatttaatctcaaaaa

SEQ ID NO: 99929 - DNA, 997 bp, Cannabis sativa
  modified_base (814)..(821): a, c, t, g, unknown or other
agccattctaggagagagaatcgggacaccgcgggggaggggcttggtgacatcacacatgatcctaactcgaagataggatccccaagtttctaaaagtgaaggttggtgtatctcaagaagggtgccagcaattcggcccaccaacttggcaagagagaccgacattcgggaaaaaggaatggtgtggatttggacccaaagaggaattttcctcatggattcaggggagaggatagaatcggggtcagggatctccaaaaagacagggaatttgtcaaagacccagggttggttgaggatggctctacgcatatccccatcacaatggaaacagctaaataaaggttgaagttgggagctctttctttgacactcactaggaatcgtcccttccagtattttttgagaaaattcttcaaggcattatggttaaaaaattttgtggtatacaaggtggccattgataactcttgagtaaagagttatttgatatcactttaaacaagttttttttttttgcaattgtgtgtcattttagttgttttgtcttttaatttgtgaaagttttagtgttttatgtttatgtgtgtaatttgaagttgttagttagaaatcaataacttttgtttataaattggcaatgaaaatagcaagttagtcaagttgttaactttgctgatattttgtgaagtttttgctacagcaaacaggtcagttcttggacaaaagatgagttggtacttcattaaatgtggtggaatttttcgagataacgtggcattctaggagtggtggctggagcaaatacttnnnnnnnntagatccatgccatgtgtagggtttatgttgggcaaagggtacaaaacctaaaatgttctcttgaagaaggcagccttcattgtcagaaaataggaagaagaaaaaagaaagaaggaattctaccatagaacctctgtttgtatagaacaagaagagagaataaagaagaaaaagg

SEQ ID NO: 99930 - DNA, 1468 bp, Cannabis sativa
  modified_base (663)..(680): a, c, t, g, unknown or other
taatatgaaatattattttggactatttattttgtaaacgttattgattagactttttattttgttaaataacaacataaatttcgtattttttaaaattatacaaaatagacactgaatttaatttttgacaagttatgttttcgatataaccaacctcaagtcagtatctagcatgaacaaatacaaaaaagtgtaacgaatatgataataacacctataggttaggttattattaagttttaatttaatgaaattaagcttggagttcgtgcaattatgaaaaacacatagtataaattgtcatttaacaaaagagaatgtctaattaattatctttactaaatacatgatccaaaataatatttactcatataatatataataatagtgcatttactatagatagatataataatatacacaaacactaataaattacatataaatatatatatatataaataaattatagcatacactacaatatatacaaaatgggatttttattttccgtcgctctgctcaaattttgctaattttgagatatttgggagttcatcacaagagcaataatttttttcgacctctacatgtgacagttagtagtctcgtgatccgtaagagaaatactaggtaagctgtacaatcccacaccgtctnnnnnnnnnnnnnnnnnntgattctgagactgtgtaggtacgggactacacagttgaagatggcttaaatggattgattggtactacctatagcaacaaggtgcatcttattttttggtaacccatgacgaaagaacttttaataaatgagaatgttataggcgtgagagaatagaatgaaaagtaagggactattgaagcatgagggagagaataagagagcatatgtaaggaagtgggagaaagtgagaggtgtgagatttgaaatttaggaaattaggattttcaatttatgaatttatatatttatttaagattcatgttttagctttaaagttcaacttcacaaaaaaaaaaacatatatactatatttataatatattgatcttatttaacttcggatcacagttttaattaggactttcttttttcttttgagaaataaacttaagaaaacaccacctaaaagacagagctcacattattgatatataattggcatctgcaaaataaaagattctataattatatatatatatataaatataaacactataacttaatgcatgaccaccaaataatactagtagagaaagtatcgtgaactataccaaaaaaaaaactacaaaatactaaacatagaagccattacaagtatattaaagtatatataatgatatctttaagggcaagttccaaaaaatatatgttatttatattagttttcttttcttccttaagttttttttatagagttgtaaatttggaaaaaaaattatacatttttaggacgaatatttaaaag

SEQ ID NO: 99931 - DNA, 1228 bp, Cannabis sativa
aggccatggtagtgcgcgtacgtatctcaggacatgccttttgccaaatgacttgtctagagagtaatttgaaaggagaaacctttgagcaacacatatctctaatatagacctttgggagttcaaaaaacactttgtaattgctcaaaacattgtctaaaaatgctggattagtctcggtggtggctaaattacatttttccagctgctcggtgggttctttgtggcacattctcaacattgttttcaaattcactagactctttcccacacaagaatccccttttatggttacgagttgtacccccactttgaaattcaaaatctgatgattccaatcaatgtgagtgttgcccaagattgccagccattgcatacccaagatcacatctgtgcttcctaattcaaaaggtaaaaaatcatcaatgatggtcagcccttgtagttctagcaccacactcttaatcgattttcccgatcccaaagtcactttatactcccctgttttagttaacgacaactttttcttttttactaattctttggaaatgaagttgtgggtagccccagagtcgataagtaccgtaactttatgattccttatcgctcctttaattttcgtagtgcgtggggctgctattctcgttgctgaatttagcgagacttccattatctttgtaatctcagctttatcaagggccaattcatccttctccggtcccgagtctttgtcctcatcacaagtgattaccatactcaattccttcctagcacatcgaccccggagcccttttggtatcacagcgataacaaatgcctttttgtcatttttcttgcacctcagaattagttaatggctgaaattagccaatgggtttctgatctttattagaaaggttagttctcctcctatccccattgttgcctggccctttgaaattgttccaattcaaatgagaaccaaataaagaatggttcttgctctcgatcttagcagcaaaatccatggccttgttcaaacttcaaagtattgggttcaaataacctcaactcttccttaatattcttttttaacccagtcaagaattggctgagcgccaccacctcagagacatcatttaaggttgcaagcagttccagaaatccttcacaatattcttccacggaaccttcttgtcggaacttgcagaactgttcgtggagcgaacccttggaagtgttacgaaat

SEQ ID NO: 99932 - DNA, 4287 bp, Cannabis sativa
  modified_base (27)..(30): a, c, t, g, unknown or other
  modified_base (4089)..(4092): a, c, t, g, unknown or other
  modified_base (4225)..(4231): a, c, t, g, unknown or other
actaatcagattgtaaagagttttatnnnnggcataaaacccaacaaaaactaactctacggtgaaaatgtgagaattacactaatcattagagcctcaattatttctttactcagaaagatttaagtacgaggtagagactgtagttggaactggttaaggattatgattgtgagattttgtatcatctcaagaaagctaatgtaatggtcgacgctttgagcagaaaaggtcccgggcaggttttcaatactatgatgatagctcctcaattagccacggaaatggttaaggctgaaatttaatttgtgttttggaaattacgcaacttaacacttcaattagatttgttagaaaggatcaaaagagcgcagttggaagatcctgagctagtcaaaattcaggaagaggtattggccggtcagcctaaggacttttaaatcttgaataatggaatgctacttttcaaagcttgggtttgtgttccaaattatggtgagcttaaaaaagaaatccttgatgaagctcacactacaccttatttgttgcacccgagaaccaccaaaatgtatcaagatttgaaaccctattattggtggtgcgggatgaagaaagatatagtggattatgtggctaaatgtttaacttgtcaacaaattaaagttgaacatcagaggttggcaaggttactgcaaccattagcccatcctgaatggaagtgggaggataatgcaatggacttcgtggttgggtttccttgaaccacgagaatgtatgattcagtttgggccatagtggaccatttcacaaagtcaacacattttctgtcggtaaagactacctatacagtagatcagtagagctgtatgtgaaggagatagttcttctccatggagctcctagatccattctttgagacagagatccaaagtttacatctaaattctggataagtttacagagagatatgggtaagaagttgaagtttagtacagcttttcaccctcagactgatgggcaatcagagagaaccattcagatattagaagacttactacgagcctgtgtcatggactttgagggttcatggagttggtacttgcctttaatagaattctcctacaacaacaactaccagagtatgataaaaatgactccttatgagatgttgtatggtaggaagtgttgttccccaatccattgggaaaaaactggagacaggaagtatttgggtcctaattagttcaaaggaccaatgaagctatagataagatcaaggctcggatgcttgcttcgcaaagcacgcagagaagttatgctgatccaaagcgtagagacattacatttcaagatggagaacatgtcttcttgcgagtttctcaagtgaagggcattaggcacttttgaaggcggggcaagttaagccctaggttcattgggccatttgaaatactcaagaaggccaggcaggtagcgtatcgattagccttaccacaacgttgtcggttgttcataatgtatttcatatttcgatgttaaggaaatatgtttcaaactcaactcatgtcttgaattacaaaggcctagaactacactcagacttatcctatgaggaacagccagttcagatcctcgataggaaggaaaattttcttcaaaataagactatagctttggtcaaggtgctctagaagaacaacaaggtggaggaagccacttgggaaatatagtctggcatgaggactcaatatccagagctattcaggttagatttagggggcgaaatacttttaatggggggataattgtaatgaatgcatgatagaatatggattagtaaaggaaattagcatgaattatttacatttttataattatttatgattttattttattgtgggtcccattattagaaatgggcactagagttataatgtctcaattccaaagattttataaaactctaggagtgttatttgtgctgtatatgaattatgcaatttcttatgatttttgctcggcgacaatgaaaaatgcgatggatggtcgttgagtcacatgagtaagttaagaacctatttcatagtaggaaaaaaatttgagatatttagaatatcgagtttgagcggggttattgcttttaccaattttacccctaggattaatattgcttaagttacaagtaagaagggtattttggtaattttattaaggggattaggtggctagtttttatttggatagatggccacacttagtttcagcttaaattaattatatttttggaatttattaattagagaaaaaataagaaaaatcaagaaaaaccttagaaatttcatcccttttctctctcttgctcaactcccatacaaccagaggaatcaacacaactagccttcaattttctggaattcattaggaagtcaaggtgattcaagttgaaaaataccctagaaacttttactttgtgaattctttaagttttagttgatgtgggcatgctattttgagttctagaggctattagggttagaattacttttggttcagtttctagattcaatttgagttgagattgatttcttgatgctagttttgatgagtttagtggtgaatgaacaagtttgagttggaatactcaaacttgggtcattaatgacatgcttggattttgtgaataattattgttgttttcggttggaaacaccctttgatgtttttataggtgatctagaaggtttggtgaggtttggacatgaattggacaagttttcaacttgtttgggttacctggtgcaaaccggttaaccgaatcaggggcaggtatcccgaaaagttcaatttgtggattcgtgttatttttcaatgccttacttggttatttccttaatacttatggttatgttataataattaccaatagcagaacccttagttggggtttgggttccccaaaacagggttttggcgtgttatttacctgtttacataaatgtgactagagaatttatccaacacgatgtttttccttcaggtcaacaaactctcttgaattcagaaatgagataagaatagcatagaacatgttatatttgcaattttgtgtatgtgtgatatatgcacgcgtgttctgattggtacactaccaacactagtatggtagcagtactgagtgcattggtatagcgcgtacgatgtttatagagtacgacacggtgttaccaacaccagtacaggcatgtacgaagtgtttgtagtataacacttagtggtactcaaggtacgagataaattggttgttggtgcttgtcctcttcttgcactatagctccactaattgcatcttccgagatggctaaatagagaaacatcgtctctccagttatgggttttgccaaaactggaggcgtcactatatgcctttttatgttttgaaaggcctcttcacactcttttgtccactcgaactttttgttgcctcgtaatctattgaagaacggcacacacttatcagttgactttgaaatgaatctgttaactgcagccattcttcctgtcagggcttgtacttccttaggctttgtcggagatggcatgtctattaatgccttgatttttttggaatttgctttaatacccctcgcgttaactatgaatcccaaaaattttcctgaggaaactccaaaggaacattttttcaagtttagcttcatgttatacttctttaatatcttaaagcattttaccagcatatcatcgatgtaaacctccatgttccaccctttttagtttgcgaacatttcgtttaacaatcgctgatatgttgccccagtgttcttcagtccgaacggcatgaccttataacaatagagtcccatgttggttacaaagcttctacgttcttgatccgggacatacatttttatctggttatatccagaatatgcgtccataaatgacataagctcatgcctaatagttgcatccactaactagtcgatcccgggaagtggaacataatcttttgggcatgccttattaagatcagagaaatcaatacaagttctccaagttctgttaggcttnnnnacgagaacaggattggctatccatgagggataaaaaacctcccgtataaagtcgttgactaacaacttgtcaacttcttgttttattgccccttgcatctcggaatcgaagggtctccttttctgcctcttcnnnnnnnagtttggatcaacatttaaatgatggcagataatattagggtcgatccctatcata

SEQ ID NO: 99933 - DNA, 629 bp, Cannabis sativa
catatattacgtaatcaacatatatatatatcataatacagtacccttatgatataatattgttgagtaagaaaattgatcgagcatgcaaaatcccaaattttatatctctcgctatgcaaacgaatattctagtataaattattctttgacgtacaaactgaactgtttatcaaataagtttcaaatgtcccactaacacgcagaaaatgaatagtatattgtctgcattgaaagaaaaaaactatgattaactacaaaataaaaattatacataaatatcaccttctataatattataagcagcttctttgactgatgtgcaccactaaaaggaggcaaaacacacttctctcgatgcgttcttcaatcctattttaagtctttagactcagtaaaaataaagaaaaaatcagatataaaagcaaaattgataattaagaataatatatatatataaaagaaaacatatatactaaaagtaaaacaacctatgatcgatctcttacaagtttttggaaaatgagtatctagtcgatgaataaaaaaaaatcaaagaaagtgatacaaactcatcaaactatagggtttataaaatatatatgaaatgttcaataaaacgagagaga

SEQ ID NO: 99934 - DNA, 1096 bp, Cannabis sativa
ataatgtaaatataaaagcaacatgaaaatgtgtaaataacacggtataatattgttgtaaaaataatataataaacaataataagtacttttgtacaaaaatcaaatctataaaaaatgtatatatacttctttgtaatttatttttctatgtatttatggaaatatcctaaattaatcttacatacaaattttattttggttttgagaaaaaaaataatgataatgatgaaaattgctaaagggatcgtgcctagcaccatctaatcatctattattataatttaaccactcaatactaacatattacattattattattagatattatctttctgtcttttcttaaaaaaaaatatatatattaataacatttttgtcaatttaatttaatggaactcatttgagagatgcaatcatagactttcaactccttttagtttgatcattaatgattgtaagcattttgtatttattttttgtgaaactatttgcaaacaaagttgctcacagtatgttttgttattaatttacaacttacatttgttatctcaattgctctgtttcatctttgaagattgatagcattttctaacagaaatataataaattacttttctttattattatcatttttcaccatgtcaactgaatcattgatgctccaaattcaagttacatgtcaagtagtatatcaaatcttgaggtatctttattttcaatgtaatcaaaataatcaaatgtaaacaaatattttcactctatttgatgcctgttttcctattcaaggttgatacttgattctgattatgtaggttctgaaggaactttactgagcagccataccagcatgacaccaacaagagcaccagatagatgagcaatgtgattgatgctactcatggaagagcctccgcgaaacgcacccgatattgccgtagaagcttgggctgcatccataacctatcaagttcaacaagttcaattcaattgaaaaccttttgtctaggcagaatcctttaaccaaaagttgctttcttttatgttgctcatactttcccagaagcaaacgaaataaaagatcataagttaggtc

SEQ ID NO: 99935 - DNA, 755 bp, Cannabis sativa
ttttattttctcctgatgaagataaacttttatgctgaatatatggatcaatgtttttgtattatttcttgctggacaataatttaatatattggtgttttggttgttgataataatgaatatatattatttttgtatgttaatattaatgatataagtagctagaaaaatgagtgtcctagtcaagtagtacggtgtctcttatgtgatctttaatgagacacatagctaaagtaaaatcaacttgagaaactaacaaataaaaaagcttgctttttggagtagtggaatttgttaacatcatattaagcttaattattggatcatatattaaaagggtaagagtcctttttgaaccatatgactatttttcatcaaaataaattctcttagattgtcataaaattttatatgatcacttcactagtcattagctatgaccatagtgactactaccaaaccaatcataaatattgtgattttagatcataataattaacacatttttaatctttagttagtttatgtttagataatgttatcacaccgaaataattcccttaattttggaataatattatcttatccaatttttatcatcattaccttccatcccaactctttcttcttctaatctataatttttaagaagttttcatttttatggtattttttagcaaaatacttaaatatggatttctttcgaaaataaaataatatgagagaagtaatttagagtaattaggtaactaatt

SEQ ID NO: 99936 - DNA, 1922 bp, Cannabis sativa
aaactacgcgcttaaaaaccgcctctaaagggagtttttgtagtagtggacagattctttgttattgttcaaaggagtgcaagcatctcaaagacatatttccgattttcattgtttgttgaacaatatctcttttttattttccaatttccttgaggctcagatctctcacatttacaaatctgctaataatgtggctcatctgttagccaaattactctctcggtggattctatttgtacatggtggaaggaattacctcccccaatcatgcctattgtattagaacttggttattaataaactgacatttatctcaaaaaaaaaaagtgaatgtcattaaagaaaataataaatatgcaataaatataaattaccaaccaataataaatgtaattaatataataaataaaattaccagaaaagaaaaaaaaattataaccaaaacactcaaaacgcctcctcttattcctccaccaccatcgacatcggaaaatgaatcttcaagacagagaccaatcgttcttactcgtccacctcaccaaaatgctggtgccactgatcccaatccgacttttggtacaaagaccaaaaaagaataccaaaacaaacacctcaatcacctagaaaatcagtcactgaaataaaaaaaataataacaataaaataaattaaaataggaaaagaaaactccctttgaagataaactgagcattgaagatggaggcgttggcacgcatcgagtcagtatgaatatcaggatgaatcacccttctcgctaggatccactcgatcagtacgactaacatttctcaaagaacagcgaccatatcagagttggaaaacttatctagtccttgaaagaaaagaaaaacgtcgtcgacgatatatcaagaacagaagctttggtcaagaacttcttggctatctccaaggcttgattgatatcatcgggaaaggtccccaagattcgaaccagaaattccttcgagagatctgctttaggagactgaggatcggaaggttgatgagaatgtgaagctgttgatgagaagaggaacgccaattaggaaaaccagaaccgatcgaaagaccttcacggaggatggaatggagattgggaggaaaggtgaagttgaagagtgactcaatggaggagaattcgatgttggagaggcctccgcggcaacaaggacattagagcagcagagattctcaagtggagtagtaactaaataaaaattagtcaccattcaaaaaaaaaaaataataataataattagtcacaaattttagttataaaatttataattgtgactaaatatttttagtcacaacatttagttgtgacctcttacaaattataaaatttaaaaatgtaaatattatcacaaataatttattatgacttattatttgttatacgttgtgataaaaatatatatttagtcatagattattagattatttttgttgtgactaattttttttgactaaaagtataaacttttttgcagcgtatctctaccatatataatctgtaaacaaatatcaaactcttaaaacatgtagtaatattaatattatcgactcgtttgatatgttgtattaggtcatgttgtattgtattgtattaaattggattttatatcatatttttatataatactacgttaaactttaatttatactaaaatattatatatttatgtattcatattacaagtcaatatatcacatatagttttacataaaaatattacatgaaatataattcaatataatactataaaatataatacggcgtaaaacgaatccaatgaggccaatatgtcggctttcaaaaaaaaaatgggctattttcaaaaatataagaaaaattattaaggttatgataaatatggcataaaaagtaaatgcca

SEQ ID NO: 99937 - DNA, 1903 bp, Cannabis sativa
agagaatgttactttgaacaaaatagatttctcttcttgcaagaaagttataaatctctcattacatgaatgttttgatgatggggagtcatcattacaagttcttatctctaattttcctcttcttgagcatttgacttcgagctttctcagttttgataggactcattctttgataaattattactatgagtcagactcagactcagactcagactcaatagactttgatcaatgtagttcaaagcatcttcaaatttcgaatcaacacttgaaatgtctcaatggcaatgaagagatcataggacttaatctgtaactgttccaacagtgatgtttcttatctaatttctctgatttttttttgttaagacctgcagaattgagcttatttctcagttgctttgcttagtgatcttccaattgaaataaagagatcattctgatctaaaactatgcatgcagttgattgtgatgagcctaacttgatgggattttttatcatcttcagtctgaaacaacatctctttcaattcccgccaacttgatcatttgaacccagtgaatcgcttcgtttatcataatttcaaaggaattcatgttaagaaaatcaatgccattcaagtcttatctgtatgctgatttcttgtcagcatcagaatttcaattttgagaccttttggaatatgggatatttgtttgtgatcatagttttacttttgtagcacaatgatttacgagtctttttacatattgtcttttcacttcaaatcttcaaactaatgcttaactaaatataactattggctcatacccttatagtgagctttgaactacaatggttgtcctcacaaaaaatgaacaagctttctctcaagctttttattgaagcctgaagaaatcaaatatggaatgatcacatatcaaaaaatagcacaatgcataccataattgaggttacattctatgatgagttaccacatcaagatagagagagttctttatatcattccaggatgacacttttcatcattacaattcatgttttttttgttcaaaaattgctataatgattggtattattatgaataaacaaaactatatgtatacttagctcttgcttttgctctttcaacaaatgagagagagggttgtaagtttgacagataatatatgtgttctatagtttctagcataagagttttgcctaaaatgtgaagaataatttgcattttctaaatcttggggttagttggtgtagggcaattttggtatttgaatttcctacctccacaattctcaccacaaataataataataatacaattcatgatcaacaatatgaaaaatcttattgggacccgacctatccttttttactaaaaaacattatccaattacgctaccaaaatcttatagtaagcttggacttcatgatattgtggatgcgatggtaagaaccctcttagtacgttgccttttatattaagacagttggattaagaacaagaagagttggagagacgttctgacaagaataaagtttggtagattatactagaagagttatcgcaagtcacttggcagtccactcaacagaaactgtcaagacaggaactgatgttaattaaaagtaatatgttttgaaatttattgttatgtaacatattgttcattattttgtttaataaataaagtacttcactttttattctgtttttcctttttgtaatattggtcttaatcaatgtggtagctgagtgatttgatgaaaatgagaataacgagcttcattgatttattagtttgttacataataattaactaacagtacaagctactaacactctaaattcaagttttatgtgtgaattaatcactactctagctaatctatacaaaa

SEQ ID NO: 99938 - DNA, 837 bp, Cannabis sativa
gaagttatacttaaaatatttatatacacaatttatttgttgcattccactgggttttgaatcagaatcaatttttgtttttgaaattttatattacttttgaaagagtaatatatatatatatatatatatatataatcaccacctaattaaatatagttttgtttattttgaaattcatgaaaaattattggtaacaattgtttgattttgtatttgttacggctgaaaatttggaacaacatagaactcaactgagtttgtttagttcatgttaaattcactattgactcgactaatttgttattatttaaatcatttttaagttagtaaaactaaaaaacacaaaccgttaaagatatataatattattggaaaattttataatggattattctaaaagagatatattaatgcaccactatctattttagtattgttgaaaaaaaatttagtctatttctttttaattgtgtattacaaaatttaataggattcaaataatctgttgtataggtgtttcttttattttatatattgctttttatattgtaatttattttgaatccgaatcgacttaagctaaaatggactaagcttgatccacccatcttaaatatacatactttttttaatattttttaaatatactatttattcttatataataaagaactttttttaatcataaggcaaatttcaactcagtatggatcatgttttgaattttttataattttacaagatatcttaagtatatcgtatacaattataattttttttttttctgaataccaaaatagaagtgtatggttacaccctataatattttatagt

SEQ ID NO: 99939 - DNA, 2080 bp, Cannabis sativa
  modified_base (1966)..(1966): a, c, t, g, unknown or other
aaaattaattctactatgcactaatctaacatattaataaatataaaacaaaaaatattgatgaaaaaacagatagaatctacaaattaggtaaataaacatataaataaagcatgaaaacaaaccagcttcaaatagcatattccacggtttgaatggcacgtagaacgtatttccacagatgaagtcatctcgggtgcaagttgtaaagcatattcatattttgatagtgcctcctcaaattgcccactactgtagagttgattgccttccaatttagcatcatttgcttgtgctaaggctttctggtttgacatttgaacaaaacgaaaaggacaatatataattattcagaaatcatcatagcctaaaattgggctaactaacagaactgaaagttcaatagatcaaaagtgtagctttaagcaagtgatagagaaattcttctcactttaaggagtatcattagataccaggttagcataacaaagcaaaagaatgaaagataattactttttcatttgaaacaatcttaattttaaacttgatcaacattagagataagtaagagaattatcaatcaggcttggtctccagagacatgtatcccaaaaaggtgtccagcattatatccttatatctaacatggttcaacaaacctgattttttctacttgatcttacgtagcctgttgatacatatgacatgatcgagtctgatcatagaaaaaaaaactattctcttccaacgaaccaccttatcctctatatggagctttcatatgatgaaaattccacttgaatagagaaataacttgatcttaatgtacaatcaacctcatgttgtgtttgtagactcttatcatttgttaggttcccctttggtattatcttgatattgtactgcaaaaaacactctttgacagagtgaatttctcttctatgcctgtggtttttctactttggagtttccatataaaccagtgtgttattttgtttttcttgttcatcttcaattgctatattttctacaccttaatatgcaacaatgttgtacccctaaatttagtcatgctcagatattagaatagtgtcaaagtcatcaaaacctaaaatgcattataacaatttcttcaagcacattctacactgtattaaaaatcctatttttcgattacacaaaaattaggggaaaacacgaaaaaatcgattactgctcttagaactttttaatttcaatcatttgaaaatcgtgtttagaaagacaaacctgattgagctcatcgtgattattatcattatcaatacgggaaacaacttgttcttggtggtgattctggggttggcgatggtggtggtgttcgtcgtcatcgctgccaccgaattcgccatcgctggcggtctcgaagccgtcgtcatggttagggtggttttgggaagaagaggattttggatttgggggagtggaaacaaggtcttcgttctcgtctacttcgattctcaccatttctgtaaagcttccaaagtttaggaagtctctacccaaaccaataaataaataaaattaaaggataattaattcatttttgacatgaattaaataattccctctaaattttggagattattaaagaagattttttttatttttacactttaaaataaattttttttattatttttataaaattttatataaaaattattattgcaactagcgctgcaaccactttagaaacccaaactgtaaatttaaaaaaacagtatatgggtaattcccctattaaaaattacatttattaaaattgttggaattaaagacttttgtctaatttaagtaagaaaagagttcaaaggcataatttatcacatgtgaaagttcgagcggcataatttgaataacatgatttagttcatggacaatcaccgaattaattaaattaaataaaattagacaaaagtccttnaatttaacaatctaaatagtttagagagagtttttaactaccaaaaaaattcaagaaacatgatttagtacatgtcaaaattcaggggcaaaaatcttaattagccaaaaataa

SEQ ID NO: 99940 - DNA, 1935 bp, Cannabis sativa
gatgataaagagttattaaccctagtaggcctttgggagggtggttttatgtaacgttgtgggagtttcttgattccactttcggatagggattggacacggactattggttcgggccaagaatgtaggcagttcattcttcttatgtgttcttgaattttgggtttcaaaagggggagaatgtgtgtatatatatatgatagtacttttataactaggtagctagtagtgtttattactagctcaaagtggtatttttttttatttttgggtatatatgttgagttttgtagtggtagaagtgggctctttatatagggattgggagacactgctttcaatatatttacggcgccgtgaacaacttgagttgtaaacattttatttaaattattcttttttgagggtaggttcaagttgataaattatgctattttattgtataccacaagtgataaagtatatgtttatatattttatatataacactatatatatcatttaatacatgtgatgatatatttcgtacatatagtatttgtgtccaacggataatgtcatttaatttataaaataatgttaattaaaattatcaagttatgagatattaaaaaattatagtattgtgactaaacttagagcaatatacaaccagcctcggttgaacatcaaggcaccaaactaaattctattcttcttactagttttcttccttttaaagaaagaaaatctgaaatattaacctcctttttttaatgggattttttcaaaaatatacataaaatgtaatctaattacaaaaataacttaacaaatctcaattacaataataccttgctacatcattaaaaaatatcttaattctaaactaatatacctgaaatgaaactaatcccgaaattctatttttttattttcctgcgtttcaaaagtaacattttggttacttatgatgttgataagaaaccaataagttactttttcataaaaaaatattacttttatattatataatttgaaatacattttagctagctctaaaacttatatggatacgccttaataattaattaattaattaggttatattaatatatatttgagtaaccttcaagtttattttcaaaaataatgagttgtcatgcattaagctaccattttagtaaactatgtttaagccacccatattttttaaatgtaaattatatatgcattttgattaattaattaaagaatgaaattacacataacttttaaaatattacaaaacgagacatattttttttggaccaattagttattattttgataagataccaatcggttactttttataaaatgatttattttaaaataaaaatatctcatatggataacttttgatttttagattagttacttttaaaactatatgttattattagtttatattatattatttacgatatatattatttttttgtacatttatgttacctataatcttattgaagaaactaacgtgttaaaataaagtaaaataaatcacataatttattagtaaaatgtttagacatctataataactaattaattatttaaaggttacatcatggtatcctaatattatttaagagatattttggtaaccttaatttattgtagaaactaattagttatcatataataattttaaatatgaataacaaagtatattttagtaacctacgaatttagtttgcatattaaattttgtttacttataaaatttggttatttaaatagaaaaagaaactatttttttttattgtggttattttaatacgtaattatagatattttctattgttatatagtaaaaagtaactatttagttaattatgatacttaaaatgtaaagtaactaggaagttacctttcacacacaacacaaaaaatgattcatttatttataaa

SEQ ID NO: 99941 - DNA, 1671 bp, Cannabis sativa
ttcttatttttcattcttttctatcttttatttaaccgaatagaagtaaaagtttaattttaacttacttaactacactccctgtgggatcgacctcactctaggtgagtcaactacttggaacggtacgtacacttgcgtgtgcaaaatattgcaacataaagaaatggagtggtcctaggtccttgagtgtgaagcatttcttcaattgagcaatcaggccttttacattctttgtgtcattacctgtcacaataatatcatccacatatattaagacaaggattataatcttttccgagttaaagaagaatagagaagtatcagattttgaatttttgaattttcactccaacaaggtgctctttaatttatcaaaccagactctaggggccttttcaaaccatacaatgacttgtttagtttgcaaaacaaagtgctcctttcctttctcttaaaaccccaaaggtttgtgccatgtaaacatcttctttcaagacaccatttagaaaagcgtttttgatatcgagttaccttatgtcctaatttcttaataacatggttgtaggtttctccaaaatccatctcaggtcattggtgaaattctttttccactaaacgagccttgaacctctaaaatgaaccatcaacatattgtatttttcgcgaaacacccacttatttctcactaggttgtagtgcgaagaaggaggcacaagaacccaagtccaagttttattacgttttaaggcaattatttagtattcattgtgccattccaacctttgtgcaaaatagcttcttgaacacttgtaagttctttatgtgccgaagcaaattgagtttcactgagcagggttcatggcttgaaaattcctacttttcctcttgtaatcattggatgagtagattgatatggagtaggtggtgtaggcatgggttcaggttcaatttcaagtgttgcattatatatcatcatgaccatgatcagaaaaattgttagaagagaccaaattccccatttgaacctaaagccaaaacaacggtatcaatagaaaacgaggtcatagggttgtggggtgatacatgaagtaaaggagaggctgaccgaggaggtgatggagaatggcctgcaactggaagagatggaggaatagaaggtactgcaacatctgaggaaggtggagaagagagtgtaggtgcaaggagagttgaccatgaagaattatgaattatatcagattgtggagattggtaattgttcaaaaagtcagatttaaagggaaattcaagtttgttaaaaacaacattttgaaataaattcaacaatttggactaagacacttgtaccctttctttaccttttaatttcaaaacactccataaccatttagtccataatctcattgtgggtcacctccaagatgtaatttccacccttgattgtcatggtcaatcatggggtccatcctgacttgttggaactttgatatatgttttaacaaaatatgaaagtgtcctagtatgtgtgaagtgaaaagagtctgacatgagatatgagtctcacatgagagaagcaattctcttatggaaagttggtttttttaaggaaactttgattattgcattttccttattgatttcgattgtatcttgatacaatcataatat

SEQ ID NO: 99942 - DNA, 1719 bp, Cannabis sativa
atgttatatgttatttgttttagggttaatatcattctgtcttttctaaaaattattgatattgcaccttttattttgtcaaataataaaataaattttgtattttttttttaaatgatacaaataagacttgaactcatttttcaataatttttttaaataattaacttgcatgaagataattcttaatatgaataaatataaaaacgtaattagttttgtcaaaatatctctagatcggctattattaaattttattttgataaaaataaaacggtgtactattaattttgtctaataattttttatttgattgaataaagaatcaaatcaataatttttgtaaaatacacatctaaaatgatttttccttttgttttttataatgcactttattaattaatttagatacattaaagtactatagacttggtttgactttgaagtaagattgaaaatttgggttagatacaataacacgactcgaaactcgcacgaaataaataattttggatttgccttaataaatgagtttgcatcatttatgtattgactcagctaacctgtttattaaacatgtcatttttgaattgacaccttcaatccaaaaataacacagtaatgacttatgtaaaagtatacactacttttaaatttattatatctaaattatattttaattaaataagacataaacatggtaaatggctcataaatttatcataacaaaattacaaataagttaaacttattataaacatgttaatgagttgataacttaacttaaattaacatgattttttatacaaacgagtttaacaggttgggtttgaattttgatttttgacacgattcataaataagtcagatttttatttgacattttcttgtaataactaagccttggtacgtacgttacacaaatacgacctataaatacaaattgtgactcctaatttagagtgctttaacttcttataattaacaactgttagatcaagataatctatcacatataatctagttcttacatcaaactaaactcacaatacactaatatgtataaagtatattttatattaataataagaggtgcatttatttttaataaattaattgtgaaacaattaagcataataatattataccaccacactttgaatctagctagctaactttattttccttgctattttttttttttttatcggtatgtgtatataattaaaccatatgttatgttggagaaagtttatcactttattgacatatgaggcaacctattctcttttcattattattattcaaacaaaagtaaaaggtatgtgtgtgtgctactcatcaacaccaacttttggaagtttttgggtgaaactttagcagataattttccaatatatttttttagggttttcaatggaaacctcatgaactatatgtatttgttctcatttctctttttggctaaacttttcaatcaactaattaaatcatgatcaagtgcacatatataatacgccctagccaagattatcatcagaaactttgttgcaataaatatatatgttatgatatataagagcttgaagataactataattattgtagttttaatttatttataaattgtataattacttcactcattaccaattggttttgaaaatttcatgattctcaatatggtatcagagctatatctctagtgggttttcgatc

SEQ ID NO: 99943 - DNA, 1070 bp, Cannabis sativa
tttttttttttttgaacaaaaaatataggaaaattttaaatacctttaatttctctttttttttttttttttttttttttctctcagctcaatcaataatgtattttattaatgatttaaaatataaaataagtatttattatcagcgtctataacaaaatgtaaaagtttggcatttataacaaaacgtaaaagtatacatagtctaagttaaattaaagcatttaattgaataaaattataattacacaaatatttttatttagttaagtattataaaattttactaaaattaaaaaaaaaaaaatgtaacactattctcccacaaattatttgtcttactgaggctatctttgtgtctgatagaagtacccatactaataatgttatcgtacaaaaaatcattcactctttcaataaaaagaaggataaagaaggcttgttagcaattaaaattaatttgatgaaagcctatgacaagatgagctgccattttgttaaccattatctgtattgctatggggtgccagaggtgttctgtaaatgggtttcccaatgtattacaactacgtctctgaatgtgtatcttaatgttggtcaagttgggaacatcactctgacttgtggtctccgtgagggagaccctctttcaccttacttttttatttgggcggttgagattctgtcgagacttcttgatagagccttgggtaatgggaaaatcaggggcattaaactttcccggggtggccccactctatcccacaattctttgctaatgacctaatcttggtgggtaaagcctctctagctgaagcaaaaggctactggattgcattgaaatgttttgttcttggtcagggcaacaggttaataaacttaaatcttttatatttttcagtagaaatacccctatggatgtgaaacaagggattcgagaggccttgggaattagagggtttgtaataatcgttttagtaatttggattagtaaaggcaattatcactaatttctattattttataattatttatgaattaattatttatagaccccaatatttagaaat

SEQ ID NO: 99944 - DNA, 1446 bp, Cannabis sativa
taaattattccgaatttttcaaaattttgtaggatatcttaaatacctataacgtacatgaatatgaaaaaaaaattagactaaaaattttttcgggataccgaaacaagttaagagtgcatcagtacatcccttttaaaagagtacattgtagaatcacccaaaaatatatattatttatattaaaatttgtagagtaaacccaataaaaaaaatttaatgaaaaaaaagaatgtgaatagaaactagtaatcaatcatgattaatattatacaatcagaataacataatcatctgataagtttgatatttgttttataaatataatcaatttatatattaatattcttgaattaattcttgagattataaatttttaggatattttaaagactaatcatatatttagagtcatttgaaaggatattaatacattttagtgaaaaatagctagtggaagccaacgagcttgactttacaagacgaaatttaattgtaaattttgacaatcttgaaagcagaactagacttaaagctcaacatgaaagtgtaaatctcgttcttagattttcgagacatcttgaatcgtcaaattctgaattgtattgaaaaagttatggccaaaatactaattacgtgatagaaattttttgacagtgagttatggccgcggcgagaaaattgcggtcgcaacgagggtgcttgtgggcactgcgaggaggtgattactgggaaaaatttgaatttttatcccttttttaagtgagatatttttaaggattataaataaaacttctagaatacgagttttatcacttttaaattacgtttttgagagagaaactcatagagagagcaagaaaaagacggagattgtgacatcgattgttctacttcattattcttttttcttatccttaaactcttattatttattatgaatttcattataatgtttagttcagagttgtttctatgataaatgttaatttttagtttccattatatcgaattacttttatttttctatttttaatgtcatgattattgttttaatcttgtttagataatcactaaattaagttttactataatctattatcatcttagaattactattcacctaatagtttagaattataagtatttgtgataaattgcaatttataatattttcaaaaatattttttttttcttgaataaatttcaaaaatatttttagttgtgatgaaaaatagaacctaaattaaatgaattatatacttcattaatttattgtttagattaatctatctccattgaacttaaagctttatctaagttaaataaattacatgcttcatggatttactgcttaggtaaaagagttaattattgagcgttttgtctttattacacgcaatagagagaatgtgataattgactatttcaatattatttgcgaga

SEQ ID NO: 99945 - DNA, 1585 bp, Cannabis sativa
tacattcaggaataaaataaatattgttcaataacaaaaagttatcattaaattttagacagactttggaaacaccttttgcagacacttgtgctctattcctcacctgcatggccacctctccatcagtcagctttcttgacgaatcaagtatctgcatagaagaacaaatatgattagtggctcccgaatcaacaatccatattaagttatcatcttccactaagtaagcttcaagaaaaaataaatcaaatttacctttcttaagctcggagacatacttgttatagtttctcttctagtgtctcattatgccacaatggaagcacttgaatttcaccttcttgtccttggacttagggctagctttgttattcttgactttaggtgccttcctgcctttcagtttgggctagccactgctgctgtccttactattccattttcttatcttatctaaagaagaaggagaactggattttgcttcaacaatgtttgatttaccttccttggacttatccttgttaatattcttaaacacggttaactcgttcaacaattgagtaatgttgaactctagcttgttcaacaattgagtaactgtaactaactaatgacagctaacactttcacaactactaactaacaatatttaacactctccctcaagatggagaggtaattctcattaatcccatcttgtctttcaagttgttaaattggttaggaaagtgagccttagtgaagacatcagctagttgctcatttgatgaaacatgactggtttttataataccttgctaaactttttctcgaactagatgacaatctatttcgatatgtttagttctttcgtgaaaaatagggtttgctgatatatgttgagcagctttgttatcacagtgaagtaatgcagggccattgtgttcaatcttcaactctttaaggacaaataaaagccatacaagctcacatgttgtgttggccatgaccctatattcagcttctgcagatgatctagaaatggtttgttgtttcttacttttccaagatatcaatgagtctctaagaaatatacaaaactagtagtagaccttcgggtatctggacaagctgcccagtctgcattagtataggctttgagcttgatttctgatgtttcggggaacaacagcccttgtccaggacaatgcttgacatattacatgtttttttgacctactttcatgtgtctagctttaggaacaaccaaaaattggcttaatttgttcacagagaaagatatatctggccttgtgatcgtaagatattgaagcttacatattatcctcctatatagtctaggatttgccaacttatcatccttctcatcttggctcaattttaggttagcttccattggagtagtgactagtttgcaacctaaatgaccaagatcttcaagcaattgtaattcataaggtctttgagatatgaaaatccctttagcaaatctagccacttccaatcctagaaaatacttgagatttcctaggtctttatgtcaaaatttgtcattcaacttgatttttagcgctttcaattc

SEQ ID NO: 99946 - DNA, 1468 bp, Cannabis sativa
acctaatgtttatttttggaggtaaaaatacctaatgttacaattcttttacaccgttactgccacttccgttcgtgaagagcccaaatgcattacagttatttattttatgttaaaatttaatattcttaatattaaaaactaaatgctacttgttttttttttttaaaaaaaagagatgcaatactaaattaccataaatgagtgaacacgtgcagtatatgaaacatgattattgaactgaagtaccaatatcatgtgaaaattgttatgagaagtgggttttttttttaaaaaaaaaacaagtaacatttagtttctgatattaagaatattaaatttaaaaataaaataataataaatgtaatgcatctgaaccctccacgtgtccatatttatgagttaatggaagtggtagtaacgatataagaaaattgtaacattaggtatttttgcatccaaaaataaacattaagtatttaagtgtataaaatctaaaacattaagtatttatatcttttagtcttattgttttatatttcatctttgtgaaaaaagagaaagtttcttatataaaaacttagagtgttctactaagtaattttttttttgtaaaattgttatttcactgttcttagaatagtttgaagagcttcattgaacaagctagagaagagtctttgaaagaagatttttcaaagactcactttggaggaagtgagtgcgcacatatcaaaagctgaattcagttttctgtttggtgtgttcagagatcagattgacaaagtgaattacaaaagattgtgttaaaattttagagggagtataaacatctttaagtcaattataattgtaatttttgagactttactaattgattttattctatgagcgtggctcggtggactagtagtatttaaaagaatactaatataacacgtataattctcttgtgtgcaagttttcaattttgcacaatttatttatgtttctgacttgttactgtaagtccgtattttgaagtagcaagtttccaacctgttaccgcaagtcattactgttacattttaaatatagttattgaagaaataaattggtacatgcaaaaatattatttttcgatgtgtatcaaagcgagacactaaacgatcttagtgtggtcctttgatatttcttgtgtgtttttgcaatatgccatttttacataaggaagttctattcctcgtctcccacttctcaatgattctaagtatctttattggaaggatagaatgaggcattcatcaagtatgaagatgagaaagcttgaagatcaattcggtctagttagtcacatcctgttatgatagacttgaacggtaataaaaagctaaaacctaaaattaaatggtctaatgaagatgatatgttgtatgcttgcaataataagattttgcatgctatttttaatggagtatgtgaaggtttt

SEQ ID NO: 99947 - DNA, 1096 bp, Cannabis sativa
atataataatttttacaaaacaaaatagtatttaccctataaataatatagaaaagacataaaaatatagtagttcagcaagaggttcgagctaagcttgcctaatccacgagtgaaaagagatctctagggcaaataatggtcataatgaaaccgttacaaaataataataataataacaataataataataggcttattaattgaattaattacatcggttataaaatatgtgtaatgtctaccatgattgcattttgaatgcttgaccattagttccgttaattggtgtgtgtgtgtgtgtgtgtgtgttcgcgtctttttctattgatattgtggtttcattaaatatgcgaggtgtgcctttcttgatacaacgaaatctattttaataaatattgtgaggtccttttggtaccctataatattgcgagtaattatcgatgttgacttagaaatcttgattagacttctaagccacacacattcgctagattggcaagaatgataagtagttaagtatttataagagagacacaaaaaatttatggtagttcactccctatatcgcgacagtaatgaagctaagtctacttcgagtttttatttatcacgagatggtaattactgaaaaagactaagtgtcagaagctctaatttctagagagagaatctagagagagaaatgtgaccttgtaagtagttttttgaatgtgaaaaatgtgctaagggagctcttcttttataggtgaaggaagcccacaaaaataggaaaaaaatacaaataagattttttttgaccactgatgatgatctaacggtaaaaattagctcttggtggtgatggctatttttcgaagccaaagcttattttcataactctcttatggtaaaatttgatgacgatagctttagaattacatctaaagtgtaagacatgacttgatagatcattgaattagcttcgaaatgcaagttaaatcacgtcaattggatcaaaattgactgagttatgactattttactgaaggtagttcatgacccaatgcccaggttgacatccaacgcccaagttgactgttaggttttatgccct

SEQ ID NO: 99948 - DNA, 5402 bp, Cannabis sativa
taaaattacatgattatagttgttttattttaatttaagtaaaattataaagctaatggaggaaaaaaatgggggaaaatataaatttttgtgccattaatttgtattttttttttacatccacgacggtttaaaactgttgcctataacatggtataggcaacggttttaaaccgtcgggaaacccacattagcgacggtttggaaacgtcgcctattatgcccgttttacgacggtcgtataggcgatgattatagaaaccgacgggaatactttaaacgactatttaaaaacgtcgggaaaacccatttttgtagtagtgctaacctataattttttgtatttatcttcacatcagagttgcaactcacccatgatgttggagtgggactcaaaagtataatgtgatcaacaatgttaaaggcgactaaagaatgctccttgattttctctctgaccgtggtcattttttgttgcaatggagttatgtcttctccatgcatcttcttattctgttcccgccggaccacttccataatacaaagggttgttcccatgaattcgtttagagagacatttggaggtcgatttgatgcttcctagaaccattgactccattctctctagtttctcacatttacttgtgttgtgatgatttcctaacttgtactataccacaaagctcttgcataacaacactcccagaaaaaatggattgtgtctccattgaatttccacacagtatacatagattcaatcatatattcataaaggcagacaatttacctttagtgagtaatgcatcatgaagtaattgccaccatagatgttttagccgaggatgaagaaaatatttccatattcgtttccatataggatcaaaattactttcaccaaatgacccttgaataatcttacacactaatcgaatagtgaactctccacctcctttcgttagccagatccagctatcattatttggttcatctggcagatcaatgtttaaagtagccttagcatcctcatccgcataccaatcctttaccatctcctcactccgtctattgtcattatgaatgaattgcttcacccaagccacaccaaatgttgcaccatattgagggactggacaacgatctacgtgggaaatccaaggatcaaaccatatagaggtactagctccattcttaattttgttgtagataccataaaacaacagaggtcgagtatccaaaattgccttccacatagttgaatctccaatgcttctcacaatatcaaaacaacttcttcctttcatatatttttcttgcagaaccatgctccacaatttagaattgtccattaacgccttacaagcccaattgaatggaaacactttattcattgtttgcacacctctgaatcctaacccgttcttgagctttgatcgacatagggaatgccaaacaatagtgtggagcgttcttctttcgtttgtatctccccaccaaaagtctcttaggcaattaactatcctttgtgaaattgaggtaggactaggttcaatggctacaacataggtggtaagcaaagaccccacatattgcactagacaagtcctcctagccttagatagaagccttgttttctaattttttatctgctggagtactctatcgaccaagaattaaatgtcattttttctcttgaaagatctgaaaagcaagagatctaggtagattgcatctcttttcatttttttcattccaagaagctccgatattttagccgcattcttgggggctacaccttttgagaactacaccgtagacttttgaaaattcactacttgtcccgatcaaaagcaatactttaagtaacgccctaatcactaaggacgccacacatgtatttttaaaacatagttttattatagtagattaattaattaataaaattcatgataataataaaaagttcactataataaaactatagtaatgaataggataactcggtaaaaatttatttcgaggatctcctgttacaaaaaatttacaaaaagggctatatagaagtaagtcaaaatacatatcaggtatcgcccaaaactcaaaaactcgactgtacaagtcagataagtcgatatgtacattttcccgagaaggctgtcatctcatggttgccctagttttccattgcccttacttgcaccacaaagtacctgtgagtcacaaagactcagtaataaaaataacaacaacaatcatataattcatcacatagatatcagaaagtaaactcacccaatcaaaatcaaacaatcgtacattactcatatacttaaatctaggcctgtacggatactcaaacacaatgaataccaatataaagatagacaattatacacaattaccagtctaataataataactatagtcgttacttcataaagtaaccattctcaccattttcttaacacaaaaatttatgattcccaaccaggcatactaatgtctttgtcgttgtttaataaaacaaccctgatacctaaaactagtgtccaaatgtcactgttattattgaaccaaaaaacatgaataccaaattcacgatatccaaatgttaccgtcgttgtcaaaccagacaacctgaataccactccctagtatccatgtcactgtcgctacttaaataggatcactgacaagtatgaaacctatcaatagttttagtttagagtcataactttttacgattgtctcacgggaacaacccgaataccacaccttgctattcatgtcactatcgttacctaatgagataactagcaagtaggaaacctaataccaattttattttagagtaatgactttcatggtggtctcacaagaataactcgagtgctccccaatattcatgtcactatcgtaatctaatgagataacctgcaagtaagaaacctaacaatagtttcagtttagagtcatgacttttcatggttgtctcacagaaacaaattgaataccacccctctgtattcatgtcactatcgttatctaatgagataactagcaaataggaaacctaacaacgatttcagtttagagtcatgacttttcacggttgtctaacaggaacagcccgaataccactttctagtattcatgtcactatcattatctaatgagattaacgagcaagtaggaaacctaacaacgattttagcttagattcacgactcttctttcataacagtcatgacttcttcttcacttccataacggtaatgcatctctttactttcataaccaatcgattcacaaacgatcatgatttattatctgctcttgatttaacacatttccactgtagtgggtgagattgtatcttgacatactatgaggtacatatgtacttttcttacctcaagtcccaataaagtatgttggtcgacccaaatggagaaagatcaacgatcccgggctctatgtcacaacaaaaaagggaactgattaatcaacttaacctaacttgttttaggtctttaattcaccactgtaagttctccgataggtcactagggcaccaataccctaaacataaaacatgaaaaatggggattctaaacataaccagaatcggtaagttgattagaaaacaacaacccgttttcactgtttcctagataaaatagtttcccgttttctacaggaacgagaaaccccaagttttaacttctcaaaaccccaccaaaacctaaccaaatgattccaaacttcacagaataatcatattacatccttataataatgtttacgtgacagaaatcaaaatcatgtctttaatcaaaagtttccatgagagctcaagcattgagctgaaaaactcaaacttcactctcacctccccacaactgcaaacctatcaaatgagcatcaaaagtagtccaaaacaccctagaaataaagccatataaatccataagcttacttatatcccaacaactacaaaaccacaatttaacttgtagaaacttttcatgaaaaaaaagaactaagtccttaccttagcttccactacaagatgcttactcttagttgctgccttaaggtgttgaggagctgcttggacagagaacaaatcaaaaaaaagtttgttgcttcagtttttgacttgctcgagagaaaagaagaagaaggagagggtttatgtttttgcttttgacttttatgtttaagcttatcaatatatacatacatatttttcagcataaaaacaaagaaactaaaagaaaagaaagaaaaaaagaataaataaaataattaatttatttaagaaaagattattataatatttcttagccgcaatgaaatctctaaccctaggacatttggtcaacctcaaatatcccaaaatatcctggtatttctaacaccaacttacctcaataatctcactaagatcactaagtaaactcattgtgatatttttggcctctgatcgtgtaacatccttctcaaaagaacgccacatatcatgattacaacatactaatctcgttaatcgaggtctataaactaagtgatttgaaataaataataaacttaattaaataaataacttgcaataaacatatacattgagtctggggttggaatctgagtacatgtagggcctatacctgtgtttgtgtctgggttttgggtagctgtttaggtccaggtccagctcctaattagggagtcgagagtcggatcgaggtccgagttcggtctaggactgagtccaagtctcggggctaggctgcgattgaggcaggggctgaggttcgagtcaagtcgtggccaagggctggtgtttgaggtccaagcaggtaggcgggagccaatgtctggggttggggtcggtgtccaatcacgggatcagaattcaaaatattaataaaagaaaatacaaatttataattaagaaaaaagaatcgtttaaataaatttttaaaatgacatttattaaaaaaaaaaaaagtaatctcattttcattttaaaagttaaaaggtgaaaatagtttatagactatattttttgaaaatatttttatttttgtaataaataaaaataaaaaattaattggaaaagagttacagaaagcattcttaattttcattgatatatccatttattaatgatattttaaatagaaataaattttaattatattttctttgatcataattgattcatttctaatggttgccatgccaaacatattttttttgttttactaaacttaaaaactaaaatgtaagaaatcatttttttttttaattctcacataagaaaaacgagagggagctatccttgttacacccacaatatgaaaccaaaatctaacaaaaaagagaaaaatttctatttg

SEQ ID NO: 99949 - DNA, 1413 bp, Cannabis sativa
cgccgtctgtgggaatttcgactgtaagattttattcacttcaaagaacaccactcatcatggctggaaatcacgttaatggagctaacaacggatccatcaatcactactacataaatcacatttagccacacacatttagcatcatttggaaaataagtgttgggaatttgtttatttttcaaattagtaacagttatagaaaaagtgttactaatagtatcaaattgtaaaatatacttttttaaagaataaatttaaatattctatgccaacacttatgatgtaacagttgctatattaaaaaaatctgttgctacttaagaaaaatatatataccaatatatatataatatataccataatttattttttttaaaaaaataataaataaaaaacttttataaaagtgggacgtgggttaatgtaaaaagttttgagcagttttttttttttttttttatatttggcacctcatttgtaatttctgaatattttactcttgttgctgcctgaatttctctctcttattttgctgaatcttttttacttctctaccaaacctcaagttcaagaatcaatggatcaagggattggacaggtgcaatggcaaagctatcaacctcaaggcattgaaattatatgtaattaatgttcttctctcactcatgcgcacacaatagagttctacctttgattgatatcttaaaatatatatgtttgttttagaggtaatgttatttttcgttagctattttagtttttgttagtatactaatttttatttatttatgtagagagatcaacatcaacagtcatcatcgaggaaaagtagatgaagcagacatatttttttaaaaacatattcttttaatctagttgaatatatatgtatagtagaacatttgtataaatgtgtacttaatgatttttacagcccgatcatataagttgtaaagagtttgtacagtgagataactcaatacttaccttgatgtaattttgtgatttgcagaatatcaatgtaatttaattttggccaaattaataaaagaagatgaatattttcatatgcgttaatatgaaaatttgggaaaaattcaaatttgaatgaaaatttttaaatagtttttttaattttgaagaaataaaaaaagataatatatataatgattaaaaaaattaaattcaaatatatagcaacatttgtatagaaagtgttgcattagatttatttacatatgagcctaagacaacacttctaaaagtgttgccatataacttatacttttggtaacagtttaggaggcaacacttttaaaagtgttgccttttaatttttcttaattaaaaaaaagtgttgctaaatttactttttctagtagtgaatattggaatgatgagcgtaccatt

SEQ ID NO: 99950 - DNA, 699 bp, Cannabis sativa
aactatttttaagaagttaatgttgatactttaaaaaaatattaggattaaattattctctttcgttatattaatttggaaataaattgcatttgcatgtggttgtattttgtttagtgataaataaaaaataaaattatattaaatcaaattttaataatttttaaaaagaaatgcactaaaaaaattcattaacaacatggatagggtggagttatttcgacctataagcttcaatttttatttataaagtgatttcttgcctattgtcttagcgtctgagagggattatggatcaaattgtctcactattttagtccgctttcattctaggaagttggatagttgatgctactattttagctcatgaagtggtgaataccatcaagaagaatagaagcaaaggtagtttgatggttgtgaaaatagatatgcataaagcttatgatgggatcaaatggaaattcctcgagacgatcctgaaggcgcatgggttctcagagcattttgtccatcttgtgatgaaatgtgtttcaagtgcttcctatgtggttcttcttaatagtaaaccacttcaacacaggtcttcgaggagaggtttgagacaagagaaccctatttcttcattcttattccttctatgtaattgaaattctgtattttaatattctcagtttgattatttaattaaatgattaa

SEQ ID NO: 99951 - DNA, 928 bp, Cannabis sativa
gatttgattttacgacgtcgtggcaaggctttcatccaagagccataaggtttacctctcagagcattaaaaagacaaggacgaaactgttcagcatagcccataatatcgcatataaagcaaaatgtaggacgatatttgtatttaaacattgcccagaactcttcttctccaatttgtcgcagtcgtatacatatcttcaaaggacaatagattgtcaacgtcattcgaacatagagatagtctcgccaataaccatttaaattctttgaattcgattcaacaaactttttgatataattcccaatattttgcaccacacgagcagttttaaactcgtttgaagtccatattattgaacttacatgtccacttcatccagaaccattgtcttaggatcctcatcctttttaagtcaacgatagacgagcaaaaaaatttattaaacgtccaagggctcttctccatcaccctttgaatatctatctcatggtagaattaaaataaatactaattaatatcaagttttttcacgtacaaatttttacaggctgccagagagaagccattagatattgcatagcatcaaaatcaattgttctcgttgtcaaaaatcgaccaacaagacatcacctctcatcgacaatcataatcacttgaggctgccgctgtatcataattgtaaaccaattcctcttcatcatccaatcaaatgttactgcattgctaagccataacccacaaagaccaatcacaaaataaagaaaaccaataaaatgaccaagagaatttacaaaaaaaacatgtcaacaatagaaaagacctaataaattatgtttatttatacgttataagaatgataaatcctaatcctattctaattaggaaaacaacattgaacgtatttttaatgttggtataattagaa

SEQ ID NO: 99952 - DNA, 2164 bp, Cannabis sativa
  modified_base (27)..(40): a, c, t, g, unknown or other
taggatgttaatcaaacatacttggtnnnnnnnnnnnnnnctggtaaaatatttccaacacagtagccttttatattgtgacaaataagaggcagcaaaggaatagagaatggttactggtttcggtttagtgccatgtatctctttgtttcttttagaccaaatacaccacatgaggcatgtaataatttctaaatcagtgtcattgtgggcagcagcaagatgggaatgaatatcaaagcctttaatgttaccaatgttggggatgaaaacattgaaatgaaacttgttccataccaatttagctctttcacaacgaaaaagggcatgaccaactaattcccagctacatttacaaagagcacaagcagcagaaggggcgattttcctatgagcaagattaaccgctgtagggagagcatcattcactagtctccaagcaaaaaatttgacttttttggggagtttgagagaccgtaaccaattccaccatcttctattcgtggatgatgatgaatgatcatcctttgagtccaaactaacagcaaggtgatatccagattgcaccgtataacatctagtatccgagtgatgccaaataatcttatcatttttgggaaaaggactcagcggaatagagagaatacgttgaatgtccatggcgccaaaatgttgttgtaagagctgaatatccattgcctacttgtattgatgtagtgctcaacagtgaagaaaggatcaccacaataatgatagggagtaaaagaagtgtttccaggtaactaaggattcgttgcacacctaacagtttgcccatcaccaattttccatctaaaacctttcaataacaattcgagggaagagatagttagtggagagtaaatccttccaaatctctaattttcacctaagaggatttgttgaaaattataattataccctcttaatatattcttaaaaaaatatttataaagataatataataattttataaataaattctttccttcatacttccgactacatttctatcaaacaacttataaggattgttattttattttcccttccatccttttctcaatccctcttatctttcatagctttaatgaatagattaatattatatattatcaaaaaaaaaaatggtttggagacaattttttttttttgacatatagagactttcttatttgttttccgtcaaagaaattttttacagtctaatatttttatatgaattacatgtaaatttttaaaaatttcaaataatttataataataataaaaaaatagttgagcttttctcctccctcgatttcgaagggttccttgcttcagggattggtgttcccacctccaccatggatgaactgttgaagaaaacccataatcttcaagtaactgatgaagatgattgggaaatagacaagagtctttctatcacgatcgcaaagttcaatctcagagggagattatgtacaaatgcagaacacagtcgaggcttcctgaaaagagtcctgggaggcatctggagattaaaggagacgaatggaacatcaaaattaaagagaaattcgatacaggtctatttctaacctttacctttgcctctgaatcgattcaaaacaaaatattaactgaaatgccatggtatttatctaacgggctgttaattttgtggaaaatggaaaattcaaatgaatcttgggccaatgacctgaccaacttcccaatttggggcaaggctatgggggtgccgactgatcttctgaccaagaacaacacaacgagaatggcaaacaaagcaggggcggttatccaagtccagaattcagatgtttcaagaatggtggcagatgggttttttcgattccaagtatggatgtccatcacgaaaccagtttgtctgggttttccactaccgtattctggaaagaaactatggattgcattcaaatatgatgaattgccattcatgtgcttcaaatgtgggagaattggccatagctttaaagattgcaataaagaaccaattaagatcactatggaggagaatgaagaagtagaagcatatggagtatggttgaagacagacaatggatgcagagatggctttcaaggaaaaagaactggtatggggcaagcaaacattcaaggaaga

SEQ ID NO: 99953 - DNA, 1689 bp, Cannabis sativa
  modified_base (54)..(63): a, c, t, g, unknown or other
aggtaaaaatgatagattttaaaaaagatggtaaaaataaaagaggacaatatnnnnnnnnnntagagtgtaatttcctcttttaaattcttagttattaaactaattaaattatcactgagttgcaatacatatttaatattatgagtattattatttattttattactaattttattttaatttttttttcgatattggggccctaagctgtggggggcctaaggcagccgcctccttcgtctcacctcaggatcaaccctgcacatggggaaggtgtcaaaattctatgattgcgtaagtatgagactacacagttgataaatgcttaaataaattgatgagaattacttgttaaagcaatttttcgtcaatataaccttaggtggtcataaaaagaaagaggactagactgagaccattggttgttagaaataaactgtaagaaataagaaatcaattttataatgtttcgccccctttgattggtggtaacgaggtagtccacttggttgttttataaatcaagactcaaacacactagagttatattctcatgagtgtgtttgagtggattacaaagagcaatatcaatagtaagatctcgtttagtgtctctatgtgactgagtttagaagaataagtgaccaacctatattctttttgagtgagctagggctgaatgtttttggaaatgtgtatgagtgagagagcgatcatagagagagctgccaggtctttatgagatagtgaagtcatcgtggatcgaatcccttccctaggtaaacattatgcttatataagtttagggttttctattcaatcccccacaaattaggaaaatattacatttatcttgcagtttagcatttaataataatgacaattacataaaaattgaaatctattttattcccaaagatatataagctttgaaagtcttctaaaaactttatcttcgagaggcaagttgagaatgtgttgaaggggcttctcccttgtagaatacttattgtaggcgagtattggcacaaagataatattatcacttgtgtaaggattcatttgggcgagtattggcatcaagaagctgagagtactcatgtagcatgcttgtgaggctccattttcggagagaagcaccataagcgagtactgacactctaacattggtgagtattgatattatgttagtgtcaatactcatgacaagtttttaagattagtagacattccctaaggttttgagcttaaaaacaccaagatacctctagtgaccttaatctacacgattactattctaattaaagggagtgttagtactagtgtagagaatcctatgctctttggggacttcttttatttgttatgtggtctttgatatcgaaaagaactttttggccattaataacccattaatacccctgggaaagaactattagtgtcagtactcatgtgttatgtgagtatgtagcactactcttctttattttttgtgtaattttgactttagaattcaagtttaagtgcatgcatgtgatattcttgttaaagtgccaagtcttcttaaaaatcttgtaatatgtgactactgacactcggaaggtgtcagtatatttgtattttgtgatgttattatcttatcattcgttctcttgtactcccacaaatttaagtatttttagctac

SEQ ID NO: 99954 - DNA, 1882 bp, Cannabis sativa
  modified_base (37)..(74): a, c, t, g, unknown or other
  modified_base (238)..(243): a, c, t, g, unknown or other
tgtttatttataatcgttttagaaattcatatttagnnnnnnnnnnnnnnnnnnnnnnnnnnnnnnnnnnnnnntggtaaaataattccaacaaaatgttagttgatgtttacctgatttagttaatgtgattattagttttcttttttagatagtgtgatttgtcttattttttataattagatgtttaaggttggtcatctttaatgtgatttatgatcttaatatgaaatctgannnnnnaatattaggaatgctctaatagaataaatataagttttgaagtaaaacgagagtatttacatagcttatgtgacatttagatttcgtaattaatgcaaattatatgttaatttacttcagagatacaagtagattatatatgatttaggaccttaatgatctgagaaaagttaagtttacttttataatttgtcatcacataaagggaaaaaattaatgcattaacaattggataacggaaataacatgattcatattcctaattatcatcaatagtcaactacactgtttatcgtttattttactgtcttttaattctagttaactaattgctcaattatatctttatttactaaatagaaacatgaatctaatttagtggtactgaacattaattctccgtggatcgatctcacatgtctgagtatttaactataatagattacgtacacttgcatagactataaaattaagcaacaaatttttggcgatgttgccaaggaattgaataaatattaatattacaataattagattagattctacttagggttttctttctacttctggctaatcagtttccttgcaatttctcttactctatttcaggtattggtgatttatgcgacgtcaaggacaaagtataatagtgcatgttgatcctgaaattgagaagacttgcagaaaaaataaaagaaacaagaggctagaaaggagtgtagtggaggttgaacaagaagtagtcgtgactgacaatgccaatattggcaataatagcaataatggaggtgtggtagaagaccaggctaagatcgcaatccaccataccgtagcctgagagattatgtgctacaaaatatgacaggggctagatcctatataaggccacctgccatcgaagccaataattttgagaccaagttggccatactgcagatagttcaatccacattccaatttggcggacttttatcaaaagatccaaacatacatcttattaactttgagatcatttttgcatttgaaagttatatttgtctatgtgtttgcagatcagcatggatctagaacaaatattattggagtgtgagttggatctaatctgatatctgataagagatttgaacactttgaataagccttacggcccatcaaattgggggtcttacccgctccaaatgatcaaatctttttgccaagcctacatgagttaaacaaaagagtacactcataaaaaataagttcatggaatatgaaggtggaatagaattaaatagtctagaaagtaaaaaaaatggaaggttacataatatcaagagggggttcaaaaagatatataattatatatatacatataacaatcatcgacgttttttatccttggtgtagttttctatctaacaagtaactaaaacgaggcttcatatgtgatcctttaaggaacatatcagagaccaccttatacatagcttcagtgaggtgaactccatcccaattaacatactgagatgggttttgacaagctttggtagaaggcgtcccacagaaggaaaatacatcaacgttatatggttcatcacccgcaccacaacaagctttgaaagactcgttaatgccaaacttggctggactttgcatg

SEQ ID NO: 99955 - DNA, 896 bp, Cannabis sativa
tcttgtggaaaaggcccattaatgttacataaatcacccctggcttcggcccatgaggcacctcattaccacaaagcctggtgtcaccacacccaatattccccacggtcttaacacacccagtaaaagccttttcttccataagctttagcccatttccttgcccaataagcccttcacgagtcttaaaataaggcccacttaacttattactttccatagtgtgcaccggcccactaggatcaaaatccagctggactcccaccctagtcgaagagttgaccttgctacccccttactaattaaattcaaattttcttctgaagaaggcaacattttaggcctctttttaatgttcaaagaagaggaaagggaatgaacacccaaaatggcaactgagtccaccgccaccccagcaggtttcaggttccacaccttatgagcctgacaaccacccctacccctcggaaatcgtccgtgcatagatctcgaggtggcagcacgaggaaatggggaaacatcgacatttggagcagacactcccttctccggctccggtaacggagatgcacctctgaccaacactaactctcccccagccctttcatcttctaccactttatcatcaatgatctcttccacagccccagccaagcctcccactttaccagaaaaacaactagcatagtttgaatgggtattcaaccatggtccaaatagaaggaacagagttcctctgtcattaagcaccgtgacgggagatgcaaggctacaatccctgtgttgctgaccgagcatgccacacatgtagcaaaaacctcccagcttttcatacttgagttgaatccatttattatctccaatggcaagtttaaaataacaaccacagcagaggg

SEQ ID NO: 99956 - DNA, 1105 bp, Cannabis sativa
tgcctatatatagccatatgcattttcatgattacaatttctttttttatttttttcgtcttctctaataattaattgtcttatagggagaagatacttcctatcactttagagtccagatgtgtgaagaatttaataattgaaaaatgtcttgatcattttactctctaatgaaacgatacaatgttttgatcataataatatccttttattagtcataatcaacaaaattataatatgtaaacagccctaattcacgaattactattggacacatgtctaacttattaattcataccatttctacgtgcattaattacaccaacaatatatataaactatcgcacgtaacaatatctttaatacaacgagatcaactgaagttataatttttaacatatgttacatggttgaatacatgactttgagcttaattaagtatgccatacaccatgtgcttattaattgaataagagacttaagtgacatataggtatatatattaattgttcattaataaaattaataatctctaccagtcggcttctagtaattttgtatactatcttaaattagctaatacaacattttttctgttgcttttattttcattttgaagctcagaaaagaattcaagcttcatgcatatgtgatgacacgtcatgcgtttcataaatcaaaggcattaatatatgtatataaatgtatcgttataataattggtcatcaatcgatctctacaaaaaatgagacaaataaaaccttaagtttggatggatgaagattggagagagtgatatgttacctaccaaggatataattgtgatgggcagaagaagaagaagaagagatgtcggccatttgtctcccatagtcaaacctttctttttgctcattcaatgttagcatttgagatttcggctagctttatacaaataaatatatatatttatatgtgatatttaaatttaaattgtattttatcatatatctaaagataaaatgtacaccccacacgataatatacatacttattaaaatgatatctgaaaagggtacaaacaagactaaagaacaccttttgaactctctctctctctctctc

SEQ ID NO: 99957 - DNA, 1178 bp, Cannabis sativa
actgtagcgtgccttagcattagggcgttacaagtagtctcaagtcataatagtcaacctgggaggggtccctagccctacgcttgggttgactcttagaactctaaaatggttttttggatcttgccaagttgtttccaactcaccatctttccgtatgttgaaccaaaaagacaagaagaatccaagtccaaggcttggaaaccaaaaaaagacaaaactacatcccagaagtcaacccgagcgcctagggttttcacctaaagcccaggttgacatttccaactagagttttaatttttgggtccctcttagtgaaaatggttcaaaatttgtatttagacatgaataagacctatcacgaacatgttagaggcatcataatcaaaattagaatcagaacactttccgtttggggcactcggacacccagagcccgggctacttggtgatgcacccaccacccatgtttacattttgtcaacctagggtgcttccaaccataatattgaagaagtatcccaagaattttattcttctccatccaaaacgaggaatcaagtactttcgggaagaaacagatcaatttggaggccaaaactaggacctaacacttaggttgacatattgtcaacttgggccacttccaacagcagttcagataaagtctttcgggtatattctccgttttcatcaacaattaagatttggatgcttttgaaaaataaacagagccatctaggagccagatttgggacccaacacccagattgacctggtgttgagcccagcgcctaagttgagatattgttaacctgagccatttccaaatagtttttttgagaagtctttcgagcatattctctgttttcaccaataattaagatacaagtgtttctgggaatcaaacagaaccatttagtggtaaaaagctggatccagtgcccaagttgacactagcaccaggcctaaatgtcaacctgggctatttccgatcagttttcttgaaaagtgttttgggaatcttttctgtattcagaaataacgaagatacaagtgatttcgaggagaaaacgagatcgtttaaggtcaaaatagggacctagggcccaggttgacgtgggcactaggccttgcgcctaggttgacatggaacctggttcgcatgtttctgctcc

SEQ ID NO: 99958 - DNA, 1627 bp, Cannabis sativa
gttatagaatgccacataaacttgcttgtgcattcctttatatatatatattgatattgatattgatattgattgatattgattgattagaatcactaattacttcatgaaatatataattaattgtctaaccaaagaatatgcttagccaaattaaaggttgtgaaccatcatttgacaaatctattcccgaaaaatttagacaatacaattataagaacaacaactaacacaaccaattaaaaaaaatattatgaatagtccataaaatatctacaaaataaaataaaataatattgaatgatgaattagccccctaataataatattaataaaactgaaaaaaaaaaaaattcaattcaatatttaaaaaaaaaaatatgactctccaacatattatattaaaattaaacttatcgataaagttttcgtaaacataaactctcaccaaaccgacttacaaaataataataaataaattttattatcaaacaatttaatcatatataaaataaataatgttgacaaagaaagatggtagtaaaattatccaatattacaaaacttaaaatatttatgaactaaaaaatcatcaaggtaaaagttatgagaccatactaaaaaactaaactaaataattaggtcttggcaaaccatgataactcacacaaaaaagccttaaaatgtatcaaattcatcaaaccatgcatagtgcagaaaactctacgtgttattgaaatctaaaaaaaaatcctatatatatatttggcttataaggtgggccaacctagtaataggaggatacaaatacaattctaactaaattagaaacaaaaacgaaaaagggtggctataggttgttcaataattaataaccttttaccctcatccatccatacatagctgttataatgaattggacattacatcaagtacactaattaattaaattaattacaaaagatgaactatatacatatattaatattactctttactctttagtctttaccaaccaaactcactgatcaccactgatcactctccttatctcctacccctatcaaaacctagtactataactcatgtactagatattttgaaggtgtattaaatataaagagtttttggcggttaaactttcttaattatcgtttcacttgcacttaattttccaagctcaaattttagcggtaaaatatcttaatgaactgttagtaaatttaagatgtcatccggttaattgtcaccatagactgtttatgtgtatactcttatacgtgtgacacgtatatattggtacacctgatattattattttaaaattaaataaaattataaaaataaaaaatattataagttttaaataataatattaagtagtgtactaatataaatgtgtcacgtgtacctgagtttacatatttgctaacaattcagtaaggattttaccaccaaaatttaaacttagaaggttaagtgtaagtagaataatatatagttgagagagtttaatcacaaaaaattattaaaaaaatatatatttatttttcgtaaatgaggatccatatataaatatattgcagttttttacttaaatttcctaaaataatataatgactttaat

SEQ ID NO: 99959 - DNA, 1384 bp, Cannabis sativa
tgtgccaaaaccacctcctactacaccaacacccgtggtaccaaaaccacctccttccacaccttcacctattataccaaaaccacctcctaccacaccagaacctgtggtacctaagccccctccttcaacaccagagcctgtgactcctaagccccctccttcggtgtgtcctccaccatctccaacgcaggaaacgtgtcccatagacactctaaagctcggggcttgtgtggatgttttggggggtttggtcaatataggtatcgggggaagtgcaaaggacaagtgttgtccagtgcttaaaggcttggtagacttagacgctgcagtttgtctatgtacttctattaaggctaagctccttaacgttaatgttatcatcccaattgctcttcaagttctcgctgactgtgggaagactcctccacctggatttcagtgtcccgcttaaattcatcacgtctcgtatttgattaacttctaagagaaaattggtttggtcaattacttaccaggttttgaacttacaaaaaggaaaggttaatcaaataaataaaaataaagatgttctcgttatttttattattaatgtttgatgttatttgtttagtaccttggatattatgtgtacctaccaaagaagtaataaaatcaagatattacttcttactaaggagattttctaccatttgtttgtttatatatttcaacattgtggtgatctaatgaatcatggtcaatattttaatggtattgtgcgtgtgtgttttgcttttttcatggaatgtatcagaactacattgcaatttttttttttttttatgtttagtactaataccagttatagtttatactagataattaaccaaacttctattatatggttattatatattttaaaattttatacaaagtactaatttttaagcttttttattagtatattataaaagatacacaattactataatagtactatacatttttattacataactatttataatatcatatctcaattctaaaaataatgctacatagtcaatttgtaatatgcatttatacaaccatattatatttcttgttataatatattcattttataaatttgtgtatattaattgcttatactttatcatattgatgtttttttagagaagagtaactcgtcaaatcacaacgggcaaggaaatggatcactttcagaccaaatccaagtgttaactaacctaatagacacttgggtaagattgtgagtagttgtattcctttatcgattgatatgcaaaagaaaaatagttgggaaaggaattaacacatctttaagagcatcaacaagaactccacaatcggtgaggatactttcttgagatttgatgtc

SEQ ID NO: 99960 - DNA, 608 bp, Cannabis sativa
gacgaaacagaaaccctagaagatgaattggcgaagcttcataagcttttccttaaggcctttcggcttagcctccatgaaattgggtctctctctctctaactctctttctctctctaactgaagctctgaattttatttcattttcatttttaatttaatttttgtaatttcagtttttagggcgtgaaaaattcgcaatatatataagaaagagaagagcttttctgggtttgaaaaccgacgcctatcgtgagcgcgtgtgatcacgcgcttaatctaacggctgatgattctttaactgtttgaagtttattaaagtttgagtcttaagcgtttgtagagagagtgggtctctctctccttttttttctttttcttttttttttaactaattttttattttttatttttatgagtcgttcgttgccgccaaatattatttttttttagtttatttgttaaataattaaaaaagaaattgtgggaaaaatgtatttgagttataatttattttaaagatatgaaaaaaaaaatatatggcaaatgattggaaaatggctcatcttgtatgccaaaatctataattaattgatttaaaaaaaaaa

SEQ ID NO: 99961 - DNA, 1752 bp, Cannabis sativa
  modified_base (313)..(321): a, c, t, g, unknown or other
atgttaagactaattattaggtatgataagcattacctaaaaaaaatgacacttgtcattagaatataaagggactgcaaaaaagagtgtaaaatagagtgtgattagcacatctctttgctaaatattctaagattttttttttcaacaatgaataaatatttcattgaaaaaccataagagaaagggccgtcttaaatattttggaggacctgttctaattttaaaaattaggcctttataaaaaaaatataattcaaaaataatatttttaaatattatcatacggttatatattttacaaaacaccaannnnnnnnnattaatttataaaaattgttattgattgcaatacaacaaaaaaatgatagaaaaaaaatatgaaaggtttgaaaaaaaaataatattaggcactttattgaagagcattaaaaaaaatatatattaggcactttattttttttttttgtcttttattttttggggcctgtgcaatagtctaacttgcactccacaagagtcgtccatgataatagagtacatcataaaaaaagatagagaattcattcaaattagttcattatctactctgaatgcacgcactgctaattcatgattacgaatataaattagggatagttcaaaaaaattagtaagtaaactagtaaaaatctctaataaaaatcttaatcaattttaatacatatgaatgatctcgtagagagacaaagaactaaatctaaattgtctatcttgaagaaaaaaaaaaaggagaaaaatcatgcgtcaaagatgaatccaacatcaataaaataaataaaaataaattaatatattaaaataataatatatattgaagtaatatccatcaaatttattatttttagacaagtaatatcccatgattttaatataatgccataacaattcaatccatttaattttaataaataatagaccaaaacgttgtgacgtgtcactagtcacaccagcttaagcaaaacttagtgaaaacaggcacttaaaaccatttatatataacataaaataagtatatacatatactatgaaacattagaacaggtgtctttgacacttgattattaaaaaacattataaatttactgatatttatttttcaactataatagagataagaatgtctttcactccatcaaaaacgaatgtacatatatattcttcaacatttattaatatactcattgaagattaattattgagatttcatttttatatcatatatatatgtcgttttgatcaccatctggaagattattgagtatagactgcatttaaatatgaaccaaaaaaagaaaaaactaatcacggtggttaggagacattaaaaaagaaggaaaaactattaaattaaaattgtttaagattcgtttagagattaaaattaacttagaaggaaattaatacaaaaacataaaggagtagataggaagtttcataaatatgtaatatataaatataaattaaatttgttctcctagatcttgcctatgaatgatcaaccgaaacagctttcttccaaccatgctcctactcgtatagataaacgcgtcgaggttaatttgtttcctcattaagctacattatgtgctcttctgtattaggttaggtataaaataaaattacaatattaccaatttatacatattcacgtaacatcaataataataataataaatgtaaaaaatattaccatgttattatgtttgttaa

SEQ ID NO: 99962 - DNA, 991 bp, Cannabis sativa
  modified_base (935)..(965): a, c, t, g, unknown or other
aattttgatacctgggatcccgatctatatggttattaatatataaattattaaaattaatttccgagtttattattataaaatgcgggcgttacacacatagtctccaaacagctccgtcagtgactactaattttgttatatatttaatttaattgtttttgaatttttttgaataatatatatatatatacatataaattatgttaaaacagagttcaaagattcaattatactcttattatttgtttctttttgcacgtatacagttaaatgtttaaacattgttttttttttttttacataataaattattctaattatttttttaaaaaaataataaatgtcatgactaaaaatatatacaagaaaattttagctagtaataattttttaaaagctaaaaatataaaaacctccccacagtaaaattttctttagtttaggagagggaaaattaatgagcaatatattatgtttgagagatcctatttcgatcatttacttccaacttattccataaagaaaaaaaaagtatatacccaaagacataataaaatataattgacatgggaatttataacatatactatatattaacttacaatataattaatttacaaatttctaaatgatttttactgctaattaaaaccatatatatgcatatatattcatgtaaggaaaagaaagaagcagtagttgtgatgatgaacaaacctacggcatggactgtgttgagctgcatcatcatcagaattatgaaagccacaagaaatatgccaaccatgaaacgaacaaaatgaaccatactcacatacatgtgtatatatatatataaatactttatttatattcgatctttcacttatttattaatagcaacacaacttgatgaattcttggcatgcatgagattatatatatatatatannnnnnnnnnnnnnnnnnnnnnnnnnnnnnntgtctatctaacggcaattcttggtt

SEQ ID NO: 99963 - DNA, 2215 bp, Cannabis sativa
  modified_base (27)..(46): a, c, t, g, unknown or other
atacaagattattattattattattannnnnnnnnnnnnnnnnnnnattattattattattattaggggttttacatgaatttgggagtaaatattacaattatactatcacatggtgaaaattaaaaaaatagtaggaattatttcataaatacacaaaaacaacaaaaaaattacaaaatacgatttcatggaatttttaatacttttacgatttttttttattttatttatagaaaatacggtttttttatgttgtactcttgataatttgttgttgattttttgttatctatatgttattttttgttgttatttttattgttattttcatgttacttttatgtagttttctttttgttttcgtgttgtttttatagaaaaccgtaaaaactataaaaattaaatctttaaacgcaaaaatgtaattttttttcaaaaaatagtaccttatgtagtaattatcccaaaatactatcctgatccatttttattactttcatactgtatggacggaaaagtgcatatatgcctccaccgtccaaaacgacaaatagaaccagaaaaaaatttagaaaaaaccatttaatctgacgatatggagaaaaaaaaagtgaaattgacaaccaaagaacaaacaaatagcttcatcaacaacacaaaacaacaaatcaaaaaggttagaaacttaaacccaactaaattcttttaaatacaaataatgttgaaacatagatgtggaaatcaataataaaattggactgtagcttctgaaattatttttgtataaatacgtaattgaagtaaatgcattataatatacataattttagaaaaaaaaaatgctgattaggaattaaaataaaattttaaacaatttaaagttgttttagagtcgttattgtttaattacatgtaatttattggaaaatatgaaaatagataaaatttggacactcaaatgatagttggaaaactgaaacaaaaaatacaacttcaatagttgttttacgattgtcgtctgtttgcaaaaatgttgaattgttgaaatattgtcaaaaaaattcaggttatggaatctatacccattctcttgaagagcaatgagcgatgagaagaaggaaaaaattatatcaattacgaggttaatggagaattcataccaaaggattacaaatatgaacacctcgtacatattctactctctccattagaatgcgacccagcaacaacaactatgcaaatccagttccaagtaaaataaggaatacctccaataaaaatattcaacaatccgagcctattttttttacttgcgactgaagatcaaagaactgattttacaacatatccattttgtgtcaacatgcagaacaataacacaacaaccgctacaatacctatgatcacatcaaaaacaacacaagaacaagaaaatattgaaatgcttcagaacaatgcaccaacaacagaatcaaacacactggaacaaccaacaaatgaagaagaagaaactgaaacagaagaagcagacaacagccaattcaacatagttgactccgcaaatcttgttgctaaagaaataatagaaaaactagaaaacaactatataaaaaaaaaaatagatccagagattaacagcaacaatgcaaagctcataacagataaattccacacaaaagttgaaaaaagacagacatacaaagacaaagaaacactctaaagggtcctcagctactacacaattaaaaataattttcaattcaaggtatgaaagtcgtactctcaagaatatagcctgaattgtgtttatcaaaactgtaattggtcactaagagcatcaaaaaatgggccaacgaatacattcataatcagaaggttctcaaacatccgcacctgcccaataaacgttagacatgaaaaccaaaggcaagcaactacaaaattcataggggaatgtatcaaaccaaaatttctgaacatcaagacaaaagcaacaccacaagatataaaaggagaatttaaatacaagtacgatatcaagatgaactaaatgaaagcttggaggggtaaagagcatgttgtaaatgacttaagaggaaaggctaaggaatcatacagcctaataccaaattttttgcacatggtggaaaaaaacaaccctgaatcaattgtggatttgataacaacggcttgctatttgtttttatggctt

SEQ ID NO: 99964 - DNA, 1650 bp, Cannabis sativa
aaatgccatagatatattaaactgatggttgtggtcttgatgacttaggtctagtaacaataaagagttcttacaagtggatcctagtcacagaatgcaaaactcattttccatacattaacatacagtttcaatccattgatagaaaattgatattaacaacttgtgaaagtcatactgtattgtccaatgtattctaggaaactgaaataaaaatttctatttagaatctaaaatttaaagtgaaagacataaatttataccaaatatacaatgagtgattattctctcttggaccaccactactaatctaactctaggtctaatttgcctaaagtaagcatacacaagtaggttactttctaagattgaggatttatatcatttcaggatagaataaggatagaatatcgggaagaatatcgggaatatattcatctgtcactactatacaaaatgacattagtgaccctcgttgagagactctaaaatgttttagtgacacttcactacgtgtcattaatgtgggtgactgaaacgataatatttagtgacactgcagtgtgtatcactaaacctttttagaaaccctcactttgcgtcactgtaggcttttagagtcacactttattaaactgtaaaagtaacacctacccacgtggcgcgtcactatatctatttattttttttaaaaaaaaaaattgataacagccacattcaaagtgtgtcactatatcttgtttttttttttttgaaaaaaaattatttattaattttttgatttagattatattgtaaaatttatttaattaattatatttaaataataataatagagttaactatatatcaattatgagttaatatatattttaatttgactataaatttattaaaaaatcaacataagaaaaataccatacaaatttacaacaatttgtgtaaaagttaatcaaaaatctatagagccaaaaaataaatctatgcagacgaaaaaataaatctccaatagtaaaataaaaagagtgcaaacatacatttcaatcaaaactaaaatctttaagtctttgaataaaataaatacaaaaattttgaacaactattcaatgccaaactcaaacctacgccgtccgaagctcacactatcatccaagatgttgtggtgtggagctcacgcaacaatgataagagaggcagtgggagaggtggagttgtgtcccttttccatcgaagagagagatgaaagtttgagatgagatggcgcggagctcgcgtaatagagatgagagaggtcgagggagtggcggactggcgaaactgtcttgtggctctttttcatcgaggagagagaaatacgaaagaaaaatataggagatcaaggagagagaataggctcgagagggagagagagagagagggagaggagatcaggcattttccattggggtttgggttccttgacagtcggaggtaaacatgcatggatttttctgggtttctccagagctagtcatggctgccgcacaaagaagagtgagagaaagataagggattcaatttgtgtgttgaagaagactagggtttataaccttctttatatatcccaaatattttattaattttacacatttaattataattataaaaaaa

SEQ ID NO: 99965 - DNA, 662 bp, Cannabis sativa
atctagatcttggtaaaatattcccaacagagctagccggtgtgccctctgaactcttgtgggtatctcacagtgaacgcccctcactagaccactagctattattttgctaaaagcatcaacagaaagggcataagcaggagagacccaactatctccctatggtttagcatccagaatctcaggctcagaagactgaatcaagatgtggtccaagcctaacactgaaagttcaccaagcttgttcagcgggttatcgttgtcatcgtaagtacccaaagggaaattagagaggacaataaaagctctttatctccttctcctgacaggtgcagcctcctcaacttcagattcaatatcaggactctcagccccttggtcaaccttaggcacctttgcgtggtcaacccctggatctacatcaatatggggttgagtaaccccctctacaattctgactcgaccccttgtttccatcctagcaacttagggatcacatggtggcgcccaaggacatgtctactttgttttggacatgatcacagaataaccaagggacctacgcggctatcaccttccccaatccaatactcagaatcacatgcatagaagagacaagaggaggtgagcaacctgataaagctacaaacatattctagtca

SEQ ID NO: 99966 - DNA, 652 bp, Cannabis sativa
tttattttattgatggatgtacttataataatacaacttccaaaaatatttaacttaagagtacattttcgcttctaatattaatcagatgatgaattggactactggagaaagtcattttttgacgaaatcggccttcaacaaccttacatatgaagattaaataaatttaatacatttaatactgcacttcaagtattgatgcaggtatgtatatgtgtatatatataaacaaagataatttgtgttcaaatatcttaaacttttaaatttgacaaagatcaaatcttaaattaaaaaaataatagttaaactcgacccctactttctttaatcttttgttttgtactttattttgatcagtgtatgtatagtaaaattcattagtctacttattattaataaataaaaaaattaaaatcagaaaataaaaaataaaagagtattttttttctctttcttcattttttctttttttcctttctttctatttcttcttcctctgaaaatcctatctcattctctctctccctctttccccatttgttcatcttcttcttcctcttcttcttaacactatcaacctaaatcgtctgcgaattgttgtgatatttttaacatgcaagtatacgtatcataaacaagtaataaa

SEQ ID NO: 99967 - DNA, 1953 bp, Cannabis sativa
gaaagctcaagccttggtcaaactcataagaagctgcataaataacttagaaacaacttagaaaataatctcaaacaccattaattcgtacagtaactaaaacctaacgattgcatgaaaacctagctcttaaacttgaaaaaattaaagggaaaaagacttgtcttagcttggctatcaaaatatttgatttctaagctaaattccttctaaaatctgttttgataatggaaaaattccttagttttccttagttccttcttgggccgacaaagagagcaagagagagagagagaaataaatgttccttagctttctaggtattaattaatttgatatttttttattcaacatattatttaattaaaactagggatatactagaaattctcttaattttcactaacataaataaaaaggcaaatgacacttttgccccatacttagccaaaacgcaaattaactacttatgggtaaaatggtccaaaaccataaccccaaacaattttgacattccaaaatgtctaattattttatcccactaattctaagatactccaccatatctaagtgactcaactagctaaatcgtcgcattccactgttttttttcatcaaaaaagaataatctttattaatcaacaagcacttacaatcaatcttacaaactaacacaacttgcacacactctacatagagtcaatttttgacaacaatctcctctcttcctctctcaacttcttaaaaataaaattgttaactctatactttgagtccttcttaatcatctctacaattttttccatactataagaatatccattgaaaacacaagtgtttctattatgccaaatataatatatagttgctgaaaaaatagcagcagcaaccatatttatcctctccttgctcagacgttcagtccaagctccccacttctccacctgatcagaccaatcagacttgctccaaagattaattccattcaacacctgctgtgagaacctgctggagaacaagagatgagctaaactctcatctgagttgcagcacatagggcacaacttgctgtcaatttgaaatacctgttgaagatgatcttgggtgagcagtctgtcttgcactgcttgcattgtcacttggcataaaatatgaaaaacatataattttaatatataacataaataatacaccttgaattcaaatatatctttataatttcaaaaattataatctaaaacctatttttgacaataagccttaattatttactaattctcgtaataaagttaagcgattatcacaattatcccatcgttaaaaagattttgtcttcaaaatctaactgaataactccgaatactgagccctcatattagattccaattcctaagtggcttcatccgccttactatttctctagagtatcttgaccaaagttatggtcttgttttgaaaattttttatcattcttattaaggatctgcactggttgctcctcataaggtaaatcttactggagttctagagtttcataactcaggatacgtgtaaggtctgaatcatatttccttaacatggagacatgaaatacatcatgtactactgctgataatactggaggcaaggctagacaatacgctactccaaccttctcgagaatctcaaaaggcctagtgaatctaggacacaacttgccctttttcccaaaatattttacccctttgattagggatactcgtaggaagacatgatcttctacctgaaattctatgttcttgggttttggatctgcataattttttccctactgtgatgagaagcaagcattctggccttgattttctctagttttcacccaatgaattggagatctacattttctgccatacaacatctcataaggagccatccctatcttactctgataagtattgttgtacaaaaactcta

SEQ ID NO: 99968 - DNA, 1486 bp, Cannabis sativa
agtaaaaaatagtcaaacataaaataaaattaaatagaaaaagtataaatgtaaaaaatttcttgtcaaagtataaatgtaaagtttggaaaaagttagtatttggtgtaactttcccttagaattacttgtaggcctttgtgctaacttttcattgagatccatgatcgcggatagtcaccaaatggttcctccaccccaactatctctacaatttccctgatggtggtcagtttgctagttaacttcctcgctgagaggtcttgttcaattctagcaactagtcctgaccctatttgtaatcggtgatgtttgaccttatctatggatatgttcattttttgtctgtcttctcattgttgttgttgataagcaaatggttcctccaccccaactatatatctctacaatttccctgatggtcggtttgctagttaactttctcgctgagaggtcttgttcaattctagcaactagtcctgaccctatttataattggtgatgtttgaccttatctttatttttcttttttggatccaactctgctatggatatgttcatcttttgtctgtcttctcattgttgttgttgataagcaatgaagtaggagttgggtaatcttcacggcaaaaccatggaactaaacaaccaccttcatctacctctatttcttgcttctcactacaatctccctattcatgcccccatataccacatttgtaccataaaatggcaaccaatcaaattagatctaaatctagttcttttttctcgcagttgtaataataaatctttcaacaaagatgttttccttgataggaaatccatttttgagtcatacatgtccagtaaaaaaaacttgttgagcatagctcgaatgcatctcggaaacatccccttcttggtccctactacgcatcacattatttttagtaaaaacttttaggaaagaatccttcatttgcacccaacataaaaaatgatcaagacgagcatcttcccattgaccagaagcaagccaattttctaacataaataacccatcgtaaaacagccatggttgttttttcgagagccattttcaaatcattccggtcagaaagctaaatttttacgaaggtgtgatcacaccttctctacctagaattttcatgctccagtcagaatcttattccacattcttaaaaaaaatacttttagacagccgtccattcatctcccgtcgggcaatcactctcccaatcaacactttctctccaaactccaccacttcttcttcatttggtgccacaaccagattcctagttaaattaatttatgatatcatttgtacctttggtgaagccgacgcactttttttttttggtaaatgagatgaatattattgctccaaatataaacttttacaaaacaatcactttttacacctttcagcaagttaaccaaaccaaaattgatctataagactaactttctctagattaat

SEQ ID NO: 99969 - DNA, 1054 bp, Cannabis sativa
tttctgatttcttgtctctgagatggatcaccaatatgctgcaatgagtttgggagaggatgatgagggatttctaatgtatgaagatgtttcggtggacacagtggattttgacgatcggtggtgtctagttgggcggtttttaacggatcgtagtatcgactttgacgctatgcaacacaaaatggcttcgttatggcgaccagtccgtggtttatttgtcaaagagctagaaccgaatctcttcttgtttcaattttaccatgatatggacattgatcgtgttgtggaaggaagtccatggacctttgacagaatccccttgatttttgaaagacttaaacagggggaaaatcctcgttgtataactccagtcgaattgacttattgggtacaaatacatggcttgattgctggatttcgttcggaaagggtgctgaaggacctgggcaactacattggatcgtatgtcaaaatggatcagaataactttgctggagggtggagagactacctaaggataagagtacgaattcgtgttgatgcaccactaaagaagggacgtaagttacagatgaggaacgggccggagtgcaaggcgatgtttaaatatgaagacttaacaacgttttgttttgtctgtggattattaggccactccgaaaggttctgcgagaaggcttttgacacacctccacacttactggtgaaaccatatgatcttgagatgaaggcggcaccaaggagaagatcacataccattggtgctaaatggttgcgtccggaaatggctggaaaacagattggggagacctctgcaactccggcaacaagcagatcggaggttcgtatcattcccgctcaatcaggggcggaaatcatgggaggaaatcgtggagtaattgatggagatgctgatattttggtccataattttgatttgaatggaggaggtaataaaggagatataattggaaagtcagctatggggaataatgaagaggcagatatggaaaatcagattgtgttggagcaaaaaagaaggagagtatct

SEQ ID NO: 99970 - DNA, 2404 bp, Cannabis sativa
agaattagggttcttcaactagggcataaacacttgtatggaatactttgaagcttttctagcttaatatacttgacttgtggactagagttcattaatactcaaacgatgtaaaaatcttgatctattcttctttaatatatttctttcttaagcttatctattttcataattagtttctaaaaatctcggtaaatatttttgtgctttcattaagagctaaagaaagaactaccagagttgtcatttacaacaatggttgcaacacacaaagtagtggtcaaaccgtctactcgagatggtaggggcggtgttgttggtgatgatgagaacaagctctcctggcaaatgctcaggtgagtgtcgcgggagatgggaaaacatgggcaattgtccgaacctagaaacccaacaccgtgacaagcaagttgctaagaatcccatcgtcgaggatatgtgagatggtcatggaaatgacccaaaagatgaccacaatgacaactacaacaaagagtatgaagaggagtattatgagcaagatcccgaagtagtgaggatggcacaagaactcactgaaactcaaaagagactggcagagcaagaagaattctctaaaaaattctaagaaattctggcgcgactgcaagctaaagctggcctcccagaggaagatattcctgccccatgatttaaccacccaaagctggtccatctgccctagcaaatgataatggaaaaggtggatggacgtaatgataaaagataaaagaactttatgttatttagccacatttaatataagtaaaaaataagagagatatgtgtagtgaatttgaatttaaatttgtaatgttaaaataaattacatgttatatagctacttttaatataatatatataatatatattatctattttttttttaaaattatattatccatcttgaaaattgattttgggttctcaaataattaaccccaaattataatgccaatcctaaaacaaaaaagaaaggaaaaatttaatttcataaaatgcatataaactaactctaatttttaaattttccaaattttttcaacataatcttaaatttttaatgaatcaatcaaatgtggcttttaataccacttgttaaaaattttcaacactcatacactatgccacatatcaagatttaaatcagtaaataaataaattacatattaagtgtataaatatatataggtataaagaatacctttgttgattcaaagctagagaaaaataataaatcaaataatgaaagcatacattaatcaaccgataggtatgatccctgtaaagataatcttagggtaatgattttctaagaaaacaagatttattaaggctctctaattttctctcttgacaaaaaaagatgagaatagatcgcaactcttgtttcttggagacaaccattatataaactaataaatattaaattttagtattttttaatttagtgcctcaataaattagaaatatcacttatgatatctatacatttagcacataacactttaatactcaataattcataaatactaaattaattattatttagatcaaacttcatacatcaatataatccaacataccaaagtcaatgaaagatataatacataattcccaatttaagggatatactgagagagtggggttagttaattttgttggtgagcttttgtcctttgttaagggcataaaacctatgaccttcccacaagggttgaacaagggacactttgtctcagctgcaaagggagtaaatagctagcattgtcctataagtgagtgtatagcttccttcacgtgatggggtacactactagagaagtattgggtaaagaatctttcactttcaagtaactatacaatggtaaattattagattatagatagtaaaagctatttggtgaacctacaacaacatacaaacatattggtgatgccactatatttatttatatgataatgacattatgtattgtatggtgcaacttaatgcaacaccttagagatatcttctttcaagattcttggtttagatgataaaagctttatattgttttttttttttcttggatatcttactaattaatcaagctcattttctctcggagtgtgcccatggagtaggtcaaagtataaaatttattgtgtcaactaattttgaaaataattctataataaaccttctaaaatggttgttctgatacactcaatattcattataaaagatcttacttttagtcacaacaaaacttgtgacttaaagtaaaaaagttaggactaattataaaaaatgatttctatgttgtgattaaaaagtctgtgactaaaggtattagtcacaaaaattacaatttattgtgactaa

SEQ ID NO: 99971 - DNA, 2485 bp, Cannabis sativa
atttgagttcattcccacgggtacactagtcgaagaagtacctggatctggtatggatctaaatccagattatgaaacatggcttgtacatgatcaactcttaatgggttggttgtatgggtcaatgacgaagccattgcttctgaggtcatggggtgtcaatctgcccttgctttgtggaatgctcttgaagaactttatggagcacactctcaagccaacatggatgatttaagaacaaagatacaggttactcgaaaaagggtctcagtccatggcagactacttaaagatgaaaagaatgtgggcagattccttggccatagcaggtgagccctatcctgagagacacttaatctctaatgttctttctggtcttaatgcagagtacctctccattgttgtgctaattgaatcgcacgctaacctatcttggcaacagctgcaaagctcacttctcagctttgacagtagacgcaaaaggctcaatgttatctctacaaatagcaaactcgtgggtaatgctactgctaactttgcatagaagccaggccctagtggatctaacaataatggaggtcagagaagattcaatcccaaccagaatcatggtagaggtcagcagcaaactggaggaaacactagaggtggaagctatagaggtttaggtcgtggagctagagaaaatgggtcaaaacccacttgtcaagtgtgtggaaaatataaccactctgtagcaatctgttacaacagatatgatgagagttatatgggatagcagcctaatactgatgggaatcaagacaagcagttctcagcacttatagccacaccagaaatgcttaatgatgattcatggtatgttgatagtggtgtgagtaaccacttgacctcagaccccaacaagatctaaactaaagttgaatatgaggataatgagttgattataattggtgatgacagtcaactgccaatctctcacattggtacaagttctcttcaaaccaatacctcaaaacctttgctgttgaataatatgctacatgttcccaatatttcaaaaaatcttattagtgtttcataacttacacttgataataatgtttctatggaatttttctctagtttttattgtgtgaaggatcaaagcacagggaaggtggttctgcaagtgactcttaaagatggcttgtatcaactcaaccctcttccacagtcacaacatatccattctcctttctttgctgttgccatgaacaaaccactagtagccttagctagtcatcattccctaaaagacatttggcatagatgtttaggacacccttctgtaaatgttttcaatcaagttctaaaaatgtcaaatgtaaagtttcctattaatgaagttcaacatttctgtgatgcttgtcagtatagtaaaatctcatgctctaccatttcaaaattctcaagccaaagctgctaacatacttgacttaatccatacaaatctatggggacctgctcccatagcttcacacactaacttcacatactacatccactttcttgatgatcatagcagatatacgtggctgtatttacttaagagtaaatctgatgcccttgttgcctttgttcaattcaagaacatggttgaaactcagtttggtaggaagattaaaaagttaagaagtgattcaggtggggagtaccaagcttctaatgacttggtttctcaaaatggcattctctttaatcgctcatgtcctaacacatcgactcaaaacggtcaagcagagcgtaagcatcgacatattatcgagacatgtctgacacttttagcacaggctgtaatgcctcaaaagtactggtctaatgcattttagactgccatgtacttaattaatcatctacctactcctatactcaatcaccaaactccctataagatcatacattcaaagaaattagactacaagcagctaaaagtattcaggtcagcctattttccttgtttaaaaatctaccaaactcataaattttagtaccactccacaaaatgtgtgaacctaggatttagtgacgtgcataaaggctataaatgtcttagctctcatgggagaatctatatttccagacatgtcgtatttaatgaaaaagaatacccatgccaacatggtttcttcaataattatcaaccagaaaaggaagtcattgtcacaactccacactcttgggtcaatcttcctttcaacacaatgccatctcagtctcctgcagaatcatcatcttagactccttcctcacaaaaccaggtacatttgcatcctgactatggctctcccatatctgctatgcctaatattgactcagatatagatttgactccaatgcaatctcctagttttacttctgccagttttgcatctagtcaacacacactaaaccttgaagaacctaaaacagctcaagctttagttgaagtaactgctgctaatcc

SEQ ID NO: 99972 - DNA, 2728 bp, Cannabis sativa
ttacccttttgatttacaattgaactatgagattaaactatgttctaaccattattcataactcaattggtaaaatcaaggcagtgggtagtaatttggaaccatattaaaaccataattgtacgtatgtcattttctaagcatttggtcggtaggattgcctttttatttttaacttattggaatcaaaacaatgctttgtcaccctataaaggatccactatggaagttttactcacgtgcctaaactttttgccattttcattttgtttattgataagatggttaatatacatcataccaactagggtgtttgttgcagaggtaatgcaaaataaagtggaggaaccttttccttgcagacttgactgtgtggttgccattacatgtatatgaccccaccagccctcacctctcctataataagtgattggactgactgaacagtcggaggtctatgaacaggaggtggtctctgaatgacgagtagctgcaatggtggggacaaatgggggtgagcgtctttgtttagtttccataaaaaatagtagttttcttttcttcataaatattctggaaatttttcctgtggtgagctttagcttgtagttctctttactctataaatattcttgtgattggatttcttatgaaaatttgcttctgagatgggtattgatggtgcatttttactttgttaaatgtttaattttgtttatttttgaagtaatattgtgcaagcaaagtttcaatttttatgtttcattttggtttcttgtgttttattttgttatatcgttttcttgtacaagtaatattaagccattgtgcaggtaatattaacttgctatattataatggtcgacacattgactatacagttttgaatacttggatgtggcaaagcaggtaaacttgatatttttcctttgtgtttatactaagaaaatatgatttttttgtgggtgtcttaatacattgcttatctacatgaagtgtctgtaagcatttgtttaagctatttatttattctgtatcagggagttactctttccactgtgatgaacatatgcaagaaacttccttttgaatgtccttccccttttatggaggttgttctgatattatgcaatcttcttcattatgatgataaacaggtacttgaagtgttcagggtaagtatattattgaccatcgtgctcaagcttctggtttattttcagcttgttgacaatgtggttctctgcgtaattagaatatcagacagggttaggaagtcttttgagaatgtcgaatgaactttgcaagcatgggttaatagagcagagcactcatttcataagctcaagtagccgaactactctgtcactaccagtttatttagatatacgtaataataattttacttaataactaataatattttttctttaatttttaattgtataactttgaaataaagtagaaaatacctaacataaaatttagtatacgtgcctcgcaaatattactagtatatatacatacttgcatgtccatagaaaagtaagaaaaaaaaaataatgtaaacgcatgaagatatatatggacaaataatgactctacatatatatgtgtgtttatacgcatgaaaaaaaaaataactgacacactgtaaaccaatatcatatatgtatgcatgtgtatatacttgtattcaattgtctttgttagttgttccacgaatcaaatttccagaaaaaaataacatatatattacagcatagatataaaatctcagaggtatatatatggcttgatctgaaagaataggaaagtggatttcttgtgctaccttcagcatatacgaatcaaagtaatttcttgaggttttaattggatctattttgagcaatacaagttgagtgattatttgtgtatctcatatttaaagaagtagcaaagaaaaaagatattgtggtaattcaaagtgaaattcgaattacaagatattttaaatccttcctattttaatattattctcagaaattaattttaaattgtgagatattatccaatttaaaggcaaattattattatttcctaaattttgagaaataattaattcaaataccaattaagtaatctttttatttgtaaaaaaaataataaaagatttcaaaattcaattctatcacaaaaagtagtaaaattctaaagtcaaacaaaatggcacaaaattctaaatgagctcactaaaataaattgaaatgataaaatattatttcaaaattccaaagaggtctttaaccacacaaaaatctcaaaaatagtaattttacctaaaaaattaaaactgcattaaaattcaagtccataaaaaatagcatcccaaaaagaggtcattcacctcttaattatcgaagcatcactaaaattttggaactacgtttgacttgattcctataaaaggatatgtaggaaacttagttgctaagactaagtgcagtcgctgataccgcaaaatggtataaaatacaaatcttaaaattccataaaaggtcatccacctgggaacttttccgaattttcaaatagcaaagtattttttgaagtggtcatctaccggaatccttgtattcaatttctaaaataccgtattctgaactacaagcggttttatccttcacaaagaaggtatgtaggcaactcggttaattaaattgactgaggtcagctgcaattccaa

SEQ ID NO: 99973 - DNA, 2312 bp, Cannabis sativa
attggaataaacaactcagaaattctcattcactttctctttctctcttcatcttcttcttctttcttctcatttactttatattattttataacacttactactttataaagtttattaactttttataattatatataatgtataatataatatttttattgatttatatactattaatgtattaaaaatatattattttaatgatgtagataaaaatataaagaagctgatgcatttgtttacaattaattagttaatattctatatatggttatattataatttattaaatattcattgctcgatttaattttctaaattaattatcaaaatattctaataattaatttgatgaaaggtcccacttatatgaatataaggtttcgatccttaagctcactactcattctgtaaaaatacaataaatccatctaatgtaagttcgtgtgtgtcatgctggttcgacccatatttatttgtgtttttcaaaaaacagaccgtgtcgtgtcgtgccgtgtcgtgccataaaaaatatagattgtgtcatgtcatgctaacatttttcaaggataggcccagcacggctcggtgtggacctgtacagaagtttgtttctattataaggtctcagattaggataaccagtacaactaaatacttttagcatgcggtaatcagggggtatcaaataaaaattctaagtgattagaaatatgtaaggtaggagtagaaatcctgttaataaggtacactgctgttctaaatgcttcaccctaaagttttaatggatgagatgcttaagctaagagagttaagtctgtctcaataatatgtctgtgtttactcttcactaccccattttgttcatttatatgtggaaaagctagattattaactattcctagtgttttaagaaaatgagtgaaagccctgaactcatcaccccaatcaaactgtaaggttttgatggaacaccctaattgtaatctaatttgtgctttaaacttagtgaaagtaggtaaagcttcatctttgattcttagcatatagatccaaatttacttagaatagaaattacaaagcttatataatatgtatacccattagatgaatttataggagcagaggaccataagtttaaatgtaacagttctaagggttcattgtaagtggtggtagaattgggaaaggtcaatttatgagaattaccaagataacatgcagtgcaaacattaggaaaattttattaattaatggaatattacaattagagaaaggtatttttacaattttggcagtaaggtggccaagcccactatttcatagataaaaaatggaatttggtatatacaattaattgtgaaacaataaaagttctgaaacgacagactcaaggtagaagctggtgaaacaagagctggactaggaggcatatgactgagatgggttgaatcaaacttgtacaagcatttgtcaagtttcccaaccaaaaagatcttgtgggttgcttgatctttgacataacaggagaaaggatgaaactcaaaaaagcactattatcttgggaaaattgggagacaaagtttttggtggtagaaggaacatgtaacaagttcttaggagtgagtgttttagatgaaaaatgcgaaagaaaggaagagccaccaatattttcaatggaacgacttgtgacattgcctacaaagatctgttgttggcctgagtaggagctactagcaccaagattggagttgtttggtataaggtgatgagtagcccaagagttagggtactagctttcatcaaaaaccgatttagaagaggcataacaagtttgcattttagccatatttgcaatggcagggtcttgcaaacttaccaaaaatcttcctctttcagagccaaatgaacttatttggaagaaggctcctaatggagcttttggtatcaagattgcttacaagtatcttgttaattcaagagttggattccttaatgtggtgtggaagaatctgtggaaagctccgctccaagagttggagggctcttttttcatttatttctaaggtgtcatcttgctcgtcaaatgtggttgaatagtccttaggctcttaattttccttctccattggaattccttaattggattatgttggattttctagtactaaattaggtacactgcggaagagttgtgtataatcttattatcattataccatagctcaatgaatctctagatgtgtgtacattaaatcataacaataaaaaaataagttaagaacatatacatcttgatgactatcagg

SEQ ID NO: 99974 - DNA, 1227 bp, Cannabis sativa
gtgtttttgttttaaaataatgagatctcatgctttggttatattcaataaattagtttattgtctttattataaatgatttcaaacggactagcgagtgtgtcgtctcagaagatcgggcattacaatgaggacatcatctataaaagtgggtatattttaaagaatatagaaatgaaggtaaaaattaaaacatgtaaagtaaagtgggtatacaatgtaatttcttcattttttttaaatcatatccaaacggtgaaaataagtcaaaagtaaaaaagcttaccaaacgggaaaatatacgtgcttatgtatatttgttttgagcaaatcaataaacacacaaacatatatatatatatatatatagatatattttcagcaagcccaataaactcaagagctaccgtctgatggctagcttttgcgattcagcgagactatgcctccctccgtccgccagtaaccattttcctccatccatcgacaacactctctagttcagcgactaactttatcttcctctaattgtggtcgccattattgctctgaaatccagaatgatgaactcgactagacgcgtgccagatctggttcatatcacgaacaacaaaaataatgttggtgctagtttcagtcgatggaactaataccatcttctccttctctggcggttgcgttctttgagctcaattcgctgttgtaggtatagatccacaacgttcgatgaagcccaagtcatctttttgttaggttacttttagtattgattttaaattaagtttagtatatttataattaagttttaatcgtgtttggagcatttttacgcttgttatcttttaattttgcagatttaaaacaaaataatattaggaaaatatcagaagaaaaagatgggaaaaaagataaaaatatctcacaaaaagatgatatttaaaatagagaaaattacgaaaaaaaaacaaagctgaaactttaagcctgaattcgactatcttctgtttatattttggaaaaattcgaaacacaaaagttctagatctctcttttatctttccaaaacatattgaatcgtctaattttaagcaatatcgagagagttatgctccaaatactatcagtcaacgcagcagaaaaatcgccgtcgaactccaacacaagcatgcggcggcccgcccccctaaacagcacaaaaatcatatttttctctcatgtgggtgttgg

SEQ ID NO: 99975 - DNA, 974 bp, Cannabis sativa
attattgttgaaaaaagatataaaataattaaaattataaaatacacatatattttagtatttaactcatcaattgtaataaaaatataaaaatatagaacacacatttaagacagtataagaaaataggttggtttattaaaaaaaagccaggctgacccgaatagaacatgacacaaattcgagcacgacacgaaattaccgtacttacaggccgtgttaggcctattctagaaaattgttgcatgccatgacataacctatattttttaatggtacaatattattttttttaatggcttagcacgatacgacctgtattttaaaaaacttaaaaaaatatagaccaaattagcacgatacgcacgtatttacaactttcgatctcaattggtgcttgaatgtcaaggaataattaaagaaattatttaagttttaaatgctaaggtaaggttaatgtaagataaaggatgcactagttcagtttgaccatattgctaccaaaattattcttgtagcacttaatgattccaagtccaatctaaaattggtgaaaattatgtctgaacatcattatttgaaaattatttttctattcaaaagttgctagcaatttttattatagtatagtcgtgtattatatatatactaatcgagtttttttttttctctctcaatcaaaactttgtaagattttaaacatttattatgttgtcttgttcaagtctatatttacttgggattagattttctttaatataattacttcattatataatcaacttggttatattgttgttggagttatcttcatcagtgataaggtctaccttagactaaagtgggctaagtatatctagaattcatctaaactcaaagttttaaaagtttatataatatattgatatgtagtgaatttttttcttttaaattttgtgaagtaaacctaataatactcaaacttaattttgttg

SEQ ID NO: 99976 - DNA, 1324 bp, Cannabis sativa
  modified_base (149)..(158): a, c, t, g, unknown or other
tttattagctaatttattaaatttagtcattttcttaatttttttaaaaagtggacatttactaacttagttaccaaatttagggccattttgcatgtcaacccttatttctttctctttatttgtattttgtgctttgggattgtaannnnnnnnnnatctataatccttgtaattttgttacatagaattgtaatttttttggtctctttattcatcttattgttattcttctatagatattcctaacatttgtacaaggatttttagttcttaagcaaaaacgttgctaaagtagaggcaatcactaagattaattaacacctgaattacgtagaacctttgtatcattattttctaagctctcttactattttttcttacatttatttagttgtcgaaaatatcggtcaataataattttttttaaaattttggaggagagaggattcaaacttagaagttactttgtgtaattattaagctgtgttgaccataatcttaagatattttaagcaactttggtttatttttcaataaaaatagtacttaaatactacaacattgttgtaaaaccttttattttaaatgcacttgatattagcaaaatgacatgtggtaagttttatttgaatgattttttcttttttttttcgaatggtatttgaatgaatttttaaatcaatttacttttaacaaataaaagttaccaacttggaggttgacttattaatatcacaaacaattaattaagttgcattcaatagaattaaataaaatcacttctcaccaatactcttcacgtgaacagataattttatcatacaatgaaaaggaataatggctaacattggactttaattgagatagtcaattgtcacataaatatatatatataattaataaagtttatgacttggaattaaaatataaaagtaatttgactatatatctctctgatttggttttggatttctctttaatctagatgtgtttgttggggttaggcaaacgattagaagtgttaaacaatctagttccacaccatatatatctaacagctttaatcgattatgactagtcaaaccaataaagttacatattacattgttcgaaaaaaaaaaaatacattacattattacagcttatcaacttacattaattatatagtcaatgaatccaatccttgatttatagatttacattttcaatcatacgcttgttagacttttatttgggcttacattaaattttattggttttattaaaatttgggttgattggatagttctttgctgtattagcccatgttgttggtgatcaa

SEQ ID NO: 99977 - DNA, 1243 bp, Cannabis sativa
tttttttttttttttttgactattctctgtttggtactccgtggatgccgtacacataatggtcaaaagcttacataaagccaaaaggagggttccaaatccaaagttttgaaagccaaacaagttcttgggatgctccaaaatttgcatgagactgtttatttaattaaaaataaagattagggagttgtattctgtagaaatttaattaaaaactagtacatatttaattaacaatatttccatgtacttaattattgctttctctcactatctggtccagtgaaaaaacaacaaagcaacaagtacttcagattaaagaaatattaattaattaggaacataataatgaagggtttccaatgatactatctcaatcaaaaaaaaaaaagtttacaatgaattctgatctgccttaattagagggtgcaattcatgtttattaatataattaataatattgtaataagatgggacatgcatagctagcaagactaatcgaaaaaaatcaatattcaaagctaacaaggccttgtgaggtaaaacaaaactgatggtgcgatctattgtagtaatgtagaactgtaatatatatacctattaatatatttataataaataattgttatgtgatcttgtcttgttgttcaaatcctgtactagcgatcatgtttcaaaacgtacggatatatagcttcaacttattactatatatgcacgtaaatatacatgttggatctgttagacggataatatattagaacagtaataagactgtattattgaagacaattaggacagtacttatccacatgcccacacacatgcataatactaatttcagtatgtataaccataattaatatatattttctcgcaaagtaccattttaatatatttatataaataaatttgtagaaaataagaagggatcctatgcaataaattgactaattacaaattttcattaattaattatgtatatcttgcaaagtacaatatgtatatggtagttatggttataagtttcgtcattccagaaactagttgttactccggaaagaagttacacgaagtttggtgtccatcactggaagctttgttcaagaatttgtggtcagttcagatggttaggcgtgagcatgggttgggttggccgggttgaggctattttaatgacccaacccaataacatcggcctagaaattttcaacccaatgacatcctgaattttttctaaccc

SEQ ID NO: 99978 - DNA, 2337 bp, Cannabis sativa
aattataaataataataatgaagttgttaataacatagaaaattacaaatatatacacaccattgttttaaagagttaatgtaatgatatttttactcctctccctcaacatcattattttcctcctcatcattctttgcatcgtccacttcagttgaacctctacatggtgtttcttctgttcttcctgagtcggaataagtagtgcctttttctttttctcgaaatatcctttgaccgcatcatctaatttacttgctgcattaaaaaccttatgcaattcttggatgctaatttcgagtgcatcatgtatttcatcattcaagggttttgatggtggaagacttacactagggattgaagatggattgccgctttccttctccatcataacatttttcatagaggagttatcttcatcaccggatggtaattccggcaacttggtcatttcatcaaaagcttcacaagtatcgtcatttagagacatgagtgtttgtagatagtgaattaaaattataaattatgaatatgacaataacagaatcgataattttttttgtgtgtgttttcggaggtatttttagtttgtataatactaagtttgtatttatattgggtgtgcattgaaagtgtgtgtccgatgagaaagaaataaaaggcaactcttcaaatctttataaataatgagaattaatttttcatactatttaattgtaatagtaatctccatttttcaaaaactcacaattattacaaattgatcttttccattcccatgcctgcacaccttttattggaaacataataaataattcaattactcagggtaaaaaatctacatcgaacaatttaaaaagaattcattatgacaatttaaaagaagaaacttattgatcaaagaaaaccaatgtggatccggtgcggccattaccacaccaccaatatgcgattccccaaatatatgtatagttaaaaccaaaagggctttaatatatttcattcccataatataatttttttcttaattattatgaaaatgcttataatatgaaaggtctcattatttcactataaaaagacatcaccaacgataatacgagccatcatcattatttcactttcttacatttatatcaaacatgtctaccatcaatgacacattctccaccaactcagaagaatatgcaactccaccattagatttcaatggtgatggttttaatgagtcgttcacagaaatcaaggttgaaaatctagacgatgaccaacatgttgagcaaagtcatcatacggttgagcttagtcctaatgtccatattacttttgctcaaatgtatactaagtttgatggtgtccaatcgcgaatttctgaaataggtaaagacatgttcgattatattttgaatacaaacgaggctatggatcattattttttgtcggagcaaccgaaactcgaaattaaggaaaagtggttgctggagaaggagattttaatggaggagggaaaatgcatgttgattgagaaggaaaatatgttaatggagaaggaaaagatgttaaaggataaggaaaagatgatactagagaatgaaagtaagttggatgacaagaataacgtactgcagagtatagggaaagaagttgttgaggatgaagactaagaaaatggtgatgtaggagatgtcattttcaaataaactcaaagtttacgttttcatttcttttgttttatgttttccttagtgttgttaccattttctaatatttaaattagtaatgtgtttttaacaaaactacaagtgttaccctatcccatggtaagacatagtaattggtatctaatgtgcttcaccatttccatttaaagttttaaagtaaatgggaaaataaattttaaatttataaaatatgcacaagcaaaaagattggatatagaaattgcaaagttgcatttacaagagacaaagattattatttaaccaatttcaaatctacatagagggcaatatttgcttgttaacagccacttgataatacaatcatcatgatatatgtgtgtgcaaggtaattttttagatttaaaaccatcctgcacattctcaaaataaaatgaacataaaatttgatcttcttttatttcggctttttccaaactttgaattgactgttcaatagctggctcgaaattgattgtgtcatggtcggcatcatcttcatcttcagtttcagaattatcactgtctgttattgattgaaaaccaatagcgttgatgtacatgaaaaactgtgtttttgcaaatgtcagttgtatatgagaaaatataaaaactgtaa

SEQ ID NO: 99979 - DNA, 2521 bp, Cannabis sativa
ccataatacttttttacatgctctccaagtcttcaacattcaatgtcattgagcacaatttttagaaaaaacatacaattcaattattgtatcccaaacttctttcttcaaaaattttgaatgccccctggtatcaagctttgtaacaacacatggcagtcgtgagacttcaggccagaaatcttgtcttaattctcattcacatgcttctctaaatttgaagcaaatccatctagaaactgtacagacttgataaatctgcaaaattcacgtcgttcatgaagactaagcgtgtaactagcaagagattcctttaaattcccattgcggtattcatacaaccatatttcacgatgtattttgaggtctttcaaatgaagtcttgctttgtaggtatccttggacttgctctcgatacttaaaagagttccaagtacactgtcacacacattttatttaaaattcattacgtcgagattatgtctgagagacaagtcttccaatagtgtagttcaaagaatatactattctttgacaaaattagctcagctgcagaatatttatgcttgaatccaccaaatttcttgtgttttctaggcaaacaaaattgtatctgctccagttgagctaaaacatcgacccctaacaattctggaagaggtggtcttttctcaattttttcatcatattttttacttctccaccttgggttgtccattgcaagaaattgtttgtgtccagcataaccaatcttaatacgcaatccaattgaaggggtgtgtccgttacaagtggggcatcccttgtaccctttggtgctccaaccagacatcaaagcatccactaagaagttattaatggtctagaaatagcagcatgcattataaacacagtcccattaaaagcatctcgagcttggacacctgactaccaaaaatcttttaattaatcaatcaatggtcgcatgataatatacatgtcttttccaagtgcattgcgccctggaatcaatggagacaatattaacgactctgctttcatgcacttccaagggggtaagttataaaggactaagataacatgtcatatactgtaagagttactcatgttactaaatagattgaacccatcagtggccaaacccaacctcacattttcaggttcaagtgcgaggatgggtggcacctatcaaactgcttccactcctctgcatccgcagggtgcttaagcacgccatcctctttgggtcttttagagtgatgccacaacatgtcatcagtcgagtgtcttgaactgtatagcctcttcaatgttggagttaggggaaagtactgcataacttttcaagcaacttttgttctatctccttttttccttttccaacaactcttgccacaaataggacaaaaatatttttttttctcattctcattccaaaacaaggcacagtgatacttgcatacatcaatggagtcataacctaaaccaaagttatgcaacttcatctttgacttgtaatgggacttcagtaattttttaccctttgaaaacaactcaatcaatatggagagtaacatatcaaaataatggttactccacttattgggaacttcgcagtgcatcagcttcgccaaaacattgaacactgattttttgcaacccgggtacagtttactttctatatccttgaacaaatcatcatagttaccactaccattgagcgggggcttgttgataaatcaatggtaaataaggatattctcttaaaatattagccatcacattcgccatttctttttcatcgttgtcaactatttttacatccggttccatgaacgaatccccataaaaataccaggtcatgtacgatcacttgatgccatgcataaacaaatgtaccccgctattatctgtagtctcgaagtttacatccagacatctcatgcaagggcatcgagtaattccaacagaatttatttttattcgagcaactctaataaactcatccacacccctataaaactctacagatcatctatttaaacttatccagcttctgtcacttgccatatttctacaaatataaaaagaggaagttcaaaacaaagttaaaaatgtgcaagtgtcctaatccaccttctcactccattactaaaagggtaaagaacttataccatttaagtttttaatatacatatagtacaatctatactcttaagattgcttctttttttgtcaaaatattggcggcacctccccacagttctcataagtaagcaaactatcaataagtttgccaacttaaaagaatatgcaaagagacgacgtaccaaaatatttagcaaagaaataataaaatgagcaacagatcacactataggtatacaacaagcccaaaatattcatgtggacaaaaaaaattcctggatattcggagaagcgtatttaacaattcttactgactcagtctctccaaacgagtccaaaaaaaattgtacgcgtgaaaaaaaattatcactag

SEQ ID NO: 99980 - DNA, 2564 bp, Cannabis sativa
cattgccaattggttttaagatggaaccccatgattctcaacatctcacttttagaaatatataaaaaaaaatattgaaaaagagtgtcaccctaactaagcaagttgtgaattaaactctaaaagtgagagccctagatacgaacctaacctgcctaaggccgaccctgaaaatatatctattataactataatatacaactttccataaaagaaaagtgaaattccctttatatatataaattatatttctctcttaggatgcaagttaattaacctttgctttgttttattaattatttcaatgatttatgtacatgcatgcacatacacaagttcaaattagtgggatataataaatattattaaactacttaattagctccaaaacaaagttttaagaaaaaatgttagctacaaataaaaagaagaaaaacaccataagtgttttggttgaaattatgagtcaatattaattaacatattagaaaaagtgaaaccctaatgatacaatgtttccaagtgtccacaacttttgtatagacaactttcatgtgatggtgatttgaacaagtataaactctccaaacagtaacagacaaattgccaatattgtcattattaatttttaattataataatatatatatatagtttgttgatctagaagtagtttagagttagagagtaatcgacacctttaaataattaattaaactatatatgtatatgtatatattatatgaaaaatttctctactttttgcgttaattaagcttaaatctctcccgttgattttgttacattttttttttatatattataccttaaaaagtgtatgtatagcttaacctatactgcatgtttgactttttgtgttgactgttatttatttataacaggggcagtttcatgccctagctagccaattaactacttttgtacgtaagttttttttttttttttttttttggaaatctagctatattataagataatacatatctgtatgtgtatgtatatatatatacaatatctaataagtcagtcaaaatatgcctagatgtaattaaatggatatatataataaacagatattattattaacatgtacatgtgtggaatgatatttaacctaatgtgtattaatcgatcatattatatttctaaatggctacaaatgcatcatgaaattagaccacaacaaatcaatatatatatatatatataagtgggtggattaaatatattatatataatatatgtgtgtggattaaatattttttatattttattttgtgaagatagttacgcatgcatatgcacgagcaaattaaggtccttgcctaggtgaagttaatcttcctttaataaaaaaagtaaaatgtctaatcacaaatagtatatatactgtaataattaataattgtaataataataaaaaaaaaacattccaccatccatattattggtccatatataaataattaataatcatattataatattctatatacatacactgatacacatatatgaaagcatgcacacatagataatttgtggttgaagttaattaggagaataaataggataatgttcttatatattcttctcatgatatataaaaaaatatttatatggggccaagcacatgagcgccatgcatgtggccatatataccataattcatttattatatatataaactgtatatatatatatatacaataataagtatatagatggctctagtgcatgttattttttggttaggttaacccaacaaatattgatactatacaactcacaaacaagataataataatgctgtatacagttagtgcgtataatacatatatatatatatgtatctatacatatatgtgtatatgagttgtaaactgaagacatattaattactttgtataattgggtatttcttaattgatggggtatactatgcctgcttcttaagcaacaaatcattctatatggaatactatccccacgtcgctcctaagattcttaattgccccttcattattaatatgttattatatataatatacatatatatatatatatatactactcagttttgatgtatagacttattattataagctgtgaaaaatagtaccaaattctattaacagttgacttctcattctctcaattaaaacctgcatttttaaccttttttttttctcttttaaaaaataatattaaatatgtgtttgccgaaaaaaaacccaattgtctttttataccattattaatttgacaaatttataatatatgcatatacatagatttcaatcatcaaacaattttaaattcgtgtgcatggtccacaaaagttcccatacttcaaattttctcaactatatataatataaatatatagatatttaaatatataattaatatatatatcctcctcaaaaccctactagtagatttttattacaaaaatggataaattaatagtttggtatatatataaaatatatagccacgtaactaagtcatttctttatgatgcatgtatatgtacatat

SEQ ID NO: 99981 - DNA, 1193 bp, Cannabis sativa
ctatttttatatacattaaatttttatgagatttaatttttaattatacccataactataaatatgtgtattgtaatagtccgacttatatttttcaagctttttaaaatacaggttgtattgtgcgggaccataaaaaatatagatcgtgtcgtgtcataaaaaaatataggccgtgttgtgccatgtaacaatttcatagagacccaaaacgatccacaagtccaacaatttcgtattgtgttcgaattcgtgtcgtactttatttggttcggtctgtttttcttaaataggtcaacctattttcttatacgagctcaaattcgtgttccatatttttgtattttcagtacattaactgatgagttaaatactaaaatctatgtatattttatagtttcagttatttttatatctttttttttaataatagttacacacaatcatataaacaatgactataattattataatttaaatattactattatttgaattgataaatatatatatatcattgttattattatcaaatttttgagtttttgaatgtgttatgctttctagctaatttatttatacttacgtgtcatatttttggacttatcgtatcgtgtctaagtctatatttttcgtatcgcgtcgtgcctaagtttatatttctcgtgtcgtgatgtgtcgtacctaaatacatattttttcgtgtcggatcgtgcttgtgccagttttttgtcgtgtcaaaaaatctaatccacatttacagtattaattgtacaaataacagtataacatattgaagggtgttaggggtccatatttcaacatttctcgtaaccttatatctagcttttgtggccttattattataattttcttttgtaaagggttacatgcaaaagttgaaaagtctcattaagaaatgccacaaacttaaattaggagttgcaatgaaaagtaaaaggtgaagggaatatgtcatcttttcattcttgctctttaaaagtttttaagttaataatacaaagaaccctttaaactaattagaggcccatttccttcattaacacaatgaaaaaccctaaaaattcacttataagtagaaaagaaataatgacatgtttactaataagtaatgggaatcaatagtaaggtaatcattcccttacatttgtttacttgcattattaaaatta

SEQ ID NO: 99982 - DNA, 838 bp, Cannabis sativa
ttgaaaagaatgaaaatatagaaataggaataagaatggaaataaaaataagaatagaataaaatttaaaatacatataaaaaattgttaaaaaattagagtaattagaaattttacacccaaactttgtcatgtaccaaatcaagtcccctaaacttcattaaaaatactccctaaattattgagattgttggatttaagaattttcgtctaattttagtaaaaaaaatctaatatagatgaaagttcatgagtcatgatttgatagatatcaaaagtctgggaagcatgatttagtacataaacaatcactgaaattgtaaaattgaataaaattaaacaaaaatgcttaaatctaacaatctaagagaatttttaacgaccagaaaaattcaaagagtatgattttatacatattaaaatttaagagtaaaaattccaattagtcacaaaattattaaaattatttttcattgtattttaaaatagaatagtgattaaatagtaaaaaagataaaatactttaatatactttaaaatagtaaaaatgtattttgatttcatttcatttcattagaaacaccacctgaattcaaaagcacattctctttaaacttgggttgattctctttaaagtggggttgaagaaaaatttgagattaaagaatattagaagaggtatgaaatccaatccaatccaatccaaggcacaatacttgattggcatttccaattctttcttctgtaattctctacgacctaatctttcttttctctttctctctctctctctctagacctccttccttccttgacatcctccttttctactccgacc

SEQ ID NO: 99983 - DNA, 1536 bp, Cannabis sativa
cattatttatacgattgcacaatatttttcccaacttttcattagccaaaatccagactcctctctcatggatagttacctatgggatcacattgaccatcacacatgaagaatattagctattgatgcccttacactgttgatgagatcaagcatgccacttttcaattagctagcgacaatgctccgtgtttggatggtttcaatggttgcttctacaagtctaattggcacattgtgggtgaggatgtaattagtgttatcctcagcttcttgaattgtacagctagcatcaaagccatcaataacaccatcatttttcttataccgaagaaggcccacttgaatgtcttcttgattatcgtcccatcagcctcttttcaacattgtataaaatcatctctctaactcttgttaatcagcttaaacccattctttctcaaatcatatctcaaactcaaagtgcattcttacctaaaaggttgatctttgataatatcattattgcccaggaggttactcattctctggcccacagaatctcaagtcgagttggctaggtggctcttaaacttgatatggccaaagcttttgacacagttgagtggtcttttcttcgaaaagtgatgaaaaggtatgcttttcctgaatgtttcattgatcttatcatgacttttgtttccactacatctttttccttctcggttaataatcaagttcaaggaaatattttctccactcgaggtattcgtcaaaccaatccactttctccatacctttttcttctctattttgagggtttgtcctccctcattacccaagtgacggatcagtgtgtttccaggaagcatacacttggcctcaagatggctcgcattgctcccactatctctcaccttttctttacaacaattttctttttagtgttgcttaacctattgcaacttctgctattaaagaattactaaataactatagcctggcatctatccaacaagtcaattgtgccaaatcctctctctatttctccatcaacacagataaggatacaaaaatttccatcaccagtattcttaatgtccctattcgcgcagtaatagagaaatacatgggtgtccctcaatattttgggtgctcctaaaaagaggccttcaattgcctctatgatcgtgtttggactcatttgaacaagtggaactccactttcttttcgaaaggaggtaaaaaaatgtttcttaacccaagttcaagccattctgccctattctatagcctgtttcaaacttcctttctactttcactctaaataagagtcactaattgctaacttctggcggggtggaactgaacaaacaagaaaactcactgggtagcttgaacatctctttgcaaatctaagttccatggtggccttaaatttcgatccatgaaagcttttaaccaagctatgctagccaagcaagcgtggcgcctcatccaatctccttgatctttggtggcttctttacttaaggctcgctatttctcccactctac

SEQ ID NO: 99984 - DNA, 614 bp, Cannabis sativa
tggggtttggtctctgtcgtatctgatgggtaaaaagattggtcgacctttgaagtttgaccagagattaagacttgtgtctagtatatatagaaaatagaataacacgtggtccccgtgtttggcacgagagaaatttggccaaaagaagtgtgtttggaagaaaagaaagctccaagaatcaagaggttggtcaaagttaggcagctgtgaaagtggccttgatttttcacccagtataagatagaatctaataagcatcaatacaaagcaaaagagatcaagataaaaggaccccctaaaaaaaatccaaataattttaatgttttttttttctcctaaaatgtgttgttggaagatccaaaagaaatcttttaaaatggcattagaataagtataaaccgtacaattttttttatttgagatgggattttgaggactataaaaatagttgattcacttttgaaataatattaagaaatatgatatgtgcgtgctgtgtaatatattcaatttatatttgtcgtgaaaaagtttggtacagttcgaggataagatgctgaaagaacaagggtgatcaacaaactattaggctaagcacctaattcttttta

SEQ ID NO: 99985 - DNA, 1042 bp, Cannabis sativa
ttttttttttttgggaaaaatttaatggagcatatatattcatatatgttgttacggttgttgcacgttaggaataacgaaacaaaacgtgaattaaatttgcaaaatatctataaacatgacattttatagcttaactttttttttttgaaaggaacattttatagcttaacttatactattgactatcttgttcattacttgtgagatatttctttctttttgttcatattatctgtaaatgtggtaactaataaagccgctgacacttttattaaaaaaaaaaaaaaagagatgaactgttgtcacttcatgtgcataaattgggaactgctttacttgttgcaaggttacattaaattcagcctaatagtttttttaaaattagtaaattactgatttcttatttctgtttttgtaattaaatggcctttaattaacttctcttaagataagtagagtaaaaagagaatctaatccccgtaaatttaatattatccatctgcatgtttactgatataattttttagcgaaagaattaattcgtattataaaataccatatataaaataaatagattagttttctcattgtaaattagtattgagatggaactccgtgcaactttatcccaaattctaacagtgtgttgtgctaacacatcatatatttattcgtgcttttcaaaatacagatatcttgccatgccacaaaaaaatataggttgtgtcgtggtaatacttttaaaggctacgcctagcacaacacatgcccagtattttcgtaccgtgttcggattcgtgtcgtgatttgcttgtgtcagttcgtatttcttaaacacgtaagtccatttttaaatctgagttcgaattagtgctttactttttcaaattttttttacattactaaactatatatatatatattttatagctttagttatagttatataacttctcaacaatattttacaaataatcatatgcaaaaattattagtgtttactgatcattttcaaaaacaagattaagtaagagcttaa

SEQ ID NO: 99986 - DNA, 1267 bp, Cannabis sativa
  modified_base (1220)..(1221): a, c, t, g, unknown or other
acaataaaaatgtaaccattgaaacctcttccatatatatatagatagatatataaatagattgattagcttgggatgtatattatatggtttagggatattttttatttatttattgagtttgattagatttagttagagatattgttagtggtatattttattaggtttatagcatatatgattggaatttttacgtgatttgttgaaaaaaaaaattattcgttatggtgatagtttaatatttaggggaaaaaaaaacgatattttttttaatcatgtgtagtgttatatttcttttatttttatttatgataatttaaagttaatagagatagtatcactatagttaactttttaaaaaaaaacaaaagtgatatatggtttacttgggttgatagtttagtgatagttttcaaatgtgatatatcttttttaaacctgatatttaggttgagtcttataagtttttttttttttttgaaaaaaaaactaatatttaatattatttaaaaaattgccaaaaagagaaaatcattagtgtagaatgaagccaatttaaatttgtgcaatattcttttcatatgtttgcttcttgtttccacgcttacacaaaataaaactgcaatgcataataagtgtattaacaaaagaaaaatgaacaaaaaaaaagcagcatgttactaccaaaaatagaaaaagtagatgactaacggtgagatagagttgatgtaatgggtgagtgagtgagggtattaatggtcaataaaattaataaaatctataatactattacatgataataacaaagagagaaattatatattaggattatagttatatagataaataatagttaatgagaaaaaaattcttaattaggaactataattaaaagaaaaatatgaattcaatttaaattactataagtaataattaatgagaaaaataaaatgtcttaattaggaaccataattaaaaaaataatataaattcaatttaattaaaagtctgtgcatgtataaacgtatatactttcaacctgaaatataagtaaaaatttgacatatttcaatatttacaatacaatgtataatgaatattttaaaatatgatagtatagagtgtactagggtgggcatcatccaatccaatctaattgaatcgaatcgatccaatccaattcaattacaaaaagttggatatccaattacaattgnnttggattggatgctaaaagttagattctaattggattggattggtt

SEQ ID NO: 99987 - DNA, 1484 bp, Cannabis sativa
aaagttttttcagtgtgagttggttttattaattgtgtttggcaaattctaaaaagtaattgaatctctttatattttgggtaataagtttgtttaggtaagtggtatgcttaactaatttgtggttatagtccatttaagttcattaatctaataaatagttttggtccattttattataattagttgaagatctaaagttcaaatttaagtgttcatttgaaattgataacaatggtataattggattgagtctctgaagagattttgatgaagtatttactattgaagggattataaaaaaaattagaagaaaaattaaattttttatcttttatgtgtaatctttattttgtagtttaggttttaagaaaattctattatgctctaagtagagtttctaaatgaatacatctcccataaattaggataaaatgtttaagggtaggtttgatgtaacaatataatttaataattacattatattttaaaatataatgtgtatttaaaaactttatatcttctttcataaaatagttagtaattaccaaaaaaaataaattagtagtcagtatttaaagtagaaagtttttagtaattacacagtataattatacccaattctcactgggctatgagaattgagaatgtaattggaacctctcaattaacttaaattacacagttatagcgtaattacatagtcagaaaaacatattaaattatataattatctctaattacacctaaatccaaacaccaggactttctaaacgcgctcttagaaaataaaataaacaaattatgaaaaactctctgattctgatcatctccaatgtaagatgtaattattgtcctaaatttaacacaaaaaatgaaaaaaaaatattatatttagccaatattaataattgtactctaatgtacaataatattttaaaagagaaataggtctagaaagtaaaatattattaacaacaatcaataaattaaatatttaaaaaattattaatgaaaatattgtaaataatatatatgtaataaaaatatgttattaataattaatgacaaaattgtaattagaaaaataatattgtgccaaatttttagcatatgcctaatttaacacaatttatagtacactattggcatattcctttatggaaaagggctaaaaaataacaatacactcttgtgttattttttaagccttggtgttatttggtttgatctaaatgtgtgaaataaaatggcataaaatagtaaaacaactttaaagttgaacttattataatgtatttatttactaaatacatgagtattgggatagtaattagagatgttcatcaagttctttacaccgcacaaatcactagtactgtattacgccgcataaaaaatgtgctttgaaattctttgcggtgcaattgtcatttgcttttttaacaaaccgtgcggtacggtacagtttgcaattttaaatt

SEQ ID NO: 99988 - DNA, 747 bp, Cannabis sativa
  modified_base (652)..(652): a, c, t, g, unknown or other
ctgatgcacagtctgttatacctcttttttttatataaatcaagaaattatattgctcatgacaaattttgtacaacctaaaggcacctcaattagaggcccaaaaacatatcagcagctacttacatctttttacattcaagttatatttatttacaatgattgacaccacttcttgtcttcatcattgagtttcttgggtaggaacattgtaattcttagttttaggctttcttttatcccctcgacaagcctactcagtgttagctgctcttccttccaaattatagcatttcttgccctccaaatatggtataccagtgaggcacaagctgctgctagtagttgttttttaaacttattggcttttgacttaccaatccaactgatcagctggggcaagctattacttcttgctttccaatacaacagtctttgatcctttgaaggcactcctttgagaatttgcagtcaaagaacaggtgcattgctatttctttttttcctgatagagacaacaattctcttcaacttggattccaaattcagcagcctaccttttgctttcaacttgctgtgcatagccaaccaaagaataaagcagtgttttggagcatttagtgttggaattaccaggatctagatttactancaagtatgttattaacatcctaaacatgaatttctaaaacgatatgaaataaaacacatataaagtatcaggcaccttacagtggttgcagcgga

SEQ ID NO: 99989 - DNA, 1022 bp, Cannabis sativa
attatgctgttactgcagcttgatttcaagtccatagtaatctttgtattacatgtgcatagttctctgtagattcacggagattaattatttgttcctggcctccactaatcactagcttttattaattaactttatgataaaaaaatgataacaaagatgttgtgttgtgattcattgtactaacttgagcacttcagttcacccttcattctttaagcacaccagttcgagactcgagtctcaatatccgcataatgaatcgaatagaataaggccagatttttgggttatgagctcaagtatgtggcagactcctatagtttgttcattggtggtcctgaaatttctacagactcaatatctcttttctagttgggctactgttattgtatacttgctttacctttgaagataggatattttcaatccaataatatgttccctaagaatgattagagagccttgtggcttttaagtttttttacttacccagtttatcaaccaagacgggctgaacttcttgggtttgtaaattgcaagccacataatgcaaggcagctgaagtgttaaatcacaacaaataaatataaccatattaggatacaatacaatcaatcattttcttaacttttacaagtgataatatatagaggggacttgtatggtggggatgccaataatcctacacttcaaaaagatcgtatttattgtaattcatagtagtatttttttgtgatctactttgttatctcttttctcaatagagattataggtgtatatatatgatcttggtgaagttcttcagcctcacaatctgtttgaattgcttgtatatttatatttaaactataaactaaggcagaaataaataacctctcctaacagaggaggttagcttttacgaaattgctagtaacttatgtagttaatagattccttcgaaacttacataacctcatgtattatagaattacatagtctggccatttgaattttggatttttttttatgaaattat

SEQ ID NO: 99990 - DNA, 545 bp, Cannabis sativa
tctctcctttacttctctattctttattttcatgttcattaatggcaagaccacttcaatatggtatcagagcttgttccacctctggttgctaacatggttataggtaacaatgctttgattccagaaaccaaaggacctcaagctccaatcagaccacacacaaatcacgaacctgtgatctttaatcgcaatatcttgattagattgaatgataaaagttttctcttatggaatcagaaagttcttgttgttgtcagaggaagttggcttctgaaatacatcaaagaacctcttctagctgaattcttgaataatgggaatcgtgagctaaacatggtaaatccaactgattctaagtgggagtttcaagagcagctcctcgttttgtggttactcccctccatgacaaagagtcttttgataggaatggttggctgcagcacttcacaagaaatctagagctcattggaaaatacttcacattgcaagtctcctcaaagatcttgaagttttggactaagttgcaaaacttaaagaatgga

SEQ ID NO: 99991 - DNA, 798 bp, Cannabis sativa
atccttcttagacttctttagtgcctcaatcttcttcttagatttctcttttctttctagggcctttggctgcttctcaaaagttttaactttagaagcacctcgttctttacccccatttaatagggataacggggttgcttaggagattctccaagtaaaactccctttctgtagaataaaagaaagtggtggttagagaaagaaaaaggaggggagaatacacaaacattctctacacatgagagtgaaattcaacctaaactacagtcaaatattagaagttgctcgaagtgaagaaagatcaatgcaaggagacttgataataggatgatcgctaggtcctctcaactcggtgatatcataaaggtcaaatacatttaagggagataacttccactcataagctcgccaatcataagtcccatattgataagcaatcccataaaataaactattacacgaggtttggacatgaaactcagggtaccaactatcaaacctatgggctattaagtcgacgcatttccaaacagaaaaattgtattgattattcctaaatttgactaaactcgttggatcggtcctaaggacggtaggaaaccaaccatagaaataagaagttttaccttgggagcctcttctgtagtctcgaaggcttcccgagtagctaagctgttcagaaaatgggtatgacgtaattgcgatcttttaattcctcaggcattaggagttgttactgttggaaattattttaccaagatctatttactatcatgtatgttggattaacaacct

SEQ ID NO: 99992 - DNA, 883 bp, Cannabis sativa
ttattcacataatatatatattaccacattttaatctacacttatattataaaataatataacaaaaacgttgtcactaaaggtagcagttttttgtagtgatctggacccagagctttcataccaggaatggtaaagaatgcattcttcacttcttggctagtataaggttaatggaggataagcacatggttattagaaccattagctatgatcaatagagacactttcattccgttgggcatatttgatcctaacaaattttgataatacatcagaatagcttgttggattctctcttagtatcaatccacattcctcccttatcccttatggaattaattctactttgagctctttgggttctcaatgatgtatgaaaaaagagaaattttcatcaccatatttaatccaatttatttttgctttttgagctaaaaactacacagtaatgctatataacatgatgatctcttataatattttttgatagatgatgtcatataatggtattagtgcacataattcatgagtattagctcctacatattaattaatttaataattattataaaaaattaattatttgtggtgatgttggcacaaatgcatctctaatagtagataaaaattgtactttaacataaaaattaattttatgatatatttatattaatttttattattatatagtataattgtaaaatttgatacaaaatttaatatttttattaatatatatatatactgtatatgacaaaatatcactaatatagtattttcctttagctttagcttgtttcttatattatttattaaatgaaaaatatgttagattctatagttgggagatagacctaaagcaactctttgttggtctaca

SEQ ID NO: 99993 - DNA, 928 bp, Cannabis sativa
caactcgtaggacctgcaataagaatatgaaaagaaaattgatccaaaacgattggaggaatcttctaactgggtgattgcgtttcgttttaattccaattttaattctacaaaatatctgtaactgatctaataagtaataacaacacatcaaatcaaaacaattcatggcaaatttgtaaccttacactaacccaaaaagttctgacttaaaattctaattattgacctaatggggttctttcttcgtctacatatgtttttattggtttccacaaattctgttgttccttctaactttcacatattatacttcctttctcatttaaaatatcaccattgctaaccttatcttcatcaatggactacacacaaccatttgcatcaagataccctgtacacgaggccaaggctatctccactaacccccttccaatgtatatgcagttttgagtccgcctaccatgaaaataaaatgatattattataagaaaacaagacaattgtgaatgctgctcaacctacaagaggtaaacgcattatgtaatattttgttgtatcagatgttgtaacagtattaaagttaataaaaacaactcaatgaatgttccaaagttgtgatattggcataattcaacaaacaaacaagtaaatcacgtgaaacactggattctcggatatatgtatgaatgcattgttgtcacaaaagaggagagcagggagagatatatccacatgaaagtcttttaagagagatatgatccattgaagcccacaggtgacattggccatagttctatactctgtttcagtagagggtcgggatatgctttgttgtttttttgatttccatgagatgagggaatctcccaagaaaacacagtagctagatatggatctcctggtgtcaagacaagcaccccagtca

SEQ ID NO: 99994 - DNA, 883 bp, Cannabis sativa
caaattgccttattctcttttctgttgaagcagtaccggtagtatcccttatgtatcgaagctttctcctggccaggcggcatatcacttcctggctggttatcagaacgggaagttcttaccagcatattgcaaaggccctacatcgcttgaccctttagacctcggcattgctcttctttccaaggtttaattttaaaactcttcgataattacaatatgttaacttaacgcagtttgttttaaatcttttgttacttttcctatattcattcgagttcctctttttcgtgttgcagttaaaagagaaccgaatcccttcatatttagttaatgttggtatcgaagaaaagagtttaactggtgagtttatgttgaattacttgaaagctctctttgcaatcctcaattacatttacaattgttggtatcactatcgatccaattcagtgaattatgaatttccaaacttttcgagacaatttggtatctccctagagcaatgtttttctctaaataattcacatgaaattccatacccttatattaggccatgatattactgtagtttcttaaatataattgattaggattatagatgctgagttatcaaattcttagcggccgagccgagatggaatgttttaactgagctatgttaatagtcctaaggtgttagttaagaattcggttagtaatgttagtaaaatttactcggggagatatccaagtgtctcgaaaagtttggaagaatggtaattctttctttgatatcaataagattcttatttactaattctttcaaatattggaatggaacaatagtgtatcatcctcataagactctctatctaagaattaggcacacttaaacaatcatttc

SEQ ID NO: 99995 - DNA, 966 bp, Cannabis sativa
aataaaaattgaaagtaataacgtagtatatctctataagttattggatccttattagagaaatttacaccgttttatataagttattacaaatttcatagtcaaaaatcaaattaagatacttgtatcattactctaactagattttactttccaattttactttatcatcacttattctctttgtttttttatacaactaaattatatttatttttacccaaaattaaaataaacaaagtttgttcactccaatattcataactgatttatttggatactatttggtttgatatttctatatgatagatttattttgttatcaccactaatgacgaatccaagatttaaagtgagggggtttaatttcttttatgaggtaggaagggcaaaagtgaacttataaaaaaagtgcttttggtgggatttaaactcttgagttttataatatatgcaatctaccttaatttttataccaaagttaatattatttttataactatcatcttttattacaaatacatattgtaattaattaaaatacatttatattttttcctaactttttttaagagagaactacccttcctcgcttcttctatatgggtccgccctgttaaaactttctttttaatacaatttagtaatttgtttatttttcttatactatttggtatcctattgtttaagttgtcatttattatttcagttcctaaaatataaataagataccaaaatcaaaatactaattatttgtcattcttattctactagttctccattcattggtagttaaagtatgttattaaataatctatacatttatataaagaaaaacacaaaaaagattacgtggcattttatattttttttttattctatttttactaattgaggcttttacattgggaaatttcactttcagaccctaataaaacccccaatatcaaattttagaccatccac

SEQ ID NO: 99996 - DNA, 1796 bp, Cannabis sativa
caaacccccgcttttacccttattcggcaccacaaaacagtttttgaacaccaatacaatcctgattctttccatagctacctcgttaagtctagtttcggacaagaaaatcatcccgggatgatgatcttgcacaagggagcagagggtcttcaatgtccaggggttcccaagcccttgaacattccaaaataagatgttcatggctctcggcgacccaggcacgctgtgttcgccacttccaagttcattccagagatcaaatcagaaaaactagaaatgtcccctggttccttccttttcctaatcatctccttgactgttcccgtgtctggcgtagtgatcaaagatggagattttgaattgttaatcctcttcctgttttttcttgccacagttatccttcttttatcacttttagaccccaaaatccccattccatcctctgtatctatggagataggcacctcaatccattctccccccatttcagtaaagctcaaattcaaattcaacccctgttgggttccaccgtcttctcgatgaactcttttacccaaactcggattcatagtctcttccatgttcaagaagaccccgcaatcagcccttctctttgaaccagagccaccttctcccccaccattgccttccgtgctttgctcattaatcctgtttgttaggttcacaaaatcgtaagacaacagagggttagagttcgttacctgcattttctgagaattcgttggtgatagtaggcacaagatcgatcccttgcacaggtaccgtttctcccatgaacctttgattttctgattgggcttcattcttcttgagttgtggctttctgtcaccacttcgtacaggagtgtcttcgaatttcaaccaagggccataagccaccgaactctgaccctcaccagtaattaccttcgcaggatgttcaccacaggccttgaaatcatgccccactcgtccacaattgaagcacatgaatgggagtcgctcatatctgaatggtagccatatcttgccctcagaactaggaaataggaaccccgggcaaatgggctcatcaattgaaatccacactttgaaccaaaaattcccattcaacgctattttggccacctcttccttctgaatagcaatcacctctcccgccatctttgctaatcgcaacatgttgttcctggtaattgacttcatagggaggttcaaaattctcccagagagagggaaccgtgtcatctcctcttcccatttcgacggtatcttggagagtctctgtagaatcaagatcccattgttcaatagccaaggagatttgctctctattcttttcagatcattgtcgttcttgaatgaaaagatcaagaatgaagcctccgttgtaacctttttgattttaactccccaatccacttctgctagaccccaaactctccccaagatggttcgaataagggctctgttcaagttcttggtagtgcaaaatctccccatcagacacgagtttcccacctctgattcccggtcttcattgacttcccatccttcatcatctttcattctcagattgctcgcacgatcaaggagatcgtccatggttatgtcaggcgtgttaggcattcctaatggaaaggctcttctcacacgagagagcaaaaattttggtacaaaaaatcagctttttgtttggcattgctttttaaaaacagttttcagaaaacaaagttacaaaaaacaagaattttgaaaacaacaaaatgtttttttctgttttaaaaaccaat

SEQ ID NO: 99997 - DNA, 2295 bp, Cannabis sativa
gtgagattttaacaaaacattaactagtgtaagggtaaggaaaaaacttgttaaaatttaccctaaaaagaagaatattttcaatttttgaattacatggccattttaataaaatttaatgcaaaatcaatcttcatattcatgtgttagtagtacaaatttattgtggtaagttgtagcttaaatttggaactctcttgtggtaaaatttggagtagatagctttaaaaattgctattgaagtgtgagacaagacttgatagagcatttaaacagatttgacatgcaagtagaactacctcaattgaatcaatattgagtgagttatgaccattttattgaatgttattttgggcccagcgcctaacctcaacactgagtgagtgggaaaatgtgttagggatgtattttttgattcttaagtgatattttgacatcccttagcccattttctatgttttagtaaagctagtcacccgttctcaaagatgttgttctcaaaaaatgggagactcaaaactacacggtttacttgtaaatcaccttgtcagaaaagtgaaatatgaagttgtgaatttgaatatattctgacttcatgactctcatttattgtcaaaaactagattaacgatcgaaatagaatcagaattggataagcagaatccaatgcatcatgtcattggtcaacctaggcggtgggtgcttattttggagcttttgagttgtcgttttagcacttccaaaggttcttgaacttgaggacaagatcccttaactcctttttaactttttatgagcgaattcttggagcaaaattcacattttcatgatcgaaactagcgcaccatgttgattgtcaacctaggcattgggctcagttttgatgcccctgggattgtggttttcttcttgagtttgcttgtatcttcgttattttttatggcaaaaaaaatggcccataacacttttttgagaaactgattggaaatggcccaagttgacaatatgtcaacgtgtgtgctgggcccagtgccaaggttgaccagtgccaggtgtcaaccttggcattgggtcaagtttcaggtcacttggaagttttctttggtccccaaaaatacttaaatcttaatccttgctaagaatggagaatatgtctacaagaattctcgaaaaaactccttgatagtggcccatgttcacaaaatgtcaacctggcgctagtctcttgttttggcacccaagatgggttatttcttccttgaaagtaattgtttctccatttttgatgaataagaagaagctgcaaaactcaaaattttgatcgatgcttagaagtggcctagattgacagattatcaacttgagcgttggggtgtccgagcaccgggtgttcgggttgtcaaaaataaaaattctcttaatccgattctaataccttaaatttgttcatgatatgtctagttcatgttccaataattttttttacctatttgcacgaagacggtcttgaaagcggaaaccttagttggggttatcaacttgggctttggatgaaaccctaggttcccaagttgattttcgaggtgttgattcgtgtattttcagctttcggagcctggacggtacaaaatactcttttaaaattttattgaaaaatcaaattttagctcttagggcttggattaggttgctccatgtcttcatggtatagaatactaaaagatagtgagttggatccaagttatcaaagtacgaacttctatctcgccgcgtagggctagggtcccctcctaggtctctattgactcgggtttactcaactccgtaacgtcatccttcttgtcacatgtaaaatattgatgttcacgtcaccaagaaaaatttacagggttaacaacaataaatttcacatgttaaaatgtacatatggtataggctaataatacgtgtatatatatactaaacaatcatgatcacatctctgtcctaactggctacttatctaatagttactttacttcatatctcatattttaattttttctaaacccagagcctctacaactcaaaattcattttcttcagaactcgtctttcgatctcgaacacacgttgccttccgtcccatcaccgatctgcctctaccaccatccggtcgtagacctaagctccgacagctagaaatttaacccttttcttacccatgattttctttcgagcttcgatctctttatcttctcttcaaatcttattataaactagatctatggggtatacagagtatgagaatcttgt

SEQ ID NO: 99998 - DNA, 1017 bp, Cannabis sativa
  modified_base (747)..(756): a, c, t, g, unknown or other
ttttgtttgaaaaccaattaagactgctttcacaacaaagaaggattatggaagaggtgaaagggaagctcagtgggcattggctcaacgaacaattcatggtcttcagccaccggtagctctttacaacagcgataaccatgaactttctgagatagctgagcaagccaaaaggcgtgctgaagttgctaggtaaaatctaaataacatcatctttcatggctttaacaaattgttcaatatgttactttgatactttgttatcaaattaacatttaaacttggattctgatcttttaggctgagggagctccacacattgaagggtcacgttgagtctgtggtgaagttgaaggggcttgacattgatactattcagcaacactacactgtgtagaagtctttcttcttcaaaggatcatgaccaaaaatgtctgatgccatggaagatgctgcttgaagataatagagaaaagccaaagcttgaaatattatgtcttcttttgtcattatttgatttttcatgtaattttgcttaataagcacaagtggttgggattaatttattggtagtaattatttgaaaagagtaaatgtttaatgagatatggaaaagaactaagagagctcttatattatatatatattttttttaccgtagaatataatattgtcgtaaatttttgtaacaatgctgcttttttataacaattctagttttgtgcttattattattattattattannnnnnnnnntattattattattattatttggaggatgggatttgtgaaataaaaagaatttataacatgtttagtaattagataaataatatatttaatgtgattttatcgaaaaaaaattctactacttcgctgcatctttctccagtcctctctactccccagattattaatcggtgtgtttatggcatatgaaaattaatttagataaattttgtaaaataaaaaatgagtaatatattttcttcaaaaaaattgttgaatttaata

SEQ ID NO: 99999 - DNA, 1541 bp, Cannabis sativa
tatttcatgtaattttcacttcattttactactctttaatttatacccacttttataagttatattcccattatgtgcattaggaagtctaattttaatacggtttgtgaggttatgtttggtactttgattataaaagagggtatttatcaattaaaattattttagagttatatttagttaatgtgtaataaaaaagggtagttttcaacttatccaaatttttgtttcggatctcaaaagcccaaacccaagcccaagtacgtttctttcacgctctctattttatgaattaaaatttcgtccatttctaacgatctcccgttaatgtctatgaatcagtttattttattttttataatttcttatcaggaatatatattcgttgagcaatttgtttaatttctatcaataagtaatttagggagaggacaatcgtggttagcgctatagttgtcaaccctcgtcgctgaagtcaccatacctgatgcctcggcgttggattcgatttctttttccgaactaagaattggagagacgacagtgtgaatcgttggcacatttttagtcagagggtctcgatcatcttcagatcaagcctggtatacttatactgtttataaatttttttgttcagatataatttacgtaaccttgtgcagctaaaacatttgaacacctaattggattttatgtaaacttttgttgattgatgaactccgttttactttcttcctcatggaacaattcatataatattttaatatcgattgggaacactttctctaaattagatctttttttgtagtaactactgttttcttactctttgtagtacttaattaataagagtgtttctaggcaggcaggggttctgtaaattttatatgcgttatttcatcaaatagtcattcttaactaccaaaactttctatattccaagcgagtattgagtagtcactggacattcttattgttattgttattctacttgagtagccagtagtagccaccacccaccagacattccgtattagtgcttgggccaacatgtactgcttgctaatatcttaatgttttgtaatcttagcaatgctgcacttgttcatgtaccaactctcagtctctcagggacattctaagtttggaaaaaaggaattcctttttattagtttttcttgtttcaatcaagcattcatagtggcaaatgagtacctttccatgtgaacagaaacttgaaaactttggagtatttgcttctgttttgaacgatttagggcctgtttgtcatggctttgaaagtgcttttttagtttcttctaaaaagctttgcgtgcaatttaaaatatatagttgtgaagtgctgccaactcttcataaatcgtgactctcttaaacattctataccattctctaccatgtatgatagttaaaacaacgctttgtaaatttgggaacttttcggtgaaaaagaaaaaaaaaaatatggaataactttgaagattatgttctcttacgaggagaagtatgttctgttaggt

SEQ ID NO: 100000 - DNA, 1154 bp, Cannabis sativa
tctctctctctctctctctagttggttggggttctcagtgttctccagtggagcgtcagcagtaatgtgggtatataatcgtcggcgagagcagagaatccttggtggtgaggctgttggtccctccacaagatggtcggtcggggttggggttggggttggggttgcgattagcctaggtcgggggttttcgggtctccggtggcggtgggcttcaactcttgttctctaccaccttgcactgcccaatgtttcgtttttggggggttttttactaaagaatttttcaaacttttttctagactgaatcatttttttaaaaaattatctaatatattattttttttttatttttattttttttttttgctataggggtttctatttaaaattatgtaaaaatatatattttaaagtgaccaattatgaacgaaaattgccaaaaaattcgctctgcagcagttattccttgcaattgttaacatgatatctacgtctggcttcgtccgattctttcgtccggtaggatatcggtgagcgtccaccccatttcttgtgcccggtggtggttctttcttcttctctaatctcatcgtttactctaggctcttctatgcattttttactggtctggattatggccttctctggttctgcaatctccgccctcaggggcatcaaaactattctatcctagatcatctcaacgcgattgcattcatgaagatggtgttggtacaggaaccatggcattattataatcaacacattgtttggtgttcactaggtgctcgaccaaatgcccctatgaaatatatgactcaatttactttttagattcaaccacatttaccattaataaaatagtgcactccaccctcaggtcgacttaaacttacaactaattaatgagaattttctcttccaataattggtgttcggcgataagatgaactttgcacggaatgtacttttaggtctttccttgcctactattggctttttcaagattaaagtattggaattattataaccttgctcatttggaacaatctggggattattttgacattgattcatgaagttcaaggccatactcatcccaatgatttagtctagttattaaaatcttgtttccaatttcccttagagta

SEQ ID NO: 100001 - DNA, 1137 bp, Cannabis sativa
  modified_base (438)..(451): a, c, t, g, unknown or other
ttctatgttacttcttaatttgaacatttgtcttcttaatttgatcctttcctctaaggttattgctatcttaattagtttttatatatagtatatattaaacaatgttagttgggctgccattcttgatttggtgatattactagctaataacaaaaattcaacttcgtccactttttaactgctcctgattatatattattcaaaaaaaaaataatttacaacataaatagttaagtttaactttcagttgcaaataaatactataagtttaatttttggcggtaataataccaaaattataattttagaacttttgtaagtacctggttaaataaattgacacgtgacaattcctaatcggtccaaatccttaaatttttattatttaaaaaaaattagttcaaatatactgtattattaccgtcaaaaattaannnnnnnnnnnnnnttacaactgagagttaaacttaattatttatgccgcaaattactcttaaaaaaatgctccttattattaaatactaattaattactagttaatgttggagaccttacatctaattaagataattatatattaatttattatacaatataatttcaccatatttataaattaagaaatgttaagatattaatagtgcctactgcgtaacaccttttaatgtgcatattattattggtataatttaatgtattaatatttatgaaatatcacttctacttctacatagtactattgtattaagtaccattaatgacttataacaatgctcttataaatttaatttcaaaatgtgatctttaatcactatcttacctattattattagtaggtaaatgatttattagtacatcaactattaaatcttatataatttaatatattaatttatataaaatatatatactaggcaccactagcaatgcacttataaatttaatttgaaaataacatctttaatcaccatatcttacctatcattagtgcgtaaatgatttgttggtgtaatctaattagtacatgatcatatgatagacttcaagtatagcatggtcatcactgagtgtacatatataaatttagatttgaatttttttaaatatttgtttatagagaaatttgcggccaaa

SEQ ID NO: 100002 - DNA, 698 bp, Cannabis sativa
tgaaatacaaaattcaattatcttatcatttttttttcatttttaagctcatatcatataataatagacttatatgtgtactaaataaatataatatgaaaaccattacaaaaaaatgaatatttcaggagaattctcaaacaaaaagggacgcatttgttgctttaagaaaaaactaatgaatatctattaaatccccaccacgtatagtgcataacaaaaaaagttaatttacagacaaaggatgtgcatttaaagaataaggacaagcaaatttttttctttccaagtatgtcaattttcattaccaagtggcttatattattactcatgtctcaattaaataaaattaaggcagaaaaaattccggatgtggccttacagcatttggaggtcagaaagatgatatgtatgcatggtttatgtttatagaacctaaacaagtaaactaaatgacagtaacagtcaatcatatgattaagataaaagagaaatatcaatgaacctcgaaaagacttaggcattcctccatgagtttgaaaaataatctagtccgtgcaatgctctgctgccacaccttcacaactgatgcatcatcaagattgcgcacaatttgcaaaataactatgagaacttcacgcttttcaacagcactaaggttgtaaaaaacatccattccatccaagatctgcatagcc

SEQ ID NO: 100003 - DNA, 643 bp, Cannabis sativa
gcaggtcaaacatcttatgtctttctattttttctataaaaattctgatcggtttctttattctgttttaaattgtggttttgtctacattttaggatattgtcggaatacctgggtgcagaccaaatgctagctgttgttgctagatcgtttgaagctgctgctcaatttgaaacttacacacaaaccggtgaagttgatcgtagctatgctcttcatgctgaagcagccgttcttgggaaatccataaattgtcgatttactgttatatgcttcgacaaaatttggtaagcttgttgttgttgttgacttcaatcaattctgacacaacattgtttttttgtctaattaaaagttgaatagaatatcaagatacaacattggaaggaatctttgttacatttatctattattccctattgctacagtctatacaaaggtgggtttaataatcaccctcagaggaggctggctttaccagttccttggtttattgatggaaccattccaaaaggttttctgggatttgctgtaaatatgattgatttagatgaagatcatttgtccattaaaaacaactcaggctatggtcttagagagacggtattctatcgcctatttggtcaactacaagtttaccaaa

SEQ ID NO: 100004 - DNA, 1337 bp, Cannabis sativa
taactagagatcacctgttggcaagaggtattaccatgatttttactagctgcttagtttgtgaggttggtgttgattgtcataaccattttttctttgattgtttttttttccaagcatcgcatgcgtgctatccattcttagcttgacaatgttatttggcatgagtcttactcgaattagcttttgtggttgaatgctaattgagatcgcagtctgcttcataggattgttgcaactgtttgagcggcagcagtttattttatttggtggaatcgaaatgcttgtatcttagagcaaaaggttttctcatgtgaataatttgattagagccacacgtaaagcaagattactacttgttaataggaggaatctctctaagagggaccaataaatctttgattttaattataacatgtaagtaagtctgtcttttgttattttgtggatgctggtttttgtagcatttgctctgttttgattaataaaattttctcctttaatccaaaatatttttttactaggggctgtacaccataacaagtgtgtctgtccatgttcacaaaggtggctccgttcctcattaaatatatggtagtaggccgatgggtaatgaataatgtatttttttagagtaaataatacatgtattgttttaatataggattttattggggaatttgaattataaacttcatgtggtatagtaattaaaaaaaatcccccataatacaactctaactaaaatattttattattttggaaattctcgtactgttctctcccttaatttgacctaacctaaactccatgttaatacttctccatccactggcttgacatcgtagcctaacgaaaacttgaccctaatgaaatcctaacaccgatgaaaccaacaaggcaaaacccaagcaccaataaaccccaactctgacaaaatccaacatcccaaaccccaacaaaatctaggcccctaagaaaacccaagcccttaacaagatactacaaaaaaaaaaaaaacatacaatatcaaactcgattaagctcattgagcctaaaataataaaattgtataagttaacatgacgacatcgagttctcttgatgcattatatatcctatcaagtcaagatttttcgcatttcaattcaaagactgtctcgatatggcttattgtctactcgatcctaaaccaataattaaatgaattttagaatttaacatagcgttatcaaatactcttgtatccatcgagcacaatcaaacctattagcttgttgagctttgctgcattttattttacaatagtgctcatagtctacttgatcatatcgagt

SEQ ID NO: 100005 - DNA, 1818 bp, Cannabis sativa
ttataagtgtatatctatttttgtctaaacagctctacaagagttagtaattaagaaatgggaaaaatttattattttgtattgcatggtcatggtcatttgataaagtgattgaattaaatcaaaattaatttgatccaaaagacattaatgggaactaaattaaaaaaagcaatggaagatcaatgaatttttttaaaattaccttctacatatggtggtggagacatctttattcccaccttgccacaggtaatagactgctcctttgattggttggtgacacttcctgttaatatttcagataatagttgatagtatctaatacagatttgtctttcaagtatttaaaagatttgtcagccaattacacaagaaggagacatcaaaaaaaaaattctaacaaactaacacagatactaatttatatagttgtatttctcacaaccaaaaatatattctgcagtcattgatgcaagttagaatttaaaaaggaaaggagcatccttatattatcataaaaagtaaattatgttgaatttaatgcataaattaattgtcttaaaaattaaaaatatacaattgatttgtacaagacatgcaagattctcttagtttcctagcacctgaatctatataaaacacaaatcaaattatcaacatcttagttgcagacaaagttaatataagatgagtcaagagacttgccaaagcttcaaccagaaaaataataatatagaaatatatactaacttttttaatcaagcaacttctgaagtaccatgacagtattgttcaagtcacaccaattcaacgtacaattaaaaaagaaaaaatttcccaactaagaataaaaaaaataagtgttccatatttattattcttttaattgtactaagtcaatactgctgtacaactcttgtcaaacccttataaattaccacaactaagaagagtacttcataataataataaatgatcattttagaatgtgaaaatataatgtgaacaagcaaatctaagtagaataagttgtacgctagtaattgtagtatatacattgattgtaaacattctacactgaaagttgtacaaaattactatactaaattaatttaacaagtcaatttatcaattttagtagcctgagccgaggaaaagaatttgaaacttaattcaaaatatagacgcccaataatttagcctaaagcatagatgcaagaattaaaaataatataacaaacaaaacattccacatgtaatacactataaatctgggaggaaactaattgcataccaaaaagcatatggaagacatgatatatcataatgaactaaggcattctaaatagcatataccacaagacaaatcaacaaacataaatgagaagaataaaaaaaaaagaaaagttactataaaaataagttctataatgtcaaatcatatgttttataagtgcatagattacaaaaaatagactatacctttcactcttaccaaaaccaaagcgggcacaaaaataaaacgcaatagccaacaaccatgaattgctatgaaatgtgaccaatgacaaccagcccttctcttgcatcccatcccttgcaaagtttatatccagggccagttcaaaaagcttgggaggcacctcttaaacaggtaggttaacttcgcatgtctcatttagaagtccatacaaacaacttttccttttatgtacaacacaatggctaaggacctattgtgtgaagctgaaaaatatatttgatggctgttgaaaacaatgcaatgaaatcaaaatgtgaatgggttaaaactaa

SEQ ID NO: 100006 - DNA, 651 bp, Cannabis sativa
tagcttcaaaagattatgccgtatttattgctgaactgtcctatttattgacatatatttagtgaaagaaacaacagtgatatgttcacttaaaaaactgtatgcctcaaatatttttttttttgagataatatgcctcaaatatttacttagatatataaatttaacaaattattaaatataatattcgaatgtacatattattattctcaattagaataaatatctatctaaagattatacatttgattttgaaataagattcactgttgtataatacagtgtctctattgcttgaattcgtatatcaatactctaatctataacattattaaagagacagacataattgaattggatcagacataattattgttatttgctagaaacgcaagagcaaagtaacgtaagtattttaataatcaattcaatcaaaagaggtcacatcttcagtttccattataaacttgagcattattaatctattattatatgtaaataagtggatagatagggccactcttttttttttttttatagatatatcgtaattggtgtaatttatatattttaccttttaacttaaaatatataaagctctatgttaaatttatccaacgtgttgattcatgtggtgctctgcaccatatc

SEQ ID NO: 100007 - DNA, 1646 bp, Cannabis sativa
tagccaagactttcagaagagggtctaaaagtacactaacctggaagaagcacaaatagtggcttacgaagagtattacccaacgggagtatcaggatatgcgataggagcacaacttcctagagctgcgctccctgccaacccacaagcaagcgggatacaattctctgccactctgggatatactcagaatcttgccctggctccggcaccaccacacctaggggccccagtcagcaattcccctgggataaacgtgcaatttccaactcagtttgcgccagccacaagcatggaaagagtgcctcaaagctcccagagtaaaaggtcttcaaaaggtagtacgtgatttgaggacaagaggcaaaggagagggtatacaccccaatcgcagtacaccgaactcaaggatagtcaagagcgggtgtatttcacgaatcagcaaaatacgcattacctgaaacttccttctttgtacagagacaattctcaaagagaccctagcaaaaggcgtgactatcacaacaacattggtcataccactaatgaatgcaaaaacttgaaggatgaaattgaaagtttaattcgattaggccacttgtatgagtggatcaaaaataggttgccacacctgaatctagcccaaacggagtcgcaatgcctcaaggagggcccacgatggcaccagagggctggtacctcctagagggatgccccatcagcaggcacccgaactacctccctagactaacagaagagtcactatgatctatggaggtcttcatattgggggaaccactagaaatgagctatgctggagccctaaaacatgataaggatctatgctggagccctaaaacatgataaggaaatacgggatgttactgagcttccagctcaaaggtccagcctcatgaatcaacccattaccttcattgaggaagatgcaaagccaatatggtttccacatcacgaccccttagttattaagactcaaatcacaaacaaagtcagggccagaatattggtggacaatggaagctcagtaaacctgttgttcaaggatgctttcactgccattggactcactgacagagatctctcccctagtagttcacaactcacaggattcaatgagacaaccctcatccctatgggaaaggttaggctcccggttactttgtgtccgggcaccctgcaaagcacattcaaatattgcacctttgtggtagtggattgccccactgcttataacgctatcctagaaaggccggccctagtagactttggagcgatcacatctatacgaaactcgtgccttaagttccctacccaggaggtaggaataggaacggtcaggggtaatcaaggagaggtgagacagtgttataacgttgcggtgcacttgtcagtcctaacaataaaggtcacaaattggaattgacagcggaacaggacgaattagaccctcgtgtcaatttcaaagcatcattgaaaccaatggaagacattgaagaagggtgtgtgaccgtgacccatctaaagttattccattgggtaagaacctagaaccgggagagcggagtaaaatcatcgacaccataaagacattaacgggcgtgtttgcatggtgccatgaggacatg

SEQ ID NO: 100008 - DNA, 1548 bp, Cannabis sativa
aaatttatacagattcagcttctgtggtgacaaaataagaagaaatataaaacagcataccattttcactataagaattacattccctctatgactatagaaaatttttctacatgatggaaaaacaaattaatcataccatttttcaggccaatggtcgagtcttgaacattgaggtgatagaggatgccctcataacgtatttcgtacttggaaattaagctaatgaaactcccaatataggaatccccagcacttgctgccggctcgctcgacatggtgagctgaaatttcattaaagaaagagaaatgggaaagaacgcactaaaaaagataaagcatgcagtgatttttaaatgtaggtagccaaagagcaagttgatttacaattaaatctcacatttacataggaccagttttcataggagttggaaattaatttggggtctataaggcaacagacagcaagtctattctaaaccaaaaggataaaatggataagatttgactcgtctgttagaatttttctcataccctaagcatgcaccagaaaaaagtaattgaaattattaaataatgaggattgaggacaagcttgatcaatatatacaacttaaagttctaaaacatgaagaagaaaaatgttagcctaagtacatttagaatcaagctttagtttaatttttatatagctttcttcttcttcttctctatcatgctgccataatatatactcattttttttctttgaattctagcagtagaaagttcatcaacaggtttcaattctgattcaaaagacaaaagagtaaccgtgaacaaatgtcaatggaactacaaagaggttggtgggaaatgtttttaaggcttttgtgtgtactgtcatcatagaaaacaatcaatataacatgttctttcttttactttaaaaaaatccttaaatggtcagtctatgacgtagaattctctatagtttcacccttaaatatgcttgtatttcattgcaatcagttcatgtacccctttatgccaaaacccaaaatcaatcaagatgacgaaattacaattgacacataaatgtcttcttgagtaaagagggccatgtagcacctagtttttacaggtcataaacaaagtttgccttcccttgctatatgatttctttattttatattaaataaacaaatcaacaagggtcaatgagaaaggtgatgataacattgaagacaaaaatagttcagcctccttagaaatcgaataataggtaagcttggctcctaaacaagtttaaggcaattgatattttaatatttactttaagttactagataggaagcgagtcaaatattatttgaaagtgttctcggaagaccttaaccacactttcttctacatctcgaatctcaaattaggaaagtaatgactatcgcgtcagaaaccaattcatataaacgcatttcatgaaacattaggcaggaaacttttaaaaaaaccacgtttacatactctacatgtcacataaggaattacacaagtctctcgatgaag

SEQ ID NO: 100009 - DNA, 752 bp, Cannabis sativa
ttgcctccaaaaataaacattaagtatttaagtgtataaaatcggaaacattaaatatttatgccacaatttatcctatctatttatgtacaattacagaatatgtctagcaatattattcaatattttattatccttactaatatggttgccttccctaaatctcactttccacttcaattttgaaaaatgcaccttctctttcaacatttaaagtcttctcctaaaagatgtgtggaagtgggatcagtaaattaaatatgaaaaatagaaatacttacataaaaatacaaaaaaaattaaaagaaaagtccgagcagaaaactcaaaattaagcaacattttaataaagtttaagatcaatttaactttttgttttataaactttttattaaattaatctccatattttattatttcatactgaatttcatttatataaggaaattttaatgtactttgacttaagggtattcatcatgaccttaactaacgtattatatcttttgtttaagatttataattatttttgtcatatattaatttattttttttttgatatattaatttgttttttctttagttttttaaaagtaaaaataaattaaaaagtaaatattgtgttgtacttagtattttcaaaacaataaaataataatataatgttataaaataatataaagtagatgagaggaaagaagaagaagatgaagagagaaagagaaagtgaatgagaatttctaagttgttta

SEQ ID NO: 100010 - DNA, 1289 bp, Cannabis sativa
ttgccgccatttacccaaattattaatataatatgtaaggttatatttgttttgatttagattgtaatataatcaaaattacgattgtaattttcgatttttttttaaaagtgatgtaataaatgtaaaagtgattatatatatattatacaatggaatctttattacattgaagaagtttatcagttgaatagagcagtgaactcatctaaaatagacatcattttagtaattttatttgatcaaaataagaattcgacgttgtcgcgtttaggcaagagtcaaggtcattcttattttttgaacttttactattgtttcatattttataaaccatattctgagcagtcactatttaggtaattgttactgagaataaaaaatttacaataataattagagtaatttgcagcaaaaatacctaagagtagcaaataagtacctaagtcgtattttttgcgtaaaaataccttccgtcacactcctagaacttctgtaggtacctctctgtttccttccatgtaagtatccacatgacacccttttattagtccacatcattaatttttatttttcattttaaaatttatttgaacttatttaaaattattttaaaataaaatatatttaaaatgtataaaaaaataaaaatatattctgaaacctaagaaattattcttaccttttttcttaaataaatattttttttaaatggatttttcatttatttctttttctattcttttctctttgaattaaaataaaattcttatttaaattaaattgagattttgaaacataatttagatcaaaagtgatacatcacacctgaatcaaactcaaattttgaacaaacaaaacaaaaagaataaagaaacccaaatctgcaactcataatgtccataatcattaaaaaatttgtttaacacattccttaaacctaaaacccagaacttgtcaagaacaacaactttatacaggattctaaatcaaaatatattacatacaaaatacaaaagcaacaaccagatctaaagtaaaactccgaaattatagccttaaatgaaaaaggtaaataacaaatgtcaattaaaatcatgaccgagccaagcccacaaacccagaaataaaacacaaatcacaaacccaaatgtccaaattcaagctcaagcatgcaaacattaaggaatattttttaacaaaggttacatattgatcaatggaaatgtaaaaacaaatcacattgagataaccctgtcgatctacattccagtatagtgctcctcttc

SEQ ID NO: 100011 - DNA, 2135 bp, Cannabis sativa
gtcattcggttacattcggctttccgataggcttcgaagaactgcaaatgatccatcaaaggtattgtcaagtttctattctctatgatgcttcctagtggatttgctaatgctaaaatatgagattgcttgtttagtgctttatgtttaactatttgaatcaatttgattttactacaatatctaattggtcttgtccttcccgcgttgtgttggatttggaaaggaattgtttcaaatagatactatctatatagcattaacatgataatgatgagacagcagcagcaacatttggagaactataaaaatttgacatataggtataggaaacaaaacgatcattagactatgtgctgcaaaggttttagcattattttttataaaggccagccagtatatgatttttttttgttgtctaatggggttgtttacttgaaaggcaacttccatgtggttatctcacctagattttgtttcacaatcttcatcttcatagcagcataccaaatgctggtgtggtatgaatatctcatgtacaaatgctcataccaaattataatattaagtcacctatattgatcttgaaggtgattttttttttctttttgttctgttcatttattttttcataatttttcaggctcctccacgggctgaagttgtgaaaagcttgagaaatggcatagtagtgaatctactgggcatgggtgctgcaattctcggcatgcaagctacggttggattattagttgctaaggctcttactacctcggcgaatccatattaccaaggaatcacgcctggtaccagtcctgttcttgcattggatgtcttcttggtgcaggtattttacttatttatttattttctgtggaattattggtttccaatgctgtaggtaccattcttgctatcagaaacaataaacattattaagaaacttattctggttaagctgttactaatatttacaccaaataatctatactttcatataagctgatgagtctgtcttttcaggcatctgcaaatacgatcctctctcatttcttgggtctggttttctcgttggaattattacgctcagtgacattaccctctccagaaaatacccctgtgccgagaatcgcatgagttctgatgcctctgtagaagaaaaggtggtgcttcacaaaattggagaatagaagtgacttgtttttggaatctgtgaattgtgaattgattttttcactatggaaaacattagtgaaaaataaacaaagaaatgcttttggccgctatgttagatgagaaatgtcaaaattttattttatttgagataacaagtaatgaaacagtttcaggctttgagcttccttaggcatcttgctctttgctctttgctctttgttttaataaacgcttactatgaattcttttggtagaagttggaaatttctaatggcagacgttttagctaatggattttataattgatttgctgaaaaaagggaaagaatttctttattatattatcacataaggcagtatcccaaaaagcttcacatacgatgagacatttcaatcattttactacatatatttttgtgcaagatcagcatatttgtttaacaagtccagtgcaattaaaactacaaagaaaaacacataccaaggcactagtaagtagtaaattctaggtctttacaatctcaaattaactgccccattctcaaagatcgagatgaacatgaaaagaataacctcgaagtcaagggctagactgtatataccaaaaaactaccccataaaacgagtccaaaagaacccaaaggaaagaaaaaagaaattggaaacgttaatactgtagtcaactcttgtaaatcaccattctcccttagtactctttaatagtggtggaattgcaccagagagtaaaaaggaaccacaaaaagcctcatatatgttgaacacccatctataaggtcctaatattactttgcctgtcctgcatcacatgaaaatatgcacaagtacattgatatatatgtatcaataccaatacgatcaacaaatagaactgaaaatgtagactcgatgtaagaaatatgcaatcgaattggatgaacgagaaacacataattaggagt

SEQ ID NO: 100012 - DNA, 1192 bp, Cannabis sativa
tgtatcgccagctggtatttctgaattcctgcaacccaggagtgactacagggatctcagtagtgatgcctatcgtacccctaactcctatgaaacttgagtctccagctctagttcctcccgaggtgttattgcgtggtggcaaacaagcgttggcgttatcattttcgacgtcaacaggtatctagacatttaaattagtgcccatcaggtcacgtggtgtagtggatgaagccctccttatttgaactatttttatttgattgaagatgatctgttaaaggaaatgaagcacaaatattgtgtagagagcaatgaagtataagctctcaatgaaagccccaaaatattgatatcatttctagtcaacgtcccggagtcaatataacaacaattgaggtgtttgaatagtaacaaatatgaagaacaataaatgacgcaaagttgtatagaggttcgatcccgtatttggtaatagcttactcccttttttgttgtatttatctcagaaataccaggataataagaacctagtcaagtgagtttcttgatatctcatctgtaaagattacaagtattttgacaacgtaacgactctctcaagaaatcagatttccatcccttcatagtgataataatccattatttatagagatgaagatgtgaaacatttacattagttacaaaataaataattagggatttgatgagtcaatccaacgattttttcaatctccccgattctcacaatcctattcttttaggcatcaaagttggcctattgttcaagaactgggcagttgagatgaatctggacattacctccgcgaggttgttggtcggccatccgtccaggaagcatcttctaacttctcatagtgataggtctgtctaatccatccatccttcctacacttgatgttgaatgactctacatatcaggtatttcacccaatatcctccggacgatcctatggctcgcttgcacaccgtctagattttttataatcttccatgtgtcaccttgctctgtaccacatcatcaaggtaattttttggataaagaaattaattaaaatttttttaggaaatattattaattaaaaaaaatagtatgtagaagtttgaatgtgagtagtaagataatgtaagagggacaaaaagataaaatgagtgcttctatttaaaaaaa

SEQ ID NO: 100013 - DNA, 1163 bp, Cannabis sativa
taaaatccttggtttatgctgggtttctagggctgtcgaaagaagaagggaagaagagaaagttataggcttcctttttaggttatctccttattctaaataattaactaaataaggtaaaataaaataaataataagaaacctaatattaatctagaattcagcctaaataaaaaaaaaaacactagaagacaaaataattcaacattacaaaatgactaatctgccccctcccttaaaacttagactataatatcacctagaggtattttgatcattttctaactaatctcaccaaaccgacaatttagaattctaaactagttcagtataattccaatacaattcatcttatatggtcgtgacatttctaatcactctgtcgagtttccacggccgctgcacctgaaaaatattttattttgaaaatggtatctacaatacccccataatctaataaaatctctgtaattcataaattatgctttatttattcgtttattcatattttactaattaactcgtaattagcttaagtaagattataatcctactcaaatgcccacataatcacatatttaataaaatatgtcattatattttcaaggatattacacctctaccagactttgaattttccttgcaaattctctccctcgttgttctttcgctagtgaatgtaagaagagtgtgagcatttgattcaattactgctaaatctttgcatgaggctttttccagatataaaacctcttcaaattgaccacctgaaccccttgccaaacgaaggcttcgacttccagactagttgaaatagtttaattgactgggttcgaaggctccagacgagattttacaacagcaatccatcttctttctactcaacacgtaagtactctaactctttgttgaatttttattattttgtatctttgatagaaatttcttgttcaagctaggattaggacttatttacatgttgaatagtgaaaaagactttgtgaaaatttttcatatcttaggggtagatctgtctgagaatcgccttgccataaaaaaggaggctaaaactatctgggtgtttttttggttacttgaggttcataggtgcatgtatatataccttagggatttgtcgattggagtgcaactctggcaatttt

SEQ ID NO: 100014 - DNA, 1045 bp, Cannabis sativa
agctcaactaaaacaaccaaccatcccctttcccccataactcgggaagggattaaaccacctgctggaaaataactagttctccagtaaacagtagggtaccggaaccacctggtaacacatcattatcttatacaaactttccaatcacccttctcgaaatataggaatacgttgcaccggaatcaattaaagctatcaacaaagtatgataaatagaagttcaacttatcacggtagaaagaccagcaccagtctcagtttaggtcaagaaaacaccaaaacaagaacgaaaatgccatcacccctctatttcggtcgctgcaatggtaggcagcttctttctaaatggcctactatgccacattaaagcaagctcaagtttagcatttaccctaatggcatctcttgcatcacaacccttactcctttggcaaaagaggttaggttaacaacctgaacttagaactggacaaaccctagttgataaacaactatatcgacattccgagcgatataatatttccaccttcaatcagatttagcctccttagcggccttagcaactgtttccttaaaacaaaagtttgccaatcggtccaatttaatgtcatttttcatcaccatgctacccgggatcaattgtgtaagttttactatcctgccactcagataatctcttactttatagcatacactttcccccagcttatggtagtggaagattcatacccacactaccaacttcaaacctgataagcccacaattattcttactagatcgcttcaggtacaccttctagtacattcgcgattattcctttctcataatatctttccaaccagaattaatgctaataagcattaccatacatgcataaacatgcttaacagttttatatcaaaattttcatgcttctctaatagcttacacatttcacataagaaaataatacaaacaatcaataaataatctactaatcaagtaacaagtagcacttactaagccatgagtctaacgagtcttcacagccaatgtacatat

SEQ ID NO: 100015 - DNA, 1991 bp, Cannabis sativa
aaatattagggtgacttcagaaaacgtaagattaattttaataacaagtactactatattgatgaaaaataaattaataagtaacataaataaattaataaagaaaaaataatattagatatccaaaaataggtttttatatcataagaatacaacttaaaataaatgcagcaaaaatatttatatttgcatgtcttaagcatttttgataggtcaataaaatttttaatgtactaaaacatctatctgatatactacactaaaccacgttctacgtatcctagattttgtactatgaaattattttacaacgtctgccaaaaataacgtttaagaagacaattttaccctttgaactgacaaaagaggaccatcaactattgtaattctatccttgctcctgtcaactttaccaaagaattgtaccttaaataaataaattattattacaaaaatataataaaataaataaaaaagaaatttatttattagctggtcttataaacttagaacaaccggttacaaaaaatattaaaaaataataaagtacgtaagactcattatacagcacaacggaatacaatccataattttacaagatgggcataaatcggttgcctatatatataaatttatgattatataaattgaaaataaggtgaattgtaatttttttcaaaatataattttttaatttcttaatttataaaaatgtgatgaataaaaataaaaaaagagttattattatttttttttaaaaaaaaagagaattatggaaaaaataaataaaaatatatatatatattatatcatttaatatttatgaagctaataaaaaattaaaataaaatgagagaattaaagagaaaataattaaagctaattatagagattttagagtgatacgctatcggctgatacatctccaatgagagatgtaaaaattgtgctatatgttaagaaatgattttttactgctgtaaattctctggtgtaattctctgaggtgtactatctgaatctgtaccattccctaggctaacaactttctgttagaatattctcttttatttaaaacgtgtgtatattgtacaattgattctagaattttcctgtacaaaccaatcattgaatatataaaaggtagcacaccagcctaaaagtttcaggctgagttttctcatttttctgcattatttcctttctctgtttactctggttttcaaactctatatttagcaaaaaagtaaatttgtggtaaatttacaccaaattttagcttgtgctccaatgcacaattacaaaatttagatgtaaaatttaatatctaattaatgttttatattaaaaaataaaatctaataattttataattaattttattataattttaatatgtaagataataaaagaataatataaatattttataatttaatgtgatagttaaatatactaataaaataatagaaataacataaatgtacaagaaaaaatagtgtatttattgtggtgtaaattttatatagtaaatattgtaccaaatttgacacaaaatttactatgtatcaaatttacatcactttttggtacaccattaaagattagaggatactctttgttaaatgtgatatattatattttagcttctcaccactttgagcaaatggtacgcatttctcaattaataaaacatttggtaattttgtgcacgaccgaacataataataatatatcattgccccttacttagaacttaccactcacttacttttccaattctaaattttctatgcataaatatttaataaaaccaggaataattcgtaagagtaagtcagagctagatatagagagagttgttagagtcttgtaggagacatggtgagccgagttgccgactctctctgaccccatgtgagtaggttggacttgcattaacacatgagattgtcctttgatttgtccccagagagagagagagagagaga

SEQ ID NO: 100016 - DNA, 841 bp, Cannabis sativa
tttttttgaatattgaattattttttattttattttaaaatggtgttttgggtgagagaggagtgtatgtgaagtagaagaagaagaagagattgagagttgggattcacaacatttcgtcacattagaaaagattgattcgaaagcgaaacctttcgaactcttaacaacgatttaacagaacaactcacaacctttctccagtttcaaagcttgtttgattttaaggtactatttttatttttctgttgttgtaatttgggatgaggtgttgtggatgtccatggcggaaatcatttgattttttcttctttcatttgggtttggaatgaaaaaagtcaacttaatgagttgagaagctttttcaggaaaagagaccaaagacttgatttttaatgttgtttctatatttatgacatgcatgatctttaagtgtaattactaagtgattagttttgttttattttcctttcttttgggtaggaagaataagatgtttttggattgaggaataactttttctaggctgagcttgttttagacacatttatttgttttcccaaggtgagaaagtgaaaatgacatggtaaaaagatgaagagggtatgtatacatggcaaaactatgaaggaatcttatatagtgttggagagagaagtggtccctgctcttattctttttgcaaccaaatgaatttccagaagttctcttcctctgatgatatttttcaaggaattgaaaatctttttatggtattgggtcattttgtgttttttcttactgagttcacaatttttttctttctgtcatttttgtaaataaaatgaatggaaggatatga

SEQ ID NO: 100017 - DNA, 1360 bp, Cannabis sativa
ctctctctctctctctctccttgaagccttgattcaaccagctgtcatcatccatttcaacgttgcccatcatcgtcgaacccttgcacgcacaccgctcctcccctgtctaccaccggagtcaaagatgtttgtctcggttatcttggctgcaaaccagtaaacactcctatggaagccaatttaaaacttggacaagatgaaaaagagaagctggtcaatcctacattgtatagaaggattgttggaaagttacaatgtctaacaattactagagtcaataagctaagtcaattcttagtcactccccgtgttactcacctacatgttgtacaaagagtgctgcaatatgtcaaaagtagtccaggacagggactattttttgcttcgaacacagatgttcagcttcatgcctacacagattcagattggacttcttgtcctgacactagaaggtctactacaggcttttgcatattcattggaagctcaatcatatcatggaaaagcaagaaacaacaaacggtctcaaggtcctcatttgaagctgaatatagggctccatggaaaacactacttgtaaaattgtgtggcttctctctgttctaaaagaattaaaaatagaacataaaggacctggtttgttgtattgtgacaacaaatctacacaacacatagctgcaaatcctatttttcatgagagaactaaacacattgagatagattgtcacctagtaagagaaaaggtccaagaggaagctgtcaaattgtcaatgtttcatccaattaaggatcagcttgctgacattctaactaaacccctttatcctaatcagtttaagagcattaaagacaagatgggactaaagaatatctatagtccatcttgagggggagtatcaaagttgttcgtttgttagttagttggttgattagctgtcataacagttagaatttgttactgcaagttgcagtgtttgtttttttttctgtttctattattagcagctatatatagcttgcttttctttgtattaattagttggaaataatcaataatagcagctatattttctactttttttctctagatttctctctgttttctctgtattttctctgctggtaaaaacatgaaaggatactaaatttttttaataaccctcaaagtacatcattgtagactatttttgtagtggtgtatattaaaaacaagcaaagggcaatttaagaaacgaaaataccaaaaatcaaacaagagcattagaacgtatatataatgtaaagtccttttttggcaagttaggtgacaaaataatttttcctttttatggtaagattgctatgcattcattttcga

SEQ ID NO: 100018 - DNA, 899 bp, Cannabis sativa
gagagagagagagtgagagaatcacggagagagaatgagaatcatagaaagagagagatgagtgcaatgaattaataagagaaaaatagggaagaaggtttgccttcttcattttattcaaaattaggcaagcgcggtgttgcctaacttttgtaaattatacatatatattatatttattgagtgatataatttaaaatatattttgatgtatattataaacaaagtaataatattgaaattaaaaacataattttaaaatatatagaaagataatgattttgtgacaaatattaaatggtagaattaacaaattaagaaattgcatgtgtttttataataaaataaagaaaaaagataatagctcctgaatttaataaatttgacttgtgactgatgatatagttatttttaaaacattgtttagacctttttttctttgcaaagaaacaacttaacatacagtttatcaaagtttttacattttattttgtggtaccggtggaacgttttttctacaaatgtgaatgtacgtaggatgacaactataaaattggttgagcgttcgtgtgataagtactgtataaagttggttgagcgttcgtgtgatcgttataatcattgaaaaataaaatttaatttatgattatttggtgattttagaaattcatatattaagtagttgttaatatttttactaagtgaaatattataaatcatgtgtttgttattttctttttatttctaaataaaaatagaataattttttattattttataaatcatatagtaaaatatttctttttttttttcaaattcttatacataaaaatgagaaactacgtatattgaatacaacaattacttggatactatactttagaattcagatcatgaat

SEQ ID NO: 100019 - DNA, 1284 bp, Cannabis sativa
  modified_base (1151)..(1158): a, c, t, g, unknown or other
aactgataggggtggagaaaaagtgagtagatatgcagttcaaagatcaaaagtttaattagtatatcaaaattgactaatgataatattatttttcttgaatttcataaaagttattgtttcattaaggacaaggacaatggccaggtcctgttgaaagggagacttaaagatgggctttacctacttggagagaaatcttcctcaccctttgattcagctctgcaatgtcatcttgcctacacaattcctaatgccaataattttcctacttctattccttgtactgatcactgtgatcatgtaataaacacttgtaatgatttgactatcaataaaacatcttttacttcacattgtgtttctatcccgcctgttatttttaagtcctttgttagcaatgatgttaatacatggcataacaaattagggcatattccaacaactagtaccttggctagattacttcctcaactacctcacactggttccataaaagatttactcttttgtattgcctgtgttcaagggaagagccacactctaccctttcctacatctagcagtagagcttcccaacctttagcccttatccatactgatttatggggatcccctcatgctctatctaaaaaagggtataggtactatgttcacttcttagatgactacactaagtatacatggatctttcctcttgtccaaaaatctcaagcctttaatgtctttctaaaatggaaaattcatatagaaaaacaatttaatttgcccataaatatgtccaagctgattggggtggtgagtataggccattcaaaagattcctagaagaccaaggcattcatttctaacacccttgtccccacacacatgaacaaaataggagggatgaaagaaaatataggcacatcaatgaaagtggtcacactattttagctcaatctggtttggatcttacctattggttgtatgccttcattactgctgtcttcactattaacagattacctaagtgttatttgacagcaaacctgaatatagcatccttaaaccttttggtcgtgcatgttatccacatttgagaccatacaatcagcataaacttgatttcatatccaagcaatgtctatactgttggaattattttaccnnnnnnnngatttactaacaagtatgttataacatcctaaatatgaatttctaaaatggtatgaaataaacacatataaagtattagaaaccttacagtggttgcagctaaatataatgtcgccttccactcag

SEQ ID NO: 100020 - DNA, 1913 bp, Cannabis sativa
gatggtaatataaaatacttgggcttgtcccctattcagatcgaggcttaaaaagactgatttcaattttattataaataacctttcttctaaactccaaggttggaaggtgaaaactctctttaaggttggtcgagctactcttatcaagtccatgggtctttctatgccattgtattccatgcataccaccaagctttccaatcggatggtggctaacatagatgacatggttagagatttctgatggggttttgagaaaggaaatcatgggctccacctcaaggcttagcacaagctgtgcctcccaaagtcttatggtggactgggctttcgtaaaactagtgagatgaattaggcctttctggctaaatgaggatggaatatgttaatcggagccaactctctttgtcgcaagattttggaagcaaagtacttgcagggtaaaagtttccttcactgcagttacaaagattctgactcctggtttttgaaaaatgttgtaaaagctgaatcgacaattcagaaaggtgcttgtaagttggttgctaatgggaaggacaccaaaatttgggaggatccttgggtcactcacagtatcggcttttaccctaaatccagtggtaatccttcacgcggctttgtttgggttgcaaaccttctaactaagaacggggattggggtctccagaaacttaactatttgtttgatcatgataccgttgtagccattttaaaagggggaaaacctttagggaggggaagcaattcttgggtttggactaaagaaaggagtggtaacttttcctgcaagtctgcttatttaatccaggcccttgatcgggctcctcactgtgtagtctcgccctccctccagaataagctctggaacagtaaaattctagagcaccctaagatattgtggtggagtatcctctcaaacgcgcttccagttcgttccatcctgagcgatagatactggaagcgagaataaaacgatggagcatcttttctttcggtgcaatctggcttatcacttatggcggtcctccccgtggggtattttttatcttttagactttagtatccgtatgtgggattgggttaagttcatttggagtctaaaagataaaggcattgatgtagatgaggagtttctgtatacctctattgtggtggacactatttggggggcgcgaaatgataaagtacataatgataatctgggtaacattaaacattatattgactctattttcttttgttacatacattgttgttgctagaaatcacaaagggatggtttgctgggcagttacgtcaagacttgattttattgatacagtgaggcagtggcctgttgtttggctttagagaagacagcagagaaggagtgcaattttgttattgttgaaagtaactctcgggtgatgatcaactctcttaatgaagtggagtccagatgggatattgcaaattactcaagtcgttgtttaagtacttcaattatttgtcagttgtatttttctaatgtttttcaatcttgtaataatgtagcccataatgtggttatgtgaatttttactcacaatctatatatttggttagatgttagcgacataccttcgaacttactttgtaatgacctagaggtctaacttcattgtttaatattatcaccttttcctcgaaaaaaaaaaaaaaaacaaaaaatttgatacccactccatttctacgtcaaactataacactatttctccatctctttaaaactataacataacgcacacaatagcaatcgtgtgcctatgaaataacaaaataacaatgccacaaaaagaaagatgctacaattgcattgatcagaagaggttaattaacaaacaaaaagacatatcctccagctgaaaaaa

SEQ ID NO: 100021 - DNA, 1458 bp, Cannabis sativa
  modified_base (999)..(1007): a, c, t, g, unknown or other
aactgttttaagatatgttgcatacatgattaaatagatgttataaaaccctaattgcggtcttggaaatattttgaccattgttcgacctacttgccttgcgggttagcaagctaagtcctaagtaatggacgttcaacgaagcgtaagagggcaaggtgaaatggttgagaccgaagatggtcgggatggtagcgatcccgaaaacccccgtggacgcggcagaggtcgcggtcgtgctcaaagagatggccaagaaaatttatcgcaagctccattagatttggagcagaggatcgcggagatggaagctataatccagcgacatgaggcgaaaatttagatgttgaaacagcaaaggtctcatgtggtaccttcaccccttatggcaatcattttcgttccggaattactagtagagcagagtatcgctagaagtcaaatagaacctttgtatggggaaagtggtagtggctctttggttgggcagaaaagggagcccacattgacattggtgggctcaagacgaaataagagacttcagaagatccgggggtgagatggtcttagaagacgctatacctatcccgagtgtccacactacaaaaagcatcaccccggagtatgtaaccggaaagcttgctttcagtgtggatcagtggggcatctcaagaaagattgtccccaattgaagaaagaggaatttaagcctaaagccaaccctgcgcctgctcgtgtatttgctaacactcaggctgatgttgctgccagtctttcagtggttacaggttagcttcttatcaacggtctagtatttactattttatttgactcaggtgctactcgatcttatgtgtcatcaagagttcttgatcaacttgatagacctagtgatatttttgagatgggatttggaaccctgttgtctaatggggaactaattgtttcaagaaagtgggtgagatcagtgttaattagaattgaagatagagaattgannnnnnnnnttgtggagttaccattggccgagttcgacactatactcggaatggactttttgttcaaatattctgctagtatggattgtaacagaaaattgtaacttttcaatcggaggatgagaaaccatttgtctttgttggtttggttcaaggttttcatgttccaagaatctcagcattaaaggctagggatttgttactcagtggatgtgttggattcctggcagttgtagtggattccagtaaaccggtgttacttggacctaaagaggttagagtggttaaggaaattcctggatgtgtttccagaggaattacctgggttaccacctcagcgggagatagattttattattgatctaatccctggagtagaacctgcttcaaaagcgccctaccgaatggcacctgccgaattaaaagaactgaagatacaactccaagggatgttggatct

SEQ ID NO: 100022 - DNA, 1521 bp, Cannabis sativa
  modified_base (1360)..(1362): a, c, t, g, unknown or other
aattgtcacataaatgtgcgtcgaatttgtgtgtttatttatgtacatattattactcctaaatgattttagacatataacttctctttttctcattttctttttttaaaaaatgacctcattaaatatgaatagagtaattagttttaccaacaatattattaacaatcttatgataatacatgaaagaaaaaacaaaaaaagtgattataataaacaaaaatatctctaacaatacactatataaaaataattaattgtataattaagaacagaatggataacagtattacataaactcattttgggtgattattaactaatgaatattgaaccctttattggtttatgtatgtgacatctaacaagagaggcctcaaacacataaaagcaatattaaatgcaatttcatgtcaaattttgagtacttcttttgcatgaaaaatgcaaatgttatgtacacaacaatagttaataatgtcattgaacttaaacctttttttgtttgtggtcccttatgggtgttagtgatgagttgttaattttatcttgcgtgtagtctttatagacttagaatataagggattgttatcgggcaccagtggtgtctaacatttttaaatttgtcgctttgcgattagttggtgatacttcttaaaatttattatattaaattatatgaaactcgatacttaattagaccaatagcgatattgacacatagaagggtactaggcactattagtgccttttaatatttttgtataatataatattcttgaaccaatacgataaaagtaagagaattgttaaaaagtattattggtactcttctcgatgtcatatttttattggtataattaaatattaagtttcatataattttaaaaaataatttttagaaaatataattaaccaatcataaaattaatgttaactataaaaagtattgaatattatcaatgccaaataagaatgttgtaaaagtaattgttcttattactctatttcactagccttttacttggaagttgtgtttgggacttttctaaaataaatgtatcaccttaatattttatattttaattttttatattataaaagaggaaaaatctttcaaatataggtttagttttttttgttgtttttctttttctctctaaaaaaagaacaaaaagacaatggtaataatttgtaattaatttggtacccatataatatatgctgacacagctgccttgtacatgttccaacaaagtccgtaaagtatcctttcttaataagtattgatatcggatactaatagtatctagcaactttatatatgtcgtcttgtgattggttagtgatattttttaannnttattatattaaattatatttgatacttaattagaataataataatattaatacataagaatatctctaatagagatgtaaataagtgatgcaaatgtaaaatatacctcactttgttaaaagtttactccaataatgtgctaaattatgatgcaaaaa

SEQ ID NO: 100023 - DNA, 828 bp, Cannabis sativa
  modified_base (779)..(779): a, c, t, g, unknown or other
agagagaagagtatcatgttcgatttgatcaacgtaattgcaactcggatgagtcaaatttaccggaaatgccactgtcttttcaaccctaacgtaacgcaagtggggtgagggcaatttcggtaactcgagagtcaattttgtggaaattgtggcacggaaattgtttaggtaattgtagccgttttaagtacgtacgtaggtttttttttgtttgtaaagctcatgaatgaatgattgtgagtgaaatgtgaatagtaaaacaatcccgtggtgggatggcatggtgggacccataaataaggagaagaagaactaaaagccactgtactgtgtggaagtctgaacagatatgccaatggagtgggatagggtgtgggggtttactattgacggtccacaaaaaaggtggaaacttggaactcaacacgtgatttatggcaaccattctatcctccattgttgtcgtgtctctctcacgtttctcgtaccctttttctttggcaatctagctgctactaccaaaaatttataggagtaacttagagcaactcctccttgggatgtcttcaacaatgttagatgagatcgacatatttttgttatttttttaatagactaagcaatatagccgttcttcgcgcggctaatttaattttttttagcattataataaataattatttaaaaatataattttaatatataataaaagtataaatcttctctattagttacatcttttggccatatacaaactattctatttttaatgacanctttaactttgcaaacaattctattacaattttctatctcctcattcca

SEQ ID NO: 100024 - DNA, 1219 bp, Cannabis sativa
ttggcaaagcatgctttgcggttagacgatgagctatcctggttcgaggaggttccaacgtcggtggcggacgtggacatcgtaaattcatgagtgatttaatcactttgtaaaaaaaaaaaaatgcaaaataatataattacattatataataaaaaaagataaatgtttaatttaacatgttaattattttcaattaattttttttaaaaaatcaatgcgtcaagttaactatataaatatataaggcaatatctatattttgatatattcttaaaatttaatataaaattaaaaaatatatactgtacaaaaattttatttatattttataaataaatgtatgtatatttattaaatatttaattttaattattataattattattaatgtttataatgttactattaatctaatatgttcattttgataatttttcaaaagaattagtatatattttttttattaaaattttataaataaattcaaaaataaaatatttatgtttttttttttaaataaatacttatgttataagctatttagaaatgtatttagaaaaataaataaactgtaattaaacgtgacatcatgtataactgctatgtttatattattattgagaatgcttataaattattaatttaatatatttattattattatgtttgtgatagtttattaaaatttaatatataatttaataaatataacatgcatatttattatttgttttataagaggttgtaataaaaagttataccactgatctcttataaaaaagttgtaccaccgactataaattgttgtatcgttactttattagtgattctacttactgtgtcatagaaaaaagaaattataattaacattaatactaaacattcatcaaacatatgtaagacttagaaaaatttattactttatatagaaaataaaaattatgtttatgtattaaaaatatatataatttaatgtacataagatattttgtatatataatggaacaaaattatataatttataaaagggaaaatggcggcaaaatccccaatactttagttttggttcgctaaacccccacaacccaaatttctgcgggtaaacccccagaaccactattctgttatcaaaaacacacttccgttcccctgaccccgttatgtgcctacgtggctcaatccaagtaagcagcagctcgacacgtcataaattatt

SEQ ID NO: 100025 - DNA, 1665 bp, Cannabis sativa
  modified_base (45)..(54): a, c, t, g, unknown or other
tttctttattgatatttaaaagataaagattacattgaaatggannnnnnnnnngggcataaaacccaacaaataggaaccaactggaatggggaaattcttagatggttgaggaagtccttgaaataatctcatagagggaggattgctccgaccccaatgagctcgaggctccaagagcctatccctgtcgagccattagtactcgcctcgccactggtcccctcgggtgcctcgcgagtaagccgttctggtgggtaatagttgaactcgccaggggctacggatctaacctgacattttcatttttggtcaatgctacaagtccttaggatgctacctacatagtctccgatggctcgtaccctcgactcgataagttcaacctcgaatgtaatgttggggtcttggggagtctttgatttaagagacttagaagtcatgatttcaaaatccaggtcatctagtgaaaaagaaattttgactctgggtaaaaataaaggcctacccaaaggaatagatgataaactgggaggttcaggtcaagcagcatctcgttatttcttgcaagaaacgcctatgacgactagtaatatcatcctggtgggtctttattaggtggtccctaatttttgcatcatttatctctaattttgacttgggttccaaaattctgggtttatacggggtggcaagttcactagggcactctatttctaaagcttctagagaataaacttctgaaccagattgggacattgttacaaaaaagagagcaatcccaattcttagatgaaatttatcaaactagaagcttataaatttgaggaacccaaaagcctacgctctgcgtaaaccctaaaaattacccagataaatttaacttaaaatcactaaaaccaaatagaatgacaaaggtgcaagcaataaaaataatgatcaaaccaaggaatgtaaagaaaaacacaaagaaggacatgtcacttactatttgaaatcggattgtggtgcgatgaacaattctgcaattggggatgaagcgaacggcatgatgatctttctaaacgcttaaggtcgaaaagtaagtacgacgagattcgcagaaaaaatatcagagacaaagatggcatgcaaaggttcgtaaaattggatggagttttttgcagaaaaagctcaagaatttttttgaaatgacaaagatggtgaaaaatggagtttaccaatttataccttgaactttgtaaccattagatcaaagtgtagaagatccaacggatagaaattggaagagaagtggaaaggatggctcattaatgcaaatgatgtccctcgaaaccacaaaactgccaaaatcaataacatgcatattttcaaaatatattactaccaaaataccctcaataatcatttaaaaagcaccttttattaaaaagagactttttaaggggcaattgttatactcgaaatttagctggtacttcagagggtgacacatgtcaatcttagggagtatgaatcaacaaaaatactaataattatatcaaaaaatactaaaatggaataactcattatatgcagaattaatagagtatatttataactcgcagatggcacagtctttagcgagacaaggatgtacaaactattgattcacgtattgaagag

SEQ ID NO: 100026 - DNA, 918 bp, Cannabis sativa
ttatcaccacacaaactctctcattttttcatagtaacacatattaaccctttatatatatatccaacacctaaccctaaggggttttattaggcttattgggttaatgactataattaggggtggactataatttaatgggccaattatagttttaaggtgctctcatgtgcctctaatacatttatttaattattaactatctcattatggtagtgaataaatattaggcacatagttaatgattgtatttatagtattaagctcataattatattagtctactgtaataattcaacattacgataccagtttatatttctaccttaattatgttcgaatagtgatgcaataaaaagctatgctaaggtctacggacaactgacatagcacccaaccttcattaaacaaaactatatttcttgtgcagccggaataggcctgtaaaaatgtataggatttggggctaggctagatggtgtgtttgtaaaaaccgattacgtgtaatttagagcaatgcaactagaggtaattggggtctcactctcttttgaacttttcaattcatgacccctataaaaatttgatttgcaagatataattatgaaattttacagctttcaaataattgattattacacaatatatttcataaaaaaaatatcacacaatattatttctctgtagttactaatccttgtattaaaatggctgcaatttacataatttctaatggttacactaatttagtgtagaatctacaccaatttggtgtagaattttctactttaggtacaacaattctaatgattcacaccaaatatttcattaaataaatatattttatttaaaaaattcatattttatattatttatattgatagttttaaatagctaatttataatataattatatca

SEQ ID NO: 100027 - DNA, 624 bp, Cannabis sativa
gcgggacccgtacccggacctaaacctgggacacagacctggacctaggactcggacctggacttaagacccgagatccaaacccgaaccgggtctcagactcaggcccaaacctaaatccaatctgtagttggtgttggggtcgagtttattgaaaatatattatctgtacacaatttattaatacaagtcaataccaaacatagtattgtattaattaatactaatacaaaacaagtcggatctgattcgagtatgtgatctagcgggacaggacggggcagatccttacatgatctaaatcagggcaaattatagtcggatcagatccaacccgacccatttacactcctagaaagagatacgagatcattgtttctagtataaggtacgtcttgccagtgtcccaaattggtatcatctatgagaaatggttcttcaaatcttttctttggaaaagaatatgcaaggtccattaatgtacttgaaaaaattatattcataaatagtaattaaaacactaaataacactttttatatttaaatgtatcaaagagaaaaccaagttgagaaaggtaaaataatataaacaaaatttagatttgaagatatcataaaattccc

SEQ ID NO: 100028 - DNA, 1426 bp, Cannabis sativa
tcatatttaggttgttaatcaacacacttgtgagtagatctaagatcctggtaaaataatttcaatagagatcagtaaaatacctttcaattttagaaatgatgtcatccattgtccacttttgttccattgttaaaaaacatgtggttgattcgattggtacttctcctattagaagcaaatctatagaagaaatgagtgtttttaattctagactggagccaattacaagtatataagaaagtataaaaatttattgaaaaataagaggttgtttaaatgtgttttcagttttttagttttcttatgtttttaaaactgagaacagaaagcggtttttttttttttatcattataaaaatgtaatggtgtttgttgcaggttttttgaaactatttttaattctttttttacaaaaaaatattaaaattctacaccataccatgacatgaacccatcgaactctggtctcaaactcgaacctagaccccagcccaaacccggacctaaactcgaacttggaactagatccggacaccagacccaatccttgaccccaaacacagacctggacccagacccgaactaggactcggacctgagttggggtttaggtccagtttcagggttcggggtacgggtcctagtctgggtcaagccggggtttgggtcgaggtccaagtttggggtccaggtgtgggtctgcggtttggggtcctgggctcgggtcaggggttcgggatccgtgtcagtgtttgaggttggggcctgggtctagatttggggtccatgtccaggtctggggaatggggttcagcttctggggtctagggtcgagatcgaggtttgggttcggggtttagggtttgtggtcgaggtccgggtctgggatttagggtccaggtttgggtatgggtctgggtcctaggtccaagttcggattaggatctgggtgagggtccaggtttgggttcagggtccggggtttgagtcggggtttgggtcagggtctaggatccaggtctgagtttgggtctgggtccacgtttgggtctgggtctgggtttgggttcgggtttgggtttggggtctaggtctgagtcttggtcaggttcggggttagggtcgaggaatggggttcgggttcgggttctagtctagggtccagagtcctgggttcggtataggttcggggtctgggtcctagtctaagtttgggttcgagattagggttggggttcgggtcggggtctggggtcggattttagggtttagggtccaagttcggggtctgggtcggggtccgagctcgggtttgaggtctgggtccaagtctaggtcgaggtcggggtttgaggttcaggtcaggatttagggtccggggtccaagatttgggtctgggtccggggtctggggtccgggtcc

SEQ ID NO: 100029 - DNA, 877 bp, Cannabis sativa
acaacattttttgagtgcataattataattaaatcccccaaattaacataattattgagcttttctttctttcttttatttttaaaataaaaataatagcaaggagaacctgtgtctcttgatgtttaaataataccaattaaaacccaactgaaaaaagccaaaaacaataacagtacgtaggtctagaattgattaattagcagaataattaattagtagtaattaaaatcccaaaagcagccattgttaatgattaactaataatcaagatcaacataactttattatataatacaaaaatagaagcatttaattgatattacattaaacaaactccaaattaagtagtactattaaaacatacatttaattgatcgagtaattaattaattaagatctataatattgatcagagtcgttagttgttgtaaatccacatatataaagctaagagtggaactcacaccaattaacgactctgattaaacgtacataataagtaattaattattaaatactaaaattacttacccattatccataaatatttctttaattaatgtatttggtctctttttctggaattgggtcagctctgttgtagcagaaaaatttgagtatggaatctaccatcatgctcttcacagacctcctcttcttcggaaaaatgcttcctggtttcggtttgaaccgacccagttctgctgtacgtggtcatgatcagatgaatcatgaccactcggtctttattattagtaaacttattggtcatcttctctaagtttgttttagctctgatttctctgatttgtttttgctctttcttcaactgatgtgtgtggtaggatatatatatatatatatatatatatat

SEQ ID NO: 100030 - DNA, 3098 bp, Cannabis sativa
gactaattgaaaaagatatatataaaaaataaaaaaagagggagagagcaataaaaatcacatgtggtttggggcaaaataaggttaaaaaaagtatgttatatgattcttacgaatgttactttgtcctattgaaatttttgacttgatttatcatgttctagttaaaaataaaataaaataaaatagaactataaacattggtcaagcataattatcaacaccttcaactttagagtccacatactatgacactagattttcttaatttggggccctacaaagacaaactacaagtttgtgagaaatgatttgagaaatagaggcaagaaaaatgattgaaagagtaagcataaagagaaacatgtaaaagcttaaactaaagtcttaaccttttggggagcaagagaaggaaaacactctattttaggttaaaaacaatactcatttcatattctaaaatggtactcaagctaactgctttcttttctcaaaaatatgttttttttttcctaataaatcacaataacatagcatttatccatattttttaattagttaaaaacatgtttcgaggagaaactatacattattttttaattaaaatcaaaagagaagaaaacacaacgttttgaccctaactaacttagtaacttgtaatgaagtccttcaactacagttaaaaaaatgtttcaaaatattagaagttgtttgactgtatttttcaatttttagtttttagaattatatttttaaaaataagaaaagaaattttttcattttaaaaatttaatggcatttgaatcatgttttttaaaagctacatttaaattttttttactaaaaaaaaattaatattgtacaatataccacgacatgaactcagtccaacctcgaactaggacctagattcgaccctaggatccaaactcggacttggcctcgagacccggactaggaccccaagactaggacatggacccggacccgaacccacaccgggacccgaacccaaattgagacttggacccggacccagacccagacgcgaccccaaaacccagacccaagttctggatctggctccaagactgagttcgggtccgagtctgagtccgggtcccggatgcgcgtctacgttggggtctgggttcacttcaagtttgggtctaggtcctgattcgtggtcgggttagtgtcccagtctgagtccagggtctagtactagagttgggcttgggtcgggtccggggtcaggtttgggtccgtgtttaaggtcgggttcgggtccgtggccggggttccgggtctagagattcgaacccaaacccaagtatgtgagagaaaatgtaacgacgaatatgtttgacaaaaaaaaaattatttcttttgaaaatagaaaacaacattttgatgttcgatgtttttttaattttttataagtcagttttcaaaaaactgcttataaaaagtttaaccaaacaccccattaattgtttggttgagcttcatttgaaccgatgaaagaagaaagttgaaattttttatttttatgacatcttttgtttttgtgtttaaaaaaaataatattttgtttcaccttgagcaaacttggagggaaaggagaaattgcatggtacattattgctacaattctgttttttttagcaatcataaggacactttttctttacccttaacttcattatatatattgcctctttcagatactttcttataatatacagcataataatgagatggtttgatctagaaaaggctaattttaagcctttgctgcaattcaaagatacatgacacattattacttcaattctatttttttttttttttttggtaaccataaggacactttttctttacccttaaatatatttacatatattgtctctttcgtgtactttatgataatatacagcataataatgaaaagggattgtttaaccggaaaaaaaaatgaaaagggagtgatctagaaaagggtaattttaagcctttgcttctatgaaagttgtgcaattcaaagatgactttctaaggtcataaagctcaaggtggcttcatccctttggtcttagatgagaaaaagataagaactttggcctaacttataacaaggctgacttaagcctccatagtaacaagaaaaaaaagattaatacaaaaatgaaaatcatatttaaccaaccaatgtttgtctgcctaatcacttagcctaggcccccatacatgattggcgacatcagctacagatgcaagattctaattggccagtattttcatagatttatacatgtatgcaggcacactaaactctgcctaataaaatctttattttgaggatttgtgcttgaaagtctttgacgcgctaattgttgtaggtcaccaaccattatcatgttatcacatatttttctttagaaagttgctaaaaaatattattagtgtttagtactctgtcatatcgttattgatgtaattaagtatatagtctcgtatagtttaaaataataattttttaaaatatatcgctagttaatcgtaaggcgccacctatagttagtgataagcaccactggttaccaatatcaatactcttttctttattaatataaggttgagtatcaatgtaatgctctatttatttaggcgtactacaataagttttaaattactgtgctaatctttactaattaaaaattttagtagaaaatatgtttaattaaaactttataacgaaatattaactttactaaatatgttttacaaaagtttacgagttttgagatctcgatctatttacaaaatgacccaaaagacaataattcaaaatttcatttattgactaatacagctgagctcatgttgtcttgaagaaccaaaatctctaggtcaattgctctgatatgtacaatcttcatatagcttcagactcatctccagttcagtctcaaccaatacctacaaatgcaagcgtatttgtgagtcgacagactcaaaaagaaaagcataaaatatattaaaaaatattgatgacttgcatctaggcgcccatacatgttgggaatattttacca

SEQ ID NO: 100031 - DNA, 823 bp, Cannabis sativa
  modified_base (767)..(793): a, c, t, g, unknown or other
ataatttttttataataattacaatataatttatctttatttttttaaagtaaatttattgttgattgataggtgtattcttaagaatgtaaattagataaaaatttaatataattaaaaatatatattttttgtaaaataattttttttttttttgaaatagtaaaataaaaaatttaaatgtagtgtatttataaatttttgaagtataaataaaattttttaaaaaatttatataatgggataatttctaaaatgcccttggagatttggttatttgctattatgttacgcggataagttatcgttactgaatgattctttcttactgtgtttagaaagtgacacctgttctataattggtaatctcatcattcacctgtaattgtcacgtgtgaaaccactactcttcaaaaaaaaaaaaaaaacattgttacgtaagggttgtgtgtggtgtggtgtgtgaaaatagaatttgtttaagcattgttagtgagtgttgtagtgtttagtgtttttagatatgtccttttgtaattaattatgatatttttaaaaaattattatattaaattgtatgagatttaatatttaattaaattaatagtaatattaattgttaatgttttttaagttttaatatatctcattttatttgtttattaattgaaatacagtctttattttctctattaaacattgcaattttaaaatattgggttattaccttgagttctttttaacataaagggctcgtttggaacgcnnnnnnnnnnnnnnnnnnnnnnnnnnntattatattgaattgtattttatgtaatat

SEQ ID NO: 100032 - DNA, 1032 bp, Cannabis sativa
  modified_base (998)..(1005): a, c, t, g, unknown or other
gtttagacaattaataccggcggatgtctccgccggtactatacaaaattcttgtagtgtatatataaccaaactgattataattttttacacctgttgatgctagaagctagtttcaaattaattatattaaaaaaaaaattaacaaaaattaatgaactcaagatattattttgtacttttttttataaaaaatacaatttaccaatatttaataaaatatcatcatacaatcagtaacttttaccgatcacaaaattcaaaatagtattctagatctatactttattaacaatattcatagctagattatatcaaagtttagattgtttgaatcatcaatcactaacgagtttcttttttaaaagaaaaaaacaattataattaattactgtgtattaatgtaatgaatttaaagtttttttaataggattaagttatcgtacataatgagattaagtttatttatttattaatttatattttggaaaataagcaaatgacttctcacaagagaattacacctttgcacacactcatctccctttacaaatatatcccaaccaaataataattagaatattattacaacagcatacacttgttatatatatttttcgtgacattcccgattcaaaattaattatctaagacctagtaaaaaaccctaacaagataagagacttagtatgtacaaaaggatgtcttagccccaagatatttacattcaagagcaaatctctctatgaattcggaagggcatctgtaggatttttactgttttaacctacaccaacaaaacaattttgttatcaattgacctttccttagtctaaatgaacttagaccaaaaacggcagtgctttgatcaacacgacaacaatcctactatcgtttaacctagggttagaaagacttttcaagcagaaaagtctagaacccccaaactcagcaaatataatcactacaaaaaattgctacttttagtgacaactttnnnnnnnnaacataatttttttgtgacttttagtc

SEQ ID NO: 100033 - DNA, 1880 bp, Cannabis sativa
  modified_base (1826)..(1846): a, c, t, g, unknown or other
ttgaaagccacaactcaagaaagtcacttacaagatggttacaacacgctcctcaagtgttgaaagaagatccacaacaactagccaacaaatcagcatcacgccagtcactgaagctggaactgagactactcattgcacctcatgtgtcaggaggaggccctaaaactagctccacaggtcattccccaaggccactaaatgcttcttgtactggaaccgacgaacaaattccacctagagagccacgcctcgagttggaagaccccaaggaggccaatccccaagctgtatagcttagctaaactatggctgatctacaataaaaggagcaagactcactcgacagacaacacaaatagatctaacaatggttcatggagaactggcagagcatcgaaagccaatgggttgaataggaatatcggagagctaacctgtctcaacagatcagagaagcttgtcactctaaacgcaaaactacccctttgcaagggtctttttgagttggtgagagagattccatgtcgaccaacatgtcacgtgggaattatagtgctcaaggggaaacccttaatgcacagaacacaactaccatgcctaaaaacagtgcaagcactaagaaaacaccgggtgctaaggctcctcgaaaggaagcaaatttcaagcaagagtctgaaaggactcaaacccttaaacacgattgtcagagtaaaagaccattattgggtggtttattatagttgtttttcttagtcgatccccatttttatttatcattagaatgtttataggcttataatggtggtaaaagaccattattttcgtgtttatttgtaccatacttggcacaatttctcaagtgacttagggcataatttcctattttatgatggatttaggctctctataggtatttgttggaatgtcatttatcccttatttatgacttgatggctcatttatgtagtcgtcgattgatgtatggaggatcgtgaaattagagaaaatgggcttaaacccttaaacactcttgttagtgtaagacatctgatgttcatcctcatgatgcattaaatgcatatacaatgtcttcatccttgagtgtcaggtcatcttccattagtcctcatgtgccatcctctgtatatagttcactcacgaagaggaacaaacgagagatgcttgcagtccagttggatatatttctagagatgactaatttgtcattactcttttgaaataatggactctgagagtactaaggagaaatgtcctgtaacgtggctctcattgccacctaactttctcttgaagtgccacatattttgagagaaattttaggcaacatcgaagtttttgactgttgtctatactatagctgactgttttgcactgttggctatagcatagccaacaatcaataatacataataagcttaaacaaaaataaaaaaaatccattaaacaacaaaatcaaaacatggggaaaacttggaaccagagatttgagagagagctggtaacagtatgtactaaacacgtagaggaaaatatataatcaatagtagctactaggcgtgaaaagtttaaacaattaagaaaattattatgtacacacataagcatgaatctcaagtatccaccctcacgatttcaaaatataggtacaaatatgtatgaatgaagcacataatacgaatccttaatttaatttaaaaatcaagttcaaaattccactatgagttttcactttattgttgcacatcttggtaagttcgagacaaaaaaataaaataaaaggttagtgcatgtttggcatcatnnnnnnnnnnnnnnnnnnnnnttttaaaaacagaaaattgtttttaaaaacaatt

SEQ ID NO: 100034 - DNA, 2486 bp, Cannabis sativa
tcacatcggatcacatcaccaataggtgaggtgcatcgaacacgtgccacccgttcagacaagaattcaaactaagtgaagtctacgcgcgacttcggaagtctcgtgaagatttgtggggtaaatgttatcccatttttttgcagaacaacgtggcaatatgtgctagtggcacatgtttgttatttcttatgtttgataggagaaaagttttgaacagacttcgagtaatacatctgcacgcacaaagtcttcctgaccgagcagagcaagggaagatgatccgaacaacaaatgaagtcatttctccaagtcatgcatcaagacttacttcaagattgatatcatgaagcccaagcacaaaggcaatccctacaatcatgggatcatatcaaagggatatggcaagttgtctgaatccctcatttcatgtattctagttatttaatgtatgttcttaccaattatagatattgtaagcaaaagggaaagattcactctagcatttagccctataaatagtgatctagcttcactgagaaagagatcgaaagaattgttagagagatctaagagaaaatactcagagattttattgtgagagctttgagagaggaaacattgtattctttgttctcaagtcaatacatccaaagggagtaggccattaccgaactaaaggggtcgaacctctttaaaatcttgtgttcattattggttacctattttttgctctgtcgtaattacatttctaatcccttattaactgactcagtgtcgttggctaaaagcaagatcaacatactttatctcacttctctaatgtctccatcactcatgttaagcgtttcgctaacacttttccctacaaattagaaaaattagatttcgggttagatgaagcttctatttgaattagagatcgcccttccaatcttactagccttctcttccctaagggtatcctccccctaaaatatatatatatatatatattagacaaaatatgcaaaactatcacttggttgagtatataaattagtccatagttttaatgtaattttatatcatatcaatatatatatatgtgtgtgtgtggacaatagaattaaatcgttttagttttttagttctctgaaaggtcaatcttatgaaaatgatatatatgtgaatacttaaccttgacacaaaattatggtattaatatgtatataaacaccccaacagttaaaagtattttttttctctcaactaacaatatttttggaacggtaggtcttgttggccaaactgtaatgtttctttacatattatgttattgttacgtgtattgcctgtacacttagttatatttttagttgttatttaattttcttatgtatatttttagttgtataattttatatatgttatatttaataaacaacatccttttatattaaaaatgtttaattaagtaatatttacaaaaaaaaaatataatagtattttgaaaaaaaaaaaacaagaatattatataaagtttaaaccaataaataaaatttaaaatgtcagtaagatgtatgaaagtaataatataaaaaatttataaattaaaaaaatctacttataaactatataattttattactaaaaaataatttttaaaattttaaaattttgagaaaaataaatataatattaaacatgaacatactcctaatataaaaaattaatactaaaaaaataatattacacatcaatattataagcataatacacataataatataatattaaaaacaataaaataactatagaaagaaatcttaattgtaaatttatgaaaacaataaaatattgcatgagttttgttacttacttattgtaagttttaaaaaaaaactaatagaatgatatattacgatactacacctaattagcatcatcttgaaccaaccttgggtctgttatttttctgttgtagcagcccagctagttatttctctaactaactcaagtccctatctatatatattaccttcctcatttatattgtaattatcagatactattcagaataataaagcattttcaaagcttttctctcctactctgttttcactcatatggcatcatcagaaattcaagccacttcttcaattgtgagacccaccactcgttctcaagatggcattcccccatccacgtctgagaaccaccaatcagagtccaatcccgatactgcttctgcaccaccattcgtagatacctctattgcacctcgacaaaatcccaatccaagaacacgaatctagaatgaacaagacaatcttgcaccagctcattcgtcccctgatccagttgctgacattcctcaaccccctgttcatactcgtcgttcatcactagtcgacagattggctcacgaagatgtctcaagtcctttcttcctcagcaccgcagatcatcctggcttggtcttggtttccaccattcttaataga

SEQ ID NO: 100035 - DNA, 1265 bp, Cannabis sativa
tgtccttgaacttgaacttgaactttcattcatgttcatgttggactttttttactaaaattggacaaaagactaaatcaaacaatctcaatagttcaagaggtatttttaacgatcttaaaaattcagaaagcataatttggtacatgtcaaaattcaagaaaaaaaattcataattaatataaatagtctactatttttttaatttaaaataattaataaattatgacgtcacaaagtttaggtatccatccacatgactttatgctgaaaaattagccgagatcaacggacaagggtgatcaccaaaaataaacttagaaattaagtgtaacaaagtacaaacacaagggagttgaaacttttttatttgaatatttaatttttacaaatgaaactaattagaaatataattagtatgtgatgttttaaattaatcaagagaaacaatttgaatgaaatttcaactcacaaataacaagttcatcaaaatagattatttttcatggacacaattcaagctagtcaaaagtagatgtgatcaataactttaaaaaccattatggacaaataagtcacattgctcctcaataactaaaagctatattatgtaatatttgcatgtcatctttaatcaatgagaaggaaacagaacccaaatcaaagcatgcaacccattaaatttagggaaaaacaaatcacatggctcttcattcacaaatgaagagcaatactatgtaatatttactactccctagccctaatctaaaaggttcataaccaatgaccatgtcatctttaatcaataggaaggaaatggagcacaaatccaagcaagcaacccatcacaatttgacttttacatactcaaaagattgtattaaattaaattagcaatagcttcatgtgctccatgctatattaattggagtgtttcaccttcatatgcaactatatagcactagtatcatttatttttgtgtgtaaaaattagccttagttttcattttactcacctcagagtgagagaaaagggatcatgaattttctctcaaaatcagcaatttattggtcatacactctgtttttacttctgaagttgttcattgatattggagcaactcaaacacaatgcaaggaatcaagatgtggaaatggcccctcgattcgattcccattcagactcaaagatgctcaaccgaatcactgcggctatccgggctttgagctatcttgcatgggaaaacatacagttctagagctgc

SEQ ID NO: 100036 - DNA, 2234 bp, Cannabis sativa
  modified_base (1937)..(1937): a, c, t, g, unknown or other
  modified_base (2008)..(2012): a, c, t, g, unknown or other
atctatatttatttgttatactatatgaaaactaattagtttttacagtaaatttaaaatgtaaccagcattataactttaaaataactaattagaaatttaaatgtttaccaataagttatgtgagcttttttttaaaaaaaaaaaaaaaaaattattgtaacctattagtttattaaacagacttgaaagtaatataaatatttttacaacaataaaataaaaaagtaacgtaaaaatatttaaaataataaattaatttaatataatctaaaaataaacacataagtttcaaagtaacaaaaatgtatataaaatacttggtaaataaaaaagtagtttattatattaaatgacaacttttgaaaataaaccttaaggttatccaaatgtatttttaataatagcataatataacttaaaaatagcaaattggttattaagatatttatagatatgttttagaggtaacctatctcaaattatataatttaaaaataaagttttttttaggaaaatataattaattagtttcttattatcatcaccataagtaacttacttttgaaatttcaggaaaatgattaaaaaattgaattcgggaataattttgttttaggtatattattttaaaattaaagtatttttttatgacgtggcaatgtattattataattgcaatttatttaagtatttttataaatgatttatattttaagtatattattgaaaaactctttattttgcgaatagtaaggtgcttgtagatgctttaattcttgtaattttggttttttcaaacacatttgtattttttttttttggcaatttaatttttatggttagagtcaatgacacgtgagtgtttttgttggggaggggctccttctatggacctcactaattaatgactttttttttttaataacgaacatatcattaaaatatataaataaatagagtatacaaaaaatgacatggactggggatacttcaagaaaattggatagcaaacttgaaaaaatgacatagtataatggttggtgaaaacattcaacgctaaacaagcagataattcaaaagaaaatggagacaaaaatgcatccacaaatttcgctcaatgatagtttgggccccaataaatttttctccaactcctacatttgtaaactgcaacatgatgaacaacctgaaaatacacacaaaaaaataaatagaggcaagaatctatcttatttctaaataataataaataaataaaattagaaaataaaatgttaaaataatagaaagaagaagaaaaacttagctgtgagatttaatgatctttcaaaaatcttccgaagtctccacatcttcaaaaactcacaacataacttaataacaaaacgcaacaatacataaacagaacttaacaccatacaacacaacaaaaacaataaaatagtattgaagaacgcaattcacacaatataaaaatatatacttttaagtaagaaatcaaatataagaataaaaaaaaatttaactcacataaaaacgagaaaattaaaaaaataaatataaataaatataaataaaataataataataatactaataataatagaaataaaaataataaatacaatatcataataaatacaaaatatatgaagtaacaaaaaaaaattgaaaaacttcctaataaaaacttataataaatacaaattaataaatatatatatagtaattactaatgcaaaattttagtcaagtaccaattatatcaaagagagaactacaattaatgtcatttatttaaaaaaaatattaaaaagttaaaatttaaaaaattaatataaagtaagaataaataaattaatataagttaaatatgagaataaatatagactaaaaaattggaaaaaaaaataatatatatattctatataaantgtgcctatataactgaatttttggtttatgagaaattcatagataactttttatttatatttaataaaannnnnaaatattatttatatataataaagtaataaaataaaaaataaaacaaatcccattaatatttgattaccaaacgcagtcgtacatataagagcaataacgacgatagattcgaactgatatttgattatataaatgtaagttttgattatatatttgggatctggagtttcgtttattgagtattatttgtatatggcatactgtttagaaattggtttgta

SEQ ID NO: 100037 - DNA, 1441 bp, Cannabis sativa
cttgtccaacgaggagatatctaccactttagagcataacgatttgaaaaacaaacacaaccttgtgattatctctcgaacattcttaggcaaaactgatcgaatagccacaggaagcatgtgttgcattagaacatgacaatcatgagatttcaagccagtcaaagtataggttttcgtatctacaattatatgtattaagagaatatgcccttaatttatattgataagaagtaataatatatacataaataaatacagaatatactacacaattatatgtattatgaaaaatacatttctcattcatgtgtttttcttttaaaagttcattcatgtggtttagatgaatttttgaatttgtattttgtaaaatgaatgatatatgatcaaaagtaattttaatatccttaattttatttttcttctataaaaatttaggtttcaaatcagaaatatctttaaattcaagagctaaaaagaagatgaatattatttataggaaattagataattgcaaacaactgaaagttaccatgaaaacatgttaagagcaagtataaactagagcttaccacaaaagttggccccaagagaataaaagtgagaatattctttgaatcttgagcatctatacgtaaaatccaaaaagagaacaaaactgaaggttagattctcatagaaaaagacaaccttaaaatgaagtaaaacatggcctaatctctaagtggctattgaaaaaatcaagagttctcaactcaatacaagcaaataaaacattattaagactatctaattatgcttgacattagaaactaagtgtgttcactatatatatttatatatgccaaatatcataatgaaataacatgctgcaaattgcagaaggtatctgcaaatgcatggctattttggcatattaggatgagatcaaagtttcgcattatagaaaaagttattctcatgttttgtttgtttctttaaagttataatctttaagaagatcatcaaaataattattgggatcttgaaagtacaaccaaaaagaaattataataaccactcttttccatttattaatttaaatgttagtataagtattggaataaacaaacaataagaagttgtcatagtgtgagttgtcacactcacaatcaaactcattttcacggccctataattagattcactcctctttggttgaaaactcaaaataaagcaaagcaaaagttttattatgccattactatttataagcacacctctatccatcagaagcacacattcctatgctaataatacacagcacataataataatagatatatattttcccttattttgaacaaatatatggcaaaaatcaaaaactacacataaacaggtgttattctcaatgttcaacatctattctaaaaaattatttgtttatgtttcttaa

SEQ ID NO: 100038 - DNA, 1254 bp, Cannabis sativa
gtgcatatcaaacatcgaaagcaactaatggtaaatagaaatcaaaatgtgcatatccaattcaaagtatatgttacttgtcttgggttataggtaggtatgattcccgattccattaatgtgaaaatatcaaatactattgcatttacctcaaccacgagtacccatagaagaatatgaactatctccaataatatgatagaactttaattgatatctaaactttttaaataaattcatctcagtttgcaggatccaattcaaatgttaaaaattaatagttaaaaatcataggtagggtaagagttgtttccaaaactatcctcaatgaaatgaatgactatgcaggaaggtagaaggcatactaaggaagcataaaattaaacagtttctttcttcaacgaggtattcgtattattaaaatgacttttttcatggacttgatgtccatctaaccacaaaaatctatcaccgataaatgtagctccttgcaagccactgatatacccacagaacatgattataatccaatgataaatgtattcatgttgtaaaagctagtcgctgataacatgtataaacatttaagtcgaagcattcacaatatcatccacggataatcatgtaccaataaatgtattcatactgtaaatgcttctactagccacgatatgcatttcaactcaaacattctagattctcaaatcatttcatttaagtgaaatgagaaaacagatcaacctaaaggtataaagactgcaacctattaagaggtccaactcaccttttaagtcgataaagtgatgtgagccaattacttaatcatcagctttcttcatgtaaagcaaagagtgactgttacaacattaccagctgaatcaacctaatctgataagaattgaatccattcagaaccaaaactttctctacaaacaaacatgaaacttaaaaaaagaaaacaaaaatcagttctttcaacattaaatcattcctttcattcaataatctcagataaaatccatttcttttttcctaatgaataactcctcaaaataatgatgatattgagcaacaaaataaataatcatcatcaaacaacagagaaaaatgaaaaacacaaaaaacttcgcctcaagtttctttattttttctactttcctacaacatgcaacaaacacaaatgttccaaaactagcttttctatatctttccagtccttttttctcagggaacaaacgcattaccagaaaaaaa

SEQ ID NO: 100039 - DNA, 1015 bp, Cannabis sativa
aggttataagttaattattattttatttttattaaatttccaaattaatcataaccattcaatagtactctaatggctaaaaaaaatgtaaccatgatggttacagattcaatgtaaccattgaaacttcattcttaattctttatgattacatgatgattacacttaaaaaaggttttagggagtttatctatttgggtagttttaaaattataaatttttaaagcatacttgacaataccacttcatatagtatatttaatatactaaaatttataagaattactaagtcaagtaggaagtgcataaataggaagggcataaattgaatagatttttgcaccataaggaagaataaaaaaatcttataaattaggacaacattgcattgtcatcattgagaatgcttagtaattggggtgtgactgaaattgtgataaggttcaatgatgatttaggatttctaattatgtttctattttcagaaatcaatgtataatttgagttgcgattttgtgatttgaattgctattttagttgtaattgtaattttttctataaaattcaaattaaagctatgttcattggttattatttaaaaaaaaaattattgatgaataataaaaataaggttgaaaaaataaaattcaaatcaaactatataaataataattagctaccagagaatatgcaaataacagtaaaaaattaattcttctaaaacaatgagaaaataatctaaaatatacaaataagtatttcatcacacatgaggtattctaactccatttgatagaaaacgagggggaaagaatgagagagattacatttggaacagaaacaaattaaaagaacattagaggaaaaagagaaaattagtttcgatacaatgttatgattacgataaaatgtgaaaatgggagttgggtgtgtgtatgagaaacagagtcttggaaagaaaaaggcaaagtcttattatttctttattcagtgtattgaaccttttacaagagct

SEQ ID NO: 100040 - DNA, 1536 bp, Cannabis sativa
tggatcccctccttttgccatgtccatgctatccaaccaactcctaaccttgttgcgtctttcatcacaaacaactcggtctgggatactactcgcctaaactaatgttatcctcctcatattattcaagtcattttttccattcctcttcctctcatgcctactgaagacaaccttttttggaaatttacaaaatcggggacttacttggttaagaccagttatcacttaagtcattcgtccagctcccttcctgacattccttcctcttcttcctcctctccatggtggaaatcactttggcacctaaatctcccttcaaaactaaagcactttgcgtataaagcttccatatccacccttcctacaaacaagaaccttaaaccctaaaccctaaaccctaaacccttcctacaaacaagaaccttgcccataggaaaatcacccaatcccctttgtgtatccgttgtggtagagatgttgaatctgtttcacatgccttgtttttttgcaagagtgttaaaaggatttgaaaaagtacaattttctatccctatttatctcattcaaatactttttgcttccatgaaattatttttaatattttttctaacatgagcaaagaagatgtggaattttttctttgtatagcctggtttgtttggaataacatgaacaaggaaattaggaatcagaccacagatcacgcccatgctatcctcaagcttgttgacaactacttacctgaattcaaagcagtggctactacccaaaaaatcatcttttccagctgccatgctcgctgccacagtcacatgaacaccaccaccacaaggtctcctaaagctcaataccgatgcaacaacctcgaagaaccaactcaaagctggcttaggaggaatcatttgtaacagatggaggagtagtagttgcagtagctttttctcatgaaggaggtggagatgccacaacccttgaagcaaaatcacttctttggtgttttgaagaggggttcccgctccatcaggtcaaaactgattgtaaaacagtttctgatgctatagctgctaataaagaagatttctcactcttggagatctcattacacaaattaaaatgactttgtctcacttccctaatatctcaatcaatcatgtgaagcgctccgctaactcgtttactcataagctagcaaagttggctagggttagatgaagtttcaatttggattggagttgatccttgcaatctcgttgctcttcttttctcataggcaggcccggccctaggcataggcgggctaggcccgcgcctagggcccactcattttaggggtccaaataaaaaaaatatgtatatttttaaataatttttaaaaataccattgatctttataattcgagcccaattttttttttttttgactttatttcaactcaggtaggccttactgatagggcatcattcttctatttttttttttaattttaataaaagactaattaggatttttgccccctgaactttgacatatac

SEQ ID NO: 100041 - DNA, 1626 bp, Cannabis sativa
ggcaatctatagggtaattctataattcactttcaccctaaaaatggccgtttcggtacaccctctatttgttttgacattgaagagagttttttaatctaatttggtatttcatgatcgtgtattgttgtagttatttagaacacgtataaattttcagaaaattccaaacaatttacagtactgaaaaataaggttcaaatttttattgtacaggtgaatgttttaagtaattgtttgaactttattttcagcattgtaaactattcgaaattttctgaaaatgtcttaaaagacgtacatgatcatgaaaaaaaaaatgaactaaaaatttcttttgaatgttggataaggttgtatcaaaacaatcttttaagggagtgtactatataaattttccaaactatattcctatatatctagacaagaaaagcaattagctaggatttccaaacaatgtcctaagtaaatgataacagggtagtgtgtgtgagagttggtatggaaacctacctcttcttgcagcaatttggggaggcgttcggttgttacaagactagtaatatcttcccgaagcttctcgtcttttataccagaccatgtttgatcaggcaaggccaatagaagtattgtaaggacatcaccggttgaaggatgcatacctctgcaactcccttgatcaaaggtgcacaaactacttcgccccattcgacatgaaggtaccagcatgtcaactccttgttcggttccatttgtcaatacactccctgatacaactgttacaggtctttctccatccccctttaagagtttaacatcggtttgtttacaacacatttcattcactgaacaaagtttcccacacaaaatttgtgctccttggcagcaaacctttgcagcaatctcgggtaatgtgttgtcatccccagaagatttgacttctttgcagagggaactttcggatatcaaccatttggatacatgtttgaaaagttcagtctctcttactagtttcaatacttcttcctgatattcgaaatttaatcaatggaatcagactttgccattttatcaagaatgtgaaaaacagatcaattcgaaaacaaacctttacggttagcctttccttctcttcttcactcagaattaaatttttatcctctggtatgcgaatttctgcaatccacttgatgaactctcttaaatcagcaggcggtgatataaaaattacagaaagtacgtgttgaatatcttttagatcctctaacttcaagaggagaggaacatcctctgttaagtacattgcgacactgttccaactttcgtgcctgcaactctgcaggaaaccatgcaattaaatgcagtgctaaagtcggttcagaccatatgcaaaactataatccagaagaaatcaaaaatcaaaaccacccaagatatacaaggccgaattcaagatctaccacaatccttatgctaaagttctataaaattcatactcccacaacctagtttagagattctataatcaattaattcagcctcattcccattttcctctcaaagttcaaattctatgaaattcaaagcatgtttctgtgtggataattgagaatattcctacgtcga

SEQ ID NO: 100042 - DNA, 822 bp, Cannabis sativa
aaattacttcaccctcggccatgacagattttcgcccaataagtctatgcaatgtcatttacaagatcatttctaagatgattgtgctacaatttaaagaagctctccctttggtaatctttgagacacaaagcgcttttctctctaaccgattaattaccgataatgtgcttgttgcctttgaacttgtacacaatattcagcatcgaacacgtggtaaaaaggatttttcagcactcaaattagacatgagcaaggcttttgatcgggttgaatgggtataattaagggcagtaatggacaaaatgggatttgcttagtcatggactgatctcatctttaagtgcttatcatcttctagccttacttttgcacttaatggagatacaacgggtcttgtaaaaccttccagaggccttcaccaaggggatccactatcgccctacttgttcttaatatgccctgaaggtctctcacgcttgctgcagcacgaagaatctattggaaatctccaagggttgcggataacaagacaagcgccttcaatttcgcatctccttttccccgatgacatcctactattttgtgaagcaacaaactcttctgctttagcaattcaaagggttcttgatatttaccataaagcttccggccaaatgcttaatcctcataagtcagtaatgtcattctctccaaatactcctatggcagcgttattattttttcaacaagctctcaacatgcatattagtgagtgtcatgaacgatacctcagacttccttcctactccgaccgtgacaagaaggtgctcttcagccata

SEQ ID NO: 100043 - DNA, 567 bp, Cannabis sativa
atatatatatcaataataatatgtcaacaaaaaatataaaaaatgagaataatttttatggatgtttcttaaatttaattgtataacttgaactttataagcatatgagtttcttatatatgaaaagagaaaccatattgtaaattaaaattagtatttttgtcatatgtatgcagtgcggtttgaatcatgtttattaaatttaaaaccgtactgcactgcgcagtttgggaaaaaaaaacaaacggtaactacactgcaaaagattttaaactgtattttttttttgtggtgtggtgtggtgcgggcgcgatttgtacggtatgtgcggtttgatgaatacccttgcttttaacataccactcaattagaaatagggtgtctatatatttttccactctaaaatatccttacatttcaaaagaaaaaaaatctatatctctaactctctcactcggcgttgaaccctgacctagaacccccatcgtcgaaacaaaaaacccagaaccccaatcacaagccccaccgtcctcttctctcacaggctctctcttaagtcttgtcgtc

SEQ ID NO: 100044 - DNA, 747 bp, Cannabis sativa
aaaagggaaaaagtaatagaataattaaataaataataaagtgataaaaatgtatctttatttaataataccttgtattaagggaaagaagaaaggaaaaaaaaaatgtataaatattctaggaagaaaaggagccataatttgaggaggtgtaaagatcaacctagttttcagtttaaataaaagtaaaaaaattaattatttatttatttatttttagaaagaaaaaataaaataaaagagactatgcaaaaaagtctagtagtccaataaaatttcattaatatttttagttgtgatatttttgtataaaattataataaattgacaacaagaaaattttagtccaatagattgagaatataagggctgatttttctatttttgcatgaaattataatgaatgtgaatggtgacctttaatccattatatcattgaaattgaaaatgacactatgcatttgaagcttgatgactatgcatgcaccaaattttaaaaaatatatattatttatttatttattttgttttttttttttcatgaaatgttcaatgaaaatgaggaaaaatgaaaacacccacacacaaatttagaaagaaagtaatttgtacatataatgtaagtcacaaaattgatgctattcaatttatagatgtagacacttttgttacgatttaagcactaagttttttattttaagataaaaaagagtttttttttttttttttttgttgagaaaatgtgtt

SEQ ID NO: 100045 - DNA, 2343 bp, Cannabis sativa
  modified_base (2180)..(2195): a, c, t, g, unknown or other
tctaaacttgtttaagtcaattgtctttagagttgttgacacttaattaattgatttaattctctgggtgtggccccgtcgactaggagtgttcgggagaacactgataccacgtacaaatctcttgtgtcaagttattttattttctataaatatttttatattctgcctgttctgttttgtcgttgtaaaactggtttttgcagtaactgaattacattctacttctgcagacatatacagttttatatttttgtatatattattgacatttgcaaaaactcagtttttcaggttcaatataaattcataattctagatgtgctatttatgttatatgtgaaatttcaagtttttcatattttatcctggtattagtggaacgcaacgtttggctgatagagtcactttttcttatggtttagtagtttagaaatagcgaggcaatttagatagacattaagaatgtcaggaatttagttgttttagatttgaccaaaatgctcttaggtggcatgattactttttgactaagcaagggagaaattgtcttttgccttatgttggcttttgtccattagtggattattattgagttggtgatctgatttaattaggaattatattagataaaaattaagtttactatcaattagtcaaaattagaaaaagattacacacactctctgtccaacaccttctctctatcttgacctctcaagaaactcagaagaaaactagggttttcatcttaatttctgggtgttctagctggatttggtaggatctttaagaaccaactcaaggtaagcaagatctctccctctttcttttgtatttttatggttttaagcttaagtatccatgcgattttgaggttagaatctatagggttaaaattatgttgactgtatttttagaggttgttttggaagttctttaagctaatttggactttatttgatgctagtgattgtgtttggacaaagtttgagcttaagagctcaaactttgctctttcatggtgaagtttatttcagtggtttaaggttgtttttattgcttgatttaagttcattatggtattttaggtactctggaaggtttggtacgaattggggttgatttgaggtgtgtgtgaaatttttagtagttcctaaactaaacctgttggccggttcagttttgcactgtggaaccagttgaccagttcccttggcagcacacttagaaaccaattttacggctgggattcggtttaccagttggggcagtttagggtaccctaaatttttatgtttttaatatatttagggtattattatgttatccatcgatagggaaatttttggtattaattttccaaaaaagtgatttagcgtatcactcatcagttttacaaatattgtgacttaggggcctgtaaatcgtcgagcagcagttccactcatgttgaccagcacacttgaattcagaataaaggtaagattagtataattatatgcatatgggatcacatatttggtatgcacttttatgattaccagttagattacattgaaatagtggtatcagtatatatatagatttatattggatactaatgaatgtatgtttggcttaagtactgatttacgctatcacattggtacgactagagtaccgagtataggccggtattatggtcaataatactgttgtatgaacgttctaaactcagtatcgcatgggacgcgaggatagggttatgattgggtgtgtgggcacctaattataatccgaattataaatatgttatgattatgctttatgctttttcttactgattttgttgagtcacagttattgtttgcatttttaagtaagggcaaagctaagtttgaacagtagtgagtgcaagtggatgaagattgtacatgtcagagaggttagacctagggcgtacaatctttgggacagtacgctgtattttgtatagtcgctaggcaacaacttttgtatcgaatattttgtatcacagttgtaaatattttaaatacgggatcccagtttatataaaagttatttactttcaatttaagggcaattaagtaaaattttaattaattcacaattttcaacaaaccccttggttagaaccggattgcataattaatttaaaatcacgataacacgcctannnnnnnnnnnnnnnncaatttggtatcagagccgccacgttgtctttcaaagattatcgctgttgggttttgtgccctaaataaaatccatttcaatctaatcagatttactaataaagatcataaatcacattttatgttgcatggttcagatgatttattt

SEQ ID NO: 100046 - DNA, 1185 bp, Cannabis sativa
  modified_base (258)..(290): a, c, t, g, unknown or other
ctgatgctacttttatatgtacaaaaacataaaaaaaaaaaaaaaaaattgtagcatatctggtccgatggtggtctgatgggtggaccgatggttccgatgggtgccccgataggtggtctgatgggtggcccaatgggtggcccaatgggtggcccgatgggtggtccgatggtgtaaatgggggtgatgtaaatgtgggtattttagggatatcataaaaattgtcataacctacaaatattagttattatttgnnnnnnnnnnnnnnnnnnnnnnnnnnnnnnnnnaaaaaatcaaatttcccttacatatttataggctatcacaccatttacaaatactaataagcccttacactatttttatagtataacaatacatgtattttttaattcaggttcataaaattaaattctaatagtggtactggtctaaatttgaaacatattaaaagttaggttaaatttgacacaaaatataaaatgagttaaattttatactataataaatattattttttttatttatttttttgtcactcgttagtacctttaatgactttgtacattttatttatatttttaattgaatttttatatactttcaatgtatttgctgattttcttttttactttttataaaaaataaattaatttacccctaattcattagagtataattatataatttggattaaatataacattaactcatttttgagtcaaatttagtttaaaatttacaccatctattaaagatggtataactaagactgaggacttacacactcaataagaaagaactagacagtataattaaaaaaaaaaaaagtcgtgccattgtaaatttgtaaaattttattaataagtggtgtataaaaaaaagaaatataaaataatatttattagaatacaataataaaagtaatttataaattcacaaataattaaaataattggttcctacaatttggacaagatgatttttgaagtgataaccatttgttaatacaaaagacatgaaatgagtgggagcaaggtgtcttgacaatttcttcttcttccaaaagttcatctaaacacacactacacacctcactattttccgaattttcaagtacattttcaatacttttttgaggtggcactatttgttgatgtggtagaaattccggcaaaggcg

SEQ ID NO: 100047 - DNA, 1065 bp, Cannabis sativa
aagaatgtgagaaggtgactaataattaattaaatttggtgccccgtaaattaatgagtgaagatataatataattgaatagttaatttgaaaggcatgaggggaaaatcattagtggcatgtgacatgtcgtcaaacactctttttttctttttgatatttatgcttttcctaattagaggactatatactacttctaatactactactccaccatgtgagctcaagaaaagccaacttaaagaaaaggacattcatatttcatttatatatttatatttgtctatttttctaaataaacatatttatataaatagtggtggcttaattaattaaagtgtttgtatatatagagaccacatggaggggtcatgtttttggccattaaactccaacagaaattaataaagtgaaaagatatcaaaaagaaaaagctaagctttgtgaagatggcaaacccatatggtcaccactactactaattaataaataaaatttatataaatatataaatagaatttttcatatatatatatatgcatagtatggcatatcaggtatacgtcttcttccatggcgacaaacctttttttaccaatatatatatttgaaagttttctgatgtgtatatgtgtatgtatatatataatataatgagcttagaaataaaattggacaatatcacttgtttttatgaataaattaaaattaattagctagggaagcaaagaaagataccttatttatttttttttaattccttttttgtgcaatgataattaacatttttattaggtacactaaaccacataaaacttactatatacatacacccttttgtaaatggaatatctacacaaaatttttgtattatatatacaattatacatacattgctgtataatagccagctagctcacacctcacccgaaagacctaataccatataatatatgcaaataatacattatattaatattaagctagttaattagtttagaaaaatagtaataactcctatttatatatatgagactccattatatattttcattttgtttgatt

SEQ ID NO: 100048 - DNA, 1822 bp, Cannabis sativa
tattatttttataaggttttttttattattttggtgttatttttctgaatacaaatgtaaaaagaaattaaactgtgaaacgtttgctactttgattaatggccccggtccaggacattgttagtgaaaaattttcgtcatacgtggcagctttctatttgttgtagcattctgtgacctgaaaatccagtttattggtggcgggtaacgaaaacaaattatctccttttctttaaattgttgttagagagagaaagagaaagactagttatttatttatttattttggaaaggaagagaaagtgaagttgaatgggggatctttacgctttggactttgatggagttctttgtgatagctgtggagagagctctgtttctgctgtcaaggttctgcatttactttctccttctctcctccatttgattgtctccctctagttgactgtgtcaaatgattaagtcaaagagtatgttcttaatatgtaaaatagaagaaaagaattcaatcgggcacctgcttaatcctttttttttcttttctttttcctttttttgttgggtttgatgaaagttgagtatttgatttagtttttgatgggtttattgttaggctgctaaagtaaggtggccgggtctctttgataatgtggattctaccttggagagttggattgttgaacagatgtttacagtaagctcgtctcacaattttgggcattttttcagaacctactgccccataattgatttgggttgtgaatcttatcaccatataacaggaggattttttttttaatttgattataatcttgatttggtaggtgcgacctgtggtggaaacgggatatgaaaatctgttacttgtgaggttattgctggaaatgagaataccttctattagaaaatcttcggtaggtatatatttatactcatgcaattttctggctgctgttaaaatcatggcattagtcattagatttctgtaaaattggaaaatggtaatcaagaaaatttcagtcaacctcaattttaaaaaaaaatatattagtagtgcgaactttataaatatggtttaatgtaggtttcagaagggctcacagttgaggggatattggacaattggtcgaagttgaagcctgtcatcatggaagaatgggatgagaatagggagattctgatagacctttttgggaaggtgagagacgaatggttggagaacgacttggatacttggattggcgcaaataggtatcccatttacactttttgaatttccaccatctaatttccttctagataaacacaatacagcctaaagccaaagcggatggtattatactagtactgtttgaacttggagcttcttgctttcaagtttaagatagacttttttactgcatatatctagtcaaactgttgagaaccacaagcagattcatttgagattgtcagctaactacatccctttggaaaagtgaattagatagttggaggtgattcagtgatctcaattttccatgtgtttcttttgtgaaacaaactaaattataaagatgcctcattcttgtctcttgatatgggtgaattcatattgctttaagattttcagtctcttgatatgggtggattcatattgctttaagtatgcttaaattttcagaaggggtaaatgtgctactgatcatatgatattaatgcgttaattacagattctatccaggtgttcctgatgccctaaaatttgctagctcaaggatttttattgtcacaacaaaacaggtgtgccccctatagatatttaaattagtctttcttacat

SEQ ID NO: 100049 - DNA, 862 bp, Cannabis sativa
tattttgtttttgttgtacatttatgaaaaaaaccctaatattattagatatttgaggtttaacctcttcatcaataaaattattctcattttcaaaaatatatatatttaattattcaaataaaatttaaaatattcacttaataaaaaaaaattagatttattaataggaaaaggggttatacttatgatgattgttattagtatattttgtggagctccctttcgaaacaagacttatatataacataactaactaactatggttaaagactttattgatgatgggctcttttaattgtagacagatatgactcagaagtatctcagggcattggtctccctagtgggcatcttggctctacagctgcatgtgagtattacagactactctgcataagtaaagataatagagttttgatatggggggttacaaagttttcttttaatttttggattttcctgaaattaaaatattatatttgcaatcaaaaactttaacttgtcttctattttacagaccagatataaaactaatggagcaatttaattagtggggtggagttgtcattgggtcatttaggtccaatgaccctcaatccgaccatgttagaagaagtttctttctgtctttctttttcacttttcgcgacacaacataaattctgaaacagaagcactacttaacctaaaatatttcaatttttcctcaattattaaaacaattttttttaacttattaatatatgtaaagaatgttatttttttatggttataaaattgattgattatgatacaattatttttttaaaattatattatgatattatttatcgggctttattaaatataaatatataca

SEQ ID NO: 100050 - DNA, 1048 bp, Cannabis sativa
agagagagagagagagagactggggaatagagagagggactgatgaacgacctctccaatggggctttgctagaaaaacattgttgcacctgcaagccgataccggcttttgtgctctatattctaacaacccttttcctcataggcctttcggtctctactttcttactcattgcggttcgaaacgccacctttctagtctcctttctctttctttcttctctggtcctagctttcttgttctggaacaagcgtaattggagaaccaaaggcgccatccttttcttcctcagctctcttcccgaagctgacctccgtcaggctaaagagggtcagctcgttaagattactggggtaacccctctctctctctttccttttcatgtccttttagctaattttatcatatgggtgggttttcctcgtaatgtctcttggggtccagtttaattataaccatttgtgtttaacgtcttcaagtttgttcttttgtgattaaaatggaatactatgcattgggtcctattgtgggttggttgctgaatgctgataaaatttaggaagaaagaattggaaatgaagtgatttatgttattattttcatatttatattatgcgcttctcaagaacaaaattctttaatactcattgttttattttttgctcaagaataatcattgaaaatttgatttacacttttgttacttactaaactcccctgattttaggtttggttaattctattggcaattttgtatgtctttttccgtaatgtaacaatagtagatagacttggtgactttccttcgcttaagctaagtttgagactttcaaggtccattctttattgacttacctatttgtgatgactaaaaggaattgtttgtttaaaaatacatgagtaatgaaaaaagagaaatttccctttcactttcattctgcattatacattggggattttattttggagaatccttcacataattaataaaaatgggaaaggatgactaattttgtgaaggaccctctttttaagcaacaagatttt

SEQ ID NO: 100051 - DNA, 921 bp, Cannabis sativa
  modified_base (513)..(516): a, c, t, g, unknown or other
tccccttggtcgactagtatgatgttcagaccattttttttaccagatcaactcatgcttatcgtgtgcggcaaactatacttggttcatctgttattacatgtgagtgaatgcatatcttgggcaaatattttgcgaggctagatcttctgccaaagttttgatacgatgatacatgtcacccaaacaaatgtgccacgtcacccaaacaaaattcaggatagcaaattgaatgcatctacgtaaataattgcatgttaatggagctacatacaacaatattttaagaggaaaaaggttatacaataattttcgattaatatcattagtatttcctagaattatatatttaaccatttaaatatatttgttttatataaaatatagttatgtaatcgaatttttagttaatgtttttttttttattttttacattaactttaacagaatatattattacttaataaaatattctttattaattttattatattattatatatatttaaaaannnnaattatgtagatattttatataaacaaattttaattttattatatatatttaaaaataaaaattatgtagctattttatataaagaaatttaaatttaaaatttagaacacttaaaatattatagctatttttaactacacttttaactttattagtttagctttgaattaaataagagataatttcgctcaatcagacatataatgatttaccactatatctcatttgattttattgtacatataaaatacgcatatataattaaaaaaattctaaaccccatttaaaaaattaaaaaaaatatacatacgtgtattgcacttaacatcacctaattaaaaagaaaactaatttacgtgtattgcacataacatcaaccttatatatgaaataaattatatttt

SEQ ID NO: 100052 - DNA, 1149 bp, Cannabis sativa
atctaattggatttttaaaatttgcatccgatccgatccaattatgattgaatatcttattttattggatcggttggcattgaattgaatgactttctgcgagcataaccaatgaatatgtatctctaaatagaacaatttaaacagtaaccagtacaagccatgttgatgttcaaattaatgtagcatcaaataaacttaactacgaataagtccaaatgatcttaaattatatttagtatgtataacaaaattacaagaagtgatattttatttatcttgtattgtagcataacgactaactttttcaaaagtagcaatatcttttatccttatcttttgtacattaacctgaacgaacaaaattcaatttctgtctagaaaacttggcaaagcaataaataagaaaatttcgcaaaaacattattcggacaaaattacatataaagatatatttaaataatagatctccataacaaaataatgcccaacttattaagattaaacatgtggaagcaaactattatagcttctaagagctgaatatatcatagaatgatcaaattgcgaaggtatataattaaattttgtaatgacatacggtatacatgatggtcttgcaataactatggagcagcacaacaacttgatgaaagccttggaagttctcggcggcagtggcagcaaaaacaaacggagaagtgggagaaaaaagagtgacagagaaagagagtaaaaccaatcccatccgtaaaaatatattttttttaaaaaaaatatatatttaaaacggatcggatcagatccgatccgcaaaaaattaaacgggacgattcagatctgatccaagatccaataagtatccgaatgtttcggatcagtaatgatccgtcggatcggatcactgacccgatccgaataaatggatttttttgccatgcctaattaaaatataattacattaatgttagtagttaccgaacacaaaagtaaaaataatttcaaaggagaattaataataactttagtagtgaaactctgctttttatgcatgtgtgcatgtttaagaaagggtgactataataattaggttactttgtattcctccctattgattcgattaatgataattaatgggttattgggttg

SEQ ID NO: 100053 - DNA, 975 bp, Cannabis sativa
cagcctcatgtcacttttcctacatctttatcatctactctgatgccacagttacatatgtttcagatgttcatgcagatgatgtcacagtcaccgtatatgatgcagatgatgtcgcaggtacctcaggcgtcacagatgccacaaatgatgccgatgtcatagatgccacaaatactgatacaacaaatgcaacaaccaccgcagatcctaagagtataacctacacctttgcaacagactcgagggaatgagaatggtggtgatgataatgagtccacatcttacatgttaagtttattaattttgttagtatgaacatttatgaactcttttagtataaactcttttaaatataaaaataatgtttagtattaaatataaaaataatgtatgaactcttttagtattaaaaataaaatatttagttttaaaataaattattgaataaaaaaatgtgatagtaaaaaaatttaatatttaatttataaataaatttaattattcttaaaatgatctcaggaacgacagtttcattcttgataacaaaacagtcgttataatgtgtaaaaaacaagtcggtggcttaattttttggaacaacttttacttttcaggaacaactcatttttacgctaattattttagcatcaagcacgtcgctatattttgttcttgatatcaatttttaagcacgagttatcaggaataaaatatcaagagtgactagtcgtgccaaataatcttctagaacgaattattagaagattttttagaataaaaaaagtcgctctttatgacagtttttactatagtgccacatgaggtttttggacattttcataagtaagggaaattacaatgtaatttatttgtttttatgttgatgttattttttttcttaatatataaaattaaaaaaaaaaaagaaaagtcaggacgaatcaaattcgatctgaataagtcgggtcggat

SEQ ID NO: 100054 - DNA, 1492 bp, Cannabis sativa
tcatcaataaaaagatacccaaaactaaattcacttagtatgagttccagacaacacacaaaaagtccgcatgcaattgcaaacacaaagttgaactgtgaatcgaagtgtacagtgtagaagtttaaagaacgcaaatataagcaattgagtttgagccaatattggcatactcttttctcaaatgatcctcgtaaccaaacagcaatataaaatgaatttatacttagccagttgacggaaatccaattcagtgtttccccgaaaaggcacacaagaaataaaatcatgaattgtgagatggatttggtacacctctttattcatctagatcacatgttttagatatgattcgcatcgcatgttttgcatataactaagatacttaggctatgtgaaaacccaattgaaccgcagatcgcaagaagagaatcaaggctcttaattataactcaccaaggtgactgggtcagcacaataaattttaccgcaacctttatccaagaacagaatccaagatccacaatacaatccaaaagatatttaaactagcaaaacccacggagaaagagaaatttagggtttctacgtagctaaacaactaacacacaaacaacctcattcatttcagaatcaaattgtaacagaacaataaacaaaaatcgcagctcaaaggccatacctaaaaggaacggtgcgaacggcttcaactacagagtcagaagtacaagttttgaacagtaaagaaaattttccaatttccccgagaaagggaaaaacaaaaaaaaatgaaaaattgacgagaaacaggctaaatactaatagaacacttcttcttcttattattattattattattaaattatgtaactcggaggtattatttaacacctgaaaagcatgtgagccattggatttacggaggaaataaatttatggtatccaagggtgagtatacactcatgtaaagtaggggtatatatgctagactagaaaattattgtggtccaatagaaatatcaaaccaacaaaatacaactcaatgacaaataatataaaagacaaaattatggagtaaataatgttacaacattaaacaaaatatacacataaaatagagaatagatatgaagagagggattacaactcaaaccaataagctacacatgaaacacaatatataaatagcataaatataaaagagatgtgaaagaaatctcaacaccacatacaccacaagtgtataatagggaaatcacaaaacttgaacaaggtcttacacttttgtctaaaagcttatttccccctaccacaagcacttagggaaaagaaaagaatggaaatagctagctttctggatttatcaagcctaaaatattttcagcaatgtgctctctatttatagtgttttgatgatcacattttgaaaatcaaagtctcttcaccacatggctgttaccagtactttaattggtgtttaatgagataaaaa

SEQ ID NO: 100055 - DNA, 797 bp, Cannabis sativa
ttactgctagttaaaaaattcaaacatgaagtcaattcgtttaggagcggattgaatttttacacatatatcattttacaaattctaaaagtaagccaaagagtaaaataatagaacatcttaattaaatacatttaatgatatttgtgtaaaaatttgatttacatttagttaactccctttacacatttttttaaatacatatataaaatgaaaataaaatatattttaatattaacacaaaataaataaaacaaaaaaattatatgaaattaaaaaaaatatatttatgtaaacacatttagatcattattaaaattaatacaaaatgatgtgaaaaaataactaaaattaagagtaaatttttaaaatttattttatataatatttaagtgcattaattaattttatgggtacaataaagctccccaactattatctatttaatacatactctcaaaagaaaaaagaaaagaaaaaaaaaaaaaaaaagacaaatttcggtatttaagtactgtgatatttacttccattttaatccagaaatatttacgaaattctttttcttttgcttcaaacaatatgttccaagaaaaagaagtactgaatcccgaatattaatgtgtactaagttaatacaaatttgcttgttcccaaaaaaaaaaaaaaaacaaatttggtatataattattgtattgagattatgtatcaccattttttttaatcaaatgtactgagatatgtatcaacattttagttcagaaaaaaaaaaaagtaaaaaataatagacaaaatga

SEQ ID NO: 100056 - DNA, 657 bp, Cannabis sativa
cctaacttccaaagccagccatatcttacatatagattgaaatatgggaaaagtaaagaaataaaaccaacgcaagtggctgagttctccaaaagctttgcaagagcagtatagtttgggggaagtttgccgattagagttcaacatcattcaggagataacttgatatgcatagtggaaaagttggtgtctattttctcctcttctgattcgggtgtaagtagatgtcttcttctcaactatattggctgtgtatttgatgctatttggaactagagaaatgctttctgcattaaagatactcctgtaagtcctttcctggctttgaagttagctggaaaaaagttctttgatctctagaatttttcttttaggaaggactttgataggtgtaaccacacagtagaaaacattaggaatgatgtgattcaagttccagcgatcaaacaagtgtgccagattcttttcacggatgcatcatgggtgaagggagaagcaggtttagctgccattagtgtcaacatgtcgtctagctgctggtgtgtaaagtctcaaaagattcagacaagttcagccttggaaggagaattaagagccattcttcatgctctgaactgggcagttgagtcaaggtgggaagaggtgctcattctatct

SEQ ID NO: 100057 - DNA, 1486 bp, Cannabis sativa
  modified_base (42)..(57): a, c, t, g, unknown or other
acgacgctcttccgatctgagctgcacagtacgtttaaaaannnnnnnnnnnnnnnnagatagttagggtgttacacaaaagcaactcctggattaggatcagaagtggtgattgagtttcctttgtggttttcttcttgggtaacaaggtgaaaaaccctgttgatttatggtaagggatcaataatcaatatgcttccacgaacttgagagaaagaatcggaaagccccatgagaaatgacatgatatgttccatgtggtggtgttcttgaagcttcttgacaccaccacaggtgcaaccgttgcatacacaagtaggtctatagttcgacaacagttcccatattgtttttaactttgtgtaatgcatactcacagtctggttctcttgcttcaagttcatcaaactcttcctcaaattgtatatatgaggaccatttctttaatgaaatcggaccttgagatcggaccatatagcagtagctgattcatcatataaaatgctagaggaaatttctttagacacagaatttaaaatccaagaaatcacaatgttattgttcctaaaccaagtattgtacataagagtttcagaggagggaggtttgggaatggtaccgtccaaaaaaccgagtttatttttgactgagatggccaagatcatagctctactccaagacatgtaattgtcttgaccagtaagaagttgagaaacgagaacattaccaggattgtctccatggtgcaagtagtacaggtgtgaagaatcttcaagatgggttctttgttgaacaacctgttgattcaggtgagtctgtaacgtcgaattagagggatcgccaatcatggcaggtattccgtcattgtctacatcatgagcggagctttgattatcagtagccattgaagagtcgaagcaagatcagttggaagaacaacggatttgagaatcgaaagaaacaaccagacagagcataacagagctcagcggtgtaacgtcgccggagaagaagcatggcgagaaggaagaaagaacagatcaagggaaagcattcctttcccgctctgataccatattggggaattgagaaagaatgaaaagattttattagaactgaatgaataaaattacagaggggaatagagtatttatactacataacattactaacatcatccaaacaaacttaactaactccagctgacattacaaacaaacttaactaaaacgatgctaaagaatcagttaatacagttagagacaaaggggacaaaaaaattaattgtaagtaaccgatattaacagaaaacaaaccgagctacaggactgaagctaaagtcttaatacaagtgaaaaaaataagaaacttacaaaaatattagaatttaggttaacttttacaaaaatactgtcacaccgaaatattttcaaatttactgtgtttttataaaataccagtaaaacacaaagcagaacaactcaaa

SEQ ID NO: 100058 - DNA, 1950 bp, Cannabis sativa
  modified_base (1119)..(1121): a, c, t, g, unknown or other
gagaaaatgttaagccctcaaaaattagaaaaaatagaataaaaaagatagagaatgccacctaaatcttttgatgctttcctttatatatattgatatatattgattagtcacgtcggtatttggattggagattaattagtcatttaaaattattattattaaggcaaagacttaatatcacgtggctatttgcatggtagaaagattagtcaattataattataatgacattagattagttataataacaatgtttagattccttaaattagaataaaaaatattattactctaccttattaattaattagtttaagcaagtacatcgatatatacatcccttattcttatctattcagaaaaatctaattattttatagtcacgtacgttatatatatggttgttaaagttttttggtgtgtaattttttttgaatttttcaaaattttacaagatgtgtcttaaataattaaaatatacacgttcataaaaaaataaaaaaaaataaaactatttttttttttctaaatactaatataaataaaaaggatcaatgtatcagtgcataattaattaatatggtagagtaacatcttttgttctgattatttaaagaatctaaacattgttgtatatatatatacttttgtacttcatgtgcatatcatgggtatatgttggtcaatgataataaattatttaagaaagacttgaagaaggctgtgatctatgtttgcctatattataaatagtataagatctaatcaaacaaatcacacacattaatccttaatggttcattaatcatccactaattaaaaaacagaagaaagaaaatggctcaagggaactattattgctcatatccgattaatataggtaaggcttctactccatatattttcagtagtactcttataacattatatatttatatattagttaaagaaatatcctcaaatatattatattccaattattttcaatgaaatattgttaattgtaaaaaaggtgtatagattcatgtcaattaaatttgtgtcggtttaattcatatatatgctattcatcattatctttatatattcattaagatttttattattattattatnnntattattattattattttgctaatattattgagactgaattagtttagttaaataaaatttacagttaaaaaaatatattttaacttttatttattatttgatggtgtgttaacataattaattattatataattattaattattaaatatatataaatatatagatacagataaggagaagggaggaagcatcggtttcttctcggcataccgaccgccagtgccattagacatatattcatccccacagtttcctctgtcatcatgtgaaagggagatttttatgactgataggaatcactacaattacaatggccaagccattccatcaattgctcttaaaaaaattctcactcgccctaaattagcttgtcaaggctttaatgcggctgacgttgactcaggtcgtctttcgggcatgatttttgtgtctgaacgcgaccatcttgaaaagctttacatagcttttcgcttcaatgatagagttaaaatcttttgtttcgctgatgtatatggcacatttgatggtgttcgtatggaggatagaggatgtgttgctggtgattatcttgtttatgtttctactaaggatgatcccggtaaacgtcgtcaaccatggactgctgtctacaaaactcatcttatcactgcccaaactagacgtcttaccccattaggttatttgttacacttttctattgacacaaaaagatttttatgtcaactttttttatatcaaattatagggaaatctataatgcaccccttaaaagggatacaccgatacatctctatctgttttaatatccaaaataattttttagtcaa

SEQ ID NO: 100059 - DNA, 1101 bp, Cannabis sativa
caccacattagcttgctaatggggctcttaagtgtcgcctatgttttgcactattgcatgggcttggcgcacccctccaacttagttgaaactctttacctctttttggtgtccatgagctgagaagctcatttgtacaaaattggtatgctcaaacctcataacaaacaaaacaactataaaattcttcttgtttgagctataattttttattattctttctttctttcatttttcagtattcatcaagcttcaagaaattttcggctttcaaaatgatgttaaatatatcatcaagttttgtttttataactcagactaacatctactcaactagcaaatctttggtaagaagacaattaatttcataatggtatgcaatgctagaagaaagcaagcataccttgtgttgttgtctttggggttttttgccaacagtctcccaaccatcattattgctttcctcatcatcatcatcctaaatgaaaacaattgagagaataaagaaaatgaaagatatttcatgatgttttccaccaaactaataacacattgcactattctggatgatcaaacaaacctttctactccgaccgctttcctgatgtctttcttcaccagcttcatactgcccatatgaggcctgaatttcagaagatcaacaatcaattaatgtctaatgattgatacaatgcagaagtcaagccatcattccagtaaaccattcataaagacaattaaattctgaggtgtctctaactctaataattgttttctcaaaaattaaaaaacataattgcaaaaatatagtttaaattcttgttgatttcaatattttaagtttcttctccaaatttttgttttcaagccaaaaaaatagatccattttagttccttgttctaaattatctacacatctaagaaaaagaaaaatttgaattctatgaaaatggaactaaccttctgggttctccttggaggtcttgaatccacattaggccaatcttcttgcctatgatcactcataccctgcaaaaaccacattttcaattcaaatttcagattcaaaaaaattaaaatctgatccaatccaatccaatc

SEQ ID NO: 100060 - DNA, 1586 bp, Cannabis sativa
aaaactattttcagtaccagtttcattattctgcatttaattaatcacttaattaaataattaaactggaaatattaaaatacgaaatttcattctctaatttgttcagactacgaaggttgtgcttgagtattgattgttggcattctctgcaatatagtaggtggagttggaccacactagatccttatttactcaattcttccttcttgattaaagtacttctagaataattgctatgcaattgcaacattaactgattccgacgcaaaattataactttcatttattttatatgtccttattactttgtttataatttcctttcatttgaatactgccggttgatttttcatctctcttttagagttatgagacattattataggttgcatttgatgagttattagttgagggtctgacccactcggttgggcaggctcataatgaattgaagttctattcattttagcttacatgtcagccctttcagccataaatttttgcatagtgcgatgaacatcctcttgatgctaccaattttcttctcgatcatgctgacatttttctttggctgcacgttgctcctgctggaatctttccactgtgagacgttacatctctttgttgtgcttgtcccttgcagtaattctctgactcatctctcttatttctaacgccagtgcagcagtcaaatccatgactggattcaatgtatccccttcactcgaatttgttgctttctctgatacctttttcgatcccatcttagttcgtattcttagcttcaacttttcgttcaagagattcccacaaacggtgccagctgttgatgccaaaaattagctcaacaataaattgttattaagactttgaattctttacaccatgtttgatctagtcaaattaaattcccaattgatttatacaattctcctttcagttctcctaatcaggtttaggtcacttgcttcttgagctcaagtgtgaatttaagagtgtattccgacagagtttcaactagtctggtgtgatcaagaatttgtctactttttgaatgagggaattttctattcataggcgggaagaaatgcttgcttccttctctttttccgttctgatttgtccacatgcattaaatatcgtctgctactcatcgcactttctctttttgcttttggagctcttcaagcgcgtcattctcttcctctccaagctctgcttctcatctctctctatttagagctctactcttccgcctttgagctttctgctttgcttcctttctttaatgaaaaagagtatttctttctatgacctaccatattacagtttcggttctctttcctcattttaacctcctgaaattacttatttaccctcaaaattatttttatctcttacatgttttattattgtttccatatttttttttttttgttgttttcatattattttcataggacacaataaaattgtaataaaaaactgtaaaattaaaaatatatataaaaatgttaataaaaaatatttgacctcaaaattattaaaattgtgacaaaaatagtattttgtgtacatttctt

SEQ ID NO: 100061 - DNA, 1099 bp, Cannabis sativa
ctctctctctctcttatatatatagccaaaaacccaataaaaaatcaaaaaaggaaaaacccaactgggaattacgggtgattgattgacccaaatgaaaattaagagttattaatagcaacaaatattagataacaagaacaaatatgtaaagattgagtctttgatatctcatttcatatctcatattctcatagatagaggagatgtgtaatggaggagagagagagattaagagagagaagggcccttgaagcaagacaacaaccaccttatatggcagaagtttccaaaatgtggattacgctttaacgtaacccataatatatatacacatattattttattattgcattaatttgcatgaaaggtaattaataaataataagtaaagttttttatttttatcagagttatttgtcgcgttaatagataaatttaatttttaattataaataaatatatatttaatttttaattatagataaatatttaagtctaatttttaacggtaagtatttagttattaaattagattattatttacatgttatttattttattagtatatttttattgtcatgtcatgtgttaattaactcgacacttaaagttttaaaattataatttaataatgagaaattgaacttaagtatttgtaattaattaatgatattttttaaaattgagatatgattagttattatttgagttatggtttcaattcttttaataaaaccttaaatttggagagaactgtatctatcaagattgtttttttttttgctacaaaaaatattgtttttttcaataaaagaattgtttttttttaataatatgtgatgtgtgtttattatatatttattatttcatgtcatatataaaaattgtagctttcaagcagataatcttaaaaattgtgcatttcaattaaataatcttaaaaattgtatcattcaaataaatgatcttaaaaattgcatttttaagaatcataaaaaattgattaaaaacaatgtattttttaaaatctcaatttatatgcaagttaattatgaaaaaatgagatgagactaaatttatggctattataaatgtg

SEQ ID NO: 100062 - DNA, 1012 bp, Cannabis sativa
  modified_base (783)..(783): a, c, t, g, unknown or other
gtaaaataatttccaacagttctgcccattgccaattttcgaaatgagacccttgtgcaacaactcttttccccaaaaaatgctacgccaaacaaaagaaggagagtgacccagggagcaattaaggaaaaaagagtttgggtagtatctggctgttaaaatttttgccagagttgagtttggatgtttgaggatgcgccaagcttgtttagcaagcagagcttgattgaagtgaacgagggaacgaaagccaaggcctccatcttttttggatttacaaagcttttgccaactttgccagtgagtctttggacgattattctcattgaaactccacaaaaagttagccataatagacttaagagaatgacaagtggcattggaagacggaaacaagccatggtgtaagtgggaatcgcctgaataacggatttaatgagcgtttttttaccccctttagaaaaaactttgtacttccaattattaaggtggccccacactttatcattgaggtagtgaaagacttgattgttcaaggagacccaagtatttttcaaaagacgatctcagcagaatatacatgtactccgaaatcagagtgtattgcactcactattatttatatatatatcttttctatataaagtgtgtctatataaatgaattcttggtttatgataaattcatgggtgactttttatttatatataataaaataataaaataaaaataaaacaataatttatgagaaattcataagtgactttttatttatatataatnaaataataaaataaaaataaaacaaatcccattaatatttgattacgaaatgcatataataaaataaaaataaagcaaatcccattaatatttgattacaaaaagcaatcccattaatatcaaggactgttacctctccgcttgatgttattaaaatcagattccaagtttattttgattatgatcggaactcttatttaggcaaagtgttagactttcttgttatgga

SEQ ID NO: 100063 - DNA, 2052 bp, Cannabis sativa
ttattattgtatctcacttgttgtatcattgtatctcacttatttttacgtcactccattatactttttctttatatattgattttttaattatggcctcttttatagtagtgaataaaaaactcactatacatgttatgttatatagtgtcattattcgcggcattgttagtttgtttatttacaactttaataattggataaattttatgtttagtctagctgataaaagaaacaataaaaatacagaggtttttcttttgaaaaacttacacaaaataatatttttggtaaaattttaacatttttatggtcaaataattttattttattttttacatttgaattataattttgcgacatgtgataaaaataacatgcaaaaaaaaaaaaaagtaatataaaaataagagaaaagcaacatacaaatagcaagaaaataacgtgaaaaaacttaatagtgtatattgttataggatagatttttcacctaaaatagcaagtatagtctcatatttaattgacatgtagacctagttccaatagaaaaaggattacgaatcaagggtgtaaaccctgatagaatttttcttgcataataaaaatatacaagaaggtgtgatcgagataggggtcaagtcatacactatgtgtcgtatagtaaatagaataaaagagaaattagcacgactgcgacatatatcgaatatatgcgatgacctagtgttgttagtaaaaacctatgtaaaaattgcatatttatggcaattggtccaaatgactactgtacgcaataactcatcatggaccccacgaattttgtgctgtcagcatgtgaatgcccaatacgtgattagtataatcacatgcattctataatatgaaacatcaatagcttctcgcatcaaccccaaagggtttatgtgtctagcgcagatggttcaaatatccaatacatgcggtaactcgagtgaacccacaagtttgcatattaccaagaatacgaactgtcaatgtgtgattaaagtagtcgcacctgtttgagtattaaataagaacaattgaaattattcttacatttatttcataaatatttttcatttcaattaagtgtaactaatgttgtaacgatcataactggtaggttatgtaactgaatgatcactttacttctatataaaaaaagtgatctgatacgaataaacgatcataatttatctttttaatgtggactaagcacaccaagctctagctaaacaactataatttttttgtgtcttttatatacttgtttacattctattactaactattttacttttagtattagccaatctatgtgaatactcgcaattcagcttgtgaatgttctggtatagcttaaattctcacagttttaggtgttgtctatttttttctgacaacatttggcgctagaagaaaagtgtttcaataatattctatgactttagaggaagatcacaatggctacgaaccaaaattagaatgttaacagcaacatcaacattaatgaaatcactgtcaatggaggggctactaatatttgtccaccaatggcagagcttcaggtttgaactcaacttttgatatcacttttggtggagttggccgaactaacattgtaataacttaaaaatgagatgaatatgaattagcaatcttaattaacacaattaaatattaatgtgaaattatattattatataattaattatgtattattgtatgtgaatattgagtttaagtctccattttataggggatttttttgtaattttgacctaatgagggtaaaagtgtaattttattatactatgtactaatagactacattattatagtgtatttgttttgaggtattacatgtaatttttgacaagttagtgcggtgtaatttagtattttggttcagatagagttcggggtccaaatatgtgaaattatgtagtacggataattataaatatatgtgattacatttagggaagttatatttacaccccatataataataattacaccctattatta

SEQ ID NO: 100064 - DNA, 2393 bp, Cannabis sativa
  modified_base (436)..(452): a, c, t, g, unknown or other
tggtatttacccttaatttaattactctctctttctatattctcaatcatcattctcttttcttcaaatctcctaatttttttaccctttaggttagaaatgcaatactaatttactataactaaatgaattaaagagttaatattaagtgaaaattattataagaattggttttttataaaataaatagcatttagtttgtgatattaagaatattaagttttaaaataaaaattaaaaataaatataatgtatctgaaccctctacgtgtccatatttatgaggtaattaacaaaagtagtaataacggatgtaaaaaaataataacattaagtatttttgtctcaaaaaataaaaataaaatatttaagtatataaaatctaaaacattaatattcatgccataatttaccgtaataataataataataatannnnnnnnnnnnnnnnnaataataataataataatattgatctagaaaaataaaaaacaaataatctaacccacttttggattcgtggtttatatgcaaataaccaaaatcactttctcgaaaataacaaactccacttctattcaaagtacgtaattacttctttagaaagagaaaaaatagtataaatatttatatatatatatattttaaaactaacttgaaaatgatcttgcaagattaattattgaattgaattcatgtactgcttacaaaaataattatttaatatatgaatgaatgtatattgatatatatatatatgtattattattagttaatgtaaattttgaatctttctgttaatgtttacagtgtaattagttggaattattgtgtatttttaaaaaagtgcctgtactttttcatttatatagagagagcaaattcatgcatataagatacataatatctaaaaaatatatattggagagatgggtaggttacagattaaaagatatatatatatataaaaaaaaattatttatattataaatacaattgtatatgatctactttactttacagtcatggatttagtgatactaatacaattatacataaaaaaatattgaagtgttgtagtacaagtactatatatactagctactactttaccaggaagattacgatcatatatatatatatacatatatattattatttaaaaagtcttttcttatcatgagtttcgaacatgaaaaatataaaggtgatgtatatatataagtaataattaaactcataattgagcaaagagagagagaataaatgattttattaaggcacgtttggtcatgttgggtgtgtttttgtgaaaaagaaaggtttttggggcccttatataaattaatattattagtctttaaaaataaataaatgaaaaattaattaattaattaaaaggaaaagtcactaaaaatttcagctttttggagcacttcccatgcccctctttataggcccctattccttccttcacaaccccacatatatatataaattttaattaattatttaaattatattatataatttttttattatttctagtaaattataatttaattattatgtggttaattgggtactacatatggtgagattatatattatgtaaaaacgaaagaagtaattattatacaatagtaaacaagggagtatcatctaactaaatacacaatttatgtcaaccaaaaaaatatattttgctaatttatgagtattaatatttgcagatctaaaatacacaaaagatcttcacttttaggaaattagccacaaaattcttaatattagtaaaaataataaaaatagaaaaactatatttaaagaagattgtaatcctttttctaatgatgtaacatatttttttcaattattttaattaaatgtatatatatattgtaaattaaatctagtctcataaactcatgtcttagccaaaatttatatgtttgatttcctcaaactttatttacgtgataatcattaccaaaattgagaaatacgtataaatattctgatcacatatatcgatcaattacattattttataataataacaatttcataataaagttatgttatatttaatatatagaattgtacatattcaaccatatatatattttttttatgaaattgttattattataatcaagattaattaatgtaataacttttttctacacatgcatgtccaagaacgtttgacctagtaaaatgtatatagacgaaaaatatgtatatatattttttttaaaaagaaggatataaagtttaaaaatagccgtttatatatatattgcatgcacattattattattattattattattattattatttgggtaggaagaaagggaacgtgatgttggactgctttttcagcggca

SEQ ID NO: 100065 - DNA, 1706 bp, Cannabis sativa
aaatttgacacaaaatttgctatgtgctaaatttacatcactttttggcacaccattggagtacactttttgctaaattagctatattttagtttaacgccacttatttgcatctccattggagatgctcttagaggcaactgctaagacaaaaataattagcgaggatgtaagggtaatggcccttccagccttgctcaaagaaatgagtcctttgtggttcgactttcatctcaagttagtcttcactataaatgactttttggatagagtagatgactttatcaagcttgaagaagatatcactcgagccaagggctcgaaatctaaaaagaagaaattgccacactcgatattgatcctaagatgatgatcaattgtcaaagagttttatcatagaataacttaaaaaatattttatgtgttttacttgtatgcactcatgcatcacgtttacaattatttcaaaataatatttattatgttatctttctttatttcaatcatgtctactatgtcaaatccccttactgctttactagcagttaaaaaactgaatgttgaaaattttatgaaatagaaatctaatctgaatttgatgctggtttgtgaaaactacaaatttgtcctaacggaagagcgttctgaggagctcgctgccaatgcccttaaaaatgtttaagacatatatgactgttggattcaatctaacaacaaggctaaatgcttcatgcttgttacaataaacgatgttctgtgtaagacgcatgaacaaatagagaatgcatctcaaataatgaattctctacaagccatgtttgagcagcattctaatcaaacaagacatgatgttactcatagttacatgaattgtaagatgaagaaggctgtccctcttagaacttatgtattaacatgattgagcttatgcatgaagaagggacacacgaggctatcattgatgaaaagactcaattgagtatgattcttgagttactatctccttgcttcaaagctttcaccacgaactatgtaatgaacaagctagagttcaacatgactcaattattgaccgagttgaccatgtttaagaaccttaacaatgataagtccaagaaaggtgaatcaaatattgttgaagtaaaatccagctctccttcttcttcagacaagaaaagaaaatggaacagtaaggacaacaacaatggcaagcctaaattgaaaggcaagaaggcaccaaatgttaagattttatacactaaataaaagccatcttaatatataatcttatatgctattaataaaagattagaaatcatttaagtttacatgttattttcatgtttaatgtttaatatataatttctgataaatcctaaacatgtaattattcatgattacagtgatgtcatcatagtgaaaattaattgtgattatatacttcaatgtttaagttccatgatttatcagtaaactagatttagatggacatgataatcagtgataaagtatacctacactcggataagtggtatgacctttctagggtattagtaaaatagtctagtattggatgtatggagtatacatcagacttgactgatattgaacttgaataagatatcataaacttaccgttatatctttcttagtcaatatcacttagttgatcttagatcaatagatcttaatattgagatggttag

SEQ ID NO: 100066 - DNA, 932 bp, Cannabis sativa
ttgccaaaaaaggacctaacaaagttcaaatttttaagtaagtttttatttttcttattttttttaaatttattaaaatatattatttttataaataaaagttgggtctcataaaagtctggcacggcccgtataaaaatatggttcattctaggcccatattttaagaattaggccataacagtctatgaattcaaattgttcgtgtcaggtccgtgctttaataaattagcttatttttgttatatgtgccgacctattttttattaaatcagttgatttttttttttttatatatatatatatatcataatacggtttataacaaaattgttatttttttttcctattttttaaactaatttttaaaggttttaatttctaatttttgaatcataaatgataatattattgtaattttatatttttgagtaactgaatttttgaaagaccatttctagtttttatctttttaattttttttaaaaaaagtattttatatttatacttttatttttattattaacaaaccacatcaacctagagtgtcttataaattattttttttacaagtaaaaaaaataatttataaatattatacattatttttatcaaatgcgaataaattaataattatttttaaatttttgatatgttatgtaaaagtttctataccaaatatagaatgaattggcgtagagaactttttaaaagaaaagtgatgaataaaaaaaatgaaactttgacataaattttaggttaattaggatttttatctcctaaactttaatatgtaccaaatttttctccctaaatttttctagtctttaaaaattcccccgaactattaagattgttagatttaatgacttttttctaatttcatttaattttagagtaatttgcgacaaaaatacttaagttttctcccg

SEQ ID NO: 100067 - DNA, 1216 bp, Cannabis sativa
  modified_base (50)..(51): a, c, t, g, unknown or other
cttctccgagaggcatgttaaatgctgatccttttgattaaggagacttnntcgaattatctcaaagtcttgcttcttcaatctacgtgttacagtaagattggtccacgtatttttgacaaaataaagggcaacaataataattgtggcttaacttcatgtaaaattttgttaattataacatttctatagattttatagtaactatttatgtaaaaaataaaaactaaacggtaaaacttgattagtatataattttgttgttaattacttttaaattatattttacatatgtaatcaacgatcaaaaaaattaaaactttcctatttttgttattaaatatttttttttttaatttaaacggtttaattagttaatttatcttgtgttgattatgctcgatgtagagtatttccatttaattttcaaaaaaataaaaatatatatttttttttttctatgattcatgattattttgagtttttattttcactttcaatatggttcattgcattgcattgatggtgttttattacatcaatctaatagaaatctttctttaaaaattcaataaatgctgaataattaaaataactaaataaaaaatatataaaaaaaatcaatttaattattaaactatagtaagtattaatctttttcttgtaaaatttatcatatacatactatacttatggttatggtcatatttaatgtacaacaccgccacaacataaattactttttcctttttttggttagagcaaacataaattacttggaaaaaataattttccatgtgatattaaataattttcaattattaatgagtgtttattttcatttatacttactgacaattttttttaactaaataaatagataccttttctattccacactcaaacactagcagaagaagactcaggtgactagtcattaacagtaggaatagaaattggtgggtaatatgcagtaaatgttgtattttaccgtctcaatctcgttatactgatgttggtctaattaagtatcaaatcttatataacttaaaaaaatagttttttataaaatatcactaaccaatcgtgaagtactacctatagaaagtattagacactactgatactcaataataatgctcttaaacatcctcgtttccattcccatatattcttcatttaagacgggattgaagatccccgttgagctggtaat

SEQ ID NO: 100068 - DNA, 1830 bp, Cannabis sativa
gttccaatacgttttccccatgcgacattaaatgcgaggtgattgctcaatagggttcagtacctcccggagctgccttaatacagccttggcctccggaagcatagaggtcattctcatatcttctccgggagtcatcatcccagagacactcttctattgttcaagacttggatgatttccttaggagctgagcctctcagctccacgtgtcgtctttataccggtccatgtattttgggcaaaattacgggcaatatttacccccaagccttgtttggtgtagagtaaatgaggcttgtttgatgcctctggttgactcatcgatttcatggcacgtgctttgggcatgtgagctgcatttatgatagtcatcattaacatttatttccttttgcaagcaacgatttgcttcccgtccattaatgacccgacgcatttaatcggtgttagaagaatactcaagcgtttttagcccccctgatgagcatgtatcccaaccgttggatctgcagaatgcgaaccgattgtgattcctactgtacgatggcgcgtgatcacagctgctttgcacctgttccagcctataaaagccaacctttctccttcatttggttactttcaccactttgccatttctccacaagaacacctttgagaaaaaatttcagaaaccatagatttcctactgctattcctccatcgctggcagtccacattttatcgccgatcaacaccaacccccagttttcatccttcacgtaagttttcttgacactttatgtctttactgtttacttacacgctagggcaaaactttttggttaagtctttgatatttgggaaataactgtggctaagtatgttacgtggtgtataggctctcctttatttgtgtttcattatttttcctccttctactttgcaatcgatccctctgtcgaaagattatatagggtatggggtaatttttgttcccacattctgcgttttttactttccctctgctttcgctgcttttgagatttttacacccgatgtttgctaaggaaaatcctttgggtttccatctttggcaaacatccggagggggcctctttccagcggtaaggggaccctcattccctcctttaacactagggtttggtttgggggctaactgctggattctttctttttacagaaccaaaatgtctactcctacatctggaaccaaatcttctcggaagggggcggttaccctggccaccctagaggaagtaatgaagggtctggtcacccaggagaactatacttgccgttccaacggttgggaggcggatgagctttgctccaccctgatctgtgcccatcagttggagaaaattgtgactgtagctggcattaagccgtccgcgtatggggtctttcatcgcttgcctcgggacgccaaacccatcttatgtccggggccatgcttccccttcaagactaatttataaatttccttgtttttgtcggccttgctttatggcacttgatctctcgtacttactccttttacttgtattgccagattgctgcagagaccggttgccactccaagactttgattgatcatgggtacgtcatgtctgaattcaggggcatggatgaggccatgaagagtctaagagactttgcggctgagaggaaggctttctgggaggaggtccagcaaagggaggctcgggcagagctgaggcatcaagaggcgctgaaggccaaggctgaggagctaaaggctaaggatgatgccttgaaggctcgagacgaggccgtggctagggcgaggcgcgagcttagggaggc

SEQ ID NO: 100069 - DNA, 2210 bp, Cannabis sativa
gaaaaggaacttttctccttgttcttgagttaatacaaataatgaggattaggctattatcgaaatgttcggggctgaacctctgtaaaattcatgtgcctttatatttctttattatctttcaatcgttataaactacttgtcgcttatcaaattagattcactgtcgttggctaaaagcaaggtcaacacctaatattctctttctctctctttctcatcgatctctctttcccattctctctcctcgacccttcttcttccttcccagatctaaattccaatgccaaacaaacaagccttcgcactacatttttaggttttttttctccctctctctctctctccatcggccatggatggttacgatgacgctgagctttgcgagggactgcctcttcctcgttctgtagaaaatttgcttcacaaaatttgctcggagaagaatcagtacccgccaaaagccaatgtctagtagaaattggtcgtagctggaaaataagaagctctacaggttttgcagatcgttgatagagactaggtcaggcacctctccgcatacattgttgacctgcttggaaattcttcatcgccgtcgccgtcgacatcgtcatcaccattcctttctccatctccttcgcttttgtcttctcgttcttctcctcctcagaagtgggtctctatttcttattctctgacatcaacatcggagatggtgggtacataagagtttacaagggttacatggacaacgacaaagaaaatccagtggcagtcaaagtggtgaaattgaaatcaaaaagagaaaggaaaaattaagggttcaaaggagcttttcagatctgggaaggaagaagaagggtgatggagagagagtgggaaagagagagaaagagaaaattatgaaaaaaaaataaaaaattaaataaaaaattaaataaaaaaattatttatttatttattaataattttgtaaatttaaattattctttttaattttaaaataaattctattttttttataattattaaataattatattaggtggactaatataaatgtgccacatgtacataatggtacacgtaggcagtccatgtcagcagttaagtaagataaatggatgacactttaaatttgctaatggttcagcagtttggagggttttaccaccaaaatttgaggttagagggttaagtccaagtaaaattatagttgggaaggtttagctgcaaattactcttttttttatttatttttataatttctctttttcaatttataatactagcaaacaactacttaaatatttatttttcattttattgtaaaatgtaatttttactatattcatagctaaaaaagatcattttgtggtaattctaaaagtgtaagaataaaagttatcattatacacaattaaaaaatttgaagtggtacttcaataaaaaaaattgaagtagtatgtcttgtaaaaaaaatcaatattactaaaaagaagaagtaaatgctttaaagaaaaaaaaacatttttcatataaaataaataaataactaaataaaggtaaatacatatcaacaaaaaggaagttaatatttataaattttaatttgactttttcaaaagagtgtcatacaacaattagcaaaataaactagtttacatatataaacttaagaccatcttcaatttaaaatgtaaaatttgtgttaaatttggcacaaaaattaagtttgtattatattgctccaatgtaaagatgtaaaaaaaaatataattatattgatcatcattaatattgtattgaaaatatacaaacattattatttttttatttttttattgcttaaataatggtaatatagtaaataaagaagataaagttatgtaaaagtcaatgaatcataataattagtggcactatagtaaataaaaaaggtagaatttattgtgggccaaatttggcacaatgctatatcttgtgccaaatttggcacaatttttagcatgtgccaaatttgacacactttttagaacaccattagagtagtatttttttaaagtgtgttaaaatatagcaatacactacttttttagcaccccaattgaaatgctctaagcacatatatatattacgagggggccattaggggtgttcactaagtatccgatccaatccaatccgcacgatccaatccaatccacaaa

SEQ ID NO: 100070 - DNA, 1266 bp, Cannabis sativa
tttaaaaaaaaaaggtatagtttttttaggttttaaatttttggtttagggaaatttttttttgattttctaagtatagaaaatcaaattttcctataatattgggtaaatactattttatatttttgcattgcattatctattttgttaaacgacaactcacttatactttttaaattagagcaaaatagatcttaagtttaatttttgtcaaattaagacatataataacctaacttaaaaggtattatgagacatctgactatagttttttgataaaactcactgcatattggttatttaataaaaaaattgacaaaaattaaattcatgatatattttgcataactttaaaaaaatacaaagttcgaattgacatctaacaaaataaaaactcccatcaataatttttaggtagaaaataaaaaaaaaatatttacctataatatttgttaagatatatatacatgaaaatctaaattcagctataataatatataaatttatatttttccttcgtgtataatattcctttgtacgaacgaccatgaaaatgatttaacttaaagaatctgaagacaaaaaaaaaatatatacgagttgtaatgtttttagtacttggagaatagaagagataagatgcgagaggtttactaggtcagtgtcatttcattaaagagagagtaccttaaataaacttaaagtatagcatataagaatttaccctacatatcttactttttaatcttttcaaaataaaataacaattttaattcaaaaattcaaaattcatgcccacaccaactccattctcctaccaattttgcgccacaaatatatatttgctctcctataatacataataatatataatttataataatcaatgtctatatgtaaaactccaatttatctccaaaaaaaaaaatatgtaaaactccaatatatagatatacatgacattattttataaagacaatttctcttgttcataagatcgaattttttcgttgacgacttaggttggtcggtaagctcattgatcaatctataatgtacaattttattttggtgacacatataataaaagattttctttttcttttttgaaacgggataaagatatttatttattaagaaaattctttactatatgtaagtattttatttaatttttgggataattacggcaaaagtctccaaaaacttgaagttgatgctgattagtcctcaacctcaaaaattggcggtgaaaatacctaaggt

SEQ ID NO: 100071 - DNA, 948 bp, Cannabis sativa
atatataataagaacttggttttattattaacatttttaatgtttactcatctcaggtttctttcattgccaggtcagagtattgcttatggaaaacaacaggtcattgaccaattgactgtctttttcaagtaatttaaagtttctatttttattgttcttttctttctctgaggttattgtcttggttttaaagagaggtaataaattaataggaatagatatataagaatcaagatattatgttggtctttgtagaagagaaggagaagtggttttttcatactttttgacaagttcaccttaaacaaaaataaataaataaaaaaaagtgattccattatttacattttttcttttcttttcaaaatcttgattaagacaagaggtagctgtggtttcaatgatagacccccacaatcttaatgatgttgcagactttagcagctcaaatattctattcttttatgtcattttttaatgttattatcatttactttcttcatttacagtttattattttacatgagttatattcattatgtgaaaaatatgtaccgtcataccaaaattagactagaaagttttcaaaaatgccaaaataaaatgtaagtaacgatccttgtgtaaaatatataaggatgaactaatgaaagtgaaaacctatttgttcacacatccacgaatgtatttaacatatagaagttgtttgacttcgtaatttaaaaattatttttaattttttaaaatagaacaattataaaaaactaatagaggtcgttttgccaatttttttaaaaattagaaaacagaaaacatcaaaaatgttattttctattttcaaaaattatttttttatttaacatattatattttacatttttgctcacatgcatactcggaccccagacccggaccccgaatccaaactcggacctagaccccgaa

SEQ ID NO: 100072 - DNA, 1303 bp, Cannabis sativa
acaatatatttaggctggaaagcatatgaagtggcgaaaagcatttcgaatattatcactcctcatgtcgccactattctttctaagtttatttattgaaggtataaatttttattttttagtaagcaatgattatattatgagataatttgttttataaacttcttttagtatcattatttagttaagtgatagagttttgtgaatagttactaaacctaattatttataaacttaggtccaagagatgtggaaatttgtaatgaggagggcacatgcgaccaagaacctaaaaacttcaaatctcaaattaagtatgattatcttctaatacatatttcttaattcaaaatgttattattattttaattataagtttaattgtgtattatatacattatcatttactatatctttgctcacaggttgaattttgttaaaatttctcaagatatgaaattaatctgtaataagaatttcatacttaataatctcggtaagtagcttattatttttcttctcttctatattgatctattattaaattattaaattaattacctaatttaacataattaaatatgttttgtaggccttatagtatatacatttgtattgggtgcttattccttttggggaccaaaagcaggatatatactctaccacatagtatattaatttaatttctttttaattttgtaaatttatataattgaaaaacatataaataatattttatgttttctgtagaataatgctgataatattttcggcataatgactttaatatgtggagtattgggtactatattgggaggttttcttttgcatcatctaggtgattcaattaaaattgcttttaaggtaagataaattatatttttattttattttatttttcctaattgtgtaattagtatacacaaattacaacaacaatgcatatataaataagtaattttttttttttactttttatcatatctaaattaaaatgtataaataagatttttttttttaatttttaatcattcatttattattttctgtcaatttttttttatttttttataaattaatatttaaaatcttgcagattcaatcttttgccacatacataggggcatttttatgtttaggtgcctttttcacaaatagcacaatcctatttataggattatttggtataggagaaatttctctctttgttgttcaggtacattaaatattcttctttataaatttatcaatatattaaagaaaaaaaaaatcataagaaatttcattaatattatatatatat

SEQ ID NO: 100073 - DNA, 1347 bp, Cannabis sativa
tggtttctgcagtaactgaattactttctgcttctgcagacgcatacaattttatattttcttatatataactgacatttgcaaaaatacggtttttcaatttatatgtgtaggcaaagacaaagtaaatgttgagcaacagtgaacttagactagatgaagattgtacattttaaggcggttaaacctggagtattcatatctttaagacagttatctttaggatagttgggctttattttgatagtcgttaggcgataatttttctatcttttggaaattagttgtaattttttaaacacgatcccagaatatgtattgtatgtattcattagtttaagttaatttataaaaaaaaaagattaattatttatatttttttaataaatctattgattaataaaggagtatatagtaattagaaaatatattaacttgcctaatctaataaggcgttacaggatacatataaaatatgtgattgaaaatttttaagaactaaatccaaataatttttttagtttttggtttaaaaaagaaaacataattttatgttttttgaaatttcaaatcattgattccaaaaaaaaaattcaaatatttatttacattaccttttcagattaccaaccaactaccaatttaattttcataaaacataatgaatattattagagtcactcacaatttttgaaataattttttacatacaacttatttcaaatttactcttttgaaaaacataatttctaaatcataaaccaatcatttccaaatactattttttttattaactttcctcttagagtaatcgagagataatatattcctgtaaaataaacctcaatatctctaaactcttattagaccatctttattggttacttcatttcggtttacatttttcaccaatttgatgaatattttcttacttttaataataactctaataattcaacactaaataattttatttatttaaaaatctcatattttatattatttatattaataatataataataattaaattatgatataattatatacactgccaacaaataattaataattatattttaaaataaattaaaagaatggtaataatgaaaaaaaaaattatgccctaatttagtgtgaatctaaaatctaatatcattattatagtataaaatttaatacatattaatttagtatatcattaaaataaattagtgtaaagattctatatagaatggttcaccattataatttattaatgatctttagtcatatataactagagatggaaatttataccgcagagatggataaccgcggggacccgcacctaatggggtggggatt

SEQ ID NO: 100074 - DNA, 1972 bp, Cannabis sativa
tgctttcccattccacaaataatttctgcatattgcttcaatttttttcaccactttgctaggtaggattagaatggcaccaataggcatggatagccaataacacagagttaataaggactacccttccagcataggataaatttcttgtactccatgttttgattcgagcagtcatcttctcagccaatatttcacattgtttacccgagatcttcttagctccaattggaacaccaaggtaagtgaaaggcaggacttgtttgtgaaacctgatatctgcaacaatttactcaattgatcattaggcatattactcgaatatatggctgattttgtggcattagggtacaatccagaagtcatagagaataatttgagcccttttaataagtaatgaacactcccaaagtctccattacaaaacaataatacgtcatcagcaaaggcaagatggttcagtttaatttcagcacacctgtgatgaaaatgaaagtcattcttttctcctaccatacccattattcgagataagtattccatacccaacacaaataacagaggtgacattagatctccttgtctgagcccccttttagattcaaagaatccatgcaaggttccattaaacatcaatgaaaatcttggtgttctgatacaagtcatcacgagactaatgaatctagaaggaaagcttaggccctgcaacatttcttcaataaaatcccattctatggtatcataggccttttgtagatccagcttaatgatacaactggccttattatttttccttccataatgcctaaggatatcctgacagatcatgatattatgcccaataaaccttcccctaataaagcctccttgattttgagagactatattaggaagaatggttttgattctagagcacaaaagcttggttgcaatcttataaataacattgcaacaagctattggtataaaatccttaactgtatttggacacttaacctttggcaccaaagttaaaacagtagtatttatctccttgagcaatttacctgtttcaagaaaggatgtcacagcttccaccaagtcctctcccaccaggtcccagttgtcctgataaaagaaactagagtagccatcggggccaggagccttgttgccaggtatgtcaaacaaagccttcttcacttcttctttggtgaacttttttgtaaggaattgagcttgaagagaactcagaactggaccccttgctatgatgctcttcacaactgtccttctattctccattttggaacccaacaaactctgataatagtccataaaagcatctgaaatctgcttcggttcagttactcggacaccattttgatgttcaatagagaaaacttggttctgcctcactctctgtttgatgcttgcatgaaaaattgcagtgttgctatctccattttgcatccaaactgtttttgctttttgctgcagaaaagaaccgtaatccttctgcacttgaattaatctgtttctggcatgattttcttcagcaatagcagcttcatctaaagggttctggtgcatctcattctgttttttatttagctcctctctagcgtgtattactgccgtgtgaatatcagaataaccaactctattaatctctttgaacacccccttgagagctttgagcttgctaatcacctggtacattttggttccctcagtctttgttctccaaatctctgtgaccttctgttcatactcagggaaacttttccacattcgaaaatacctgaaaggtttcttcccattcgaccatctaggatacaatgacagaattgtaggagagtgatcaaaaagcccctcattgaggaagtttgactctgcatttgataatgatcaagccatgcttgattggccatgatcctatcaattttagaggaaattctatccctccccttctgcttatttgaccatgtaa

SEQ ID NO: 100075 - DNA, 875 bp, Cannabis sativa
tttatttcccttacttctttttaagtcttataaaaatattttattctaaattaatgaaagataaatattaattaaagaaacaataatagtttgaaattaataaataaattaacaattttaattaaaatagattaattattattgattaattatataattatataattaattatgtaaaaatatttaaaatttatcgtatttaagacctcatttataagttatgtatattttagtaaaattattaatttactcctaatacaacactttagtatctttacaatttaggggtattttagtcaaacatactaaaccatttcggtataattctaataaaactcattttattactatcgtgacattattggccattctatcgacgatcgttgaacccaaaaatattttatttcaaaaatagtatgaataatacgtatatgtttcaataaaatccttgtaattaataaattacacttaattaattattttctcaaaagtcactaattatctcataattggcgtaagtaggattataatcttactctaatattcatataactacatatgtaataaaatatgacaaattaagtttaattatatttttcatgatattttgtcagttagatattattatttttttattaaataattgtcatatatttatttaattcattatttaaaagataattagctaatttattttgaattattttaactaataaaataattaaactaaattaatcatgaatctttatatgtcaccctacacgtgtgggctactctaggcctccacgtatgggtcatattttaaggtccaaaattaatttatgaattttgtcataaataagattcattatttattttaccaataaataataatt

SEQ ID NO: 100076 - DNA, 1819 bp, Cannabis sativa
tgacaaaataattacgatatagtattttatagctgtggagcttgagataggaaagtagagtatggcatagcatgacatgatttgagagcttagcctagttttggttcattttcgtattgatgttccatatttttactctcttatctttgtatatacagaaaacttcctcgacaaaaataaatgtttgaagttttaaaaaattgaaatatacctcagaaagagcagccaggagcagaatccgattggatagtgacttggaacccggcaacttgacagtgccagagatatctttaatgggctgcaacacaatctccggtacctttgaaggcttctccgctgtgacagctgaagccatgactggaccagccatagctttaccaaccgtagaacaacccccaaattcagttccaatcttcaaactcaaagagttagatgaacccaaaaacggtgatctcaacgaaactgaatttagggatcttggtgtatgagacttagaaatatttgggagagtaaggatagtttgagctccattgctacagattttgctcacttgggccatttttttttcttctctctctctctgaaacccaaagcttctctgactctctctatacaaataaaggttggatttttggtggcaatggtaacgttaatggatgctgctgctgtaggtcgacattgactctctttcaattttcaaagagggtaggagggcttaccaaccatccaagcccaaaatcgtctctttcaccaagaaatttgggccaaaatgttgaatttccaaaacttagtcaccttaatttaatatccaaaaagttaagggacccatttgaccggtagtagttggtggtctttgatgcaagtctgtgcttgtacgttgtgctaacaatgtagtactctatagtagttttggggtataaaagaaaagaaaagaaaagttgatcttggggttttttgggaaaaagtggtgagtctaattctttcaccaacccattacaatttagtggggtcgaagccaccaaagggggtaggtaggtctaatacacttgcactgcatttgcaattttaatatgcattcttatttcttaaagttattatataataaaataaattatttcacaataataatgatctgtaattacattgtacaatccattcaagtttattattatctacataatttagtggtgtcttttaagtgtgtgccggggtgtaacacaatcaagaccacttgtgttattcatgttcacctaatcatttatcatctaatatatatattttttggaactttataatattagtatacttaaatttagtatctgcacatttctattaagcaaaaccattaagtggatggtacatgtttagcaatattatattgatatgttaaattaaattatataaaactcagtatcacacttcacatttaaataattaaactactttttagcatttctcatcttagattagaaaataaaaaataggtagtaattaggacaaagtattacttaaatataaccaatcactctgggaacctgcattggtcctaggggctggcggcttttctcaattattttttataattaattctttttttttcattcaaaaaaaaaataaaaaaactctcttctatttatatatataatatatttaaatatatctacctaacacaaacccacaatattcctatatcacatttatattagttataatttctaatattccccattaatatatttcaaacattacatctaaatcgaaaaaaaaaaaaaaactttttaacttactcaactcgttctgtacatgtgcttaattgctt

SEQ ID NO: 100077 - DNA, 920 bp, Cannabis sativa
atttagtagctatacttgtaatataatcccacaaatcacttgattatatctatattatggtatagccaataaacataccatatattattaatccaatattcaacgacaaaaatattccctagtaattatacaatctacttaataatttcaattatggcttacaaaattaacagcacccaaaaaactatgtgctatctatcaaagaaaaaaaaaactatgtgcttttttttggtgagacacatgtttttatcacataatccattttattatcatccatacataatcatattcatataattaataagagttaatgaatattaattaggttgaattttggagagaaaattctgttgatgatgaagatggaatatctacaattacttagcacaaactcttatttaatattataaagtctaattaaataatcatacgtagattgaattacttaattaagttggctccacaaaccgtttctatacataatatatcattataggcacccaattaagttaattaataaataaataaaagtgacacgcggtagttcattgctaattaagacagcaaatatatattaattattttcttacaaaaaaaaatatattaattatttatatagtgctataatagtctattgctttcatgagctttatgactacatttttactaataaaatcattaatataaacatcatcatcatcaccacagtgagactaatattaattaattaattatgcaattccctctcttttttcactacataatacatattacagaataaaaggtattgcttttgcgacactttaatttgtttatatgatatttttcgataacacaatatgttaagattttaaagtaaaaatatatttataacattatcttaggtgtcgtttagtaacatttttgttttttaatttttt

SEQ ID NO: 100078 - DNA, 1354 bp, Cannabis sativa
ggtttttatcctatttaatgtaaacgacttgattgatctgtttttattaattttgctcgatgagcaatatttacatgtaatggactatgtccaatttactttttttttttttttgacaaagtgaatagaatcactcatgaatttacgacgcaaatatttgccaccgacactggaacctcttcgaaccaggatagctcatcatctaaccgcagagcatgctttgccaaaccatgggtcgctaaatactcagagcgagccacatgggacaaaactgtccccgaaaatttagataataaagctataacatcttcaaataacgctccaaactcatttgacatacatctttccattattgctagttgtcaccaaagctaacaaatctaaataaactgtaattgttacttaaattttattttaaaaagaaaaaaaattagttgacaatgatatacaaataaaggagaaggaaaaagaaaagtcacataatagcacataatgtaatagagtcttctttaattatattacttcagtaggaaagaaataataaaatctatctagttataaatttatcattcaatcattgatgaagatcaagaagaaagaaatatataatctaaatgatatgtttagtattttttttaatgttaatatatatttttttaaggaaaggttcacacttcacatggtgaagtaatgtttcatgtgaatgtgacatagaacatagtactacaataataacgaaatggtaagagtggaaaagttaggttatgtgcacgttttatatattaatttaggataggaaaggttatgttatacaagtttattatgtcgacattttcaactttattatatcattttcattttaacttttatacatgactttttaagtcaatcatcatcaaccatgattagatatcggtgtgtctccttttcaattaataaataatcccatatttgttttaattcattaattaagataaatatatatagtaaataatatattaacgatccataatctattaccaaaaatcctaatatattatatttggtttaatttatatgataaaaaatttaagagaattatattgtatacccactatattttttttttattttttttaatttttacttatattctcatagtttttaagatatactcacttttatagataatgtccttattatacctgttcgattaatgtaaattatatgctagatttaagtagagagtgaaagtatattgtataactcaatagatatattttaataaaatataatatgagagtatttttaattaatgaatacaaaaaagagctattcctcaatttatctcgaagaatttatataataaactaaa

SEQ ID NO: 100079 - DNA, 1036 bp, Cannabis sativa
tgcagctcaacatttagaggatcatccctcaaactatcctgacatacatcaagagcctcctttgctgaaatagcattggcagggacatcattgaaatgcctcctgttcaaagcagacaacccttgctttgggcttctgagtttcactaccatttgatacattttggtccctttcacctgcttgttccaactttccgataccagatccttataatcaggatgctttgaccacatcctgaaataacgaaatggtcttttgtgtccacttggcatattgtatatagttagaatagcgggagagtgatcaaaaataccttcgttttgaaaaaaacctcagctgctgggaataactccatccaaggctgatttgcaagcacccggtcaatctttgagtggattctatcttctccatgttgcttgttactccaagtgaaaaaattccctgtgtattttacatcttccaatttgcaaatttccacacattcatgaaactcctttgcttctttataccttgctcgcaagccaattctttcttccttgttgaggatctcattgaagtctccaagaaccaaccaagcctctttaatagccaactcctttatgtcttgccaaagagttcttctcccttcttctgagttaaaaccatagacaaaggtgacaaaaaaacttgcctttttctctatggattcaacaaagagatgaatcatttgactagtgcattgaaggatattaaccacaaaactatccaacttccaacatactattattcttccccccttatgccacgcattattagacgtaaaacaccacccttcaaacatacgaacatacaaggctcctaagttctgagccttaactcttgtctcgaggagcccaaccagcccaattttttgataatcaatcaattgcttgactgatgtttgcttctgctggatgttgattccccggacattccaagccattattttatccatctccaagagagggttctcccccctctcttgttattaatctgttgctccctatcttcttttcca

SEQ ID NO: 100080 - DNA, 2177 bp, Cannabis sativa
gttgcaagtgttcttgagctttggaagaacatcaagaacatggagaattttgattttccctctcttttcttgctttgattctcataaaattgagaaaaaggtgtttgtgaagatattatgtaccttgaaaaaattattgaccatgtgttggtggttgagattttaggttaccccttatttcccttcaagccatgacaccacttcatggggtcagggtggctaccatgagatgccccgagatacatccttcgggggtccgccttgattgcttaaaactttagggtataccccgagataggccatggatagttgcgttgactaccccaaattaagggattaaacgacgataccctgagataggggttgttactcgaagattagggtgtcgagtacaccccgggttggccaaacacgcaccccgagttggccaatatgcctcgagcttgtggcatttagtgataccccaagatggggttttaagcatagtaccctgtgattggggtgtcggggtacacctcgagttagggtgttaccctgagagaggggtctcgaggtacaccccgagttaattcaatttttttacacacacctcgagattggggtttgggggtgcactacccccgtgactaccgtgtggaggtcagggtgcaccaccctgagaccaccacatgtaggtcagggtaaggtacctcggggagacccatatggcccaagatgcagctacgggggttaatgatgattgcctcttatttacttcttagagacttatatatatataatttcatacattgtttttgccacacacactcagtaaaaaatttaagtgtgtaattttcattgttgcttcttccatttagctacatgaaaggttatcccttgatacactttctttcttgtgcaccatgaatgtacatatgtatgccttctcttttggtttggagttatatggctttattactatatgctactatgtgttaacttgtctgacatataccacactatgagtaagcattttttatagctaaccatgtaccacatataggtcgctcaagacattaagcaatgcacaaacactttaaaatctgaaaagaaattttcaaacttgtaaaatctatttaagtgagtgcgttttgtgcttactagtccatgtatgagcgtggtttcccctcaagtgacaaaacaagttcacctcttaatcacttgttaagtaactagggctttcacataggaattgtcattgtcataggtttgccactatgatttcatacactcttgaccttagttaggcttgtaatttgattcaataacaatcatacaagttgcatcgttatatgaaaaataacttgcaattttttattgatgaatagaataggcaaacatgccttagtacatcaaaagtgggtaattcatgtctttacattatcaaactttgctggtaagtatgatgactagctatgaaaatgcactttgcaagtatactaaccagcttaagtcattgttgaaaagtaacttatattggtagtacttttgtaggagctctccattccaatgaaaaggctctagtactaactttatgttggcaccgtaatgcgctaacttgtatattccaggtgggatgacctcaactactctgtactcggtgataagagatcctttggtgggatgatgggttatcatacccataggcaaggacaaggggaatgtcacgcgtgtctgaagattgttttaattaggaggacatagtcattaacgctaactttatgtttagctttttgttattaataaagttgtttccaccgttatcgttgctggccctcttttcattgttgaagccatttttattgttgcccctaaccctgggagccttagccactaaagcttgctccattcttatttcccttagcttggttgaggcctttggcatttcgctcaacctcttccagtttaataaattcattaactctatcaaggaagtctttcgtagaatgagttggcttcctccttgtatctttccatagccgacctcccactataatgccccccattatggcggctcacttgccatcgtcacttaggttctttaccttagtggattcatgcattaagcattggatatagtcttttagtgactcatcaggcctttacttaatggcaacgaagtcacccagctccgttga

SEQ ID NO: 100081 - DNA, 1846 bp, Cannabis sativa
cctttattgctttctttaattttcgtatttttttttatttcaaaatctatcaaaattatttatctaccaaatagaatcataagtctaatttcatggtattcagttcaattccctgtggttcgacctcacttgcgtgagtttactacttgattgcgtgcacttgcgtattgttttacaattttcgtaacaagaaaagtaataaagaaggatacattaaatagctaattgtacatttcattatcataaaatgattataccataacattcaacaataggtaataaccagccatatgcgtagaaatagatatgctcactcatttgcattgcctaattagacaagcatgtgtcataatgcaatatcatttacaacaccattgcaccacctaataaggtgagctcgtgccacgacctaacactaatataatgtattgcctaatcagacgagcccgtacctacgcctggtcctcatttgtcactgacgcccatacttacgcctgatacgttgataggaagaaacccacaacagtttcattctgtgccacaacctggcaattttcatattactgccgcctgtatctaatatggtacgctgctaggtggaaacctaacaacagttttgatctatgccataaccaggcaatttcatattactgtcgctcgtatctaataaggtacaccgccaattggaaacctaacagtgacttcgatctctgccataactaggcatttttatattattgtcgctcgtatctaatatggtacgctgctagatggaaaccaaacagcgatttcaattcctaatcatgactttataacagttgccccacaaatacaatctgaatgtcagtatccatttatcacattaccgactcaaacaagtttatgacatagcctggcattcatcatatatatacatatgttgcattgcctaatcaggcaagctcagcctatgccatagcttggtactatatcacctaattatgtgtatttatatagcatattgcctaattaggcaaactcatttcacaatttaaaattcatctatcatatcacttaattaggtgaagttgtatgccacgtttatattattattgtctaatcagacagtcgatgatcacaaaacctattattccatgtggtacattataattttcttacctcaagttttagttcagttatgttggccgacctacttggagtacgatcgatgatcctgggccctatgtcataacaataataaaccaataagtgtttatcccaaaatactgcttaactgttgcaaagaataacctaggctttcctaccaaatcccatagtttaaatacactaaaataaaacttatatgatagagcttgtcgcaagctttgaaacattatatagaacatccaaaacagatacccgagagcaaagttatggcaaaaatacaattctcgagttcccgagactaccaagaaccagttagccgtttctaccagaattggttgaccagttggtcaagggaaaaaagtgtgactttccaagttacccactcagccaaacgctacctgtaatgaccgctttagtaatttggattagtaaaggcaattagcactaattcctgttaattttataattatttatcaatttgtttatttgttgacaccaatatgtagaaatgaatattagagttataatttcttaattttggagattttattaaactctaggggtattatttaatttatatgtgaaatatggtatttagtaatttctgctttgcaacaatagaaaatgcgatggatggctagtttgatcacatggataagtttagaaccttatttcttagtgggaaatattttagagaaaa

SEQ ID NO: 100082 - DNA, 1039 bp, Cannabis sativa
atttagccacaataaattgtaatttttgtgactaattttaaaaatttgtagtggatacttctacaaacaatgtctaatattaataaaaaacattctaacaacaaaagaacaagacaatattaatatataggttattaatgaatattacttaattagcaaatttttattttgtgtatgtttataaaagggggtagttggatccaaacaatgataaagatatattatatattaagaaaatgaagttaagaaaagtgtgatgctataattattaatatttgataggtttaattacactaaagagagttgtttaattaaggagagaattagtaagtgagttgaagaggcgaaggagggagttgtgacgaagattgttgagctcataccaagaattgagtgtattaagattgttgtctgtaccagagaatgtcaactgtatgcttaagtggcactccaaactccctccttgctttatacacttggatctttgtactgcacagtcttggttattcaggcacacaaatgattggtcccctccgcactctttgcacccgaactttttccagtgtaagttcaccagagtacccctatcaaattctagtacctaatcatcatcatcatcaataaaaatcaatgatgactgatcttttccacatatttacatgttaataatgattcaaacaatctatatataagtattaccaaagcaaaacttgttacaatgtgtgtatcgtctgcaacaaatatgggttgcgatcttgctgcatacttttttccagcgaatgccaccatatatccacccatcgcagcctgagattatatatatatatatatttatattagctatttgatgaatgcttagagagttttattagagttgttattatttaattattaatttaaatattaataataataataataataataaattacatttaataaaatttaattatactttttaaatatatcaaatttaatcttgttttaaattatttataaaaaaatatatctaactatttattaaacaataaaataaata

SEQ ID NO: 100083 - DNA, 1422 bp, Cannabis sativa
aaaacattcttgatgtctgactgtgtggttgtggagattaaggagcctgaaccagtgcctgcaggcaaccccatggacaattcaggtttgtagcttttcacactgtaaacaaatttcatccaaaagggaaattaactaatttagaataataccaaataaagatcccatttttaataatatgctataaaaacaaaatgtgaatatccctgtatggttttgtttgttgtttttgagtcttgaaaaggttaaatctgtacttgattggtaaatacttgaaaagaaaaatcaactttaataatatattatgtttggtaggaaggttttttgagtggaaggatacattttccctctaaatgtacaaaaaatccaatctttccaaaagtggaaggaaagggagaaaaggacaaaaataagtatattaaatgtcctaaatacccttcataagaaataaataatatatatttgaagaggataatatagtaattttcacaaataagtatctttccatccttctaaggagacttgttatcctttccttccctctaaccaaacatagtgtaattgattggagggtgtgttttggaaaatgctaaaagtttgtatgtatatatgtaaatggttactaatgtttggattttgatgacaggttatggctattgaggaaagaaaaattgagtccatcttgagagaaaggagggagatttaagaagaaataaagtcaaactctcaaatggaaaaaaaccaacttgaaactcaactcaactcaaccttaatttttgatgatttagataaatttgtagttgttgtgttgtgtgggtgagaaagtaattatctttggtgaaaaaaagaagaaagaagaggatagcttagcttagcttcatcatcaaatctttggattgcggcaaaaaatttgtagaatttaattttggtcataaaataattacatttttgtagtcaatattttcttttgttatttttaaatttttgttatttaacaagttaccaacagcaaattataaatttggaacatgtagtctagtaaaattaaaaatcataaaaatatatcaaaatttaagaagttaagatgttcttttagtattattaggtgtgtcatggtaaattgcagcacttgtaaaaaatatgtaatgttttgagtaatggaattaaatttaaaatatataaaataaaaattagtaataaattattaaatatatatttaaatacttttgcaattacattgagtgaattttttagttgtatgttgatatttaaaatattttgtaaaattttgaaaaatttaaaaaaatttaacatcttaaaaaatagagtttagtttgttgtacttcattttttttaattttatatgtgaaataggttatttgaatcatgttttctgtattatatttttttttttgaattttt

SEQ ID NO: 100084 - DNA, 817 bp, Cannabis sativa
agttagagcagctgcaccttgattatccacctagattataggaatgtcagctacgaacaaagtgttgatctatctcaatatgcttacaccgagcatgaaaagcaggattcgcagttagagcagctgcaccttgattgcccatccagattacaggaatgtcagctagaagagactggcaaatcaatgagcaaagacaacagccatttaatctcagcaacagtgttagccaaggcataaaattcagactaagtagaagatctagccatcacttgttgctttttgacagaccaagaaatgagttttggacctaaataaattgcataacccccagttgaccttcgatcatcaacgtagctagcccaatctacatcagaatatgcgtccatggacattcttagaacaggtttcaacagaaggccttccgagatggtacctttcaagtatctcaagagttttttctaagcttcccaatgaataaactgtgataacttgtcaataatgagtgcaacatcaagtctggtcaaacttaggtaatgcagggccccaagagtgcttctatagagagttttgtcttcaaaatgagtacctttagtaagggacagtttttgagagctgctagtaggacttgagcaactctctgcaccttcgaagtgaactttaaccaacaaatcaattatgtattttgtttggcagagatacatactagctaaatttctatgaatttcaacaccaagaaagtaatgaactagacccaaatctttaagagaaaatgctatgttaagattaagaacaggcttcgaaatcaaggtggtattag

SEQ ID NO: 100085 - DNA, 809 bp, Cannabis sativa
tgactatgattggaaggatagtcaattggatcttttgcaatggattttcccttctcgcggctagaagtgtgggatggtaaagcaggaaagggcctaggatgagcaatgattaaagcaatagtattacgagcaagttgcgtgataaaaggccagggtccagacttggagaaatcttgtctatacctgtcataacttgacttaggaagaggagatccttccaaccagggaccataagggagatccgatctcttccttcatcaatcttttccaagaaagaagggcatttatcaaaaacatgtccaatgattccacattcataacaaaaattaggaagcctttcataacgatactccagccataattcatcttccatccacgaaaaagtgacagtttatccatgcaacaatggcttcgaaacatcaatacctacctgaattcaaagaaacggtccccatccttgattaagagaatcatcatgaacctctaggaaggaaccaatcaaattacctatcaccttagccaaggattccgatttgcttaaaaagggtagacgatagacttgcatccaaaagggggtgatggtgtaagaattgaaagggacattttgtagagtacttggtgggcataaaatcaaatgttgattatgtaaacgccaaggttccttagaaagaacccttcttaaatctcctttgcatccaaacgtaatcatgaaggaatcttattcataagaggatatagaaacttcaaatctacatttccattgtgtagagattagattggtcagttgttttggattgaagcctctttta

SEQ ID NO: 100086 - DNA, 1321 bp, Cannabis sativa
cgccccaaccacgtaaaaagtctttatctcgctttcttacagcttattattaaaaatatattttaatagttgccgaaaacctcggtcaacactaactaattataaaacatcagtaattaaagaattgaagaattggtgatcgaaataccaaatttatattttttattgaatcgagagaaaataaaaaacttaagatatttaaaatatagtctggtctcatgacctggtgtgagtgtttctagtttttgggttttgtctttttgatcgtgtctgttgctgttctgttcgtttggttacgagtgaggtctctatgatggctagttcaagtggtgttaaaaatagaggcagtgaggatgtctacagttttcagattgaagaagaggacttggaagaattggcagtggggaacgatggagaggaagaggggattgatgacagatggtgtcttgtcggaaggtttttgacgaatcggttgatagacttcgacaaaatgcagaacattctagcttccttatggcaaccgggaatgggaatgtttgtcaaaaagttagaagataaccgtttcttatttcaattctaccatgaagtggacattcaaagagttataaatggtagtccatggacgtatgatcgaatgcagctgattattgaacgtttaccagtgggaggggatcctaatctgttacaattaaatgatcttgatatgtgggttcagatccatgatgtaaaaccaggatgtatgaccacaagtacggttcgtggagtgggaaatactctaggaaaattcattgagtcggatcctaataattttatcggtgtttggcgtgattatctcagggttcgagttactcttgatattaggaaaccattgaggaggcgtatgaaactaacccgtgacaatggaagctggttttgggcacatttcaaatatgaaagggtgccaaccttttgtttcatctgtgggttgattggtcactccgagaggttctgtaggcgtttgttccagcagcctatagagcagatagtgaaaccttatggagaattcatgagggcggtaccacagaaatcttacaagaacatcggagcaaggtggttgcgcaatagggggtggcagccggaaggggtagctgggaacaatgtacctggacagagctcaacaaatcaaccaaatatggaaataattccttcggttgacatagccgaaaatcaagctccttcaaatctggctcataaagaacgaaatcatggcatggataatttgatgatggagggggatcagggggaggaagatatgggagttatggagggagagattagtgga

SEQ ID NO: 100087 - DNA, 1611 bp, Cannabis sativa
tgtttattaattgttattacttggccaaaagtaacaatttactaagctagatctggttttgaaaaggctagatctagtagttacaacttggatgatgcaagtgaattcctaagtttagtttttcttagtaaatggaatagggatatttcattaccttgcataacttgagaattgatgtttaattgatgttctgcaacttgatttgatataagaatatatataactaagtggtagaacataatttgtgagttttaaaaaaatctcataaactcaagaaaatttttgttaattttgtgcaactttgctgaaataatgttgaaaaattgggcagatttaacatatgggaatttagctattcaagtctattatttcgtagatattttgtcttgcagttaattttacaatgttggttgtcttattttgagcatattttcattgtcaccaatttattttactttcattagtcatctatttttttcgtttatttttctttcaatagacctaaagttgttaattagttagttttacatttattttaatttgcaatctctatggagacgatattcaacttatcattatattatttgttgtcgattgagtgcacttgtgtataaatataattttcacaacaaaaggccatgtagatcctagatgtaaaggaaagatgtacccatcgtccaaagaatattccattttctcagcctacaaatacaaaaaaatgtaatgagaaatgggatttgaaaaacatagagaaaagagagctctgaaactgtaatagaggatatactctcatgctaaaaatagattgctcattaataaaagtgactcgtggactacggttaattaacacctgaactgcataaaaacgatcttctccactcataattaatttcttaatctaagatttagaagttaacgaaaaatctcaatcaacaattatgatcatataatcatattattttctttcgtgatttacatcaaaataattttagttgtctatgtgctcggtattttatataacgaaaaatcaaacaaataattgtgaaattaaatacattaacaatgtgattgaccaagtcaataaatttctgttttctttattgatgataaaaaataacaaatatattgaggtttgaatatttaaggcataaaacccttacaatacacacatttatgcatcctaaattatttaattgtataatttttagaaagtctctaactacattattgaccatcatataaaaatatgtacttaataacattaaaaaaaataaatataggtaactaaaaacaataactatagttgtattcatatgtggataaataccatttttaattgtaaaaattattgaatggaccttctcttttgttaaatgacaaattagatcctgtgtttttcaaaatggtataaaatattactctaaactcaatttttcgttaatttttttttaacatagcaaacccgaagccattttccagcctggtcatagatatctctagattgtattattattattatattttattttgatgaaaattaagctcagaataatattttgtacgattttaaaaattacaagttgtatttattatttcattaaatagagagca

SEQ ID NO: 100088 - DNA, 2402 bp, Cannabis sativa
catatcggtccttgtcatatataaaatgctacatctataatctgaactgagattacttgcgaaaagaatattttgaatacttttgtaaatttttaatgggatcctgaatttatgtaaacatgtgtatttattaaagtttaaaataaatcaaaaagtttcaactttatcacgatttttgagaaaccctttgattaggaaaggcgtgcacaataattagaaaattattgtagtgtgcctagtcaagtaaggtgttacatatccaatccaaatgaacatgagataaatgttacctatcaatgactactagtcaaaaataaaagttggataataacaaccttattattcaatctaaaataaaaagaaataactaaatgaccaaccatagcaataacaattgtaacaaacaatcacaccacaaatcatggggccaataaaaatttgagaatttcataatctgaacatggacaaggatagtcatggtacttgttgaccttgtttctaataaacgacgcagaatcaataaaacgatgatataagtatttgaataataataaagattatgaataactgtaaatgatacacgaaattcatagaggttcgaacctttcaacggtaatagcctacttttttttcgtattgcttatgaaagaatattaagagcacaaggtccaaccaggtgagtttcttattatctcttgaggaggttacaaatatttttagagtattttctcctttcaaagtgcgtaaaaaatgagtccccctcaatagtgaattgacctcactatttataggggagagggagtacatttaatcctgaaataataggagaaagattggtgtggatttgaatgtgagtcccacaaatttctcatcatgttaaatcgaatctcatgaaaatatgaatcttatattggtcctatttttgtggaaatcagttagggaaagtatcttgaagtatcttcagcgattccaatggttgacaaatttcattatacaggtggcttgtactactcgacgcaaggtgaggtcttgagcctgttcgggtgttttggcatcatttggcctggtcagtacaaactggtgctatattttgcccaggatcgatattccttgccatgtgtcagcttgcccaatgccacgtcattggcacaaattttgagataacactattaacacaaacatactttgagtcaattgagattcccccaatgtcccaaaagaaataagactaaaatcatcagccatgaatgaataaagccctactgccataacaataacatagtggtgtagcaacaccattattgaaaataaaaataaacataaaaaacatagcaaataaaaataacacatcaaaaggagtaccactagtccagagccaatgagaaacttaaatctagagccaatgagaaactcaaatctccgagacacacctctacagaaagaagacgagaagaaaagaacactcaagtagaaagatagcaacaactctagtggaatcaaaaatagtgtaggaatcaacaagatccgaccaaagccacaccgtaaggccgagaaacggtcaggcgagccctagtcaagcaaaaaaaaatcaagcaatggctatgaacttctaaacgaaaaccctaaagagaataaaaaaaaacctataactatatgttttaacaaataaataactatcttaaatattatattcacctcataaagattgccaaaaaaaaaattaattttgattaaaaaaaaaactttagtgtagtttgctatctttctcaataaataaagagtaactaatttgttaaatgaaattcttcaacaagaattcaacagtcataaggcgaatggtttatattctcttggagctactgatggctttaagccaattattgtgcactagtgtgggtgaagcttccagatgagattaataaaatgaattgtgttgttagtttggatattgcaaatgctagagctgcttttgtcgtggtattgcaggattcttctggtgaggttttagcgccacgaccacttttggtgtggtgtgcagactcatgtgatggtgttagattttgtgtttgtcttggctattgctcatgttttggtagaatcagattgtcttagtgtcataaatgcccttaaaattcatttggtggatcattcttatttagggtgtatattagagatgctgaaagagtttatctatgcagtaagatctaaaagaattcaaactataagattgcaattcaagattatgcaaaagctgatttattattaagctttgatatgtttatatagggggcaatacaaggaagaacaaggaaaacagaataacagaaaagaagttgttacaagaattggttattaactatattaaccaactaagggtagtttagtaatagtagtagttgtat

SEQ ID NO: 100089 - DNA, 785 bp, Cannabis sativa
aaggaagccctcatcaaagcagttatccaagttgtcccttcctatgtcaggtcttgtttcaaaccaccacttcgcactattaagcagttgcaaagcctcattgcaaatttttgtggggttcctctaatcacaagaaaaaaaatacattgaaaaaattggaatagcctttgtgtttctaaatttgctggaggtcttggcttccgttccattacttagcaaaaccaagcgttgttggctaaacatgcttggagagtctagtctgaccatcctcccttctatcctctttgcttaaagccaaaatattttaaacatgattatttcctctcagcctctattggccatagcccctctcatacttggaaaagccttctttggggaagagaccttctcctaaaaggcctcatttggagaatcggaaagggtaactccatcccaatcacggacaatcgatgggctccagatttacactaccaaagtttttgaacaatgccagttgagtgacaaaactgtctattttttcattgataatgataacacttggaatcgccataagcttcagcatcatcttcccgatttccgggtcgatactattctccaaattctgattgatccttccagggaggatagcctcatttgggggcaccatcaatctggcttgcttactgtcaatttagcctaccatcttgcaaattccctagccttgacccattctccttctccatcaaatcaggcgggtttaaactcttggtagaagtatttgtggtctttgaagatccccccaccca

SEQ ID NO: 100090 - DNA, 2553 bp, Cannabis sativa
  modified_base (628)..(629): a, c, t, g, unknown or other
  modified_base (820)..(842): a, c, t, g, unknown or other
cgtatggagccataaaaaaaactataggttgtatcgtgttgtgtcataaaaaaaatatgagtcatatcgtggcgtgcaacaattttatagggtaggcctgacatggcccgtaagtttaataattttttagggtgctcagattcgtggcatgtttagatttgtatcattttttattcaggtcagcctgtttttcttaaatagaccaactagttttttatacgggctcaaattcatgctccatatttttattacatttaataagctaaatactaaaatatatatgtattttataattttaattacttttatattttttcaataattatacgcaattatataaaatatacttgtaatttttataatttgattattattattattattttaattgataaataaatatttatcattgttattattattaaactaggaaacaaatcgcgcttcgtgtatggttatattttgttcagtgataattaagttataaaattatataaaacttcaaatttttatatttttatataaatatatattaataaaaggctaattaggatttttttccccaaactttgacatgtaccaaatcatgtctcctgaatttttaaggtcgttaaaaatgccccctganntattgagattgttggatttaaggttttttgtccaattttagtaaaaaaagtctaacataaaaatgaaagtttaggggagatttagtacgtgtcaaaattcgaatgacatgatttggtagatatcaaagtttggggagcataatttagtacatataaagaatcactggaatagtaaaattgaataaaattannnnnnnnnnnnnnnnnnnnnnnatctcaatagttcaaggagaatttttaacggccagaaaagttcaagcggcatgagatttggtgcatgttaaagttcaggggccaaaagttttaattagccttaataaaatgagtaactattttactaaattttcactttttacccttaataatgtaataaaaatgaattaatattgtaaaatgattttaaatttaaaaacgtcgcttatagtatagagtacggtttaaaactgtcggctatacccttttatacgcgatagttttaaactgtcgtgaagtccacaaaaatcgtcgcttattttacccgttttgcgacagtcgtatagacgatggttatagaaaccgacaagaatactttaaacaattatttaaaaatatcgagaaaaactatttctgttatagtgggtcatacttgtgtcttttgagtttgtaccaatttacaacactactatgcatgtggctattgtgcatggatgctctaagagactttttgtttgaaagaagaagacaaaactcttgggtatcaatccaaactcacatcaaaagagggagtaagtgttgtcttgaatataattttttcctactgtattagctagtgtgatactttttggaaaagtgcctgaaaataaattaattcgggtaaacttaggcttaaattggtcaatattatactaatgagtggtccaacaaagtagaagaacgaaaatgacaaagaatttaacttgatcatcatctccacaagaaaaagtagaataataatactttttttttaatgaaaagtagaatatatactttatttgatgagagaaaaccataataataagaaaccattacatatatttatatgatatataggcagagcgatagattaactccttctaatccttatttataatgttactattaatcttctttgtatcatcattaggttctaatccttcaatattattcatgttgcgagagttttgatcagtatcaccagcggccttcccactaccactactccccccaccgccgttagttctttggccgccgcccttggtgataggagcttttctggattcagcacgcctcctaacaaaaaatcaataatatacatttttgagagtgatatagagttaaaaattagtaaaattaaacttgagaaaaattttcatactaataattaataaattaggagcatgatgatgagtttaaagtgctaacgcaatagtggcggtactactaaggtagataggcttcggccaagtcagccccctaacggcggcgatggtgttcggcacaaagctgcggagtagtagcgtcagagccatatataaagattataataataataacaattaataatagagagaattagaggtagtgatatataaagaggggtatatataattagacaaagttacactgggatggggtatgaatatgatagggttaataattggtggtcactggtgagcatgtgggagtataaaataataatatattttgtaattatattcatatagagagaattgttaaaagagacgtatttgttttagagcttcttattaagtatagtagtgcgcctagtattttctacacatatcgctttgttattgattagcgatattctttaaaagttaatacaataaattatattagacccgatactaaattagacaaataacaatattaatatgtaagagggtgctagtaccactagtgccat

SEQ ID NO: 100091 - DNA, 2348 bp, Cannabis sativa
atttaattattctctgttgccaaattctgttctaccatataattgaggcatcaagttctgtgatcgaattttggtttacacaaggaggaagtcacaaagccagtgttttcaataaggggctattagtatttctcaaaattctggggaggcagaatttttatttctcaataattttgatttgtatattttaaatttcaggggattccattttcaataattttgggttatatttaaaactatctgtaatttttttacaagaaagttttaaaaaagttttttggggaatattccctgctatgcacctcgcttcatgcctgagtatagacatggggcaaccaagaatacctggtgatacagttttatggtttatattttctcatgagtatgtgtatgatatagctatatattttatatattgtaagttgcataagttaaaactcgcatgtggttttggaaagtgaatatatgctcttataatacatgtatgatgtacattacccccgcttttgactacatttttcaggaatcaatgatggaatatatgcccgagaactgatgaagaattgtgaaaggattgtatccgattccaaaggcactctagtgaataaaccagcagaagttcttgttaaaagtgttgcagaaacacaattacctggatcatctacgattttggtggcttactttgatggtcaggttaggccttttctatacttggatgactatatcttacaattttccttttataattgtgtttgtattaacatatttgaaacggtttctgtttcttgtactcaaataatgatatctaatgcggtagacaagtacagagtaaaattttctataactatgccatatccagtatttcctctataatggactatagtgttattatatgagtgttatgaaaaagtaccgtagtgtcatgaagttcacacaatcagaacctgaaatataagctatgtggatgtgatttcctctgataaaaccctgctgcaatttgtgaagaagaggaagggtaaatgaggagatagtgttagcggttgaggaatttgggttctgagctggccgtttatttgggaatgtgtgctgcttgagctgcacacaagtagtgcaagggtgtgaaaagggttggtcaagtaattgcagggtgatttatttttgggtcgagttggatcccgaattcaaaatggttttcttttctcttttcattttcttctgttgggaggattgtactaactttgctttgctttggttttttttttttttttgtttttccttcttgctgtattattcaagtctaagcaggatagtgtcatttcctctgtagaagtataaaagtgcaaagataagtataaatatatagcagagcataggatgagataatccttaatattgagtgaaattcggtcttggagaagagatgcatgtcagaaggcaggcagtgttggttttacagaagtaacatttatcgtgaaaatgtagctgacttaatttgtagtatatcccaagtctccccaatccccatcatgtttggttgcttactattccattatgattatttgaacctctcagagaaataacaaagatgtttgaatatgaatacattagtaccatgaagaaaagagaattataacgataaacaaatcttgatgataactgttaggatcccacatgaactaataattggatttgttagtggtttataacttttttgacaccctcctcccattggatagtattttgagattaagttcttttcaagtggttgtaacaaaatggaatcaacatcaaacaagtatgagatttgttggtagtttattaccactcggatactcttctctcataagctagaccttttggagtgagatttactttgttttagtcgagtggttgtaacttaatgataattatgatggtggaagaaaagaaaaaccagaagacaccttgaaattggagaatttatggtaaagtttaactgaaaaacaaacattttagacatagaaaagcaaaaaaatgtacatgaaaatccatatggagattttccttctgtttccaattccaaagctgttattaaaaaaatctttaaatataatgttttgggtagctttttcctcaacacatgtattgaaaattggatctatcttttcacagactttccatgtggccaacataggtgactcaggatttatcataatcagaaatggagttgtctttaagcgggcttcttcgatggttcacgagtttaattttccattacatattgaaagtggtgataatcccaccgatctcattgaggtatcaaacacaaaattacatgttcaaccaaatttgtaatgctatgaacaata

SEQ ID NO: 100092 - DNA, 2170 bp, Cannabis sativa
tagacacaaatcattgacataactcactaaaaagaaaagaatgattttttttttatcaagtaccaatagcataaatccattaacaagtataaaaataactctacttctctttgacaaagcaacataaatgacaatatatctctgttatcaatgttcgcggatgggttctatatggaagtggcagaaggatgccacgtcaaatcatatactaatatcacatacccccttttcgaagataggatcacggaagatattcaagtatttggaagaatgcttcccttacgaaggatagaatgattcttgaagatctaatctgatgcttttgctatttggaggtaaataggaagcacgaggattttgggatgatcaggaattggctatcccaggaaggccttggcaggactttctggaagctccttatggcctagtacagaactacaccagatagttatacctcgtctgacatcaagttagatcctgtcactaagtcagactggggctatgcgtgtacatgcctttgtagtgcttattgtccaacgacttgtctgggatatatattgcttttaaaggaaaaacctttgaagaacatgtgttcatatctttacgtgataggctacatgaattattcaccacacgatagaagagctacctaccaaaccaatagttagatggtcttgtagtgttttttgacctttttttgcgtggtgagtaagaaacactagtagggtaaagggtatgctcttacccactcatttgcctataaataatacctcaatttttatgtttagagggtgaacaatttttacttatagaatctgctaaatttcctagagagctttcttcttaaagagaaccaaaaggaatacaaagattattattgtaaacacttttaatactcaaacatttgccaaagaaggctaatacttctcactcgtggatgaaggatcattaacgcctgaacaacatagaaaatctttttttttttcgttgtttaatatgttgcatttccttaagctctttaattggttttcaaaaatctaggtaaatattttggtgctttcattgagagctgagaaaagtttattagttgttgcctcacttcaactatggtgaatacgtgaatgaacaccagcaagaaaactctgctagacatagtcatggatgaggccaggtcccatgcctctgacctcctgacaggtggtgtcagagaggaaggtacgaccctcgccaaaaactgagaggaggacactgagaacgtgtttgacgaccttgatgatggcaaaaaccttgaaggaggatatgaagaaggtgatggcaacaactatgtcagagatgggtattacaaggatggttattactatgaccattacccaaacttgctgcgagtgaccaaagacttagaggcaacttaggcagagttggttgaacagaggaggctcaccaaaaaaatgaagaaaatgatagagcgtctacaaaatgagtttggagatctggcaaaatcttatgatgaactctcagtggaagtgatgtctgaggaatgtgcccaaaagtaaacaaaggccgagacctcatatcctcataaggataagggtaagggcaaggtgggcgagccctcagaaaatcccatacccaggcctcctcgaaaggatacaaccacggccagtcaacccatacccaaatacaatttttttttcagtttcttaaaacattggacaatacattttgactttcacaagttattaatatccattttctatcaatggatccaaactgtatgttaatgtatggattatgagttttgtattctacgaccaggatccacttgactattctaagaactctttattgtaactagacctaagtcatcaaaaaccacaaccataataaatatatctatacatttcacccttgatcatagtggttttgaaaaaataaattaaaaattattatggtttaaatttaataaattttattactcaattattcttaatttatatcatagataaaattttaaatttgttttaaacattcgcctcaaagcttgtttattagtttgagtagaacatgaatgagattcttgtaagaaaattttattttgggaaatatatttctatttaatgaaataaatttctatttaaggaaataaaataaataattgattttctgataa

SEQ ID NO: 100093 - DNA, 1119 bp, Cannabis sativa
  modified_base (939)..(939): a, c, t, g, unknown or other
tatatttgcaagcccaatcttaaaaaatcagaacaaaaaaactactaaaacaacacaaaaacaaatgtaaaacaataagcagatataaccacttagataaacaataagcaaatatatatatatatatatatatattaaactttcacttagaaaaacataaaagaaccacacaccttaaaaaaaataaattatagaaaacaaccgtaaaacaatactaaaacaaataaaaaataaatacaatatactgcagtataaaacttataaaaatacatagtaaaaaagtaaattctatcatgtggcagtatttttgtaaaaaaataaaaaaagttagtatatcatgtaaattttcctatttttagaaaggtagtctctttactataaagatcttgaattagttttagtgataagtgtggttagggagaatgggcttcaaaattgttgagcccaaacaaaaatttgatgggatttcacaagtgacaaatacgaacgtgaaacatggccctggtgagaggttacgccaatcaagacgtgccttgtggtcgttgtgaggagaagaaggcagcgcctagtaggtggtgatgtaggctgctggaaggaacagaaatgcgggacccatgacctagttttgggctggttgaaggaggtggaggtggagatgggcctcaaccggcttggctactatgctttatttttctctttcttttcacttttctaacaagagtatctggactacaaagtagatggcaaccttgtttagcgagcatggcaatgttgaaatcatgcaagtgccgaaaacccatgccaccatcatatttatgagcagccatacgatcccaagacctccaaataatacctttccctttactagaagatgtcttccaccaaaaccggagcataagtttttcaatttcattacatgtaccaagtggaaggaggaanacactcatagcatatgtggggagcgattggacaacagttttcaagaggattttttggccggcacgagagagaagttttccatcccaactattaattcttgcaattaccttggtcttcagaaatcctattacagcatttttgtttctcccaataatgtttggaagtcccagatagaggctt

SEQ ID NO: 100094 - DNA, 997 bp, Cannabis sativa
attgtagtaatacatcatcatcttcttcttatccaataataaaaaaatgaagaaaggatcaatgagaaagctaaaggtgtctcatttgaagaagaataagtcaagaagttcaactatgaagaagcttaggcaactccaaaagatcactaatccaagttatgatgatcaagaagaaaccaattataacaaccttggatctttgtatcaaaatactgcaaaccatatctttctacttcaagctaagctcaatgctctcaaaactctctccgccttgttcggtgtttaatactatagattcgaacttagaccttctcttttgaaatatatatatagagaaaatatatatagtatttattaataatgtttaattatctactatctataatcgtctaagtaaaaatatataaatatccaatattatttatgtaaactttagtactataacctgtattataaattatttataatattgttcccattaataaagaaaaatagtattgtaaaataatgactatgtaagaatttaagatgtgaaatcaatttctgtattgaattagttatatattattataattttttggttttttttttcagtaaattatatatatttataaattaatagtattttatttttaattgtaactataaatcaattcactatagtacaataaataacaaggctcaacttaagcgaaaaaaaaaaaagaaaaacaagacacaaatgtatttggattttgttttataatatttaactttttatttataatattttgtggtagtgctctcctaacggtatacccctccaaaaaatacttacaaaaaaaattctctgacaaccaatctatattatttttacctatcttttttatattaaaagacttgaccttattgcaaacattaaacttaatatttccaataattgcagaaatcaaagagagtttaagatttcaaaaagcatcatttcgaaccttctaaatatgatgaacacaagtataaa

SEQ ID NO: 100095 - DNA, 646 bp, Cannabis sativa
atttctaaaaaaaatgtgccgttagataaggtacttttaatatataaagatgtaaattaaattttgtttttaattaattttttaatttcattaactgtttatatttttccttttcaaaataattgcaattactaatacacccttccttatagtgccacctcaccattttaacagtaaaagcaaatagagtttaacagaaggacaatgttactgtatgtgtaatagttaaaggggtattaataacaagccttatattataaggggcacaatttattagtgtaaaaagttcaggaggcaaatatactaattattcaaaaaaaaaaaaaaaagttggttttcctaaaagacatagtaaatactaaatagtaatataataaaaattattggaaaatgcttaggtaaagtaatgaaaaatgactgtacataatatttttttttattatatgtcactcttatatttaataccaatatttaattaattctttttatattattttttttttaataatttcatgatatcagtataaggaaatacttgttctcaaaaaaataataaatacataaggaaaattataattaaatatatgatacacctctaataattctaaaaaggatttaaaaaaaatacaaattaataataacttcc

SEQ ID NO: 100096 - DNA, 773 bp, Cannabis sativa
tgcggctgcaccagatgttattccaacctgcttaatttaaacaatattaaactattttgcattttattaaaaaattcaatatacgtacatacatatatgtatatgtaaaaaaatctaaataatgagccaaataaacttaccaataagccttcttttagtacaataagtctggccatttctatagcttcatcacttgatatctacaatcaaaaaaacgaatgattcaatccaaagatttatgtgtactaattatttttcacatttttctcaaaagcttatacataattatattatgtgacttgtaaatcagttataatactaatgaaatataataacaaatatatgtactctatgaaggcatacttgaacaaattcatcaacttgattgatgtccaaaacttctgggataacttcaccaccaattccttggattttatgtggacctttatgatttgttaaggccaccaaacaaattattatatatttataaggattaagaaaaaaactgtcatacttcatattattaatatcaatcatagttacatatgattctcaatattcttaccaggtttacccccagacaggacagcactttcagcaggttcaacaccatagagctaaaccatataataaaacaaatcaaggaacattaattagtgtcacaaaggtaatatatataaattaagaatatttctcaaaaaatagaataataaaatgatttaaccttaatttgagggtttttgtgcttaagaaattttccagcacctgtaata

SEQ ID NO: 100097 - DNA, 1486 bp, Cannabis sativa
attcatcatggaattcatataaagcacagtgaccatttgtcaatcacggggtattgtgatgctaattgggcatgttgtctcgatgataggaagtctatagcagggtactgtgtgtactttggtgagtcttttgtggcttggtcctctaagaaacagacagtggttgctcgctcaagcactgagtttgaatatcgagcattggcccaagttgcagctgaaatcatttggattaagtccctgcttgaataaatgcatttcaagctgccttctacaccagttatttggtgcgacaatatgagtgccaaagctttggcatcaaaccccgtgtttgatgctcgcacaaaacacattgaacttgatgttcattttgttcgagaccgtgtgcttcaaaggatagtggaagtttgatatattccctcacaagaacaggttgatgattgtttcacaaaggggctcgcacactccaaattcaaagcttttattgacaaacttggtgtgatcaactcacccctgcgattgaagggtggtgttaagacagattaattagagtaatacaatggctcttttcctaatactggtttaggcatagaactttctatttgctgttatactattttgtcctgtatcattttgttattgcctcttcccttttattctctctgctttctgctgtactctgccacctggcataatgtcgttgtaatcattgtgtgtatataaatacaatcattgccctcagtctccctttgagctgagatttactcctttcactgtgttaatactctcactgttcaatttgaaaactctaaatttcatggtcacttgttctctacctttcttgtatgtgacatacttttgaacttgtaaaagttgatcttagatatacttatcacaataattcttatatcttggagtagcaccaacaagcaattttaagctttgttgggtcgacgaatcgtaagtaacgtcaaaagaaataagcccgtcctttttataaagaagggcataaaatgtgtccttgttgtataaaacatcctcaaaagtgtttatagtgggaaaagatgatgatattcaaggtatacgaattcatttattgtgtttaaaaggtctaatataagtcaattgtaaaaaactaccatatatgactaccatgatgaaatcgctcgtttgaatttgatactgaatttggtttaatattgtaaacctatagatatcctaatctcaataattgtagatatggctcaattgtgatctattcattcttggaggaaatagtgggggaaggtatagatattcatgatactttttggttgtggcttatggagtgttacaacaaagttgttatcaagtgtggccagccaattgtgtgtattaacaacgttcttcctgatgtcacttaattagttgttctttactgttacattgagttagttaattagttaagtaatctgttgtaattctgttacttctattcttgtttgtactt

SEQ ID NO: 100098 - DNA, 1632 bp, Cannabis sativa
gggattgcacagcttacccggtatttctccttacagatcacgggactactgactgtcacagcgtacgttaccagacttccttcagctctcaatgaaagtaccaaaatatttcccgaattttttgaaaaccaaatatttttagagcttaaagaaataagaaataataaataataaacaaatagatttttacatggttcaggcgttaataatctttagtccacgagtctattgtattggcctctttaggccattttttttgaaattaaaaggtggttacattaaagactactttgcttcactcgagagatttgttgggatttttgcagtgtttgtaagtaaaaatgttcttctttctctaagaaaaataggactatttataggtgcatatgtgataaatggcataccctttacccacctaaggtttcatactccatacgctactaataccaatactgctaaaggacaatctaaccattggttggtaagaactttcttcattgtgtggtttacaactgctgcaaggacttttgtacgatccagaacatgcgtcacgcaaaggtctctcctttgcaaaatactctctaaccagtcgttgggtaaaaagcatatttgagggtgcgtacgcgcactaccatgatctggcaccggggacaaaatttgatcctgggtcagaaaaaggtgtaattgtctatgaagtgacttttgcaagacgctgacgtggccaacatctacaagacctttatcatgctccggattcttcattaaaagaagttactcccgaaggtcatctgctctcgttacctctcaagtttggtagacgttccttttctcggtaacctcgattgatcatgtcgtggttgtattctaccctccgatcgcgccacatgtcttatttgcgaaaacttggataacacaagtaatgtaaacacatcaatgagaataatcgttattctaattctgattcatgcaagtcatgtaaacaatattttgatttcgcatcaatccaatttttagtcattccgattatgtgtaagtcaatgtactatagtgtgttccattttaatattaaaatgaatgtatttagttagtctataaactaaaatataatattatatttgttatgaaaagttaatatgtgatatatttgacacaatcgaaattataagctccaaaacactgcctcttaagaccaaaattataatactatttgcaataaataactttattcaaaataattataatatcatacaacctcaaagatatacatctctaaaaaaatgaaacaatatctaatacatcttaatttgccataattttaccctataatacagtatagtaaaaattgatacaaaatttatttatttttcattaatatttatttattaaaaatatgtaaaaaaacaacaacttatctttatattttattaataataattaaataataaactataaaatttaggatttaatgctatggctaaagataataataaaataataaaaatataaaagtaaattaaaaagaatatataatgtgaaaaaataggcttatttgtaatgcaggtccctaagctatacatgttttggcaagttggtcctcaaactttactttttttttgcaaattagtctccaaa

SEQ ID NO: 100099 - DNA, 854 bp, Cannabis sativa
ccattattttcactaatgaactcatgggttttccagattcctctggtcactggggaagcatgacgaggaagagggcatctccaaaagcttaattcatggcaatacttgtccaaaaaaagatgaaccccaaagtgtatcatgttcttttagcaatataccatccaagtttcgtcattaagaaaatattaatgtcacgaaagctttatatatcaagacctttactgcctttaggctcgcaaatagaattccaattaaacaaagatagaaatcggccttcatccatactccctgtcctccaaaaccgttaaccaaagcatcaagtgcatttgtaatcttcataaggagaagagaagcaaacattgtataaataggaatagttgaaataacattcttaatgaggaccgttctagcagcctgagaaagaagtttaaccctccacccatccattctacttttaactttctcgatgttgaagttaaaattgttgcatctattgcgtttgacaaaaaaagggttgcctaaaaaagattcatcgccacttatactattgaatcctaaggaatctaagatagcaatgcctaaactcatgtcacaattattagaaaggagaattttggatttgctgaatttaatacattgcctcaaccttaagtaatacttatgtagcacatcctacaagtgttccaccacttgtaaatctgccttaatgaaaaaacaagtatcatccgcatgtatcagatgtgagacattggggttatctctcgagatatggcatccttcaatattccctatttgctctttaagcaacatcaatcgagaaaggactttcgagcattgtctacttcaaatcacta

SEQ ID NO: 100100 - DNA, 2900 bp, Cannabis sativa
cggatctgaccatcgacccctcatcttaaatttacaccaccaagtccacgcaccatcctctaagacgcgctttatctttgacagactttggctagatgaggatggctttcatgattgtctccgcaaatcttggacaataactctccctcagtctgaatgtgacccaattctcaatattaaaaaaaaactggatcaatgctctactcaccttcgacagtggaaaacaactcttggtccgcccttgaaatccaaaataagggacactcagttacgactcaaatctgtgcaaaattgcccccatccaactgaggctcagctctcgcttgcgaggaaactggagaatgaacttgatcaactcttatacaaagaggaagagtattggaaacaacgatctcgagtgaattggctaaaacttggtgacaagaataccaagtattttcaccaatttgcttcctcaagaagagcaacaaataaaattcattccctgctccaccctgatggttctttaactatggataatgactcttttatctacattattgagcaatacttctcccaactctttaccagtcagaatcctagtgttgaactcattgatcgcatcctaacaggcatcactgagcatatttcagattcggaaactgaatcccttaatagtacttatacggatgaggaaattcaaagggctgtttttcaactggccagtgataaagctccgggttcagatggcttcactggcactttctttcaaaaaaactggcacgttattggccaggatgtccttcatgcggctaaaggttttcttaatgggaatgcaaacattggagctataaataacacagtcattgtgcttatcccgaaacgttcccaccctcaacaaatcactgattacagacccattagcctatgctcgaccctttataaaatcatttcaagggtgttagtgaaccgtctcaagcctattcttagtcgaatcatctcccctacccaaagtgcttttcttccgggtagactcatttcagataatattatcattgcacaagaggttacccatgccttagcccatcggaaaacgggtcgaactggatggatgggactcaagctggacatggctaaagcctttgatagagttgaatggggattccttcaaaaagtcatggaaaaattcaaatttcctcatcgctttatcaacctcgtgatgtcatgcatttcaacggttagcttctcattttccattaaccagcaaatattgggatctgttacgccttcccggggtattcgtcagggggaccctctttccccttacctctttctactctgctctgaaggtttatctgccctcattgcccaacacactttgtcctctcggacccacaaccaaggacttggcctaaaaattgctcgaactgccccaattatttcccaccttttctttgctgatgacagtcttcttttcagccaagcaactccccatgcggcggaaacaatcaaagaagtgttacacgattacagccttgcctccggacagatggtcaatttcgacaaatcctctctctacttctcacctaataccactgagaatattaagcaccaaatcaccacccttttgggcatccccattcgtgtttccattgaaaaatacctgggccttccccaatcctttggaagatcaaagaaagaagcctttaattaccttactgaccgcgtctggtcccatctgaacagatggaacgctaaacacttctccaaaggagggaaagaagtccttttgaaatcggtggttcaggctattccttcctacgctatggcttgttttaagatgcccttctccttcctcgccaaaattgaatctatgatggcatgtttctggtggggaggtactgaccatagtagaaaaatacattggaaaaaatggtcagcgcttagtctttccaagttccatggtggtcttggattccgctctatgaaggctttcaaccaggccatgttggccaaacaggcttggcgtttgcttcaggcacccacatcccttatggcaacagttcttaaagcccgatacttcccccgcaccaccttccttgatgctagcaaaggccgtagaccgtcgcacgtttgggtcagtatctcttggggtaaggagctccttaagatgggaattaggaaatcaataggagatggcaccacaacctctattttcaatgagaggtggatcccagatcatggtcagattagttatttagcacacctttcggacgggatctccaaagtctctgatcttataaccccttcccaccaatgggacgttccatacattgattccatatttccccctgacattagccaagccattcaatccatcaccctcattcccattccctatcccgataccttttactggccacttacacctcatggcaactatacagtaaattccggctatcatctagctcacaatctaaatcataaacatgacccttcaccctcccacaacactgacacccaaacctggtggaaaaccttatggacacaaccgattccctcaaaaaccaaacatttcatttggcgagcttattatgatattctacccacgagtctaaatctgcaaaaaaggaaaaccatcaccacatcgacctgctgcagatgctcaaatcaaaccgaatccttagagcatgctctcttcaggtgtggaactatccagaaggtatggaagttaacaaatctttttacttttgtttcaaagtatatcacactaacttgcagggatatccttcacttggcgagcattgagcttaaggcaaatgagttccaatttttcctctgtttgctttggaagatttggcactgcaggaatgaattccttcaccacaggcggattgtggcaccagttcttctactccata

SEQ ID NO: 100101 - DNA, 837 bp, Cannabis sativa
tttgtaatgattccttctgggagatggaccagaacactaataatttcagggcatacggaatgatggagatcttgtccacaaaagcaaaattctgtaacatccttggactagtatgaaataggttgtcaattgtagaggagttcgcctctcagagtacagacaggttcaacacttggagttgggcccagattttgagtggggcacacttgccctaaagaattacttcacagagctttgcacaaaaattgggaattctccattctatttaattcctccatcttataagctcttgtctgggtggtatgttctatgtaagatgtgaagcttgaggctccaagcccaagggaaataataattgttacaccatgaaaccccaacctatgtgtacgaataaggaaaaaattgggttttacaagctggagaagtatttagaggtgcatttccctacaagattcacattgtgttctcctaaccttcgggagtattggttttcctctatagatttcccaatgaagagggtgccaaacctttcctcgaacttaaaataccaagtatagacttctttgcacttttctctatttggcactcttttccttttcaaacttgtaattgatgagatatttttttttactcgtggcagctcctatgcctcggactctggagagtgagaagttgtagaaaaaattggctctatacaactgcatcttaggccaagaaccgaaggtggaaggctttgtcaccaccaaactgctccgcaaacatggactcatagccaagttccaaagaatcgataatgttagcagttgaggccttggaaaatattgtcgttgaggtctc

SEQ ID NO: 100102 - DNA, 2452 bp, Cannabis sativa
  modified_base (69)..(69): a, c, t, g, unknown or other
cctcctgagaagttttcctaggaaacgtgcgagtgaggacaaagtatgctggaaatactcgtgttggtntgtagggtcagtcgtcagtccatgaggcagtcagggtgacgtactcgtgtataagagtcattattccgtgggtgtaaaggggcaatgatgaaagcggggacgttacatatatacattctaatttttaaaaaaatgtaaatttaatttatttattttaatttaacatacatttccacaaaaaaaaagagtatatatttaataaatatatataattttttaatttagatcttacaattgtcctaatttaaatttaggtgtaacttgttttaacttcaattaattaaatttttaaagcattattattaataattcataataatatctctaatataacataataattgaaatgagttaataatataatataatgataaaaagaatattctatttctattttttaagtgatcaatatgctttttttgtgttgtgattggaaggtgagaaaaaaaatattgtgttaaaataacattagcacaaaaatagtgttgtatgttaaagttgctctatatatgaatccaataattaatatctaggaattgatgtcatatttaccattcaatcattaaaaaatctaggaaaacattattgaaacaaaagcttcaattcaaggattcaaatcaaaacccaactatgtatgttatgttggtcaccatgcactaccaatgctttcatatatacctagatagttattaggtagaagaatatatctctagttatactcaaacaaaattaattattcttattattatttatagtaagagagagatgttacataatgacatagctagcttaggtttgtatatatatagagatttcactattaaaaataggttaaatattagactattttgtaaaatttattaattaaattatttattttgttaaataataaattatatttaatatttccaaattaaatagaactaaatagtaccataaattgatttttcatcaaaataaaatttaataataactcgatatagagatgttatgataaaacttgttatgttttttacatctgtttctgtaaattatcttcaaataagttatattaaaataaaaagattgttgaaaattgagtttcaaagtcctatttgtactatttttaaaaaatacaaggtctattttgtcattttaaaaaatagagggtccaatcaataatttttacaaaatacaatattcaaaatggtatttactcttaaaaaaaatcctcatatactttagtttagctatattgttactacaaaattactatttattgtgataaaattatttatttatgtatcattatatatttatatatatatatatatattaagttgactaaaatacattttatgtctaaaatttaaaattttatttatggtgtgactaaaaatttatgtgtaactttgtttttgtcattgtgttattattattattattattttataatttgtatgtttgagcataatacaaagacatgcattgttttttttttttgctagttatttatgctcttcttgcaagaataaaaataaaaagttaatatagaattaaagagagataccaaaattgaaattagaatctgttggttacatgcactaaagtggtatatttaaaaaattaaatattacatattatttatttatttaatgcagtaaagtaatatatattacaaccaatttacatataatatttaatattttaaaaaattagagtttttcgtttcctaaatttatagctacaagatgttgttttttttcttcggccactcgctagccttccttaggcatatataatatatgtgcagcttggtcagggttatattttgctattgcgatttaatttttgctattacaattagacttatttttatgacttaattttgagtgttttagtcttgtctgtgtgacattgctatgttttcttttattttgtttcgtcgttgattcttctttgttctttgatggtttgacatcaaattgctgttagtatttgtgaataacatggttctctgagactaaagagattgttagtagtgcagttacgtaccttacacaataattgagtgttcaagctacaagattgaatgaacttgatgcaacaatttttactattatgtcttctgagcagtcgaagaaactgagtataagtattgttaaggttaattgtgatgatgtaatctttttaatcaaattttatttttagttttttttttgtcaaatgatctgagaattaagcggcggattattttgctcgttttttttttaattctaatcctagttgtgtctcttataaaagagatgtcctgatttgactattattaataaaattgcataatttattttttaaaaaaattatatttatattacatatcatttatttaaaagattaatctaac

SEQ ID NO: 100103 - DNA, 1459 bp, Cannabis sativa
aagccataaaaaaatggcacaaaaactataaaaggcacataagtcgtaaaaagtattaaaactatcaagaaaaatagtgcaaaaacccatgtggtctcataaataattttaaacatatattaatactatttgaatagctagtaaaaagaaacacatcaaaaccaacaaagaataaaaatattaaaatattttatcaaattttataacaaaaactataaattaatcttaacaagattaattagagaaaatataacaatcaattgtctaaagtctgtatcaataaaatttaaacaaaattaaataaaatagataaaaataaaacggaaataatttgaccacctaaaaaacattagtattattttaaaatttaataaaattaaaaattaataccccaacaattaatacccttttgcccaaaactaaaattaaaaaagtaaatcacacaattattaccaaagcctgcaaataaaagtgaaagcatatctaaaataaattaaaaactaaataaaataataagaacaaaatcatattaaagtagcaataaagaaaatttaaaaacggtcgtaaatatattttaaatgctaaaattaattatagaaataaaaattaaaatataacaaaataatcaaatataaattacaaattcaataaatgcacttataaaacaaaattaaaattaaataaggactaagtatagaaatatatatttataaaatagatttgataacaataaatataaaaggaaaatattacttaactcatcttatagataaatagaagaaaacacctaaataaaactaaataaattcatataataatattaaagagctgtcaagaaacgtaatgttataataaatgtaataaaagaaaattattatataaaagtattaaaaaaatataatagtagcaaataataaaaagttctaataataaaggtaattaaaaaattactaaaaaaatactaaaaatcataccgtatattttgccaccactctcgtcaaaggaacaaataataaaggtaattaattaatatatatgtaattaaataatataataaagataacaaaaacgaagaaaattctgataataaagttgattaaaattaccaaaaaaaatgctaaaaaaccttcctgtaaatcgccaccaccctcgtcaacggaacaaaggagctcctccaccatctttcttccagactcggtaaaccgaaggctttgaatcctcagtcaccaaagcgattagtaaacgttactattcattttgaattaatccaaaaagtaggagtcgcaaaattataatgattaaaaatcagaacaaaaagcaggaacacatctttattagaacagagcttgatatgatttcttgggacaaacagataatgtatagttcaataaaaattaaaaaacactaaaaattaccttaacaaatgaggattctaatcgggccattgattatgccacgt

SEQ ID NO: 100104 - DNA, 1610 bp, Cannabis sativa
  modified_base (1551)..(1579): a, c, t, g, unknown or other
ataataataataataatatgaaatcgttcagatttaaagttttttgatggcttagttagaaaatatatgatttaattagtaggaacaccacttttgtttttgtcgatgaagattattttaattcctggtatgagatgttattttttcactagcatgttgattgtgtttcatacggtgatgtactcttagagagtctgcattcctaatgtgaaaaaaaataatagaatatataagaggaataatctactccttccatgatcaattaattttaagatggaactcatttattttattccaaattttaacatagcaaaaacaaaaacaaaaaaatatctagtgactatccaaccaaaaaaaacaagaactaaaaaaaatagccacaaaaaatctaaaaaaactaataaaaaaaaagaatgccaccaaaaattcaaaaatatcgatccaaaaagtaaagtaaaagagtcacttgtgattagggatagtgagccataaaaaaagtcacttgtaatcgagttgtctaagatagagaacatataaaatagtcatcatcttgaccttccatagtcaattagttttgaaataaaactttatttatcttatttcaaattctaacatgtacttcattagaaaaataaaaaaacaccttatattagtcgacttcattgccaaaataatgtagtgtaagacattacgtgtcattgtgtcacagactcacaaataatataaaaatgtatgttttgtctcacattatttctgtagaagtgatttgtgagatttatattatacgtactaagcctcaatctcatcgtaaagttttaatgatgggataaaaactatttcactgtgaataaatctataaaaaaaaatgtccaagaaatgtcaaaataagctcattttaacgtattttggagtttgctacatgttttattatttttgtttggtgtgggcagtgggtctaaagaattggcaatcaaagtaacttttctcccttattttcttcttttttaccaaacaaagtgaactaacaatagtgaatctattgaaggatgaatgaattaaggaatgttgaatagtgtaatctactgttctttttattcaacatttcttaatgataaaattattattttcatgatttttaagagaaaaatttcattttacggtaagaaaattaatttcaaatgtgtattggatttttttataatagatattcacaaatatatatttgtaaacgttgtttataaacttgtacttcatactttcatagataaattttgtatttttgtaatgcacaatattttttttattttttttaaagtatttttgaaaattcaccttcctctttgtcctccattccacctcaccacaccaatagttaggtccaactccacgtgagaactaggcctctctcttctaaattctggcccattaatatttttctttaagaaaagaaaggtaaaataggggaaattttttccttaaacctaaaataccctatattagtaaaataggacaatatttacttacattacccctgttggaaattattttacnnnnnnnnnnnnnnnnnnnnnnnnnnnnnttattaacatcctaaataagaactttctaaa

SEQ ID NO: 100105 - DNA, 1052 bp, Cannabis sativa
aaaaaaaaaaaaaaaacataagtaaagaaccatattaaaatttgataaaatgtaacaaaaacaataaagggtaacatatgaaacttgaaagagaaaaaataaattaatatatcttagcaaaaatatggccttgttttggactaaattatcgattctaaattttttgactaatttctgaaatattcgaacttaaaatgttgttgatcgatcattccataactatccatctgtaatagtgcaagttagctcttcatatcactgatgctctcatcactatgtagggatcaagactttataaatgatcttgtatttcaatatgatgagccttgttggatctacaattttaaaatccatttcatatatataagtgattgcttaagccttttcctgaaattcattttatatgtaaggtgattgcttaaaataatatattatatataaatatatgtataagaatgtatacaaaaaaaattagtacattacacaataataattgaaaatgacgaatacataccttattaattataatcataccaatagctttcctttccaatctcatatgataattttgtaaaaaaccttcaagttctataatatatatatatatatatattatatggtatatatgatagcagtctcttttatgtcttctttatatgtctaacattgagtaatagtaggatatatatattcacagtaaaaatattggggagttttggtgatgaaaaatatcatgaaagagccatataatatgacatattcaaaagtactaatagaaattaaaaaaatacataccttattaatcataatcataccaatagtttgacgctcttcccaatcccatatgatcatttttttaaaataaaaaaaaacttcaagctctaaaatctatattgttatggtatatacaatagtctctatgtctttttcatgtcattgagcaatagtaggatatatatatatatatgtatatatatatggcaagaatggtgaatagtttgggtgatgatgaaaagtctcataaataaatacaaagaatacaaatagttttt

SEQ ID NO: 100106 - DNA, 1330 bp, Cannabis sativa
taaattttattctattctattcctattcccattcccattcctatattttcattcctcccaaccaaacgcctctaattaaattatacattttttttcttttttttttttattttaatcaaataaacttcattaaaaaccattttcaacatttaacatcaatctaaaatacaatttaggttgtggccgcggctatatataataatgattttgaaaacaattgggagttatatttgcaggttgcacctcctataattcttatgtacaccccaagatttcaaatacatgtcaatttttataataattctagtgaaagatttgccaattaaaagaaaaagatagagaaagaggaaaaaaaaaagttggtggggtatacttctttatttaaataaataattaaatgggggtgtttttataaaaaatgatattttaaaaaataaaatgagataaacttatatatgagatgtacttataatttcttttgggtgtaaatataagtagccaaataatttattcaatgtttcgttctcttatattaatttagcaagccaacaatatatacgtacgtactatgcgtatatatgaaagagggtcttatatatttttatgttcgtacgtttttcacatttcagtgcatgatatgatatattatgtatatatataaatttggtgttgatgatggaaattaaggaaagttcattagaacaaattaaaagatgacaacgtaggaagcatggacaagtacgtacttatatacgtacacacacaagttacaaacaaacacatgcaatgcactctcttctctttcatttcctactacagtttcttttgtaagcacatgagtataaagtaagactatagtaggacttaatcaacttttttcttttttactctgaggcaaattttttttaaaaaaaatactgtgtaagtgttatattacatattgtgttagtttttacggttgttccacagttattttttagttattctactgttgttttaattggtctattttgttgtgtttacggtggttgtcgtataaaaaagacagtatttttataaaaaaataaattctgtaacaataaaattgtaaatttttatctaaaattcaatatttttgtaaaaatcctatatatatatgatcacctagagtgtagattgacccaaaaagaatctgttttgaacgagaagcaggtgaggcccaaatgtaagagaaacacaaataacaaaatttctaaaaatataatagggaaatttacaaaaatactaaaatttgggttaaattttacaaaaatactgtcacacgaaaatcttttcaaaaatactgtatttt

SEQ ID NO: 100107 - DNA, 1458 bp, Cannabis sativa
aaaaaaatcgtacatgtaaatataataaaaactctatctaagtatatacttgtaagtaaattatactagagaaaattacgaatttttatattaggccagtttaattctacacacactgatttttattcttatcaatagaaataatatcttgcaatccgttaacaatcttatacattatgttaatacattaaagtatataaaactcgcacaatacatataattatataaatataataagaataaaaaatattgaacaccaatagtaacttttataatatggtttctctttatccaatgatggattaaaaatagtttataaattatcaaaatattttcaaatataattttataaagattaataataaaaagattcacatatcttcatgtgcctgttatgaaaaattgaaattacgtattttaaaataaaataaataataataataaaaatggtactatttcttggaaaatttgatagccctcctaaaaactaggtaccaataataattcagcaagcctttaatgctattggtaagtgtattaaattcatattgaaaatttcgtatgatgggactttgcacatttggattgagtagctagaattgaatcaattaattgtgcttggatcaacactagctagaatcactacatttctgataactaataataaaaaccaaacttttggtagttgtgagatgacatttaagagcatccctttcagttaatcttttatttttgatgcaataattctagctaatataatttttttttataattattaataaaaatttaaaattgtaaaataatttgatgaaataaaatatttatttaattaattaaatatttttaaaaagaaattattgaaagatttaaattcaatattgattctaatatatgctactatttcaaaatgagaaaataatgattatacaaaaaagagtttaccaacaatatatcaagtatctaaaaaatatcaattctcaaaatacttcaagtcttgccaatattttgatattcttcaaggttaagatcctcgtacgtgtaatcaatttgattattaaattactattgttggatttaaatccttaatatggactcatattggtgtattgctatttgaagtttaacctaaataaagtgattattttagtaattgggaataaattgaaaaatacatcttttttgtatccattaatcaaaaataccctcatattatatttttattaaaatatacccactttttttgactggattgcctaatatgcactcactctctacttaagtctagcatataatttacataacctaagaggtctaattgagacatcatccataaaagtgagaatatctaaaaaaatataaaaaatggaggtaaaaattaaaacaagtaaagtaaagtgggtatacaatgtaattgtacatgggtcattgtgtcttaaatgtcgtgggctaaatgtgtag

SEQ ID NO: 100108 - DNA, 619 bp, Cannabis sativa
  modified_base (565)..(569): a, c, t, g, unknown or other
aattctcttgaaaaagcaaggaaggggtatcctcgtctgaagaatcctcctcttcctgctcaaccatgatggcctttccctttccagccactagggtggaagattgagcgaccttcttgggaccatccctaatcctaatggcaggcgcaacaggtacttggtcaccatgaggagccttcctcttcttcttcttgctcggggcctcctgttcggatacaacctctccctcctggactgagataggctctcttgctgcttgctcagtcctttgtacatggtcagatcggtaaagcttgtacttgataaaattggctttagtaggcaagagagagatattccaatcgttcgagggaagttggagaatttcttgagccctctttctaagttccagagtgaacggaggtcatcagtaagacggaatgtgctgaaaattggtatgctttgtatccatgcccttaacaaagtagtaatcctccgcaaagccaccaattttggtcacctcggtatatgtggtatcggtcaggcacgaccctgttgggttttatgccataaataaaactcattnnnnnataattagatttacttattaatatagatcagaaatagcatttaatgttgc

SEQ ID NO: 100109 - DNA, 1404 bp, Cannabis sativa
atataattcatataaagttttaacagttttagtattcgattttgtgttaaaaaattaaaatactagatcaactgtcactaagtgattcacctttttggtttgtttaacggatatctcctcttaaaaatacaacaataacaaacaacaacttttggttgccttttattatttaattattttaacatgaaaccgaaatttgtgtaaacaagtttgttaattgtatttataattgtaaattttatgatattttttagttgtggtgttgttgtatgtttccttttttttttttctttttttttttgttacaaaagttgttgtgtcttagtatcaaacatcattaacattaagacagaccaacattattgcatatgcatatataaatataaattatcaaaatatatatatttttgataaagtgtgactaattacctttctcgacattatttttgatcggtggaatgtgcattttgaacaacccattatcattcgttcgagtggtcacatcttaggtcaattttgatacaaacatagaaatatggtgctataatatggtattatattatattataatagtaaataattagcattttttccacataatttttttaaatcattaaattatgcctattataattattaacgatttctattatattttatttaattttattatgaaatgagtagtgaatgatagttgcataaataaatataaattaaatactttttactgtttttatgtttatgaacgataaaataaaaggttttttttttataataatttaatttatatatttagttttttaattattaaataaaatgtgtaaattaatatttaatttatatttatttatcaactatcaactaccgtgtcattgaatagaatatgatggaaatagtatatgttagagtaaaagttatatttcaagaaatatattataagaggcacaatttgatagttttaaaaatttaatagataaaataacaattattctataatatatattacccatatatattatattaaaatgtacacatatattacaataattatttttaattgtataattaaacttaattacaaatcaatatataagtaaaacaagtgtataatttaaagtgtttcaacgaggtaatagggtacatgatgttatatttcaaaattacttaataattaatagagtagtttttgtattttatatatagtattatttattatattttaataatatgatactctttaatatcttttttcgagatataagtagagatggaaatttatactacggggactcgcctctaatggggtggggattccccgtcttggtggttaatggggcggtagtgggggacaatttcaatacccgaagcggggatggggcgagggcggggataatactatccgca

SEQ ID NO: 100110 - DNA, 1101 bp, Cannabis sativa
aatttttggccgaaatcagtcctcttccgcaggtgcaaaaataaagaaagcaaaaaatatcaattgaagcaacaaacagaaaacagaaacccatttcaaaaacataccaatattgaacaaaaatcacaaaaagcaaataaaactagaagaatgggcggagtaatataatacacataccttggaagttttttgaggaagaagaacacccacatacaatttcggctgaaatagggatgaagaattacggtttgagtttgaagagaaaagaaaggaaaatggggaatgagggtctgatgggttatatataggggcattagcgacggactattaggggcggatagtccgccgctaatagtttttaattttttttttaatttttttaattattattagcggcggggtccgctgctaatacctcgccgctaataatattcgaactgaatgggcaagatttatcccgcctatttattaacggcgattagcgacggactgcccgccgctaatagtattttttttttaaaaaaaaaaaattaaaccgcccaatgtctgacgctaataccaccattattagcagcgaattttgtccgccgataattagcgaatttgttgtagtgaatttttattacatttaaagtcgttgttacaactgtatcttacttgtattgtacctaaagtaaataaataagttgtaatttgtaacataatttgtttagttttatcaatttacaactatcaagatattagtataatatcaaagtataagagatacaatttcactgtttcaaggacactcttaattggatgttgacttaccatttcatgcacataaaataactccacaattatgtatttctattattcaaactacatcttattatctcaatacaattaaagattattgttgaaggaaacgctacattaatattttttgctccataaatggaatggaagaaagatttaaaaaaatgtgatgttgttgatataaacttccactttcactgatacttaaacagcatacaaaggacagaacagtaaatacaagtaaaatccctaagttgaccttcggtctctaaaaacctaacagaaattagttagaatgga

SEQ ID NO: 100111 - DNA, 1874 bp, Cannabis sativa
ttttatttttaagtatattatgttaaaccaaaaaatgtcgttagataggaacttttaatatataaaaatataagaaatcagaagatatttttttttaaaaattctttgagttctttttataaatttattatttttaatatatttttaaaattacacataaaaataaaattaaaatgatttaatattatttaaaatttctatatataaacaactattacgaccagtttattagtatatatagaatattttttaataaatattattcattaatagtcactaaaaaaattagggaattactttatatactatttttaatcttttctttttcaaatttacggtttgggttggtgatttcttcggtgatttctatgtgaagaaatttatttgttatattcgtattgagttcaagaaatataaatttgtgaattttgtaggttattagtaatattaggtgattttaaaattttatttgaactcaatagtttttttagtgtgattcattaatttcttaagttgataattttgatatacaatatataaaaaatcataccgttattttagtttatcattcaatatatttaaatgatgtagtactcgactgatgtaaaattattttttctcaaaatttgaaattttattattatcacattatatattatttgatcttaaattatattgatgataatgatttttatttatttgatagttgcatgaaaaatataatattttatagtataaatactattttgaatcttatgttttacaaaaattactgattaaagtatcggttttgttaaataacaaattgaaccctgtatttttcaaaatggtacaaaatagtaccctaagctaatttttttgtcaaaataaaaattaataataacccgagctagagcttttttttttttgatgaaggagggggtgttaaacaccccaattcattaagtaaaaaccaaacaaaacgtctacaggatagaaaaagaaaaacaccagaaaaacttaaggctacagcagaagaagatactacaaaagctaaaaacataactaacaccaaaaccaaacgagcagaacagaaaagatttcgtcgccatcttagcctgcgtgtttgttccactcaacataatcattcagcacctcatgattcagctcattgcagagcgtgatcccagtaacactagtctcccgcgcccatttggcaatgttgtgagccatgaagtttcatcttctcggcacatgtccaatttcccaattttgaaatcccttgcaaagctgttgaaaacggcttctaagattcaccaatttgaaattgctatccctgtcagtcgcataggagaaggccttgactacttcaatgttgtcactttggaatacgacttgcgcaaccttcttctctatcatcaattcagcagccatgcatactacaacagcttctccgattaaaggatctgttagatggcttctctcagttttgattgtaacaatccttccttggtcatcatgaaccactgttgctactaccattccttcatcatcacaggcaatgtcacaattgcagcaaagccacgactccggaggggggctccaagcacagaaatcctccacttcatttgagactacatgaagttgttccatgatttttctatttatgttagataacacctgccatatcgagttcttggattgaccatggacaatggagtttctttctttccacatagcttccatcacacaaagtgcaataaccataatctctaagaaggtgatgtttgatggtcgaaccacaaacatcaccttcatcatcaaaaacttgttgcgaaaattattaattactacgcaagtgcacgcaatcaagtagtatactcacgcaagtgagg

SEQ ID NO: 100112 - DNA, 2066 bp, Cannabis sativa
taattcttgcgtcaaaaaaaaaaatacccacaatatgaattttttatttatcttattttatttctcttcaattaactttaaagtttatttatatgctgatctgattccttattgtagctaaggatattattgaagacaaaagcaaggggcccttcgatggtaaatctatctatgatgacttgttctaaaaacatattaatttaaccaatcattcataaaataaataaataaataataaaataaaaaataaaaaagagtgctagcattgtaattagtcacaatattgattacttgttactaaatggcattttagaaatttagtcaccataaaaaattcttgtaacaaacggtcgcatgtaattacaaattgttactaatgtatagttttagtcataacttactgtatatatatatagcaatcaagtcatatcaaattgtaattttctaactaatattttaaccacaaactttttatttatttatttattttattagatgtgttctttgtttgataaatggagggacaaacttttttttataaccaatatatttaaaaatatttttgttagtcacaaattattcacacagtcacaacaaaaaaaaaaatattgttatactttttcattttaattgaatgataaatttatgtatttttttttacaagaaaaatttatgtattgaaaacaaaaagtctctcataaaaatatatggaaaacacaataaatcataagatattgacagtaatactacttaaattatctaaattataactcttagtcctataaactaaatttttgagtgtaaaaccctccaaacctaacttttgtttttgtatttactattctgttagtgaaccaaagttatgtcctattgtgtattattgatatttatacaattgtacacataatatattctcattagtccacatataattttataaacattaatattaaaaaataattcaaaaatataataaagaattcaaagacaaaatagtgagtatcaaaagtaaagtttatttgaaggattttttatctttgaaaatttacgaagttaagtgttataatttatatagttcaggcagtattattgttaatattttattaattatatatatataaaaaaaacaaaaaaaaaaagagttactctacttaaaaagggcaacaactttttataaatagaagcatatattgcagttaaatatattttataattgatgaatgttattatttggcactttaaatgttcaatattatatggatgccatattttataattaattagcaattttttatattactattatattaaaatgtatgaaattcaatattaaaatgcaacaatatatgccacgagtgtggtacttgacaccttcaattcaatgtgtttcttataatttctcatatttatgacatggagcttgcgcatataagctaatgtaatattataatttacttttatcatatgtttggacactataattgagggagtggttgactatatatactataataataacaataaaatattttattaatttaatggatgcagtgtatacgaatggtaagttttgcaagagcccaaagttgaccaatccaaatgatttctttagctcaggactgaacagtccgggagacactaataacccacttggatcaagtgtgacaactttgaacgtagacaactttggtggactgaacacactaggcttatctttggttcgcattgactatgctccaaatggtgtaaacccacctcactctcaccctcgtgcctctgaaatcttagctctcactgtgggaaccctctatgttggcttcgtctcatccgcacaagatggaaaccgcctctatgcaaaggttttaaacgcaggagatttatttgtcttcccaattggattggtccattttgagtttaatataggcaaaactccagttgttgctttcactgttttgaatagccaaaaccctggattggctaccactgctaatactgtgtttggttccaaccctccaatcaatcctgatatgttagactatatatatagtgtatgtaatatagcatat

SEQ ID NO: 100113 - DNA, 1038 bp, Cannabis sativa
ttttcatcggagagcttccatccgtaggaagaataactacattcgccatattgccctccctgatgggtcaatttctcgtgatactcctaccattgtctcccaattccttaatttttatactactcttttcagttctcaaggagtctgcgatatggctatcaattctattctccaagggatttctaccagaatctctcctgagcaatcagcttacctcgaaggaaacttcactgaggctgagatcaagcaggccttgttcttcggcctttcgggtgacaaggcgcctagacctgatggattaaaccctcttttttaccagaaaaattggtctatctttggtcaggatctctgtcgtgctatgcttcacatcctcaatcataagggagacatttctttgatcaatgatacgattctagttctcatacctaaaaagaaaaaaccccaaaatttccgtgatttcagacctataagtctttgtaatactctgtacaagtgcatctctaaggttcttgctaatcgtattaaaagtgttcttcactcgatgattagcaccaaccaaagtgcctttctcaaaggccgtcaaatcactgataacattctaatagcaaatgagctcattcatgccattcactcaagacgttcgggtaagattgtttgggcttctattaagcttgacatggaaaaggctttcgatagagtcgaatggcaatttatccatcacctgctcactcatgtcggttttcctccctcctttacctctcttatcatgaaatgtcattccactgtcacttatcgtttatccctcaatggtaccctcactgacccttttcaatcaacccgtggaatcccacaaggagatcatttatctccttaccttttcctcttggttgttgagggcctttctgctgctatacgtttataggagcttaatggaagttttcctggcattcaaatctgtaggggagccccttctctctctcatcttctatttgctaatgatagctgttgggttttctgccctaaataaaactcatttca

SEQ ID NO: 100114 - DNA, 970 bp, Cannabis sativa
  modified_base (805)..(808): a, c, t, g, unknown or other
gttcaggggaaatttttaacaaccttaaaagttcaggggcataatttagtacatgtcaaaatttgggggaaaaattcctaattagccttaatattattatattgtataattattaacttatttgacaaatatgtaaataagaagttatatgtaattagtatttaaaattcacgcattgtattattgtattttaaaattgagtgtgcttatgtgtaattagtaggatatatagtaattatactatttagtaattatcaattcttatgattttaatacaagattagtgaagtatgaacgaatacaaatttaaaaaaagaatggaaataacaacaaagagttaaaaacaacaataataattatgaataacaagataattcaaaatgaagaattacataatagagtaaagtttagtttatcaaacatcattgatttatatgaagtcaattcttccaagaatgcttgccacattagttcaatgcttttcaaataatatttactctaagtcttcattagattgctaatggcttatctcatgatttaggactttaaatcttgaaatgtttagggttaacgaaatcctagaacaatttgaagaaaactaaatgatcaagttatgtttgctctcttaatactcttatacacaaatatatagtgtaggaactgtcattagtattaacagtcttatatatagtaaaacataatataatttagaaaaattttacggtgtcgaagtacccttatctatttcgtcatttagtataattttttagttaatttttttatgattgtgtacgttatagttatnnnngatattttataaaattttgagaaactaattagaaaatttaacactctgaaaaacaaggttcaaatattctattgcatgcgtaactcttttattttacacacgtgtaaaatagattgtttaaacattactttatatactataaattattctaaattgtacagt

SEQ ID NO: 100115 - DNA, 1166 bp, Cannabis sativa
attccattcagttcatcttccctgattttctctgttctttgctctttttcattctccttcactgctgctgaccaaattgctgatggtctaactaaggccatttctagctctcgtttggatatgtttagacacaaacttggtattggtgagtgtactaattccaaatttgaggagaactgtaaaagaagttcgttatgttagctgtaggggttagttattatagtttgttattctcttgtacaactgtactctttcggttacagccttactagcttaaggtttgtgtatataagcttgtaatgccctttctatgataataagactattcttttcagtcttctctttcgaactctttctctctggttcatcaatggtgcgacacataatttttaacgagaataaaagtattcagaataatttaagttattgatcgttggtgcttgtggtaattaaagtattccaaatggagagagagaaaaaaaagttgtgaaaattgaatatagaaagaaaagataaaaattaaaaagatcatgcagaagtatacatttcgctattcaattcgacagcctgttgaataattttagatttaacccatctgtaaatttctagtgacacagcagtaagaaccaaaatgactagaattcctacacaactccatttccatttggtaggttgattttgattaaggatgaccccttcaaaaatatctgctattattaggactattatcacataacccataagccgatgataaatcccccagcttttccagccacaatgatcatactcctcttcctttttcggctgccaaaaaatggcaaccatctgatgaaattaatcaaataaatcatattataaaaagaaaaatatttctcaatagaaaatttagtcaataaaatgattaattagtacatgcattttacctgtatagttgtgagtgtaaaaataatgataccaagaatttgatgtgatctaagctcatgagaatgttgcttggaagtatggtctataagtattccaataagccatcccaatgtccccaaaacatatccaatgctttgacacattatgtgatatgaataccattcattcaagtgaatgggaaatttactaaaataccttgctattattaccccaacaggcagtagaattccccatcctatgat

SEQ ID NO: 100116 - DNA, 592 bp, Cannabis sativa
aaggaaatttcttcatctcaataaagtagctttgcaagaaaaatatgaagcacaaaaacaaagggatgaagtaagaaaccagttgcatatcctaataaaagctagcacatcatcagattatgacaacatatcaatcaacaccgcacacacccaaccgtactatgctgctgcagcaacaacagaagcccctactttaacaagcagcagttccagcactacaaggttggaaaaacagcctcaggtggtgggcatggaaattataagcaacaacaggagcagaaggagtaaaatgaggaagagaatgagtgataatgaatcttttgtgtgtaatagtcttatagaagaagggatttatgataaaccattgcccaagaaagggaggcttttgcaggctgtggttgaagctgggccattgcttcaaacacttcttattgcccctcttcctcaatggaacaatcctccaacacccattactacactgcctatgcctctgcctctgcctgtttttcaagactcaataattgctaatttgccatattaacctttcaatctaagctcatcttgaataaactttatgcttgatcaaatccca

SEQ ID NO: 100117 - DNA, 570 bp, Cannabis sativa
agtacataaatcactgaaatggtaaaattgaattaaattatacaaaagtccttaaatataacaacctcaataattcatgagagaatttttaatggccaaacaagttcagaaaacataatttggtacatgtcaaaatttaggaggtaaaaatccttaattacatgttacttccctttctaagtatatgatatcaacattggtatgattatgtcctttataagtatttatttcaacattttctttgcaatgaagagaaatgtaacatacaaagttgacattaaagaaggtatgttttttcctttctaattagcaaacagttaagtaaatctagaatattaaattaaaattgacacttttgatccttataattatattgcaaattaatttatttttaagtaaatatagtattaagttattattagtttttgtataatatttagcctggtactactaatttttaaatttatgtattacataacatacagttacaaaagaacaacaacatctaaaaaaatatatttaagttgaaaaaatataacttatgtgataattaatttttaaataataata

SEQ ID NO: 100118 - DNA, 815 bp, Cannabis sativa
agagagagagagagaggagaaattggtcggtttatttcaagtggtatagtagagtacgaggtaacataggatggagtcttaccatgacttgtggaggcagctggctaagattggagtcaaaagagatagcgtagaggttactgagcaatggtcattttcaatatctatatgttcttcatcaggttcctgttcaaaatgagtaacaaaaggtagccattgactgtattggatgtgacttgaacatgtgtttacttctgaatttttaaacttagatgtagtgaagccagaagcaaatagaaaattgttttcattgaaagtggcactttggactatgtagattcgacttgagggatgcaatcatttgtaccctttgttgtttggactatatcataaaaatacacatttggtagatcgaaagctgagtttgtattgattgtaatcacggaggtgaggaaaggaggcacatccaaagactctaagaaagtttagatttggcttaactttaaaaagaacttcaattggtgatttatgcttgagtgtaggtgttgagagatggttgattagaaaggctattgtactgaatgcttcccaatagtagagaagtggaattgaggcttgagagagaagggtgagtcccatttctactatatggcaatgttttcattctaacttaccattttgaggatgagtatgaggacatggatgcctaaaatggatacttagagagtttagaaagggagttaaacttttacattcaccaccccaatccgattgaagagttttcattgtgtgatcaaattttctttcaacaaatt

SEQ ID NO: 100119 - DNA, 1584 bp, Cannabis sativa
ttttagttgcgatttaggttgctcggttagttactgtagtaatttttgtgtaaaattccgtaaaatactaaaaaaaaattattttaaagtgtaaaaaaaaaatctctttatttttgaattatataggttataaggaattttatggatcaactcaaatatggggttataaatgcaagccagacattttaacacggcacgagtttggaaggcacgaacacgactagatataaaaaaatgtaagtttaggcatgacacaatatgacacaaaaaatatgtgcttaagtataacacgacacgggaagtataaaaaatacgacacgtaagtacaagtagactaactcgaaaaatacaggatgcgacaagcttaaaaagcacaacaagacatattaaaaaactttaaaatttattaataataatacatatgtattttattaattataaataaattaaaataattaaaaaaaataaacataatattaaatattataattctataattaaaaatataaaattaaaattatatatattaaagattgttggtaaagtgaagtgtccattaggaattgttgtagtcagttaaatttttgctacaaattattagttggttttagttgagtatataaaatatttttgtattgcttaccttcaatcaatgaaaagagagcaccattacatttcattctctctaattttcattctctctgatctcttctttctctttctctaaaactaatatggtatcaaagccacctaattaatgagctctttgattatttaacatttataaataattttaaaataaattaaaaccccaaaaagaagcaaactgtcaaaaacagtgacacccatgtcaaatcaaagcttttttgaaaaaaaaaaaatcaaaaaacgaagtggcaaaacctggtgaagacacgtgtaagccacaaaatactaatgaacttttgtaccaatggcagtatcctgccgtataaaacaataaattaatacacagtataaaagtaaaaatacccttgtaacaatatttttgaaataaaatggaaaaagttagtaaaccatgtaaattttcctaaaacttatgcttgcataattcaagaagaaaaacagagaggaatcattattccataaactgaaacttcaatacctcctgttgagaactcatgtcaattttgcaggaagtgcacaaggtaattgaggcaattattgtcctgataatcgatatgattgatctgataatcgacctgcttgttctcattgtaatatctctagacacactattacaaaattttatagagttcatgaatatccacccgaccatcgattgtatgagagatttccaagagaggttcctaaaccaggaaatcaacttgagcgatcatcaactaattttgcagcaggcagtggcactaatgaggggatgactgaagagtgaaatttggctacacaatatcaaagacttatggttatactagcacagaagatgcaagaaaactctcagcaatctcaacaatctaatcaacgtgttatattaaacatctctagtataatgcaaatctcactcctaaatatgttgaatcattgata

SEQ ID NO: 100120 - DNA, 658 bp, Cannabis sativa
ccttccgtgaatacgattgttgatatagtttcttaggtaatctttacgaggtttggctttctaagtttagcctcttctcttttggcattcagccttgttcaaagatcattcatagaaagacttatgcttttgtcatttgatggcggatacacctcttcgacattatcagttcgactaacagaattgccacagtgatttgtgtcgttttgggtagtatgcttcttagctttagcgttaaatttgtgatttttcttttgagtttggctggtagatttggacttctatgctattgggttttggcagacttctttgatgtttcacctacttttcctttccatttgtccttatgaggaccgtaggtttcaagatttttgggatcaaccttcctggtagcattgtcttttggagcggtatagtcaattttgctagcagtggtaaattctttaattatagcttctattctcgccattttttgtgcatcaacaaagagaattatttttgcaacgataatttatcttctacttctttcaactttcaagccataacgacactagatctaattcatatggatcgtcttccttttcagcgtcatcatcaacaggcatgtcatgatgattaccttcaggatcaacaaaattagtcttttctgattcatcgc

SEQ ID NO: 100121 - DNA, 1007 bp, Cannabis sativa
tcctagatttatcagtacacaggggtttaactgatatgataatctacaatgtagtttacttgcaccttggatttggatgagcagtcgtgaccacatggacctcatagctagccatgatcagatgacgcaccacctccaaatgcaacacatcaattatatacatataaatacgattatgagtgatcagttggaaatgatatgtatacatatatgtatatacctcaactacacgagtggcatgaccaaagccatggctagtgacattataaccaaaaaccaaatgattcctactgttggaagaagctgatactactccattaccattaccattaccattactctccccttccatcctcattctctctctctctcctcaaacttctaaaaaggtgtaaaaatttgccaaaaataaaataaactaattttttttttggaccgtcctatacatattgatacaacaaacattcttgtcctgtcctgtcacacagtacttactaaaatcaaaagaataataataactttaaatactatactacattcaaataacatatatatagaaaagaagaaaaaataatcattgctactatttacctactggtaatatgatgtgaagtgtctacccagttcaattgcaatgttttcaagtgaaaaaatttttgtacattccttagcttttgcatacacctatatagaaactcagataactatataggtccttctttaaggtagccaacttaaccgaaattccctcatttatgacatctctctaaggtgataggtcatttcgtcagttgttaatcttgttcttgagagccccttgccagacgttcaacttttgagattcttctcaatcagcattttcacaaaatctcttggcactgagtcggtcgtttcccttcccattgttgacagacatgcttcggcattggccaccatcctgaggttgaggcatcctctgtggaggcctattcccttgtgggttattagagcgtatctttctcggatcc

SEQ ID NO: 100122 - DNA, 2175 bp, Cannabis sativa
aatagaatgatatgtacaattgatcggtgaactattgttcatagtattggaggtacaatcattattacaagaggatatactactactggaagaattgtgtattgctttatttgattttgatattgtgggacgctggcattgtaagctagcttgagagaatttggaggatttttcatcaagaacatataagccactcttaatttttcctcgagctaaaaccttccccgtgtccttgtccttcacaaaacaacaatgtttgtgaaattctaagaaaatattattgtcatgagtgagtttagatagactaattaaattttttgtgatggtgggaacacttaaaatagaatttaatttgaatgggaaggaagaattagtatgaatgcattttttgccaatatgtgaaattagaagttgtttaccatctcccacagcaagagtttctgaaccaagatatggggttgcactatctagatgttccatgccaagagcaacatgattggtagccccagtatcaacataccatctcaggtcatcaccaaattcaggtacagtagaggttgaataagcttgagaatcacttgcttcagatgcttcttgttcagccagatatgcctttggggattgtgagttgttctttggtgtgacaaaatttttgtcaaatctatagtggcaaacagaggcagtgtatcctactttaagacagacttgacaaattggccttgaattcgaattgggataccttggtggaaaattgatggggtttcttgctgcttcatttgatctgttctgttgaaaaaaagggtctgaaatttccatttctgctgctgttataaccagttcttgaatttccaacagcaagatttgcagccattttgttggaaatgtccgaaaccgagtgatgcctttccaaacgacattcatgagccatcaatagagcttgaatttcttcaagactttttgatttatttgttgaggtgataccagaaacaactgaatcatattcaggtccaagaccattgagaagttgtaactcaatgtcttgatcgctaactatacacccagctatagcaagattatcacagatggattttattttatcaacataatctgatatagacatattacctttctgaatatttgttaatgggcttttcaattgcagcaatcgggcctttgattgacctgagaatttttgttcaagggacttcgagacttcgaaggatgtagagtaagcagcaacagaaccaagaataccttcactcattgaggatcttagccatgacaacaagagttggtcacgtttcttccattgtttgaagctgggatttgtttctccagtgatcagagtgggtggcggatgaatattactgaacaagatctcatcaagatcatgtcgaataacggttggcacaacttgtgatttccaggccaggtaatttgttcgattgagtttgatggttaaagatgatgtgagggaatttgaaaatggattccaagatgagtttgtggttgccggtgtagcagagcttgctggagttgagttgttattgttggacatagcagaaccatgaccttgagttggattggatgaagcagtttccatggacgtcagtcacgcgctttgataccatgaaaatgttcttgaacagttagtttagaaaacaggattgtaatgaaatgaaatgcttgatcaatcaaatctgatcgagtgttctgatatttatatagctgagagtttacaacctaaaaaccaggagaaataactaacaaaacaaaaaacaagaaatatctgataactaacaaataacagactttatgaaagataaaaacagaacacttgtaacaacatttaactgtaataacagaccgcagaacctaactgactgacaccaactaagtcagctaacatgtttctgttattggttagtgtttggtaccagttacttgttagtcgtagtgatataagcccagtaatcttttttttttttttttgacaatgccctgtaatcctttcaatacagtattatatatatcgttacaccatgtttcaggtgaataatgctggggttttataaaaaagaagtccatagagttcaatgctgaagatatttcaaccctattgggaaccaactttgtgtctggttttcatttttcacaattgagtcatcctctttt

SEQ ID NO: 100123 - DNA, 563 bp, Cannabis sativa
acaggcactggctgcggtgcaacaacagtgaaagtaggacgcaaaggcactggagctggagctggggttggagtggcaactgggggtggggttactactggacctaatggcctcatcattgtaggcctagctataggtccaggagcaggggcaggggcaggtgctggtgtcattgctgggactggtgcccttacgattgcgggggctggagcgggagcgggagctggtgctggtgctggtgcgattgcccgtacagttgcaggagctggagctggtattggtgcccgtacggtggctggggctggagttggagcaggtgctggtgctggtgctggagttggagaaggggctgctgctggtgttggagtaggtgcaggtgcgggtgtgggtgcgggggcgggggccggggcgggtgcaggtgcccgtataggttgtgctgctggtggctgagcaggtgcaggtccccgtataggttgtgttgctggtggctgagcaggtgcaggtccccgtataggtgccacctgcgcaggtgcaggtgcaggggcaggtgctggggctggtgc

SEQ ID NO: 100124 - DNA, 973 bp, Cannabis sativa
catgcaacataaaatgttatttccgatctttattagtaaatctgataatattggaatgggttttagttagggcacaaaacccaacagtgcgcacaaccatggcctgacacaagggacaagatctaaccctgtgttagaaaaagtataatcgtcgtagggcaatctgggttcatctccaaagtagacatctgcatttttttggatagtcagcatctatgttagacacttctagtaactagcttctaagtatcgctaggggcaaacaccgatccttggcatctttggatcccagagtgaagctaaaccttctgtgtcccaaaagacataatgaggctaggtaactctctacgtatcctttgtctttgatttattcctagattcaaggagcctccccgtaatttagtttcacataggggacttactcattgactatttgaagccatacttctcttctataccatgtgtttcttcattcaggaataggaataacattgttaaataattttttttagttaaaaatgttttaaattttaatatttttcatcatttagtttaaatgagtttttttttttctttgacatgtagtttaaatgagttatttatttaatttttaataaaaaaattgagttgaatagaatattgagaggtggtactcatatcatcatttaagaaaactgttataaaataaatactagttatggaattataagaaatgattgagtatttttagaatttgagtatttattagcaacaaactaaaccatgtaagtattgatgcaataaattgagaaaattacattgtatacccattttactttatttgttttaatttttacttctattttcatattccttaaaatatacccactttttaagcagtgccggcactggggataggcgggctaggtccgcgcttagggcccactccttttaggggcccaaataaaaaaaataccctttaaaaaatatacat

SEQ ID NO: 100125 - DNA, 894 bp, Cannabis sativa
tttttttatgaagaacatataccattattgagttggaataagagagtacgtaccaacagacaaggaataattgacaagacaagtaaatttaatcgtgctacattttttatttttataaaaaataaatattaaaagtagatcgatcgtccccaaattattaatattaaaaagtagtattgaattgaatgtatggagctcaatatatatataattagctaacaagagtataatttgtggaccctttgtctctgatttcctttgttttccaatcacacgtatttataaatatattattatattatacagaccaatatatttgcctaattaattaattaattaattaatatatatgtatagggcatagtgtaattaatttatgcatgtgttggacttcttatatataaataatttgagtctcttctaagcaaattataaataaatagctaacaactaaactatatatgggctcaaaaaatattatggagaaataatgctatctacatttattttcctaattaatatatatctttttagaaatgtaaattataatgtttcattatctataggagcagtacagtagtgatgggtcacacatttcgagtgtagttgttgttgacattttattcaaacattccttatagtgttctctcatatatatatatatatatatatatatatagacatacatatatatttctgttttactacgttactttgattttcaaaatatattacccaacttggaacattttcatgagcctttacttcacgatcgaggatgtttattttaatcttaataataataacttatttgttaatcaatgcaaattttaatcctctcgaaaaatgagattatatatttagtttatagtaagtgtggtcaatactaacgga

SEQ ID NO: 100126 - DNA, 1060 bp, Cannabis sativa
gcaaaccggaaaagcccggttccaccaacgatgggcatctctctaacggcggagaacacggcgttacgtcccaagatgctgagtgtgctgccgttaaacttaccttccgtgaaaacataattcaaaaccataagtaatcccacatcggattgggaggccgaggcgtagattccctgtgctcttcccactgccttggagttgggctctgggccctcggtcaagggatcgtcgatgaccaccacgacgccgaagcctgtcgatgacgtgttcgatgtttttgccgacgccacttggagggctgtagggtttggaccgctgacgatgtcgtggaagtaaaagtggagatgtgtcagctgttccttcttgttaagtagccctaggtgtttgagaaaagggtttttgtacttactaccattaacggtgaggtttaacagggacaaggctattacggatatgataatggtggtttggagagcttgagccatgattgagatatgataattaatcaattgctataagccaaaaggttgtgagatttttgtcttgtgatttatgtcatttatataggcataacaagttatgaatgttaattgtaatgttaaatttttgttaaagtaaaatttaataataatttaaataattaaaaattagttatgattaaattaattacatattttgtatgtattgattttaaaaattagttttaggatatttatattaaaaaagaataattgatgaaaattaaagtcattattattttgtattattttgaaaaatataaatttaatttattatttaataactattagttttttgtaaaacataaattataaataataggagaattatttcatgtattatttttaattttttttttttttttcaaatttactgtttaggatctaaagtggttagtttctttagttgggatttagattgctctgctaattgtaatagggatttatatataaaattatgtaaaaattaaaaaaaaaaaaaaaaaacctcttttgcggtgaaaaagtaaaaaaactccaaaataatatttattattattatt

SEQ ID NO: 100127 - DNA, 867 bp, Cannabis sativa
aagacatgtttttgtgtaatgcaaatgcagggtgggtgatggaccgattccaggatcttcatcctatgctgatgatgaagttggcgcctgcggagcaacaggggatggggatattatgatgcgctttcttccatggtagaaaaaaatgcaaagcagaaagagaaaagagtttcttattgttaagttttgaagtttttttatataatctcaaaatggtattcatctgatttcagctatcaagtagtggagagtatgagattagggatggagcctaagcttgcagctaaagatgcaatacgtcgaattgcgagaaagtttccagatttcgttggagctgtttttgccatgaacaagaatggtgtacatgcagcagcttgctctggatggacattccaatactcagtaaggagcccagagatggatgatgtgaaggttttcaccgtgtatccggactccaccattaatagtaaataattttcttaaactcaattagtgttcattagttccttttaatgtatggaggcttgttaatagtggtggaactataaacgttgtatattaaggagggacactttcaagaacttgagagcttttatacccatgccattcattgtcttgatcttgaatttcatcaattttcctattccaaaaaataagaaaaatccaatgaggctgcacatgtggactttttagatggtatgaaacaatcacaagaaactgtattatcaaattgagaaatgtaatcaggagttaatgaaatggaatggaatgaaactgaattaatttttattttatttatttatttggctgcatttatttgtttggtttcatttgattgtttgtaatcagcacttcggcattgtttgt

SEQ ID NO: 100128 - DNA, 1326 bp, Cannabis sativa
aatataatgaaaattaattaacaaacttaccaaaatttgatcttcatatttttggatgagaagctcagcatattgttgaggtgtatacaaatgacttgtattataaaatttaggcaataaatagtttgcaatgtagtcattagtgcctattgtaatatgatataagcacttctttaagtaatcattttttactctattttttatttttgagattgtaatttggtggttatctacttgtttattcaagctaatacaatcaccctgtgtagaaaataacaaaattaataagttagagtggttttatgaatttaataataataaaaattaattcaaattttataaatattattatcataataatatgtatactcatgaattatgtaccaaatattttccagattgtgggagaattccagctgatcctgatgcatagtttacacctttgagtatgtcatagccggtggtattagcaaaaggtggtataaattcatcaaaccctaaaagttgacctttaataataatatatatatatatataaataattagttgatatttaaatatatagaatagttcttagtaatataattatatattaattatatttgtaaataaataattcatgtatattagagttgttcatgatgaatagatttaatttgaattactcaaccctaattctggacattattaatatcacaccctttaataataagagttactcaggcctgattcaagacataggtgaactaggtctgtgcctgaaacccacctatagttgaagggcccaatttttttttaaaaaatattactaattcttttagtaattttaaaaaatgatacatttttttttaagcaagagcccaaaattattttttttttctatatggctcactatatttcaagaaaaaacaacctcataattcttgttggtcaaaaagaaaaaaaggataattacataaagtactattttttataaaatttttacatttatacattcaaagattttttttattatacttttacaatgttttataaaataacacgaaaacaacaagaaaattttacaaaatagcacgaaaacaacaagaaaattttacaaaataacacgaaaacaacaaaaaaactatataaagtaacagaaaaatatacaacatccaaacaaaataaaaaaaataaaaatgaacaacaaattaacaagagtacaatataaaaatgtatctaaagaccatattttctataaataaaatcgtaaaaatatttaaaattccgtacaattgtacgtatttttataattttttttgttgttattgtatttttttttttttt

SEQ ID NO: 100129 - DNA, 4052 bp, Cannabis sativa
tttataatgtatatatatgcttactcaattgatcatcttgagctggaaatctgttataaagattaatcctttttaggaaaaaaaaagtgaaaaatattactttcatgtgtgatttaattttgagtttattatatagttacctacctattgtaaatcaatcattatatatgttgaaaataaaaaccaaaagatatttttggcttatttgctggttataacatataagcgtgttgttatagaatctaggtttgatcgaataataattaccaactgttgttttgtttctagtccatcaaacataaatcatatatgattcaggtggccgtttcttgaagcttctctgacaagactggctatattcctgttacatggaatgtagaattaaaaaaaaaaaaaaacagattccctaaagtaaattattattattattattgctgtctaatttcaaaattatttgttgttagcatatataatcgtgcgtattataaatgttaatatatgaatcaatacacatatgtatatatgtacatttaattctcatacaaacatcaatattatattaatacattattttaatgtatatgtacattaattataataggcgattttaattagagtgaagttattccctctttaaaaaaaattggcgaagttagttagttattaattggctagctttaggtatatattattttcttttaatttatactggagttgaattaatattatatttatatacataccaactggtaataataattaatgatgtttttattaatgcagggtgtaagtagattattattgggtgaaatttgaaagagctagagatcgagagtagcatgaatacattttcacatgtaccaccgggtttcagattccatcccacagatgaggaacttgtggattattacctcagaaaaaagattgcttctaaaagaatagatctcgatgttatcaaagatgttgatctttacaagattgagccatgggatcttcaaggtaattaattaatattaataatttcatcatctatatatatgctatatacgtacttaattatattaattaatgtgcattgcgtgtatatagaattgtgcaaattaggaagtgaagagcaaaatgaatggtacttttttagccacaaagataagaaatacccaacgggaacaaggacaaatagagctacgaaggcagggttctggaaagcaacaggaagagacaaggccatatatgcgaggcacagcctgattgggatgagaaagactttggtgttttataaaggccgagctcctaatggtcagaagtctgactggatcatgcatgagtatcgacttgagaccaacgaaaatggaacttctcaggcatctcttctctctctttaattattatatattacatatatatatatatatatatttatagccttttcttttgagtattatttgcagtactaatcgttaatggccattaaatatatatcatgataattacaagctagattaatctgtcatacaatttatagtttcgttacagttaccatatagggagaaacactaatggctcaattacaatataatggagggtactaatcgttacttttagatattttaaacaatcacaagagatgaatgtcacagaggtgatgatgaacaccaaagttagttagtttgtattattattttggataaatcatgttgcaacttgtaataagtgtatgattttattataattaaactaaattaattacaatatgtattgatcgtaccactactactacgtaccccatgcaggaagaaggatgggttgtgtgtagggttttcaagaagagaatggccaccgtgagaaaagccggcgactacgattctccaccgtgttggtacgatgatcaagtctccttcatgccgacggagctcgaatcgccaatgagatcagtctctcatcacaatcatcatcataatcatcaagcatacacctcttcattccaccaaaatcactaccctaataacaattgcaaacaagagttggagcttcatcagttcaacatgcctagggcaaccttagtaggagatccatttttccaactccctcagctagagagccccaagctccccagtactagcactactactcatgccgaagatcatcaatcctgtttgatgatgatgagtaatggatctgtctttagcaacgaattacaagccgttgatcaactcatgatgatgactaataatgcttctaataataacaataataatgggagtagtactacggattggagggttcttgataagcttgttgcttctcaactcggccatcatgatgaagatcaacaactaacaactgctgctgctgcaggtgcgggtgcaccggtcttccatgtgcctcatcaactggtgatcaacaatttgctgggcggtgatggtgatgatcatcttgaacaacgactactgtagttgttggagctgatcaaaaggtcagaaattattccacgcgactcagccacgtactacttgccacactgatctctgtggaagatatattaaacattattattattatatatatatataattcaaatacagtaattagctagatatgatatattgatacatatatatatatattatatatatacttaacttaggagtttattataagtaaagagaagaagaaaggatggtactattactatatatatatatatatatatatatattgttttatggcctgtacataataagatggaatacctctctacctacgtacgaacattaattgcattatgagcaattcgacttttgggggcctttttgtgaaatatttgagaggactagtaaatctagaaaccaatatatttgaatatatatatttatatatatacataaatctttaataaataatgttgatactttttgtttctttcttttggagctatctgttgctgttcaatataaatacacgtaaccttaatatacatgtaaagattcatatcatggtatgttctacatggagagtatatagcatttatatatatttttattataagttcatgttttgaatggaaaatgtgactttgtttcttaaagtacttcagctacgtgtgtatttaatcttccgaaattgtactttaatcccaatgaaacccaatgcctagaactatcatgaatgtttgaagttttgaagtttcatttattgccgaatcggtacaaattagtttattgtttggcaaccaataatacttatatttggataaattaaccgagagtgtgaattcgaaaggagagttaattggttcaataatgtaatcccacatattactaatcattaatcaaatttcatttctcatatgcactagtgttcaatccgcggctcaaaaaaaaaaaaaaatagcttattacattgcattatcattaattttaaaaaatatatattcttattttttctgatttttgaatgtaaacatgtgactacaaatatataatacgtgtatgtatgtgtagaggaagttaatttatagagggcggaagagagaaagagtaaataaaagctagttaatatatatgtatatatatataaatatatattgcataagaagcacaaccaaactattttatacgttcttaattactaaataaaattgtatagacaaatagactatccaatggtttatagccaatgtagctttcgttactagctagacgtgttacgctaatattataaagttatagatcaaattctaacatctgagaaacactgaacttactctagctaggtatagcctatagatagtatatagataaagttgagctaagatcaaaggttccttgttataactttggccaactgtatgtatctatgagaaaatagcttcaaagttttgacttattttgcgagcacatccatgttgttatttgacacagtttaaattacccaacatcatataaatgaaatactttatatgagtcctattagtttagcagttttcaatattaattattaaaattaaaatatatgggttcctatcaaattgtgtgttggacacatactgatgc

SEQ ID NO: 100130 - DNA, 1833 bp, Cannabis sativa
ataaacggttcatttatctaccattctcggttgacataaatgctagtgaaaacaccaaaactatccattttggtcccatttgtgtcaaaccacttacaccgaaacaataaaatagtacagtccttcacataagtaaactccataattttttcaagttttttataaaaattacgttcatcgtcatcgggcaccataataccgctattttgtatttttccattatcatccctctcctccaccaaaaattttacaccattcactatgcacctaggataaagataaattgttggataaagttaattataaaatatatatggttctataggtggtgaatgtcatcgtcatcgttgttttgagtcgggggatggcatgatgatgatcaagcaccaggaggagcagggaatggttgaagtggatccacaataggtaagttgaaactagaaacaacccgcaagagatactcaaactagtcttggaatcacaccaggtagagttgttgtgttacatattgcttgtttgaatacttagtttcctactgtgcctcctacacatgtcgttgtaatgccctatactcttccatagtaacagtcttcaagccaagagcagaaggtgtgtcatgtgctcttctggccccaactacttttagtcttggtaaatggtcaaaacttcttagatgtcgcgtccgctcacccagtacctgcatcatgaaaagtaggtctcatgagtactgggtgaggtttatatcatcatgaggagactaatcaatagtggacactagttgattttcaacaagctcagctattttctcctacagattaaaaacattacatagtcagttaaatgcaaaataaattgaaagaaatgttcataaattaataaatattaatgtaaacttacataaacttgttgcgcgtattcattgcgccaagtgtgaaactttcaaaaagtatccacatcagttggaatttctcctatctcaggattaacctatatttaagtacaattaagtgtgattttaaaaaaataatacttattagttacaaataaatttaaaaggttttctcatccccaatatgtgttgcaatagtctttaatccccatccaccttaaattttcatgttatccaaactttctttgttttttgctcaccttgcgtgaaactaacatatttgtgttgaaattaattgtttattattgagtataacgtaaagtattatttagattaataattttgttacgtacatgttctttctctatgctctaataagcaatgtaatcactccacacttcctgagttactccttctgaaggtgtcttgttcgccctctcctcttcaagtgactcattattttcaatccactctttcttactatcatcctaccagtcacacaaatattttgacattttatactcagcatagtccacaaaaatataattatcttgtgggcacacaaactttatccgtaaaaaagttacacattcaaattagtacattgataattaattgaagaataatataataaatacatcaagtctattccacaatacattaattttagctttggacacaagtgctcaattgaacttattcatggggatggtgtggcggacataaagtctacacatgttgttagaattttctccatttttcttgcatggagtgcctgtctcctcatgaagtgtaatgtgatgtttgggctcaaggcctttgaaaatttcttccttaacatttgtacccttatatttacctcttacccctttctttttatcagatcttccacctgttacagacatattataaataatgaacttattttcaaatttaaatttaat

SEQ ID NO: 100131 - DNA, 1607 bp, Cannabis sativa
ccccccttgcttttttgctaaaattaatgttttgtataaaggcgaagctaacctattttgatgattatcttccattcttttaaaaattcaaggtaatttacctggcccaaaacacaaaagttagtattgacttggtagtgtgagcttatatagcttgtggccatgctctctccctctctctctctctctctctctctctacttatttatgtctacttcaatgcaaaggaggagtacaaaaagatggaagtttatgcatttgaaatggaaacaaagatttcttctctgaaagaggaattatcagttatatgtgcggagaaggaagagacattatccagaaacgaagatctgacttctgaattagaagctttggctgagaagttaaatgattccaacacagaattgaatctgttacaggaagaagttttggtgcttgtaaggctttttctttctagtctgtcatcttatatttcttttcaatgaaactattcgtggtttgtacactttacaatatcgagacttgtacttctctttcagaagcaaaagttggaagaaaaccagtttgaacagcgacaaatggagagctccataaaaatactggtagaagagaaggaagaattggcaatggtagtctaatttagggttgcataatcacaatagaccaattgaaatttgagtctgcgtcttctatttttattattattttgaagctgctcatctgtttgatactctgttttgcagcaactttcacattcactgttggaaatggaggaagaaaaggcaatatggtttgctaaagagaaagctactgttgaagtcatagatgaaaaaacaaggttatataacacggagattatttcattaacgaaagaattgtcagaggtgagatgaactaatcttgatatattagtcagctttcttcctattctgattataacttatgatcttaaaatgttaggtaagaaacaaactggagtctagcagacaagaaagtgagattctgagggaaagaatgacatgctttggggaagatttggcaagggagaaaaacaggtttacttagcttttgatacgatacataaactctatgaaaatagttatagaatcaagaccacagccagaagacattagtacaaaatattaagattaaggtgtaagcctctcttctcctcaacaaggcacatgccttggtgcactctttaaaggcgtggctcaaaaacacctttttaaacattgattgtaatggggtattggtattatatatatgatttagggaaggaaaaaatggtgaatgaatttcagctcgtggctttaggagagcactgggtctctcgaatatccagattgctccttgtttccttcattttatcttttaatattcaatttaacatcacttagctctatttttcttctctatctgctactgtccttaccatattgataacaacttcctataagatgtcccctagttgttcttcagtcttcacatatcctgtggagatcaaggcttgttgaattctatgcaagtgtgattactcttccgctccaaattatgttgagatacaagtttatagtacattgatcctaggactttataaataaaagtat

SEQ ID NO: 100132 - DNA, 1193 bp, Cannabis sativa
aggaggccaagcagaggtgccagaggtcgaccaaggggctgagaatttttacagtgagtctgaggtggaggaggctgtgcctagtaggaggaggacttttaagacttgtgctatcctccaaaactaccctcttagtgcatatgacattgataggcagccattgaacaggctaggctagccacgatgataggcatggaccatgtcttaatacagtctttagagcctaaggttcttgatgttagatcacggggagacaggtgggtctcttccgcatctattattcctatcgagactgttgataggatactggccaattgactagtgagaggtgtccactatgagatgcccacgagggattagagagcacattggctggccttcagttggatggcatggttagagtaccatatccagtaggggtagtgttccgttacacccatatttttgagatatagttgcttacttcgtgatgtgtccaacactaaccaccagaaaaagtattgaatacctctcagcaatctttgttctctatgcaaagctaggctaaccttaacctactctgtatgagattggatcttactttgatttgaagtctgctccaaagcaaaactgaacggggtacttctacttcaattaggttggccaccagtggttgggtcacaccaacaacgtgcctatgtcaaaagttggtggatatgcccaaaagtacttcattgcctaggatgtctaggagatttgacatcaccgcttccaatgagtgccgacatataagcactccaacacgaaccacatcttgtccctccccgtagtgaagaggagcataataaggtttgctagtgttgccaactttcagaagtacgacctgtatcctcctgctactggagttgtgggggccaagggcctatcaggtagtggggatggagcccttactacaggggaggtttgtcctggtggtggacatgttcctgagatggatgacgatgttcctctatcgcggatagcccagtgtctagagaagaaggagagggccctctgccagtgctgggctcatgggggcacagttatggacactagtctacggattagctctagaggccagagctctgcagggcctactcgccccttgcttgcatctagaggcaagggcaaggcagctgttaaggattcaaatgattcctcttcttaggatgatg

SEQ ID NO: 100133 - DNA, 1889 bp, Cannabis sativa
tataaatattgtctttaccttatgaaagtatttttgtaaataaaatgtcaatttatattttttatgtaatgattcctttaataaataaaggaaataatctgcgcttcgcgtacggttatattttgtttaatgatatatacaaattttaaattttgtaaaaaaaatgagtaactgttgtactaattttttaattcaaaaatgtaaaaataaaataaaatccatcatacaattcctatttaataaataaaaaaaataaagatatatcttcaaatattatattaaaaaagaaaatttaaaaaacccttacacaaaattaaggcctaaaaaaaatcaataaatttataaaaaaaaaaaatgatcatatatatgatctcaaaatcattattgtcatcatcgtatctcactccaccatttataaaaagattacatgggtcgtatttagattttattttttgacacaatattaaacaagttgtgttcaacatatacttgtaatacatgtgttgacacaaacatgacccatgagcacaaattaccaccatttttattgagacggaactatcttctaattatttgcatcattttttaagatggtaaaaaagaatgctttatgacaaaaaaaaaagagaaatctttttttgaaaagttgagtttaggagaataataacaattacaaacaaatatgaaatagtatgaaattattaggggtagcatttttttatttatttttatcttaattttagggataaatttaattagagagagttttaaaatttaaattataatatattatttattacttaattagttagatgtatttttctaatgcttctaaatacaaatttttttcactatacatatatatatatattataattttcaataataataatatttttttttttgctacctatcatttttttattagtttggaaaatttatctattatttttattagatatttttttaattgttattaataataataatttttttagtttattaattaattagtatttataaaaagaattaaaaattagatacaaactattttaagtaattttagagtattattttattaatttaaatgaaagaattaagaagagaataaataaaattattttgagtgattttagagcaccaacaaaagaaaaagagaaatatttttttgaaaagttgagtttaggagaataaaaaaaattacagaaatatatgaaatattaagaaattactaggggtagacattttttttatttatttttatcttaattttagagatagacttaattagagagattttcaaaatttaaattataatgtattatttattacttaattaaatagatgtatttttctaatgcttccaaatacaatttttttttttactataaacatatgtattattttagaatatttacagaaactaactaaaaactttttttatttacttttttatttgtttatttagtattttacatttatactgttgatagctattttgaggacaatggtctgatgcgtgcagacccctcttgctattggtaggaggagaacgcgccaaatagcgcattttggagtttttctttcttttttctttttttacatggtggatgtgttttggtcaatgtcacatttatctttctttttcttgaaaagacaaaataataaggctatatttttttatgaattaaattagtaattaaagacaaaaaattaatagacacgtgctagtggttgaattaggcaagtagcatagtattaatatagtaatgataaaaattaagaaaaatttactttcaaaaatgttagattgacatgcaatgatattattcttagtttaagattttattatttatttttttaaaaaaataagttttatttattttctt

SEQ ID NO: 100134 - DNA, 710 bp, Cannabis sativa
aaaaaactagtgttgaaataataactttttagtgtagatttaacactaaatatgagttttaccattggtggtggcctaacaagctgtttttataacagttaaatataaataaaatattaagtttttttttcggggaattaatatgttaaagttatgtagcaaggaaattgattgtaaagagtgtagagttcattttctctttttggtaccattgatgtcttgttctattcaaaaactgcaaagaggaaacacaaccataaatatttatggaatccattttctttctcaaatcaataaagaaaattaagccaacaaataatgtatgaagaaaagaactacaagttagccctttttttttgagagaaagggagcccgctagagagaaagaaaatcaacaagattgcaggggtcatcacctatccaaattgcaacttcatctaaccctgaagcccagtgacccagcttatctgcaaaggtattggcattgcggttgacgtgagatattcgagcatcagggaggtgaaacaaagcttccttgatttgactgatgagatctccaaacaccgatatgtcttctttgtgatggttcagcacgtcagtaatagtcttacagtccgtttctatctcctgaaccaaaaaatgctcgtcaatgcactagcgcaaagctgtgagaagagattttgcttcaagagtggcaacagatccccctc

SEQ ID NO: 100135 - DNA, 1248 bp, Cannabis sativa
tactttcacggaatgtattccatgatgtacgacagccgttagatgggagacttatttgatctgagggctgaggttgatctaggagttattagggttaaaaaactgtaacgtaccatgaaactcatctaatgtaccctgagactcatctaatgtactacaaaatacattccgtgaaagtacatcacggccgaacaaaatcgtgtccctatatatatatatattttggtttcaagatgaaaccccacattagtctagactaaatgcatgcttaaatatctaaatgacggagttagggggcggagggtgtcgtgggtcccccaattttttttcatttttttactttttttttttttaaaaaaaaattacatttatggcatagagagatttggaatcggtatcatctccttttcgaatgtgaatatagttttaaatgttttgaaaaggtaaatgttggctaaattagagagttatgaacactcttggcactattccaaaccatttcaagatccaagatgtccaaagtgaagaaaaaaatggtactagcaactataacaagtttgacttgattatattaaatatggatgaatgggaaacaaaaattacaaactattcatacttaagcataatgtcaagaatagaattaattgtgttagacttaaagaattttcaattgaagataaaagcatgatttgatgcttaatttaattttatagatgtaaatagattatagtcaagccttgtgaggtggtgaatagtttgtaaagaaagtttaattaatgcaatataatattctgatttatcaaaaaaatattacatgtaaaatataattaaaaataataataaataattttttatttttttatatgcatgcattggatccccaaatttttgacttgcgtcctcctaatttaagaattaattaagctttatgttttacatagacaaggggcttctccaaataaatatatatattgggaagctcttgttcttaaataataattaattaaaataaactaattaattactactttataagaagactaacaaatgtaacaattttcaatctttgtgtttaacacatttaatttacgattgctacctacttattataaaggtaacaattttcaatatcttatatatagagataaatagtatgatataatcgtatatatataataatatgggtgactattcaatggttaaatttttattgtaaccatatgattacatttttttttaacctgtaat

SEQ ID NO: 100136 - DNA, 676 bp, Cannabis sativa
aaccgaataaacaaggtaagaaatcggttatgaatgcacaagaatcttaccataaaagaaaaaattattttgtcaactaacttgccaaaaaaggacagtactttacacattagttcattaattagtttcatacattgcaaaatttgtatcacaattagtgatgtaaatttgatctgcagggacgggtacacaacgaatggggcgagagtaaaatagaattttatatagggagatttttattaatatacattaagcacattaaaattacatataaaaaaaatgttggttaaagtaatgagtttatatatcgtgtcacttcagctgttcatatcgtggccaccgaaattagtttccaacatcggacaagcaataagacgagccaactatttatgatcctcgactgagaacttccctttcttaccagtgtgtgcttttcaaaattaaaaaggaaacctatatagtttcttagttgcaataaacgaaaaactccactatagcttctccaatttcataacaagaacactccatttcaaattggaaaacctccattttggaacaaaagaaaaaactcaacaaaaaaaagtgatctatgtcaaatcttaaatagcacaatcacatttcaactcattgttgtataaaagatcacgtcgatgatgatcatctcagatcatctcca

SEQ ID NO: 100137 - DNA, 2030 bp, Cannabis sativa
ccatttaaatattatttatcttctgggatattacagtaacaaccttgacaaaattaattagaaataacttaaagtttgtgtagactcacaagtgtgaatataatttctaggagttaaagcaaagattgattacaactcttttactagctctcccatcagataaaaaaaagctttcggtagttaattgagtattaatagtgttattcaacttataatttagaattagatacaacagtgtttgcacttaaagtgtggtgatactacatgtatggtgagaaatgtgagatttacgttaactacatctgtctcaagtatttatttattcataaagatttaatatgagacaaccatggaggctagaattggtgaaagattatgattgtgagattttgtatcatcttgaaaaatataatgtagtgaaaaattctttatgcaaaaaaggtctaggacaagtattcattgcataaataaatactcctcaattagcagcaaaaatgacttaagctagaaattttacttgatatgcacaggtgatgcccggtaaataactagtgacaactaggtgacaaccggcgggtaatcactactgcacatgggtgtcagtggagtttcgtgtgacacatatacatgagatattgacttgtgaaagtaaccaaattttattttagggcaaaatatgatcgatgcttggagcgaaattgccatttgatcaacagaacattgaaacccaggccaaatgtcaacctgggttcccattgtgcttgtgtgctggaactttgtgatgcctgggggatgaatcactactcggacaatattttctccttattccaagtctcatatcttttttttgggagaaaaacaagaataatgcttgagacataatcacaatgggattgacgaaacttcgtgttcatgtagaacacgtcaacctgggcacccaatgttaggggagcaatcacccttggtgcccatcttttcatcttggctacatatggctttatttgtttctcaaaagaatgtttatcttccttgtggggaaaaataagtgaaaatcttgaaagacttctctagaaagaagttccggagtgccctaggttgagatacatcaactttagggctcaagatggcttgagggtctccactaggcgcccaggtgggggtcgacatctccaaaatttgtctcattgatgtccaatcttctttttggtgaaaattactccgcgaatgtcatcttcatcaaatttacacgggcgtcacttggtgaaacgaaatcggtgccctggttaaaatgtcagcctaggggctcatagttagaatggattcctttgggatgtcattgatgatatcatgtcttgacattctccatgatggaattgaggaatcagtgtctaagaatatccccagaatcataaatcgttattgtggtgggcccaaatcaactaaatttcaacctagatgcccattagggcttgataatgctcgattttcgtttcttgtagacttatctccaatgtttgaaatttggctgagacatgtctctcatgtatcctaggacaatggctaagaagattgcccataagaagttgataggaaccaaaattgatgcgagacggcgcactagatgtcaacctgggcacccaacactaatgttggacccatgttgagccctgtgaagttgacgtgacatcctcaacttaagagttcattgttttatggtcgctaggacctattcacttgcactttgtcgaaggatggcacctagaaacatcttcgttggatctcggtgcctacctaggcgccccatgatatcaattaggacgacgacacagtttctaatgcccaagtcgaccaccctagttttgggaggtaggaccctccattgtttccttcttgccatgtgtcaaaagtgtttttcatgtaatcgggtcaaatttttgggtgaacaatttaatataaaatattaataatttaacattcaaactgtaagtgtctttattttgtgacagttttgttctgttcaatgtctagtc

SEQ ID NO: 100138 - DNA, 1134 bp, Cannabis sativa
  modified_base (41)..(42): a, c, t, g, unknown or other
ccttaatctatttcgaattgaggttctttcaaaaaaaaaannaaaaacaaaacaaaaacaaaacaaaagcaaagcgtacgttttggtgtattaaatttcataaaaataatattttatcatcttccgaatctgtgtaaaactttacttattttcaaaatctgattttggatttgttttagagaatgataaaccaatcaaattaagtggacccatatataatatgatcagtattcaaaaattataaaatatatttaaattttaaaccaattagcaaattaactgctctattatgagtgctattaaactcaatcatcaataatacagctattagaaaaataacacatgatcccatgcaaaaatttccaattggcttattatatctctattataaatgttttggcctcattctaaatatatattatgatttaaagaaagctatcacattggggatatcatttttctttataaaatgttttagccctcgtttctaataaattatataataggatttaaaaagctatcacattatatctacactttgtattaaaaaaaaaaacaaatgtctagcattactatatattcataataataaaaaaaaaattgaactgacaatgtacatctaacaacacatcccatatgcaacccttactacactactaatattgacttatttttttgtttatgtaatttcaaccttattatgctgcttttattttagttagttttgttgtgttatttgttttgtggttggtttccttttggatttatttctcattaaagtagaacctaatgttgtgttgaagaggttcatagtaaaaggattcacataaaattaagaaaaaatatatatgtattttaattagttacgatatatatttataataaaaaataatattaatggtgtaatatttaatctaaattttatattataatagatgtcaagagtttaaacctcactattctgtcttacaaaaaaaaattatattatgcccttcactttaaattttagatcagatgtataaattgtcaagaaaataagaatgtatattttttttagtaatttaaggctaaactatctcatttatttttatttttatacccttggccgaatatttccttaacaaatgcattgta

SEQ ID NO: 100139 - DNA, 671 bp, Cannabis sativa
agtttgggtccggggtccgagtcggggttggggtcggggctggggccagggtcttgggtcgaggccggggtccaaggtcgaggtttggggtctggggccagggttggggtctgggttgactctggggctttggtctggccgaccggggttcgaatctgagtccggggtcggggtctgggtacggagtcgaattgggatacgggttcggggggttgggattcgggtctggggttgggatccgggtccggggttgggttgggatctgggtccagggttgggttgggatatgggtctagggtcgggttgggatatgggtctaaggtcggggttggggttcggggttcgagtcgagatctgagtctagggtccaggttcgaggtctgggtcgaggtcgacgtttgggtctaggatcggagtccgagtactaaggtctaggttgaggtcagaatccaaaatattaattaagaaagaaaaaaattgtttacatttttttttgaaagtttatttgttttgttttcaaaattttaattctcaattaaaaaattaaaaagtgaaaagcagttgtataaaacataatttttgaaaatatttttacttttttaaattacaatacaaaaatttgactaaaatagtattaccaaatgcacccgtaatttattttaataattaat

SEQ ID NO: 100140 - DNA, 773 bp, Cannabis sativa
  modified_base (27)..(36): a, c, t, g, unknown or other
tccgcattttgcgaattggattggatnnnnnnnnnnggattggattggatcggataatttgtgaacacccctatctgcctccatatccataacatcatgagacccaatctcatcattattaaatatgcacctcttagtttcaagatagtccaatttaacaccaaccaagaccgaccctaggcataggcgagctaggcctgtgcctagggcccactctttctaggggcccatttaaaattttaagacctcataacttaactacaatatagtattaaaattaacacttaatatatgtaaattggacccatcatagtggcaacctaaagaatggtatgtattatgctttccttgggacctgagtttgataccaccgaactttagtttttattaataatatttttttaaaaaaaaaaaatatataagaaacaactgtaaatgcatatacacttaataactaaagccaaaaaaaaaaaaaaaaaaaaattaaacataaatattatttgaattttttttctaaatctaacattttataagtttatctatttttttttattttctttatgttttttttttgtctattttcctacttctcttatcatgttgtttcctttcctatttatcttactttaatcaaaattatatttttaatattataaagaaaaatcattaatcaagatataatatttaatttcaataataataataataaatattttttcttgaatattatttgacgtgaatttaattctttttaaatatcttattataattat

SEQ ID NO: 100141 - DNA, 800 bp, Cannabis sativa
agacaagtagatatttttgtttttgaaattaagaaaaaaaaaattagtggatagagataaaggcaataggactagaagtttggaaggtacgatcatgactcgtgatatgaaaaaaatacgtgtttagacatgatactacacaataaatttaaaaattaagcaccacacataaatacgaatacattagtccaagagcatatgtgcacattaaaaaatcttgtatttgataataataaactagctcgagatcgcacgtgcgtacgttaaaaaaccttaaatattagtaagcataatcaaattatataataaatctaatgattttctataaaacatacataattagttcattgattgtgaaaaatgtagaaaagtaagtatgaattcgagctaagaaaattggctggcttgttaaaaaaaaaaaaaaaacattcgactaaagcacaatataaattggaacaatatgtaacaaaaatactgtgcttaaattttgacacagtataacacaacccaatttttttatgacattttttgaaaagtacaaaaatatataaatggagcacacaaaaattatttacatcacttaaacacatgagtaaggtccaactatatttatataaatatatacatagggacatgattttgtcccgtgatacggaatgtattccgtgatgtacaataaccgttaataggggagttatttgatctgagagttgtgattgatctagaagtaattagggttaaaaaataataacgtaccttgagatccattattacacgtcactacaacaaacaccattaat

SEQ ID NO: 100142 - DNA, 1930 bp, Cannabis sativa
gattttccaagtggactccacgtgtcaccattctcataatgtcacgtcagagtgaaaaaattgggataacaaagaggaagaaaaagaactcctaaagatgaaagcaaatagatcgaaatagaagaaaggtagataaaaataactgaagatgaagaatttgggagtacatttaacaatgagataaatctcagtgatttatgatttagaaacaaatagaataattgtagaacatcctaatttatgaaataatgacatataaaatcatgatttcatgataatacaagatctgcattatttttttttggaggaataaactaactagaaaatgattatttggtctgttagaaaagagatcatcatgtttggtctctacaaattaacatattacttgttatatgatcttattcaattagttctgaaatattaatgccattgtcaaattcaaaaagttaactggatacttgggttgaaaatgacatttaatttgcttctatgtcacttgtttattcacgaagactaaagaagaagaacataaaaaggcttgtgttggaaaagagtcttgctctgttaatgtttctacaaacatatttggctctgttgattgtggaaactggaaattcattagcaactggaggtgatattagggtctatctggaaaaattgtctgcagctgaagatgttcagaagtttgtgaagcaaaacccatttggtcaaatgcttattagtgagagtaactagtcttggggtttctacttcaaagtcatgagtgcaatgtattcattgccaagatcaatatagtgcacctgagaatatattcaatatttatgttttttgattgaggatggggcttagtagcggttacagtggagaaagctgccattaatacacaacaaaagaagaagataatgccattttgttttagataatactttttaaggaaacaacattattaatactgcaagtcttactttttttttggatgttgaccattctggtttttccagtcataaaattggccaatatctcactataatcattattttaagatcaattagctagaggatagtactttcatatttcacggatgtctacttggaaataactgatttctaaatatatttattttatttgttattaagagattagctgtacaagcttcttgtgcttagaaattgtgaaaattgtgaagagtgtgagtgagtggtagcttcataatgttaataataatggggtttgtttttttttttttttttttgtttttttgcttgagtttattaataattgtaattgatatttttcaagtatgtgaataatgtggttcgtttttcattactgcttgggtgtgagtggtgttttttcttcttcattattagttcctaacctttttatatcatgataataagtcttttgtttagctgagttgcattagttgtgtatagttagagtgaataatcatttttcacttgaaataatttgaattctaattctttgagtttgactttcaggacctcaaaagcttgtttctaaatttttgaagcatttgggcatttcagttaagtggagatctttgaatttagttaagaaaataataatcttttcgtgatctagattgttgtttgattactcatttgagtttatgtgctaggttgttagattttgtaatgatcgtggtgttgcagagaagaagaagtgtaaggatagggctgcttatgcttctcttttgggggttggagctcctgaagctttggtgattggaggggttgctttgttagtttttggtccaaaaggtctggctgaggtcagttgccacttctattggtgaaatgttcagattaactttttatgttttattttatcttgtttcagttttacttaatgttgtaactttttatcactaactttagtttacactttgttatgtaggtttatt

SEQ ID NO: 100143 - DNA, 910 bp, Cannabis sativa
catgagtgtcttaagttggaactaccgcgggcttgggaacccatgggccactaagttcttagaagatatatgtcttcaaaagaagcccaattatctgtttttgtgtgaaattgttagagatagcctagattaaccactttctgttatttgttagttagtcttaagaggttaggtagttagtttgttattctgtttctctctctgtatctcttgtctattgtaactaactactggtatataagatcaacttgctcccctttgagggcagagcttcattttcacatttctctctctctcactccatctcttcatctctgatatggtatcagatgcttaggttttcatggcgtccaaagacacagacacctctgccagaagtgatacaccaaaagctcccatccctgctgaagcacaagtaccaccatatttccccaataacaatcttcttcccctcaatctacgcctcgatcgatccaactacacatactggcgcactctagtgttagctgctgttcgagcatacaatcttgatggttttcttctaggaacaaatcctcctccacctcagctcactgcaggtaatgttcctaactcagcctatcatcaatggcttcaattagatcaattcttgatgcattggatgatgaattccattactgaaccaatgcttggatatgtcattaattgtcgcacctcgtcggagatctggacggtatttgatcaactctttgcaataacatccagggcgcgacttctgcaaattcgtggccttctccaatcaacaaagaaaggttcctccactgtcgatgactatatcctaaagatgaaagggtacacagatcatcttgctgcagcaggacaagcaattaatgatgaagatcttgctctttacattcttggaggcctcggt

SEQ ID NO: 100144 - DNA, 1127 bp, Cannabis sativa
aaaaaatgtataattttaaaagaagaaaaaaaaaaaaagatttgggtgggtcctaaggacaggcttaatctgcttataccctgtaaaaggtactagtattcttaagtgttaatatcgctattgttatgtatcgagtcccatataatttaatgtaataacttttataaaatatcgctataaccaattacaaggtgacacgtttctagaaggtgctaaacgccactgtgattgcctaataacaatactgattatataattatatgagcattgctattaggcactagtgatgcttaataccttctagacgtatcgtcttgcgattggctagcaatattttctaaaaattattacatttaaactgtataagatctgatacttaattgcacgtgctagtcaccagtgggtatcttttaacatttcttataattatatagattcttaaattaagaaaagaagaagaagaaaaaaacaaaagaatatggtttaatttaattacctaaaatgatgggaatttgtttatgaggttttgggaaaggaaaagtggttcctttctttggaaaaatctcaatagctccatgaacagtagctcttaaccaatcactatgagcatgccaccataatgttccttcttcatttgaaaatattatcttttggttgaatgtttcacctggttgaattgggcattgtgttatgtattctggcccatctgaccatggatttcttggttgcttcactccatgcctatacatatataacattaattaacataataaataaccccattcatgattaattaagtatatttattattattatttaattgattaattaccaatgaatggtgatgttgtgattccctttgttgtgaaccctaacataaatggtatctcctttgtgaactcttattgttggtcctggaaatttcccatttatggtcaatatatttttagtgctgcatagtcttgtgtatggagcttctttcacctgcaaaaacaattataaaaattatttattgacatgaaaaatatttaaatataaaaaattaaatataataatcatctgggttcgaattctactcggagatcaaaaatattgaagaaaaaacaaataaaaatatatataataaa

SEQ ID NO: 100145 - DNA, 3636 bp, Cannabis sativa
  modified_base (34)..(34): a, c, t, g, unknown or other
  modified_base (153)..(159): a, c, t, g, unknown or other
  modified_base (756)..(762): a, c, t, g, unknown or other
  modified_base (1076)..(1088): a, c, t, g, unknown or other
  modified_base (2286)..(2291): a, c, t, g, unknown or other
attcaccttgtgctttccttctggcctcttcatnaagcaaactatctttgactaaatccatagtcaaagtcccttctggcgtggaattagaaattgttatcaccaacgtgtcccaactttttggtaaagaactgaggagtaatgatgcttgcnnnnnnncatctatattcatcttcatggcaactaactggtttgcaagactctaaaattgacttgtatgctcaatcatactaccaccatccttatactttaaatttacaagtcttctaagtagagaaattttattgttagttgttctcttcgcaaagagattttctagctttttccaaacgacatcaactcttgtttcattagagatatgctcatgaagagttatattcatccatcgtctaatataggcaatggaatttttatgttgaactttctattcctcatcatctaacttagacagcttctcactacctttagtacgtttgtacaaatttttacaatagagcaaaccttccatcaattgcttctaagcagaataatttaataagttcaaattcatcatttcattcgactcatccatttttcaacacacaagaattcaacaccaatcaaccttagctttgataccacttgttgggaaaatctattgcaattaaccacaatatttttccctctttgtatgcaaaaatgggatacttatcaaacaccacaataaacaatatcagatatcaatcaaagcaccacaagcaatataaaatacacaannnnnnnataaaagtgagacaccaaaatttttagtagaaacccaatgcgaaagaaaaaccacgggaccgtagtctgctcaaatcatccactatcaccaaagtttaataatgggattagaaagttcttttctagtaaaactagaggctcgcaacaacatcaagattaaacaatcttggatcactaatacaatcatcatgatatctcaaaaagatagatacacaaataaaaagtttgggtctcaccaagtgagtattgtagaagagcaccttagagaggacaatcgccaaatcaaaatcggtagatttgaagagcaccttgcnnnnnnnnnnnnnccaaaatttgagctaaaatggatgagaaacaatcacttgatcttcaatacaaagtaacaaaacttctttctctctctaactttttttctcttctttctctctctttttctttatttctctttctgcccacgatacaccatgaacttctttttttttcttctaattgtttcaatcaaaatgggctttagcccttattagttcaagcccaacaacatggggcggatctaacatacatatactaaattaatgttacgtacaaaactcgaatatttaattttatattaagttatattttttttttcaaatattataataaataatgttatataatttaattaaataaataatattttttatagagaaagatgtttaatataaagtgctatgaaatataaaaaatatataatagtaatttgaaaaaaaaaattaaaatattttttacgaaaaataaaattaaatacaaaatattagtaaaatatattaaaagtaatgagttaattttttatttcgtacatgtagtcattaactataaagataacaaatacataacttaaaaattaatggtcacaacacaatatacatgacgaagtatattaaggctactatatatgataaaatactaacatcactttgtacctattataatttgggtcatcacaaactaatccacctttgaatagtagaaaatttccaacttttgactatatttgttttaataatatcaactcaaagaaaaaattgttctaattaactaaatttgaaacaaaaaatattatttgaattaattaaaaataaataataaatttattaaagagtaagataagaactccaaactatatataatgaaatcgaattcaaatattcgttttatataattcatatggtaaagacaaattgaaaaaaaaaaacttaataaataaaataatattgatatttatatatttataaagcaaatagtactacaatatttgttaaatttaacggaatattttttttatttttaaagtatatttttgttaaactaataaaaataattagatagtcattatatataaagatatatatacagggccagccctgaggtgagacaaaggaggcggccgccttaggccccccaccgctcagggccccatttcgaaaaaaaaagtatagttagtaataaaataaataataatacttttaatgctaaatatgtgtnnnnnnctagtggtaatttgattagcataacaactaaaaggttgagggttcaaatctcaatagccaaattaacataggaccggcctgtatatatacatatatactggggtcatggcttctataaggtatagtaaacattcgtttttgttatagtaaacgtgtcattagtttcttataacaatatttctactaggcatttggcataaaaaatttaaaataatttaattaattagaatattaaaacaaataaaatttgaggctttaatgaaattattttcctaagaaaatgaatattataattatatttagttgtacatgtgtatataagaatatttatttaaattaccatagatttaattaaattgtttggttgaacataagattaatcaaaatattagtttaaaatttaaatataatttttttagggttaagattatttattcatttttgaaaaaaaaaatcagagtctaaaataaatataattctctatgtaaaagatttaacaccatgccttgtaattatgtagtcactgtgatgataagctaattgcatacatttatggcacgtttaatatacagtattcaaaatcgaaataaattaatggagaaatgcaacggaataaataaaaaataatcgaaattaatatttgtaaaatgttgtttactaaatttttttggaaatagaatagttgtaatttatcttgtttactttattaagaaaggtaatcggaatgcttaaattgattaaattgcccttttaaattaaactatattatatggtagttattttgtaagatatatttttaaggataaaattgtcattatatatttaatattaaaaaataaaattaaaataattaaaatttattacccttaatggcattccttacaaaattggtgggagaagttctcccattcttttctcccttatttaattaagttcttcatttcctaattttaattttaataatagtttacgaattggcgacgtttggttgggaggaatgtaaacataagaatcagaataggaatagaaatagaataaaatttaaaatgtatattaaaaaaactaataaaaaaaatcattaaattttttttcttgttacattggaatagtttttcctttttttaaaaaaaaatagaatagtcattccactaaaatggtggaaagaacattccattataattcgttccaatactttaaaatgcaaccaaacaaatgaataaaataaaaattattttctttccattcaattctatttcattacctccaaccaaacgggacttaaatatttcattgcctttcgtcatcaatattcaatccgtacgagaacaatgagcatcaccaaaaa

SEQ ID NO: 100146 - DNA, 1278 bp, Cannabis sativa
tattgacaccagaagtgtccttgaatgatatgatatgcttcatttgagcaactgaggggaagacctttaaagatttgttggtcatggtacgctccatagatgggagtttggtgcctctaaacctgcaacttctcacacttgaggaatcgagtttgatggtgctttttcaagcctgagctgggaaattttgcaacttgggtccatggtgattagaggaggagcatcttcctaccttggcagcttagtaggggacccctgctggaagagccacccaccttccacttcagtatgctcttgagtcttcttgtcataacttcaaaaaaataagatagttaataaaaagggaaatctagcgaaggacaaagttattgaagtatcaagcagtcaatatcttgaacctccacggaagcattttccctaagagtaatgattagggcatcatcgttggaggaggaatcttttaactcctattcgagaacacccttggccttgctgtaaatatcaacaagttaggtagactaaggaggctctgcaaatggctcctggatgctcatagggacctcacaggaaagagaagcaatccgagcaggtctttcccaattaggaatatcctaattagagggctgagccttaggcagaaaagatttttttcttggacttcttggaaagatatagtctgtacttccaaaaattatcctccatggcctgcttagatatctcttgagcttcgccagaaaacccaagtagatttctaaaatggtctgcctcgacccctttggagatgtagtaatcagtgcaacacccaccaatcttggaaaccttcttgttagtggtaccggtcagccatgaaaactccagctgggaaaattaaaaataatcagaccaattatgatgtggatttgactcaaggtcaaaaaaccagttaaagtcatggggagaaggcatttcccatccctacttggcataaggcacaaacaatgaggatatatattttattccctttggacttttatttgagttaggtagatcacgtagtatttggccaccttctggaagtaagggtgaaggggcaacaaagcaccctcctcagcatgatgtcccaaccaagcacaaatcccttcaccagggttgtgggccaactactcctccgtcggtatgaatgctacgacatctctaaccaagcctttggctcagagaaggtttgaccttttgatggtgagcttggacagtggtgattcccaacgcgatagtggattcgacttgggaggcatcggttct

SEQ ID NO: 100147 - DNA, 1330 bp, Cannabis sativa
  modified_base (1224)..(1237): a, c, t, g, unknown or other
  modified_base (1277)..(1283): a, c, t, g, unknown or other
aatggttcattaagttttggttctgcattaatgtttgtgtcactgtcattgttgtccttaaatttgttgttatggtgatcttgatcaggtctattaatccgcaacatatgtcaaaagttttaaactgaaaaaaaaaatagaaaaaaaaaagtgttgagagacctcttgcactaaggagtcttggtcaacggtttcaaccattgtaagagcatctctaatagagtgtaaaaaaggtggtgtattgttatattttagaacactttagaaaaactactactccaatgatgttctaaaaagtgtgttaaatttgacacatgttaaaaattgtgtcaattttggtacaagatataatattgtactaaatttagcccacaataaatgctacatttttatttactataataccactaattattatgatttattgatttttactaaactttatattctttatttattatattactattattaaaattaaaaataataattttatatattttcaataaaatgttaaataactatcagtataatcaattttttttttctatttttgacatcttgtttattggagtacaattgtaaatagtaggcaaaatattgtacaaacaaacttatttatgtaccaaaattagaacaaattttaggtctttcattagagatggtctaaccataaagatgactccttctatgtattgtttttggagaaaattataaattttatggttttttaaactttttgtacaaaaatatggttttttttttcaaaaaagtgtttttacgagaaaattaaagaaaaaattgaaaaatatggaaaaatcatgtaagggtagtcaagtacccttatggtaactagaaaaataacaagttactataaaggataaccagataccttatactgttttttttctaaaactttccaataaaataactttttttttagaaaaaaaaaaaatcatatttttgtacataacttgttctgtttcaaattttttagcaaaaaagtatttaattaatgacattatacaatctctctatattaattttaaaaattaatgcatataattaaagatctaatcgaaaacttagagattataatagttgcatatttagttttatatagaattaaattattttgaaaatttattcaaaaaaaaaattattttgaaaattggacgaaaatggtgaagaacaaatagtataatgggttaatttcacaaatgnnnnnnnnnnnnnnaaatacggttttacggagttttaaatatttttacgatttnnnnnnntttatttacataaaatacagtctttttatgttgaaattttgttcatt

SEQ ID NO: 100148 - DNA, 1320 bp, Cannabis sativa
ataataataataataatttagaaacttgtgagtcccatatatatgaatcttcatttgttctctttcaagtgtcagagatctgtataaggagaagagaaggtcataataataacaataatactaataatgttagtttttataaatatttataagaatgtttttaagtcaattaattattgaggtagcactttagtttatacagccttcaaatgtgtgtaatgttctctctcttccttagaaaaataaagactcttacttaaatatagataaatactaaaggtcaccagtggtgcctaacacactcctacgtgtcaatattgctattggtccaactcagtatcgattctcatatagtttaatataataattttacggagtattgctagccaatcgcaacgcaatatgtcaagaaggtgctaagcaccctagtgcctaataacaatgctcagtttggaggcatcgattgatcccaactctactatcaaatctgggtttagtgagtagtactctttgttttcccattggctaaagaagaccccaacccaagcccctatacaaaaattatcctttatgtatatagttaaaatatatgtttatatattcatacctttatttatttgatgagatgagaatgagattggtctctattttaatgaaccaatttcccttgccgacttccatctgaaattattttccatttccaagccttcttttagggtccccttttttctagaacactcgtagagtttcttgcggttctcaagtccagcatcgtactcagctatcttcttcaacaactcagccttcttcttttctattttcattgggaactcagtctcaagcactttacttacttgttggtaatagaaatatcttgtgatcttccatagagattcctccaaaaaacccacctcaaaggctgtgtaatatcttacaaatcttatgtagtgataccattgatgaagaagacgtttagtgatgtctgtgaccaaagtagtatgcatctctttcatcactttacatacaaagtaaaagcaaatgcctttgaagtattggctacgtcttgagtcggtagtaatatctccatgtttgtgaagcaagtatttgataacagaggccaaattaaaaggtaccatatgaccctttacatcaacaatcttcaatgctacctcattcccttttattttcaacttacttctcccaaagaaagaatgaaactcatccaacataaacttcatgaaatcagattctgtaaaactagaaagttttagaacctcatcagctttatcatcatcattactcatgattttactcttttct

SEQ ID NO: 100149 - DNA, 606 bp, Cannabis sativa
tacaaagtgatacgtttaaaaggtgttaaacactattaatgtccaatataataaaataacattaatcttttcaaattacctataatttttatttatgatatgcaggatgtctcatgttaatcaaaaaaatgcagtggtgtacttgagcgtctttgttgacataagaagttatctttttaatcaagttttgttggcaaaacaaactcggcgtctatacattttccgtctttgatctcttgcaatacataaaggaaaatgtatctcccaagaattgaagatatttctatctacaattctgaatggattcttggccaacgaagttaccaacgtcaacttttataatgatgactgtcccttcgaaacttcgttgatgtttgtaacttcgttaggcatgcatgcatgcatgtagaagactttttagtagtttaccaagcgaacaagaagcattattcctaccgaccggtgcggttgttatcggaagttcctttgctgaggtccaaaataaatgatataaagaaacctccttgttaaattagatctcactgtaatatttattattactgtgttacaagatgaagtgaaaaatacagataaaatacaaacaga

SEQ ID NO: 100150 - DNA, 750 bp, Cannabis sativa
tctccttctccgtctccggcagcggatgtcagcgacattaaccataaggacatgaacgaagaatcaggcgaatcgaacgattcatcaggagacggaatgagcggtggaaagaaagtcggtgttgcgtttggagtaatcgcagccgtttgtttggttggattgggaggattcgtttacaaaagacgtcaggataacattcgccgatctcaatacggttacgcagcgagaagagaaatgctctgaacagattcattctttcgaggttacttgatattttttttttttttttttcaaatttacagccattatcgtctcttatttcttctgtatgttttctttgatttgatcatattttggaattgattgattcaattctcgattattcttgataattttttttttagtttcttttaagattcttaaatcatcatatgattcttgagatactagttagtaatcgatccatgtattcttgttcatactagaatatttttagtattattaaataataaatttgtttttttttttttgattttctttgtattttttttttaaaaaatttaggtcgtttatacttgaatttatttttattattatatatttataggtggaaattaaatgaagtcaatttttttttcttaattgggttgaccatattgttaaaagaccaatttgcggcgaaactcctttatgttttgatttttatacacttaacccccttatctttatttttggtggcaaaaccccctt

SEQ ID NO: 100151 - DNA, 1373 bp, Cannabis sativa
acttacgtggtcaaaaagagctggaacagtccagaaaaatgcagctgatatttctggaacgtagtggaaatgtcgagctaatccccacctgcatgaaccataaaactttgttctattagaattttaacatttcacaaattaagacaacgagaagaagaagaagaagaagaagaaagcacgctcctctatcagaaaaccaaatcgtccacatcgttagaatgctcatttataacaaaagcattctcaaccaaaaaaataaacataatacacttacgttgtatttacatgaaaaagcctgaaaacttaccatcctgaagtaaaaagaatgttgctttttgtttccccggttgtggtggtgtaagaggcagttatctgtgaaatagaaagggaagaacaatgcaggagttagcagcagatacacaaaaaattgtatgtacaacaagaaccgaaagacaagtttcaaagagccatatacctttgatggagctttaccccaaaccaaagctttgccatttgttctgcgaaactcttgcctttgcctatcacagtcgtagttaatgtatatgcaaagaatgcctgctactaggatatagagtgccagctgtgacaaagccaagtagagaattaaaattaataactaatttaacaggaacatgggaaaatgagactaattggttgcaaaaaaaaactcaaatccatgctcagctcataggcttggcagcttataagcgttcaacttttgcatttggctggtataatagagtttcagcttctaaatcaaattgccaacataaagctttataagctgctaataatattattggtataatcaagaggaagttagctcaaatggttgctcctataagatctgaagttcgagtccctcctaagtatttacatagcaattgctatatcttgctagcctaggaacatagaaaagtatctacatattagcaattacattttattgaccaaataaaataaagagaagaaaactttatacctgagttccaaggtgtacgggatgattgaccaggtacatgtcaggtgaagtatatacagaaggcacccatacaaggcatccccagcaaatataaaaacaagttgtcaaagcgaataagcacaaagatccaaatgagagaaagtacgaacaaaacaatagaaagggaaagaaacaatagataaattcagcatttgtttaataattattctttttctctcctattctgagttaaaacttaagttgtagaaataatttatctgctcaaattaatgccaacaatttggtatgccatgtcagccaatccaagtaattggatcatatacagcaatagatggaaaaggttaaagggaaagtaactatgatctttaat

SEQ ID NO: 100152 - DNA, 1629 bp, Cannabis sativa
tttttaaaattgtttttttttttaatttttaaagaaaaagaaatattttttatttttttatttttattttaaaaataattaatttttttattctaattttaaataataattacttggaccaataaaattgtgccacgtgtagaccgtgtacacgtagacattccaacctggcatttaacacccaaaaatggatggaaatggctaagtgctaacagaacttgagtttaggaggttttgccaccaaaattttagaattggaggttagttgcaaaaatttgaccacttaaggaggttatgccgcaaattacccttttaataaatattgtttgtgtgatgtatggtataacttgtttttagacttttttttttttttgtctagactagctttattttaggcattatgcctaggtggcaattcttgttaccgtgttatataagtgttcgtattatgtagttggatatatttatttggtcatcccctaatctaatgtatatatttcgtgtcaacaaattttaatcttaacccaacctatcatgtttttgtgttaacttatcgtgttagcgtgttgattatatttatgttacaatacacattgactaacatgattatttataattatatcaattttttttggacccatttaaataatatactaaataaaaatatatcaaatcaaactgtaaataaataatatttattaactaaaataatttatcacaaattatcaatcttgtattcttgtaaataattttctttctaatctatatatttttttatgaaaataaataacaaatttaactataaactaataattaataatatattagatataaatggatcaattcgtgttgatttcttgtcacatacgttaatcttaatccaactcaaataataatcatgtcattcgggtttgacccaatttcaagtgacgtatactttttatgactctaactcacaataatttatatcaattttatatggtattatcgtgtcttgacctgaattgtcactcctaattatatcattatggtttgtttttgtcatatttttgtttcattctaaatttggccttaaaagctatcaatgacaccatcaactttataatctttcaaataattttaattttaaaacacaataatttaaaaaaaaaatcttccaacgtaggatgacccgcccctctttttttttttttgcttggagaatatatttctcattaagtaggtgaaataacaacaaaattaaatataaagtttataataattaattataattataatgaagtatagtattaaatttagtatgcaacgaaaatatgttaacaattattattgtaccaatcatctacatgtaatatatattaaattaaaagatgaaaagataaaatagtttacctcttgatgaagtgtcattgctatctttttgtaagttgtatccatgaacagtaatgacactcaaataacgattttccagatctaccaccatatacaaagattagtgtaagttgataggatacacaaaaataataatattcttattttaatctcaagacaagaacaataactctacctaaaaaggaaatgatgatacaatttaatttattacattttttaggtttataacagtatatt

SEQ ID NO: 100153 - DNA, 1585 bp, Cannabis sativa
  modified_base (376)..(385): a, c, t, g, unknown or other
  modified_base (1554)..(1555): a, c, t, g, unknown or other
ctttaatccaagttcatacattttagccaacccacgtggagaactatccccggtgatctcggccctatgtcacaacaatggtaaaccaataagtgtttaaccaaaaacactacttaaaattcacataacacaatatagggttttctaccaaatcccgcggtataaatacagtaaaataaaacttatattttggctctaaaacatacaccgtattttagagctcgttggaagcttcaaaacagtatatagaatgtccaaaacggacacccgagacaaaagttatgacaaaaatacaatttctgatctctttggaatttctaaacactatacaactcgaaaatcacaattttcgcactcaccgaaacactaccaaaannnnnnnnnntcactccaaacttcacagggcgcatatatacaataaatattaccatccttacataaagaaataaaatttgagcccttaaataaaaaacgccattaaccctcctgttctgcgatctggaataattattcgaatttagaggcctctttcagtactaccttgaaacctaaggttaaaattactatggaggatattgaggatgaaatttatttttggaaaccttcgattgtgtgttatgtggttcgatcaaatccttcattacatattattgaggggtttgctaacagggtctggactgggaaaattgacagagttaaactcttgtgtcatggtatttttatcattcgttttctgagcttggctgttcgagatgaggttctcaatggtggttacatatttttcaatagaaggcctgggacctgaatactagcttcaaaaaagaagacatataaactgttccgatctaggttcatctagaggacttggaacttaaatattggggtcaaaagtcattgttcaagatcataggccaagtgggaaaatcagttacggttgattcagtgactaaggaagggagaggcttagttacccgagaattctcattgaggtgaatgtaaattaggatgttcctggtttggtggaactcgaggatgagaatggagccaatactagtgttggggtgcattatgaattgaagccggtggtttgcaaacaatgttttggtatgggacatagtgctgaagagtgtcaaaagaaaggtgaaaataaagaagaatgggtggttaaagtggacaataggccgaaaccaaatgctgggaacacaaagatagatgatgagggttttcagcaagtcaccaaaatgagcaaaacatgacagaaaaagaatgaagttgctgtagtaactcagttgaggaattcgtttcaggtattggatggggacaatcaagataagctccttgctgagattcaaccatgtgaaacagtagaagaatcggtcaagacaggaggagaggggggaggtccctctcttgtcaatggataaagtattatgctggaatgttcgaggggccaacagtctccaaaagcagagtcatataaagcaatttattttggctcagcatgtgggattggtgttggaaattattttattaggatcttagatctactcacanntatgttgattaacaccctaaatatcaactt

SEQ ID NO: 100154 - DNA, 1171 bp, Cannabis sativa
aaaaaaaacccacgaaattttaaaaattttgtttataaatttatttgcaaaaaaaaaaaaaaaaaaaaagttttgaactattgatgttttcatgttataattttattgttttttttttgttattttgtggttatttatcgattgtttttaatgttattttgatattatttttatatatatttttattatttttatgttatttttataagacaccgtataattataataaaaaaaaattaaaaactgtaaaattgatttttttttttattcttttgaaaaaatataaaaatgttatttgaccgtaaacaggatcggccctaagaggatttggggaccttagacgaaaaattaaaattagatcttttatttaaaaaaaaaaattattaatcagtactttataaatttaggttttttttaaaaaaaaaatatcattaatttagaatagacaaaaattttaaaatcacaagttttgatcattttttggaagtacatatttggtgttacgaacatttattatgtatacattgtaaaaaaaaattattatattatatatagagatgataaagaaaggatttttacaaaaatattagattttgggcaaaaatttacaattttattaccatacacaattgtttacaaaaatactgtctttttatgaaacaacttaaaataactgtaaaataacaaaacaaaacaattaaaaacaacagtggaacaactaaaaaacaaccgtagaacaacagtaaaaacttaacacaatatacagtataaaatttacacaatcttttgaataaaaaaatgtacgcagtatttttaaaaaaaattctgccccacggtaaaaaaaaaagtcaatgtttaatataaaaacctctaaaaaatattttaatataagaaactttgtgcaatagtccaagctacccaatgcttaagccgacccaaactgtaaatatattattataatttttccaaaataaatacttaatgcaattcatagttttaacataataattacattgtttcccccaaaaaaaaaaatcataataatcacattactaaattttgaaccgcttgaggctagctcaagtggccataaaagggtgtgtgtgttaaaggtcttgggttcgagtcccattgtaatatataaacccttaattcaaaaaaattatatata

SEQ ID NO: 100155 - DNA, 2251 bp, Cannabis sativa
attgctgctcttccttattattatcatcattactatttgaacccctcattatcttccttatctccatgtctacttctaatcttctaagccttatctctacttaagaaaatgatttgttatgtcattttctctaattgtgtaatgacttttatgatgtcagtacagatattctttggagcaccggcgggcccacatggagaaaagagtggctgaacttaaaccataaaaaaagagaattatatattggtattttagttaattagtgcatgtgttttaaattaaagagttttttacgacataaatacctaaattttatttaggtaatagataaatacttaagtcgtattttttgcggtaaaaatactttttttcacactcttggaacttccgtaagtacctctctgtttcttccaggtaagtgtccatgtgtcactcttttattagttcatatcatttaaattctatctcttatttaaaaattcattgaagcattttaaaattaaaaaaaaatacataataaaattaataaaatatctcataaaattaaaaaattactttttcccttttctcttctcaatctcatccacgatcttcttctctctcttatcttcttcttcttctcttttttttatcatctctctggttttctttttctatttccatcaatctcattctcaatccctctattgcaaataataactttgtttttctatctattagtaaaatttaaaacccaaaatcataactccaccatacctgcacacattaacttgtaagaagcttttcgacaatcaaaaacgaaagttatacaaatgattagagaaatacaccattaacgattgaggattgggcagattgaggttgttgaatcggatgcgttctctcggcaaacaggtaattaatttctaggttttcttctactttgaataaaaagttcgatatttacttttggatctgtttgaatggatcgtttaaggaatggaagagaagatcgaatgaaagagatagatctggtgggaaagtaatttggagatgtgcaactctgagaatcgatatctgtatattttgtttcattctttgatattataatatgtgttgtgtatatgttagggaaaaccatttcaatatgtacaaatctaagtttgtggaacaagaacatgaaacaatctattaattttttaggttttttttcttggggtttttttttcttgaatctggttttgaatatgttgagataatgaacagtagttttggatatgttgaggatgatgagtacagtgataattttttttttaattttatgtaaaatgatattttttttaaaaaaaaaaaaagtaaggataatagaatatatttttactttttatacattttaaatatatatttttattttaaaatgatttttaaataagtttaaaggaattttaaaatgaaaaaataaaattaatgatgtggactaataaatgacacgtggacacttacttgaagaaaacggaggtacctacagaagttccaggagtgtgacggaaagtatttttatcgccaaaaatacgatttagatacttatttgctacctaacataaaatttgggtatttatgccgcaaattactctaaattaaaataagttactagatttttgatgtagtggttgtctaaatttagatttatgtcaagagcaagggtttaagttcgtcatttttttttaaatatatgcaatttaatttttttttaaaaaaaaatacatttaatgctttttgtagagtaatctaaattacaaaagaaaaaattacacccgcttagtttaaatcctggatccatcactaacagaaagacttcccaccaacaagctaattgtactagtcaaaaggtatacaaagtcagaatataaatcgttacaaaataaaacgatttttataagacgaaattacttcgaaaatttagacaaaacaacttgaccacccaaaaaagtatctgaataaaattaacaatttaaacaaacctacaaaataaataaataaagtagaaagttaattagtacactaaagaaacaaaatattaagaaattttatataagaaaaaatgcttattagttaattttccttttttggcaagaaataaaatttaataaaaaaaattatctttgaaaacttattaaataaaatagtgtcattttttaccgaatctaatatgtttagtctaatttttgaatctctcttctaaggcagataatattaaataatgaaatgtcta

SEQ ID NO: 100156 - DNA, 2353 bp, Cannabis sativa
gtctggcctctatctctgagggttggcctccatcttcgaaggttggactccatctttgtccaggtgtacaggaaggtaccaccaattctgcctaaacctccggtggcaggaaaattaggggtcatcattgacggaccccatattgcatgcgagagcgacaaagctagagagcattatgctcgaacactccatcatgagccacaaactgatttcctattaggtgaagaacgagggtctaagaagccaaagcttggagagcccacaatctctttctcaaaaaggagatcctacccaagacagtttcctgcacaccgacccctggccgttatcgcaaaaatcaacaatataactgcaacaagatacatagtttaaaatggagcctccctcaacattcttttcaaaatcaactcatgaaaagatgaggcttcaactcactaacttggcaccctacaatcaagtgatgtatgacctctttggcggaagcatcgcattcatcaggtatattagattaccccttactgttggagacatccaaccaccaatattctaatggcacagttcatcataacatgataggctaaccagccctatacaacttgagggcataacattcatctgcgatctcttcctgaaattcccaacaaggcattagggaagatgtcaagaggagatcagtaatctgccaatcactattacaacttggccttgcccaaatacaagaaatagaagatgcacccattagattaggagcatacaagcttcataatattcaatgatcttatcagctacaacatggaggtgtgcgtggatgacatgcttgtcaagtccaaaagggctgggggacatatagaggacctagatagaaaatttcagaatcctccgcatctacaacatgaagaggctcaaaatagataagatccaagaccttttgaacatgaagtcgcccacaacaattaaggaagtacaaaaccaaacatgacgcgttgctgcactaggcagaattgtgtccatgtttacagaaaaatgtgtacccttgttcaacattatcagaggtagcaaaaagtttgagtgggaaaaagaatatggaatcgcattccaggagctgaagaaacaaatcggcttagccacatgtgttgccaaaatccctagacaaagaagagctaagtgtgtgcctaatagtcacagaacatgctgtgagtgctgccctcacaagagaagaagacggtgtacaacaccttgtataccataccaacaagagacttatcgatactaaaagttagttcccactcatgaagaagctgacccacaacttgatcttggcttccagaaagctaaggccatacttctagataatctctataaaggtgtacaccgatcaacagttgcggcaagttttacaggaacttggatcatcaggccaaccactcaactgaacaaagtccaagctgtcatcagcttcatggctaatcatagaggcatatctccccaagtctctcaatgttttggagaaaagcatgagccagagaagaagtgagagcaagaacccaagaggtgcattgaccacctgctcgatgcaggcatgtcccagggcactttgggggcaactaatgcacgaggtaacaaggtcaatttcaaagcttctaacaacgaggctgaacatgaagctctgaatgctggcctcaggctagcatacgaagcgcgggctaaccacctagacatgaaccatgactctcagctagtcgtaacttatgtcgtaggtgaatatacaactcaacacaagaagatgatagcctaatagagcttttgagatagctaaaaggctatactaaaaggcaagcccccaaagaatggcataacagctaatacactcgctcaactagccaactgcaccttttcaaccaaggctaacttggtacctgctcatttcttcaaagaactaagtccttatatttcaaaaggaacaaacatgctagacaatcaacatggatacactacagtagcatacctcgaaacaaaaaccttgccagaaagcaaggattaagggatggctgcaaggtgtccaatcttgcacagcacacagacgtggtatcccaacaccacctctaaggagcattaccaagaaagaagctgaatagctatgaatagaagtgcgcaaaagctttacgataattacgctgagggcaaagccaatcaagtgttgacgggatcaagcttcagcttcaacctgacctctagaaggctggtcgaccataatctcagcaggctagccatagaatccacaatatggccggccactacctccacatgctagccagccatggcctcatccaaccacccaggcagtgctccctcg

SEQ ID NO: 100157 - DNA, 1859 bp, Cannabis sativa
  modified_base (263)..(264): a, c, t, g, unknown or other
ataaataataaatagtgtaaaagggttatttctctacaagttttcaaatgagaacatttacttacatagtactatgatttgtgatcatttgctataatttctcgtttctattattcattggtcactaattaatgttttatccaataaagattttttttatataaaaataaaataatatgtaatatattatttatattttagaagtaataattttttttaaataatatctacttaaattaaatttatttataaataaatattanntattttcattattatttatatatttatagattaaattctttttaagattattttttctattttatatttctatgtatctttattttcaaaaaattataaacgattgttaaaaactaaattattttaagtatttatataagtatttttctctaaattttatttatccaaaagtggaaaataattttttattttatttataaaaagtaatcagataaaaaaaataattgaatgaatatatttgccgaccatcgatgaactgatcggattaaccaaccaaagttaacttcagtcattatatattgaacaaaagtaaaagcctccacaacggtcgagcgataataaaaagtcatagcgacccccgtagctacttgtactaaaaataagtaagcgcaattcctccatacttgtatgttatcatatgccatacttatatttgagcaatgtttaattttttttaagagggatttgcggcaaaaaacctccttatgttttaatttttatacacttaacctccttatttattttttttggtggcgaaacccccttatgttttaatttttatacacttaacccttttttttggtggcaaaatccccttatgtttatttttctttctaaatttgacaccttagttaaatattaccgttaaatatcaactggatgaccactgtatacacctatgtatatgtaacggtaaaacctcgaagtcgatacaataataatccagttagtatttaacggtaatatctaactaaaactttaaatttgcaaacattagtaaactgaagggggttttgccaccaaaaaaaaaaaaaaaaatagaggggttaagtgtataaaaattgaaacataagggagttttgccacaaaaaaaaaggggggttaagtgtattaaaaataaaacataagaggattttgccacaaaaaaaaaaaataaggaggttaagtgtgtaaaaattaaaacataagggggtttcgccgcaaattactctttttttaatgttttaatctttgttattttttacttcattttttacattttaaaaaatataatacactatttttacaaatttatttatctatttgaatgtttttatcattattttagtttttcataaatttattctcaattttttaaatagtcaaaattaagaaataaattaagcattttttgcactttaaagatcaattttttgtattttcatataataaatttatgaaaaaaaatataaaatttaaaattattaataaaattgttaaattttgccaaaccaatcattgttcgttactactttaaaattaacacaaaagttaataatttttttttataatacaataaaaagatatttgcagcataacaaaaaatatttataccattcaccaaaatatatatactaatgttgcccctgattttgcccgaaatacgtggaccaaccggatgatgacacatggacggaaagggtttagcatttaaataaaacagctaagtcttcttagagcgaaggattactttagacatgcctcctggagaaggcatgtaagtctcgtatgctcccggagagcaggatggcaataaagcatctccgggtggtgtc

SEQ ID NO: 100158 - DNA, 738 bp, Cannabis sativa
ccctcttaaaaatgttccaatgggctacttatagtatgcttctataattttgaattacatgtggtccccaagatggggggacaacttctcttttgtaccatgaagatcagtatgtcaggtggtctcgtgtcccctgacttttaataggacaaatgttgtctctaccatggtacattgagtgaggcaagttttgtccccatttcttgtacctgcggtacgatcgctatctcatatgtggcgtgcttgctccaacatttttattcttagttattccttctcattttcccatgcccaaaagttatgaatactcaacaaatttaggctaagtgtttcgctttacattcttttgcacaccaaacaccaagcatcttgaggatggtattatatgtatttgttcgtaggggactgaagtggggaaaagggagaagagtagggagaggtgaggagtgaggagggggagaggagggagcggggaggtgtggcatgagggcagcggggagcgtgggccgtgagcggggaggggagcgtggggaggtgaggggagagcggggaggggagcggagagcaggaagcgtgaggggcacatgggcagcccaccacttgtacttacattgaacttttttatttggatagggaatcttttctcttttcttattttcattcaaaatatacacttgataaattttcatggttaacagcaataattaattgtacaaaaaaaaaaaattacccaaaaaa

SEQ ID NO: 100159 - DNA, 1185 bp, Cannabis sativa
  modified_base (577)..(589): a, c, t, g, unknown or other
gtgctaggcaccactggtgcctaatagcaatgcttttgatttatcatgtaacatggtagtgaaagaagcggaccaatcccaagctgccatctgtctagcgtgtggagagagatttgcaccaactgggcgctgcgttggacaggcaaacgaatagggatgcgccaactgttgatgacgaggattgcagggtccacaactggctgatcaaggaacttaggccttgagctgctgggcctttcttttcccttttctttttctttgagcttctttctttttcaatgttgctactttttctttcacttcaacaaaatactacaataatttttgattcctacaaaattaacaataaattaaattcaaataaaatattttcaatataaaaatatatttcaatataaattattattattatgttgtgattaaaaagtccgtggctaaaagtattagtcacaaaaattacgatttgttgtgactaaatgtgtttttagttacaatatttgtttatgactaaaattaaatatttagtgataatttataactaaatactatgttttagtcacaagtaactttttattgnnnnnnnnnnnnncatttagtcacaaaaaaattatatagtaactaaaaggttatcactaaaggtagcagttttttgtagtgtctccaccccaaaatctcaaaatccatgagctcaaccatcctgaaatccttgaaatccccacccatcttcgaagttctcaacccatctctcgtttttcgcatattttttcttccaattttcacgatgtcgctaaacatcactaaatatcgctaaatcgttaaacatcgctaatcacgtcgctaaatgttactaagtcacactcaaatttttgcgatgtttaacgatatgctatgcattttctagtctcatatcgtaaatacatcgctaaaagcatcgctaaacattgttaattacgcaaaatatcgctaaacatcgctaatcattgctaaacttcatctctaacctcatatttggtctatcattgtaaatataatcgctaaatgtcgcaacatattgcaaaaatggaaaaccataaaaaaaaaaaaaaaacatagaaaacgagtgatgggttgggactccgacgatgggtaggaatgtcaggggtttcgggtgtggttgagcttgtggattttggggcttcggggtaa

SEQ ID NO: 100160 - DNA, 1360 bp, Cannabis sativa
  modified_base (1300)..(1325): a, c, t, g, unknown or other
ctgctctcgtagaacataacagattataaactactcgcgtagaacatagcagataataaactgcttgggtataacatggcatgttgtaaactgctcgcaaacacatggtagatcattaattactcgtataactaaaaaaatgactttcaaaatacatacaactcaaagtatcttaagctaaatcaagagagaaatgtttagattgttaattgaaacgcaataaacaaacatatatactcgaaagcaagatgtgaggtacaaaaatttaaaatatacaaataagctatgttggccatccaacaatgcaaaagtttttacaaaagccacaaggggcaatcaatgtctcgaccaaaaggccattgtttaaaaaaataataaataaataaccaagtgtacatggatggagacttggaaagttcttcttcttccttagtatctgcagcctcatctttcttggttttctcaaaaaaaaaaactagcatctacgtgactcctcctccctaaaagcttaaatccatgttaggatttgcaatccaggcgcgatagatagaatgtttagccatcaagttaactttggctatggtattctcttcgggcccttcaagtttcttgttggcctcattaagcttctggtttgccttgtcaagctctttattttttttatgagcttcacagagatccttagcctcttttttagcactttagcctcttttttagcaccttcgagctcagtcttatggctcttcttttggtactcaacttcctttattaatcgagtaacctcgggccaagagttattccattaccttgcaagaatttcacattgttcaacggatgtgcaaagctgggactctagttgcttgattcattgaaggcctctttgatgagctaggtgagaaaagagaaatgcctgcaagaaaaaaaaataatttaggaagaagatgacaaagggacgttaagaaatttgaaaataagataaatatgataacttaccgagaaggagaaatttaaactcctttcagattagctctcaaagtccccatttttgacgaaatcctagtcgtcctactagaaagattggtagtggcgccaatagaaagtggcaagctacgaacagaccttcgagcccataatgccagcatggctcggcaaggggcatgaaggttccaaaaatacgatctcgagttgtgaacccgagaacttaacctgatgaacagaacctaggacctgttcatcgatgctcacatctgttgggactggggatattatttagggatcatctgttggaatttattttacnnnnnnnnnnnnnnnnnnnnnnnnnntgttgattaacaccctaaatatgtactttctaaaa

SEQ ID NO: 100161 - DNA, 870 bp, Cannabis sativa
atttataacaatcatcataatattatattcaaatctcactttccaatatcgcgtcatagagtggactggcgcgactctccttttgtttcccaaaaatcaatttttttctccactaaacagtgaatgccacgatattggcttcaatgctgtggcttccactaagtttttcaaatacagttgcaattctaaaaatctgctataatgatcgatgatattttagccataactctctcaatatatattgggattggacaattcaagatattttagaaagcataataaaagacctagaacttttattcacaatatttgtgaacggatcatagttaaaataggcttgaaactccatacttgatttttgattacaaatggagtgtattgagcatccacaacttagaatttttcgcctattgtatcttacaactccaaaattcatgctgattccataaaatccattttatttttcttatttcaactcatatgatatattttacatttaaaacctgaaacaaaaataaaataaacgtaaacatgaataataatcaaaataaaataagtaaaaacaccctttaaaatagactctaaaacccataaaaatagaccaaacaggttggaaacaccatgttcaaaattcttaaagcttctgtctacactatcagaattcatatgtttgtagattccggcgaccttttaggtcatgactctttcaagtaggataaaggtgctcgaagtcgagaaacatttaaatttttcaaaacttctcgtactccctgttctctcgaatgtgatctaggacacgtggccccttaagcagtctggggttaacttctccaagaaatttgagaaggttcccattcttgaccatttttt

SEQ ID NO: 100162 - DNA, 902 bp, Cannabis sativa
tctaaaaaataatatataaaaaatcaacaaattaatgattaagggatgcatgccagaactgtggggctaatttcatcataaccctcaaacctaagacaaaggcttcaataattgggccgcccatgacaagcatgttttcttattagacaatgcacaaataaaataaattaaaagtgtctttgctcaatatataaatataagaaaaatgtggtgatatatagtaaattagtaagtccaactttaatgtctccaaatgttacaaatggacaagatagagatgtgataaaacttgactttgtagtaatatttccctatcaacttaccgaccatgttaggacttttgggagattgccttcataagtttgaatgtttgatgcctttgaaactttcaagttttgtctttatctccctcaaacccctaaagatgggttttagaggaccaatacacaattcctttgttttccactttgggtcacatgtaggacctagcttcttatttatactgttttgtgtcctagaataactttcatcttcatcaatttttgttatgctcgaaaccttactttccaatgtcaatgtgagcttttctctttagatttttgttcttttatatgtggtgtggtggtttggagtgggacatccatatatttcatattcaggctctaattatctatataatgcattgtgcatgcacataacacaaattaaagaatatgttttgcctttgatgattccccaacaagaatttaatggtcattttgcaaggaataattattacttttccaaaattgtacttcatgttcatgtatatttgaaaagacaataagagaatatattacacacaaccatgtaatgtattgatgacaatagtgcatctcgtgacaattctcagataaaagtat

SEQ ID NO: 100163 - DNA, 767 bp, Cannabis sativa
tgaataatttttgggatattttaacgattgaaatattctgaataatttttgggatattttaaaatgttaacaccaaaaattttgttatataagcacatcttatatagaataaatatattaagcttgtggatgacgtggtgtagacatgtaactctcgtcaaaagatatgctataattatattttttactttcatcaattataattaaacaactattaaaaaaatattatgttaaatagagcatatgtataattataataatataaaaaactgttaactaaatattaaataagggcatagtgtagtataatgttagacattattaataatcataaaaataattcaccagaaaaaaattgtacaataaaacaactcagacaagttgtaaaaaaattgtaaataagcactataaaagataacatataataataataataaaaatatacatatcgactcattcgtagtgccaatttgttgagattttattttatggcgctctatgacctatatgagtattttgatgtaattgtaatactgtaatggcatttattgtaaattaattaagaaaaaacatacataattggtagtacattcataataacaataaaagatctctggttttgaagagtatgattttggaatggtgataaattattcacaattatactaacaaagcctcaaattttcaaaagaatcaaagtgaaaggattatgaatatgattacaatagtatgaacagtttcagtagagtgaaaaaaaaaaaaaaaaa

SEQ ID NO: 100164 - DNA, 1235 bp, Cannabis sativa
  modified_base (1206)..(1209): a, c, t, g, unknown or other
atatatatatatataaaagctcaattattttagatccaatttaaactttattttgattctttaaccaatgtattgtaaatttttgggctcttgttatttattttgggaggagtttatatgcgataactcatttgatctataaaatgagttttggggttagctctgagtctgtaattgctaatgataagctctctgttttgtaaaatgggcaattgcatgtgattttgtcgtaacagtttttcagtgaatgacaagaaaaatcactttttgtgaattggggttggtcaagttttattttttggggctagggatacaattacaattgttaatttatgatgatatcttgcattgtcttgctttgtatgtgagtttgtgcctgtgcatggtcaagttcatgtgtatgctatgtttgttatattactgaagataaaaatgaaaaaaaaaaacgagacaaaaaaaattcaatagctcatttattttaagtagttttcctatgaattttcatctatcagttttatttatttatttattttgtagaatgaaaggaaggttgtatggactaatgctcacaacttttctctaaacttagctgcactagaaattctatctataaatggataaaacttcggtattaatctatatgagtagttattgaaattaaagctaaaggagcaatattaaacttatatcaagaagtttagtattgctccttttattattttgtactctgtaatttttgaatgtcttcaaatggcttgttctccccggtcagaataggtggataaattcattcccttagaatcgtacttgagagtttccgacctcatacaactcaacagtcaagttcttttagtgttcctatatcaaattgaataggcggagatgggatttgaacccgtgacctcaaggttatgagccttgcaagttaccaagctgctctaccccgagctgaagagaaaaaatgggaactaggacaacatgaaaaaaccaaaagctcggccctccctctctatctatccaagggatggaagaggcctttggtgttccatccattttcatgttatttttatgtagttttcttataattttcgtgttgtttctatagaaactcgtaaaaatatgggaaaaaaaaaattctttaaacgtaaatatgtaattttttaacaaaaaattaaccttatgtagttattgttgggttttatgccnnnnataaaactctttacaatctgattagt

SEQ ID NO: 100165 - DNA, 1467 bp, Cannabis sativa
  modified_base (1224)..(1229): a, c, t, g, unknown or other
ttttaccatcataaacacaagcttcttgaacatccctaactgcagcttgttcaacaatgttcctcaccaaaaatctcttgatggccttatcctattaacataatttaagaattgttgttagaattacatacaaaacctaatcaaaatcgaatgaatatgtggaaagtaattacctttgggcaacacttgccgcagttagagcaacgaatgaacttaacatggccgcggccatgcttgtttctgcctccatttcttcgcttgaacgtcatgtttgattaaaccctaattttccaaaatcataaaccagtctatcgaggttggggatatagtgaatgtataggcttaagaatttgggttttttatgggcttgggcttgggcctgtgaggacagcttgagcttcaattactgggtatgggcctttcgcgtgagcctcttttactggacttagtcaagttgggctttctggttggttagcatgtgtatgaataaacttacagattttacaaaaatacctgtttctgtgctttcgaaaagaggaatgctaattacaacctcttagtcaatctcaacgtccgaaatcacttgtcgaaatattttttttaatttatttttctagcagtattcgttatagttacaatatcatccctgtaaatttttgaaaaatttcgaatagtttacagtaacaaaagcaaagttcgtgatatttcaatttaccacgcgtgttcaaaaaacttcaaacatatttttggcactgtaaactattcgtaattttttaaaaatttacaaggatgatgttgtaagcataacgaacaccgccgtaaaaaaaaatattccaacatatatgagtgtaatagttttttttgctttatatatacatatatttatagcctaggcctacacgttttgacccaaaatttgctacattaaattctgatcgcatgttttaatttatgtgaacaatattatttatcaatccactttcacgtacatatgatattttaagtttcactcccaaatatgtagatcaatttatattccattatttaaatttaaacatatatcttatatactcttcaaagtcaatgctagctaaaaaaattcagcgagtcatgtccaaaaatacaataatacaattaggatagtcaacgacataacccctcaccagcaagtattcattacaaaaagggacaaaatatcatccccatatatatatatataaatannnnnntgtatgattgaagtagtagagacagccaagtaaagagctaatgtgtggtgatgaacaataatgaaaggatattgaagctatgtttttgatccaaatcttccaatatccaaataatccaaattttttagagaatgggagggacctttcaagcatggctttggaaatatatatataacaataccaataaattcaatatttgtgtatatatgatatgaaaaataagtatcactatagatgt

SEQ ID NO: 100166 - DNA, 746 bp, Cannabis sativa
ggtgtaaggacccaatggaggcttgaattacaaaaagtatcaacataataatttcatggaagcaattgtttcataatattaattattaatagccattggccaataaagtcgtatttttcatcacatgttgtaagaaataacttagttgatacaataatataatctgaaaaaaatggcatcaaaaaattaaaaaaataaaaataatccgacctaccggattcgaaccagtgacctaaggatatctatttggaatccaccaactacagtcctccgctctgccaactgagctaaggtcggtttttgctaatattctcgtatagtaatttatatagtaatcttattctgtacttttatattgcatttttattcactctctgagaaaatagacaaatatataataaggtatttagaaaaatacttttacatttcattttccttatagtagaaatgcatttcatttaaattaaaaatagatagattgtatattcatatattatatatgattcttgctattaatcattagactttgtatgtaaattgatcaagatgtataatagtacgatttaattattagatatcaatgatattcattatagtagttttagatatttactaattttttgagatatatataattaataatacatgggatatatttacgtatacacaaaaactatgatttttattatctctgtaatattttcactttaccagaatccaaaatgtttgtgcttgcgtacatttgc

SEQ ID NO: 100167 - DNA, 826 bp, Cannabis sativa
taaggcacctgaaatatgataattactttaattattcccagaacaattatttatcaatagaaattttttgagcttctcgagaaaatcaaattagtaatttattgtctagccttatgattaacattgccagcacacatgatgttttcatgttgtgtgttaaaaaatttgactcatatcctaaagctatgaaaccgtggaacttctgtcaaatctttcttcacaggagaaataagttgagattcttgataagaaagataaagttattaaccgtacttcgaataatagtaaggtggaaaacaaccatgaggactcagtttccggagtattccagatgagattttgaggacaaaatccttttaacggggggataattataatgatagcatagttaaatcatgggaatgatcagataattaatgattaaattattaatttatgattatgtacttcttagtagaaattaagacttattgtcagaaataggccttaagaatatattttctcaattatggagaaatgttttaatactagatgtaatgtatatgttatatatgaaattttacatttatgttttctgaccagttttggtgaaatgcgacgatttgaccaataagagaaacttagatatagttgagtgttgtagaattagtggggcaagatagttggactttgatgtcttaggattattcggtgttatagtttttgataatgttaccccaaagtgattagattaactctttgtagggaagcgcaaaatggtaatttttccttatgttgttattaattggattttagtactttttctagttaatttttaaaagatgta

SEQ ID NO: 100168 - DNA, 1151 bp, Cannabis sativa
aaaagttaaaaaatagtatatagagtaatttctctaaataaaatactatatctatttaataaaactacagcaaaagtctacactataggagaaaaaaaattattgtcaatattttttaaaaatagtttttaaagttatttaaaaactttgaatttgtaatgaataatgagataaaagtaatttaaaaggaaatgattagaactttcaaaaattatcttttgttgctccctctgtttctatttttgtaatttttttaaaaaaacaatgtaaaacactcatactttttttttaatgaaaggagataaattctcattaaattaacaatcacaaatacaaataaagtattgatgcagaaatttagacacagatatctgaccatgtttgctcgctagattggtgaggatgtaatgagagttaagtataagtaagagacacaacaaatttatagtggtttactctccgtgacacgacgtgaatagagttacgcctacttcgagtttatatttctcacaagaattacaaagaattggctaaatgtggggtcgaaattctagagagagaaaatagcgagagatttcatgaccttatgggaacttagatgaatgggaaaaaataaactagataagctatccttttataaggactatgattctattaaaataataattaaaaaatacaaaaaaaaaatgaaaaaattattttgggctgatcttgatcattgatgttgatcaatggtgaaaattgtcaatttttggactttgaatctctcgtccgttggatcatttttgggttatttactggaagaattgcaactttgttgaggataaattttggacctgaaatattcagaattgagatgtgggtgtgatacacaacttgatagatctttaaaatagttttgaaactcaagttcagttgcatcaatcggatcaatatcgagtgatttatgactattttattgaaggttgttcaccaccctacggctaggttgacacctagcgcccaggttgacattctgacatcaactttgacgtcgggtgagtgccaaagcgtcctaaagttgtattttttgatgcctaagtgatgtgttggcaccacttagtcaaatttaatgttctggtgaagttgttcaccagttcttgaagatgtcg

SEQ ID NO: 100169 - DNA, 1946 bp, Cannabis sativa
atttttgaacttgtaacatgttgcttccaaaccccatttacaatctcagtgtgtcgtggataagaagtccacattttaaaatacttaaatgacttctttacattaagtatatcatgaaacaaagagacaatagccggggtgtggtcaaatatttcttctgttgcaaaaatagcttcagcagtagaaaaattatttaaccactgttgattggccagaagttggtcaatttttgagcatatctcctcactcccttgtcttttgttattccaagtatagaagctaccactgtacttgatatcttctaattgacattgccccacacagtctatgaaactagtagtagcattgaactttactctcttcctgatttttcctctttgaacaaaatatcattgaaatcacccataaccatccatggttccggagtattcaagtgctttaaatctgaccaaagcaatttcctcccttctaacttgttaaatgcatacacaaaggtaactagaaagccatacttaccatctaaagtagccacttgcaaatgaataagctggctggtacactttagtatgttcaccgaatagctaaaaggattccatgccataataattagacctccatcatgccacacaatattcgatgtaaaacaccatcctttaaacatgttaacatataaggccccaagcttcggggccttaactctcgtctcgaggagaccatcaagacgagccttgtgaacatgtaacatgcttttaaattaattttgcttataatggtcgttgatccctcggacgttccaacaaacaatcttatccatcttcaagaggaggttctccccctcttcttgtcttgccaattgtagcaattttatgagatccaatggtaagtgcacctgctgccatgtcccctgatccatgctcaacattatcagtcaaaacatgataggaattacctatctgagtctcagatgaaaatattttccctttagctttactccctttattgacttgctgaaaaccttcattgtccactgctttattttctacactagaatcagcaatagtattgtctcctttaaccacccactgctgttgtttcactcatttcttcttataatatgcagtaggatgtcctaagccttggcaatggttataaattattggcttccattcataggtaataaaagcaaacacatcaaaaccatgttcaacctcaaagggtatacactcaggaaagtcttgctgaattgcaacttcaatgagtacacacgggtaattcaaattattcctctcttcagtcattgtatcaacctgtaagggagtacccagctgaccaacaatcttaaatagggatctctcatcccagtacttcagttcaagatcaggtaattggatcaaaataggcactaatatgatatcctctttcttgaaattaacttcaggatcccaagctttcatcaccacaggtcggttattgaagaacacataacccccattaagaatttcatccctggcctcaattgtctcaaatcgaaccagaaataccccataggacagtgatcctactttgtctaccttccctttccaaaccctcctaatgaacccatcaattacagataatggtgggttagaaccaagaacataacatacaatagaggagctccagaaatgaacttcatcctcaatatcctctaaagtaatcttaaccttactataattgccaaaattcttaaaggaagtgtctaagttcctcaccacattaccagagcgtaaaatagggggtgtgataggagtaccttgaagcacacttgcagaacattttcgattcgcttgaagaaaatagtcaaaatctttgctaatctcttcctgcctcttaattgcttgttgtgaaaatttaggtgataacgcagcttgaaacatatcaatatccgctctcacagactgctctgg

SEQ ID NO: 100170 - DNA, 1489 bp, Cannabis sativa
tttctttttgcttttaaatcattatgaatttagttgtttattaagatttacgatatgaaaaagaaagttatgaaggtggaaatgagaggcttaaccaatcttgaaatgggaaatgttattactagaacacgtccgtttatgaaaagaaacttattgttgtggattcataattcttgattagaaccattagtgttaagaatttaacttacattatgccatttgaggctagttcaagtggatgactggtgggtgaatggtatgggttcaagtttcttgttaaagaagttacattaccattgctggcttcttggacttgttaatcaatgggctggaatttgagcatttgggtacttgcgctatgttgttatagcgtgaggacaacatttcctgtttctccttcccactcttgaatgtggagggtctgcaagacagagagtgagtaactataagtgtatatcttgggagatagagagaggccgtgaatatagacaacatagagaggcggcaacagaaatatgtgacagtggaagagagaatgaggctaggagaagatagagagagatgatgtggggcagagagatgctttgaagataatatgaatatgctatttaacttggtaatttccttaagggattttgaggtaaaagacccaatatttttctcttaaattttttgtatatattttaattaaataatgagtctcttccaaaaatataaataaataagaagaagacaatggaggaggagaaggaaaagagtctcaaaacttgataaactagcaatatacagttttcattcatggcgttctgtcaatcttcacagcttcattaacattctcttttgtagatgcttcaaactctttggtacaaacttcttaacccctcggagtgttggagttggacttaatcgcctcaacagcttaaacaaaccccgtttgtgtccccctttgctcgccttatcttcaaaggcaatgttttactaattactgtactcatttttgcgtttcatgtatttttcttatttggatttgaattcattcctagaaaaagagctttttcttctttctttttttgtggacacaacaacatccacgcttgcttcaatgctcctagtttgtttttgcttctcacttttcagagagcaatggtagaagatgcttcccacatttatggaatatgcttttttattcaccgacccttttgtttgtttgacctgatgtgcaacttaatgtaaattttcagggttattgcataaaatctggtggtttggatgccgatttagctgggggtgttcatgaggagaggactgcaaccctttgtgcaaaaggtacattgcagcaaggtggactagtttcttcagatgaaaaggatgtaaataataattctttggacggtagattaatgctcattgatggcacgtctatcatatatagagcgtactacaagcttttaggtaaatcttcttggtttatattttgatcatttgtttt

SEQ ID NO: 100171 - DNA, 781 bp, Cannabis sativa
aaaaaaaaaataggcaagagtctagaaaggcagctgggggagccgtggatttgtgtaatgtccaacatggagggattagtaaataagtaaatagtgttttcgtgattattgggattaattataattattaattaataataataatattaataataagattataattaaaaagagagtgaaagaaaaatatgggaattggagtgctttgacttaaccggcgtttcaatgtaatcttattcctgtaatttaggcccccacctcacccatgtttttctttattttgctctaaattaaaggtgaatcttttttattattattaattatgcttttcttttcttttttatccttttattgtggcaaattattgtattgaggaataatcattaaaaagtgatacaataaaaataaaatgatttttccttttttttcgtaatatgttatccggttggaaatgtggacagaatcttaaatatttgatgttttgaaaagtactttatactacattttagttataagaaaaaagtggtttagtaatcccaacttaaaattgctctaaaatcagaacaatttttacagtgtttttttggtcagttaactgatgatttttgcttttaaaaataatttttttcgatgcaagtatttttgacataatttaactgagagtttccttgatcacaaccgcaacatatacgtacacccatttttttttttctttcttaaatgtagtgtattagttaaatgaataattgtagataaacgtacagtaaaaagttgtgcatta

SEQ ID NO: 100172 - DNA, 695 bp, Cannabis sativa
  modified_base (122)..(140): a, c, t, g, unknown or other
aaaaaaaaaaaaatagaaacaaaaacaatgcattagttcgaagctaattggccctagtataatatggttactacaaaaaactactacgtttagtgacaaccttttagtcacaacataaattnnnnnnnnnnnnnnnnnnnttttagtcacaataaaatattacgtgtgactaaaacatagtattaatttagttacaaggtattactaatttacttttagtcacaacaaatatattgtgactaaaaacatatttagtcagaacaaatcgtaatttttgtgactaatacttttagccacagaccttttagttacaatacaataatgataatttataattagccataacttttttatctttagtcacaaattttgttgtgaataaaagtaagagtttttgtagtgggtggccatatggagccatttctcttcacgagccttgtaagtgctttaaggtgtcttatttttctttaagggctcgtttgaaacatcgcattaggttgtattgtattgtattatattgaattagattatttatcatatttttatataatgatatgttaaagtttaatttatactaaaatattatatatttaagtgcctataaaaattaataccacagatagttttacataaactatacaattcaatataatactatacagtataatacgccatataaaaaaaaaaaaaaaaaa

SEQ ID NO: 100173 - DNA, 1202 bp, Cannabis sativa
attttagagttgtcacaagactctaagtttttttcttccaaatttctcttcttcttcctcttgatttttgtcaatctcaaaataaaaatgccaaattaaaatcctaaatagaactctctcctttttttttcttctttttcttcatttttcttcttttcttcctttgagtggacgtcccctggagtaagcagccgtctgcttcttctttcaattcttaacgcctcccttgtctattgccctcttatcatatactagtaaaaaactacgtgcgaagcacgtatactaattttatgctaggttttttctatgttatttgaaagtgagattattattattatgttatttgagttgatgacatatattattattctcagctagctctgatataaattagaataagaatcttcaaattataataggaaaagaaatacatagatatttaatttttgaattctttatggcaaactacataataaataaataaaaaaagataaaaaataaaacaaaagataaataacaaaaaaaaaaaaatacaaaaagataaaaaataaaacaaaagctacataacaattgatctatggatcacattatttatagtaataataataagaaaaaaaagaagaggaagaaatcatcaaaacggtgcatttcgaaacaggggatgaagaaatctttgtcgtcgtcgtctttggagagcagcagtagtccgacgaggctttcgatgtttcagaggatgattccttgtagtgtcgatgggaaagtgagggagattacattagctagcaaacaaacaaacaagaaaagttgtatacgataacaaacagcattgatgatgagtgtacaaattagctagcaatagctatatatgatcgacctttcgaaaccttcataagagagccagcgaccacaatattgcataattataatgtcaactgaaattaataattggatcttttcttcaactaaattatagcactacgacttccttataaagttactacttataagttcttcttagttaggctggcaaaagcttattacatttaattaaatgattttcttataaataatatatagatttttatggatatataagccaaattatagtgcaatggagatatatagactccataactggtgggtttattaattataaaataaatataatttttttcgtaaattatatgattcttagagttttg

SEQ ID NO: 100174 - DNA, 1471 bp, Cannabis sativa
gacacacattgaaggatcatacggcaaaaaaggtcattaaaaccattagctctaagcactcgctgaagaaaactccattcgatgggatcatacgccttgtgcatatctgttttaactgccacgaatccccgcttgcctctgatttttttcaaagaatgtaatgcctcagaagcgagaacagaacactctgcaatccatctccctggtagaaaggctgactcgaacgggctcaccagcttgtcaagcacaggcttcaatctgtctgtgagcaatctcgcaatgatcttatacccaaaattacagaggctaatcgggcaaaactgatcaaatgaagtcgggttatcactctttgggataaggcacaggaacgtatgattaaatttctccacaaactttccagtgatgaaaaaatcctgcaccattaggcaaacctcaggacccaccgtatcccaatattttctataaaaaactcccgaaaattcgtccgggccaggcgccttcaacggattaaccttccacaccaccttcctgatttcttcaaacgaaggacatcgacacagctccgcattgtcgagatcagtaaccaggggctggaagagcgaatcaaaatcgctatccaagaccggttgctggctttcattaagcatttggaactgcttgttaaaataagcccctattccctctctgtcaaacaaccagccgttcccaacatcgttaatggcgcaaatcgagtttctcctccgtctaatcatggtagacacatgaaaaaatttcgaattatagtccccaagcaacacccaaagttctcttgacttttgcttccatattctttccattctgctttccaactcaagaatttccaattgcacttccacctcctcatcactagcggcctcatcatgttgctgttgaagcacactcaacttatcatacagccttttaagttgtgtgtcacaaaacccaaacacattgctattccactttttgagagctactttcgtttccgtgagtctcctgcaaacctgacagctagcctgaccaaagaaagagtttttccacgcattcttgaccactgcttcacaaccagggtccgccgtccacacatcgaaaaactgaaacggatagttgagttttttagtcattggttgagtatccagaaccagggggcatgatcggaggccataatagggtggtgcaccacggaagccttagggaaacttagacaccaattcgcaaaggccactgctctatcgagccatttcctcacggagttatgagagccccttgacttcacccaggtaaactttgggcaactaaaacccagatcaacgcctccggtttccaacaagaaattctgtagatgagccccttcacgattgtggaactcttggccacctctcttttcctcagcattaagaataacatttagatccccccacaccatcaatcgtgtaacaccctaactatctta

SEQ ID NO: 100175 - DNA, 1396 bp, Cannabis sativa
taatgatcttaaagacaaagaaaaaattgcaatgataacattgccactcttcttatcctaaaagtatgttttatattaatttaagccacaaataattctcctaccatataacccaaagaaccaatcaaacaccactccactacacataaaacttttttctactacaatcaattataaactaaagtaactttgtcaatattttctttcataaaaaaaaaaaagaaaagaaaagaaaagaattggaccccatatgagtaataattgatatagtactagtactattactatttgtcattttctgattagtgtatgctaaaaatttttaaatgaaaaatataaattgaatgacttagactaactaaggattatcgcgtgattaatttgacacttgacgatcacgtacttacggaaatttcggaaatatatcttatatattattactgtaaaaattaaatttaaatatttatttacatctagtgattaaacttaaatatttataccgcaaattactcaattttctttctttttacaaaaaattagaccccatatataaagtaataattgatatagcactagtactactacttattattttttattagtatgtttaaattaatttttaaataaacatataaatttaatgacttgtacaaattaagaactgccaagtaatcattaatttgacatttaacgattaggtacttacggaagtttcaaaaatataacttgggtattattaccgctaaaatttaaactaaaatatttataccgcaaattactctattttcattcctttcctaaaaaaaagaagaaaagactcggaccccatacataaagtaatatttttttaaaaaaaaataacagtgtttcttagataaaagaaattagacctcacaatcattatatctcatattctcaatcatatatatagatgaagaaaattacttagagcactcacaatagctctcctactctattctttaaaatgccttattaaaactttactttttattttacctcacacatttacattatactatatatcaacttttttataattttctctaaactatttaaataataactttataatacacacaaataataaaatattatatactacataatatttatttatttttacacttacaattaataaaatacattataaaaaaaaataaaaaattattgctaagcactaaaaccaaaataacgcttagctatatttagctaaacactattcattaggtaaatttttgagctatttagctcatctattgaatgtgtttttttgattattttttaactcttagctattgtttaaccattctagctatcttacattagttattgtgagtgctctaagagtaataagaaaaatgctaaaagacaccag

SEQ ID NO: 100176 - DNA, 842 bp, Cannabis sativa
ctaaaaatcatatgggaatccaaaattaaagaaaacctattcgggaaccaaaaattctaatttggcgttaggggtaccgcccaagtatgctcgatgctagtaaaccttgtacttgcgcacatggtccaatatgcaagtcctgtttttgtatacttctttacatttcgggtgttgatcaataaaaccactaaggaaaataattgaaactaaacccatacggggaagaaaactacacttgggcactggaacctgcccttagatcatgtgttgggcgcctaacttgcttttggggtttaacttgtaatattggcattattttttgtcaagtgctaaaaatattattcaccttatctcgtcaaacttaatggataatagatgttaaatattcttcccaaactattcttgttattaagttgtggtcctcttattactttttccttcctatgtgactaataaaaagttgattttacacacaagacattgacatgtcattgtcacattagtgtcatttgtacagataaataagtaatttcctttcttcacttgtttttgttttagaaaatatgaaagtatacagtgtgttttgagctgtgaagtgagagagaagggattacataattgaagttttaaattagacgaccccttcatgtcaaattatgatctggtaatcaccgttaatacggaagagttattactctattctgaagtcgatgttaagtttcttagttatcggttgtcttattaagcaatgatagtgacattagttatctcatttgaaaatgagagtttgcagatattttataaagtaccaaaattaatttgtcttattagacaaatacttg

SEQ ID NO: 100177 - DNA, 862 bp, Cannabis sativa
agagagagagagagagagagagagagagagagagagagagagagagagtgtgtgtgtgtgaatgagtgtgtgagtgtgtttgaatgatttcagactcaaataacctctaagtttttggtcctgaagtcgttctttttgggttgtttgagtgtttgtttattgagttatcctgctactaagttctttggttttgattctggaagttaaaggttctgactgtttctcttggttccttctttgctatcttttagtgagtggggttggttttgttctgtgagtgttcttttgtcggagtgtgtcttctttttttgtgcttgggatacggtagttgttccgggtgtgtgtgtatttattccattttgtcgtttgttgtctgtgcctttaatggagttagttactgtggataatgaccctaagatgggtaaaagtttctcttgtgccgaagcctcgatttccttgtctcagtgtgccacctcgctaaaagccttgtcgtcattgtgtttatttggcaaggtggtagcacccatgagtgttaatgctgaggatattgtacggcatgttactaagaactggttgaaaccggtggctgtttgctctatttcggatgctcctgccctgatgaatagtttcaagctcagctttgaatgtgtggaagacaaagtttgggctttggagaatggcccctggtcctttagaggatatacgttcattttgtatgcttggtttcctggtattgaaaggtcgggtactgtgaacatgttaaaggtgtgggtgcaggttcacaatctcccccatgagtactattcgatggataatggtaaccgactgggaggaatggttggtaaggttattctagttgagt

SEQ ID NO: 100178 - DNA, 585 bp, Cannabis sativa
tatgtttttatgcagaaattgatttcaagcaagtctctatgagtcaagacaataactacaagttttatgttggcaacagattcttctttttctttttcttattttgaatgaaaattctcttctcttgtctcaatttatttatttattattattgaagtttggtgtattatttttattttttgatgtatcgttttttttcttatttcaattttactatatttataattttttttttaatattttggttatatatttatatttatattatcaatttggcaaaacaagaatgactaaatttggaattcaaatgtgcactcacccagccatctattgcagcagataaaatggactttgaaacatagaatttcaagtgtaatgccaaagaaagtggctgaaaaagatagactttggtttagcaatctctaaaaatcatttgtcataatatacactaattaatgtgctttttagttggtaaatgattgtaaatgtttgtttgtgcaatgaaaatcctgattcataaaaaaaaaaatcttttatatatttttttcttcttattccaacatattaattaattagaagagacat

SEQ ID NO: 100179 - DNA, 1411 bp, Cannabis sativa
aaataaaaatgatagattcgagtcccacatggatgactccaatcataaaatacttgctgaataggaaattttcaacatattaagatgaggcttggaaattcatgtatgcgatcccgagatacacacttattgatgacaaactttacatgagagggtattccatgcccttactgtgatgtgtactcccatcataagccactgacatcattaaaaaaattcatgagagcttttgtggggatcatgctggatgatagagcttatctaagaagataatccgatagggttatttttggctaccatcaacaaagacactcataaattgtcaagaaatgcgacaagtgccaacagttttcacatataccaaggataccccttattgaacttcgtatgatgacctcgccttacccatttgttatatgggggattgatttaattagatctttaccaattgggcaaggaggtgcgaagtatgtggtggtcgcaatcgacttctttaataaatgggctgaagttgaaccactggtttcaattacttcaaaaaaaagtcatggattttgtgattaagaatatcatctgcaggtttggaaagcccataaagatagtgtctgacaacataaatcagtttgatggaggtttgttcactaaattccgcagaagggataagattattaaaagtttctcgtcagtatcaagaccataagccaacgatcaagtcaaggctattaataaaaccttgaaaaatactataaaaagaagcttggcgcgactaagggaaaatgggtagatgaacaacctcaggtactctgggctcatcaaattacagagaaaacagtaacaggacatactctattttcgttggcattcagctcaaaaaccatgttactagtagaagttaacattgcgacacacagacgtgaattctatgaccacgaacaaaaccaagaactactcaaaatatccttagatctgctcgatgaaagacgtactgaattacaaattattatacatgtgatgctgacatgatatttgtttgaacaactatgtcatcattttgtttgttatgtataacaaagtctaataaaaagaccactttataccattgtgaatagttcgaagactagttttaacgggctgaaattttttaaaaatataataatacattagtcataatttgtagtagggctgaatatcgggcgggttgaccaagtttcgagttcataggtttcgggttcaaaaaattgtactcggtcccgtcccgtgaaatggtttcgggtttgcaagttttgggcttgcgggttggccaggtcaatgggttgacctgctcaacttgttaatttttttttaaaaaataaaattttatgtagttttttctatgtattaaattaatcatataagttataaacttataaca

SEQ ID NO: 100180 - DNA, 576 bp, Cannabis sativa
gcaatatggtaattttgtggttgaattgaaagaccaacacattccatttttggggtttgagacaaatttgggtttgagagttgatgcaatggaagttgttttgatttcatctaatcattggtttgagtatgcgaatcgtcgtaggcttagcgtcggagatgtcgttgtgttctgtttcgatctttcccgacgaactatcatcacatcggcctttcgttaccgtcatgaatttggtgtttacaatccaatttattatcgcacgtaaattgttaaatgaatcttggaatctttctttttcattttttgttacttgtttctttctttaacaaaatttgatgttgtttgatgatgttagtaagtattagtcatacataaataaatgttggggttcttaatttttaaactattgcaatctaagactatattgtctttgactagagttccaaacagtgaattgtgttgattcattcttcaaattgaggaaaaaaaaaacagaacaagaaaaacagagaaatgtaaagagagagagagagatttgattgttttggcgccaagttttgttcatgacattaccga

SEQ ID NO: 100181 - DNA, 1107 bp, Cannabis sativa
tatcacttcgtttaggccatatttggtaggaaggagtcagagtaagataaatggggagtttagaaaggataaagagtaggagggatggagatgatattttctaaactattatttcgttgtgaataatacaatatacacatgtataaagttgtccttaaaagatacaataaattacagattttaatgtcaaataatcttaattaacaactctcctaggataaaataaaatcagtaattaaatctgctattttatagttttaaagaatcattcctgaaaatatgaaacttcctaaaattgtttattttctccaacatagacatttacagtatgtttgatacaaaggaaagaaaataggggagaaagaaatgtaggagatatagaaaagtagaaggatagaaatgagtatatttccaaccaagaaagttaatttactttaaaactgcaatattatcattaaattattattataaatattgttgtgtatatatattttagtctttcacttttatttgtttgtgtgaaacatttctgaggaaaagaatttttaggtcccacaatgttttttcacttttctctccacttttccttcttattacacaactcatttttctcattactttttacttttctctcctggattgttgtcagctcttgcagttctcacttccaagtccaaactgcttataaaatatttttttaattaatcatctcatcaaatatgtcattgaagactgcattttgacttttgtagccatatgtcgaggagcctcaaaattacggtttaccagttgcagattatgaaaagctgttcaacatgactttagctgctgataaccatatgctacaggtccgttcttttgtagttttattaaaactgcctcagtaaaaattattacagcaatggcacttctttcaggttgccattcatgctattggtgatagaacaaatgacatgatcctcgatatgtatgcatctgttatttctaaaaatggaataagagatcgaagattccgggtaagattaagatctatattctagaataggtagaaaatgtgatataattcgtccattaaggaaggacatatatactcttcctcaattaggc

SEQ ID NO: 100182 - DNA, 977 bp, Cannabis sativa
tttgactaaaaaattatttcggatactaaaacagatagagatgtatcagtgtatcccttttaaaggggtgcgttatagaatttccctagcatattatgttgcacacattttgcccgcaccccttataagtgatgtaccgatgtatccctatccgtttcgacatcttagagacatttttagtctaattttttttatggtcgtgtacaatataattatttaagatatcctgtaaaattttaagaaattcaacaaaatttaatacgctaaaaataaggttcaaactgtctgtgtttaaatattactctctaaattataaattattccgaatttctcaaaattttacagaatatatttaacaattataacatgcatgattatgaaaaaaattagagtaaatttttttttctcgatgccaagaaaatatgggtatatcggtgcacccattgagaaatttaccaaactaaccatttcaaatattagaatttgtaaaataatttcacttaatttactttatgcgaccatgatagtcacacaatgtaaatctatggtcagtttgcggtcgcacaatataattcatagtcatttttacgaccataaaaagttattatgttaatataaatttttgtgttaaatttttttgtaaaattatcttgctaatgaaatttttcataaaaattatttttataaagttaaggtcctacaatgtacccctttaaaagaatgtattgatgcatcgtctattttggcatctagaataattttatagtctaatttcttttttatatttgtgtacggtataattatttaagatatcctaaatttttttaaaaaatttagatcaatttacaatataaaaaaaaaaaatttagataatcaattttatatgcgtctaaaattaaataatcacacttacatcacaatatttaaatcatatttttattgtattaaatttgtctaatttttttaaaattttataa

SEQ ID NO: 100183 - DNA, 2034 bp, Cannabis sativa
cttatgccgctatttaccctaagaaatatacttattttcttaaaaaagaaaaatacctaattttcttttaagaaatgtgttacactataaaatagtacaggggcttattaataatttctaaagagtgtgaaccactataaatatgtaattgtgaggctactctgagatatgaaatgagtaaatagaactttggttcaattggagtttgacactgactcaaagagtacattttagagatttgtcctgtctcgaagaggactattacctaacaaaatgctatgttttagatttattaaaaacataatgattttttttaaatgccatatttaaatttttttaccactatataccaaaaaattataatttcttttcctgaaaaaagtaattagaatttttggtcgaaggttcaaattggttttgggctggccttgttatatacgacttgaaactgggctacatttttatgacattattttagcaatttgtaaagggataagttgaggattacctcttttttgtatctattaataaaaaatacttttatattatatttcattaaaatctaccaacttttatgaatgagttgcctaatagactattgctctctacttaaatataacacatgaattatcttaatctaaggggtataatagggacattatttataaaagtgggaatattttaaaaaatatggaaatgaaggtaaaaataaaaataaataaaataaaatggatatacaatctaaattccacatttgtaaatgggggttgaacctatttagcttaatttttgaaaattcttaaatgtcaaaaggatgcaccgatacactcctttatggatttattttttattcttttatgattgcgtacattatagttatttaaatttgttttgtaaaattttaagaaaatttaacacaacaaaaataaagttcaaacaatttattatacgcgtcattatcttcttaaatacctttcatccttttgtggttttattatgaccatttcctttctttttctttagaaaaaccttctcacattatccttcagcacaacgtcttatcacaccaaaacataacatatatttacaccaaaagttttttggtttggtttttttttttaaatgtattttatagtagtaaaaatttaaaatatgaaaataattaggtctttttctaaataaaatataaaataaagtatttttaaaaaacaaattaggtcttttaaattcattcattccacttagtctaagcttctataattgcaatacaggaccgatccaaatattaaggagcttgagccattgcacgagtctccattttgaaagaccgaaattccacttaagtgtttacatgcgagcatgtcctttcaattttgaattctaagttgttagttgtttcttaccccaactaaaagaaatatccctcccatcattttgcccttctcatacgtttgatcacttatgttgttgtgttttccgtaagtagaacgaaaacaaaaaaacagaagacaaatatattaaatccaataaaatagagaagaaaagagaaaaccaaatccaaattccacaggactttcatttacaacttccttgtcatttcatgttaggtttaatttagttgtcaaggaaattaggtaaccacataattgacttactcataataataataattatatgattcacacacttttcatacacttcatttaatggactatattaaagaaataacaaccaaaaacaccatacaaatacaatcccactttcatggaaactacaatggaaattgatcccctactactattcggccgcccactattattctctcaatatatatattcaaaccaacttcaaaagtttctatttaaaatattaataataagagtaatttatgatgtaaatacttaaatttttattgtaattgtagataaatatcttatataaatttaatttttttacggtaataatatttagattatatttttgaaacttacttaactacctgacaattacgtatcaagttattattcacgtgta

SEQ ID NO: 100184 - DNA, 720 bp, Cannabis sativa
gtaaaaattctttgaatctttcaaaagaatttatcacttacacacgtcaacaaaacaaattaaaaatttaaaacgtatataatattgattttattagtatttaatagtttgcccaccaccgctttgaaattgaataactttattactctttagtccattgtctgtgtttctcccctatatttttgactagaagtaagttcattattctagttaacttagctacctatatatctgtcaacctgtttaattagaggaaaaatatatgcttaattggtcaatgtcagattatgtttatttatcacctcataaattgtgcttggaatattaatatataaatatatgtatgtgtgcatataattaatatattctcttgatttgctacttcaatacctctaaaagtgttttatgttcccctggttgatattatattaatgaaaactttataattaaaaatgaccttaatttaatgaatgtttctttaattaaatataattgtttaatttaaggttaaatagtttcccagagataatatctgaaactcaaaattacaaaagtaaatgggtcagattaggagtgttcatcaaaccgttcaaactgtccgtaccgtattgcactgcaaaaaaaaaatatgatttgaaattctttgcggtgcggtcgtggtttaaatttttcctaaaccgcgcgatgcgatgcagttttgcggttttgaattgttaatat

SEQ ID NO: 100185 - DNA, 586 bp, Cannabis sativa
aaatagaagaataatgttgttaaattcataagcagttccatacaaacactatcaacaatatatagagtcatcaataacagaataagtcttacagctaaaacagttacagaaaaactaactcatattacaaactaatttttacaactcagccttccgctctcctgccataacaatgttctatctctataaaaggaaaaaggccggacatcagatgaagggactgtctgatcagatcttcttctcaattagagagataagtagcacaacgaagggactacttgaacctgagtttgccatacctacatcattaacaaacataatcacaaattagctataacatagaaactacatcaaaatttattctaattctatcgaaattttgtcaacacaacggatgtaattggacgttctcaaaaattttaaacatccctaaaataacaaacaaaacaaacaaaataatattaacaacacaataattattcacccatctgaccgtagtacatgtattcgcagaacctactttactatggttgaatatttaagatattcaaactcaactaacatgcatattattccacccatccaa

SEQ ID NO: 100186 - DNA, 856 bp, Cannabis sativa
tgctgtgaatttgtttgtgttggtagcattcacttcaactctagtatttgttaccaaaaacttaactgtctggttaataaaagataaaaaaaaattagtaatagccaactttgattagtgaaatgtataattttgtatcttccaaaatttttacacaatttattagcaggagatcttgaacttcagtgggcctaaagaaaaataatttttttgacccttatttaaaaaaatgtagtttttcaaaatgaataaataagttatgtgtatttttagaaggaataaaaatattttttttttgagttcctgagctagatgagccttaggcccaagcctaactcgccttagcctagggctgaccctgtagtaattagtggcagactcaaaaatttcattattgagagtggaaaattaaaaaaactattaaaagagggcttgctatcaaaatataggtactaaaatgtaaaatatagaaagataaataaatatcaaaatttgtataaaaaatgatgaacttaaaaaaacatatatttatatattaaactttcatgcacataaaaaatatacttataaacattgttccttttaagcattcaagattccattaagaatagtttttacttacctcaatttgtttataagtcaccgctaaatgcaaaattgtcataccataatcatctttggcatttacaaagtggtaatcaccatccatagcattcaccaaaagttttagagcttccaactgattatgcctcacacaaacatgcaaaatggtctcatttcgatccttcaaattgattcgagctgcctcgggagccactttgagtagctctctcaacacatcaagtcgccctctcat

SEQ ID NO: 100187 - DNA, 1213 bp, Cannabis sativa
acatcaccagcttggttatcccaatcctatcaaccaccattgaagcacttccaattctcgaaagaagtagtctttacataagcgacagagttttcggggacaccaacatccgaatggtaaggccagtgttcttagggaaccgccgcgtctacatacaaggatccgaatggaactcatttgtcagagatcgcgggatcagagttggagatgttcttctcttgaaacttgttcaccaagtttcccaactcatcaacatgattatcaatgtcactttaatccgattaaaccgccaaaacaatcacactttcactcctcccttaccccaacaaaatcaagaacaagaacaagatcgaaattgggaacaaccatttttgtgtgtgaaaagattgagtgacattgatgtgtgtaaagttgttgaacatggtcctcaaattcttatgcctaaagagatatgggaagtgattacagaatcatcattagtagtagactttcatctaaatgatatgcttcaaggtaattttgaggttaatttgagagaccaaaccattgagattttggaattagtggcttatttgggtataagagttgatagtgaagtgatgtttcgatatgaaaattggatggattttgtggatcgtcgttgccttaatgatgaagatgtgattgtcttctgtgttgatcttcctcgaagaactatcaccacaactgtctatcgttctcatcaacaaactgattttttcattccaatgccacaggaggagatcgaattaagtaatattagtgacatgtaattggtttcttatgtttgatgttgttaatgttaatgtcaaacaacaaagattacagattacatgttaaggtatgtagttttcatttaatattaagaaattaatgttctcagtctcaattttgaaagaaatttcttcattcctaatatttttgtgtattgttttatttcttagtttaatatagttttacttctgcaaatacgtttaaaatatcttttgggtaattaattagaggtagctaatgtaagattataataagtcattgtatagttttattgacaaatatggcaaataataaatttcaaatctcttgattattgaaatatatatttgcaacttaaaaataattggaatttttacaaaaatattgaattttgagtaaaaatttataattttactgttacaaatttttttttacaaaaata

SEQ ID NO: 100188 - DNA, 2111 bp, Cannabis sativa
atccgtataaactatcaccttattgtcaatcagatagggccgaaacttatcgcaagcaaacacaattgccaacatctctttctccgtggtgtcatagttcagctgagcatcattcagggttctactagcatagtagatggtgtgaaacaccctgtcaactcgctgtcccaagactactccaattgcgtagtcacttgcatcacaaatcagctcgaatggtaactccaaatttggtgaagtaactataggcaccaatatcaatttctccttgagaactttgaaagcttttaagcattcttccccaaactcaaaaggaaccccgttaacaagtagattggatagcagttttgagatctttcagaagtccttaataaatctctagtagaatttagcatggcccagaaagctctttactcctgttacagagacaagagggggtaaattctctattgttgacaccttggctctatccacctcgatgcctgcctttgatatcttatgtcctagagctatcccttctattaccatgaagtggcacttttccaaattaagaaccaagtttgactcctcacatctgattaacactttctccaagttctccaaacactgatcaaaggaagaaccgaaaactgagaaatcatccataaagatctctatacatgtttcaatcaagtctaaaaagatagccatcatacacctctgaaatgttgctagagcattacatagtccaaatggcattctcttgaaagcaaaagtgccatatggacatgtaaatgtcgtcttctcttgatcctcaagtgctatggctattcgatggtagccagaataaccatctaagaaatagtagtactcttgcctagccaaccggtctaacatctaatcaataaagggcaaaggaaaatggtcgttccttgttgccttgttcagtttcctgtagtcaatgcagattctccaaccagtaaccgttcttgtgattaatttgttcttctcattctttatcactgtcattccccccttctttcgtactacttgcactggccaacccacttgctatctgaaattgggtaagccactccaacatctaaccacttgaccacctactttctgaaaacctctttcattggtggattaagtcttcggtgtgcatcaatagttggtttagcatcctcctccattaaaatttgatgcataactcttgaaggactaatcccataatgtcagccaatgtccacccaatggctttagagtgtgcccgaagtattctaagcaacttgtcaatctccacatcaaaaagtgaagataacactatcactggaagcttcttgtcttctcccaagaattcgtaccgtaaatgattaggaagcaccttcagttctaactctagtggtttctctgtagatggcacaacctccttaggcacaaccccccaactcttcataatacttcctattcaatggcccataggagtcgagccattttgcataccccatcacctccatccttcttgttgtgtcaactcatcctcagttaagctcaattccaaaggatcttctatcaactttttattctccacaatagtatcaatcagatcaacaaagaaacaattatcacttccctttgggaaagtcacagccttaagtacattaagaccacttcttccccttgcactcgcagcttcaattcacccttcttaacatcaatcaatgcttgaccagttgccaagaatggtctcccaagaataattgggacattgctatcttcttccatgtccagaacaataaaattagctgggaagatgaacttatcaactttgactaacacatcctcaatgactccccttggatgagctagtgatcaatcaaccaattgcaaggttactgtagttggctttgcctcacccaactgcgatcttctgaaaaccgacagaggcattaggttaatgctagctcctaagtcacccaatgaatttatcccttctattctcgcagtagtgcaaggaatggtgaaactcccaggatcttagagttttcgagggagtttcttcggcaatatggcgcgctacaacccttggtcaatgccactgtttcatagtcttccatttttctcttctt

SEQ ID NO: 100189 - DNA, 1311 bp, Cannabis sativa
aaaaaatgggccaacatggggtgaaccctccccttggaagaatttagcattttggctagaggatctagcactcttagctaaacaatcagcaaacacattaaaagtcctgctaataaaaacaaacttacaactaacaaaagacttagccaaatctaagacttgcaaagataaactcttaaacctccaatcaggaggacaacttagaatgttaaatgcattaactactacttgtgcatccgaaaaaatagtaacattgtctaggccaatttccttagcccaagtcagagcattaaaaatcgcttgagtctcagcctccattgacgaatccgcctctttcttgcttaatctcacttcccaagtctctctgcctcgatcgacaagaaccactgctaaaccagcagtattgttctcccaagaagcatctgtgagaaagaatatatcaccagaaaactctagggaactcgcaggaactccattccccacagttgaatctctctgattagaacctgtatcttgccaactcaaatgttcctgaatcatcttctgaattttcatcaaaaggcactgaacagcgaccattttgcctgccaccctaagttgattccttgcataccaaatttcagagaatatgcaagccgcactaataagggtctgaatttttagcttgactgggaggcttccaatgagattttccaaaaaactcatcatgtcattaccagggaactcctccactttgaaagaaaaaggatttgcgaaccagagagcccgcgccatcggacaatccttaaagagatgcaaacaagtatccataccatcatcacacaaatcgcaggttttatcatcaacgaaaggcaactttgcttttgtaggaatacattcattaactgatcgccaaagcataagggccaaccgaggatgaatttctggattccaaatccatttccagatgtcacggggctcctaattaaaacgctgctcttgatccaacaaataagctccttttaccgagaattcccctttgttattattcctccagatgatgctatcctcggatgtcgaaggaagtctagtgatcttcaagactttccttccaaaattttctccaaaaattcgaatcactaaatcttcattccactcgctccccaccaaaagatcagaaactagagaaatagcattgttatctgatctgaaagtttccatgactgacttgaattctccacccttcaaccatggtatccaaggttgattccaaacatcgatgctctgaccattagctattaaagaacatgacccctttacaattaaatctcg

SEQ ID NO: 100190 - DNA, 613 bp, Cannabis sativa
tgaaattttttttggagaaacactagaagggacaattccctgttagtgttaaagaaagagcacccaattccaacctttaccttcctgcttttcactgtgatggagataggcgtagagctatcctcaaccaaccatgggtgtttgacaaatgtcctattctgttggaaatacctgatcccgactctactttatccccagaaactatgaaaaaaattcatttttgggtccaggttcacaatatcccgttctccagacagtctgtttccttagccaaactgttgggtcaaattgctggcacccttctcgaagttcatcaatcctctctacttgaaacctggggttcatatctccgaattcgcattatgtttgatgttaccaaacctttaccccgtggtatccctatcatgtttccaggcctagcctccccaacctggctggaaatgaaatatgaggacatttctgatcactgctattactgcggccgcctaggacactcttatccttcttgtactgagtatatgagagcctcagataagtcaagccagcccccacccgttccctatgagaatgtcctgcatggtaccacttgtcaaaacaatggtccttttgggct

SEQ ID NO: 100191 - DNA, 1054 bp, Cannabis sativa
ttcggtttaggctttaggcggtttacggcggtttacaaatttttttgtacagccctaatagtcaatgatggagctagaaggggtcggagggtgtcgtggcccctcaattttttattttttttttttgaaattacatgtaaaaaagtaattacacatacattttttttatatgtattgccctctctaaattgttgggttgtaaaagtactatatatatatatattaagagtgtcaattcaagtcacgacccacaagtataacacaaacaacactcgagattttactgatttgacatgacacgaaaactatgcaagtcatgttcatgttttataaatttttcatgtcaggggtcgtacgtgttcatgtcggttgtaaaataaacttaagaactccacacgacacgatcattaaagacaataatttagcttacaacccgccaacaggacatagtattttgcgggttccacatgacatgaaatttatttgagtcgtatttgtgtacgtcttttataaatttttcatgtcacgtttgtcttcgatcgggtagcaatttttcaataagtttatgacctcaacacaacctttttaccgaaatttttgggaatcgattataaaataaatatgcttaagaaagaagcaaatcaaaaaagaagagacaaagatttttatgtggttcgattgttaatgaactctagttcacgagtccatattattgagctagaaaaacttctaagtattttttataagtatattttgccctagttgacggaccctaattatcagttcttctcccaagaatttaatcttcgaccctttgcacgagggagtcatgttctatttatagggaagaatcgggtatggacatactcagatccaattgggttttttagagatcaactaagccctctgacggggtaaaatataataattattgattgggaaagttatgaaaatattagaatttggggtaacttttacaaaaatattgtcacacggaaaagttttcaaaaatattgtgtttttataaaaaattagtagaacacaaaacagaaca

SEQ ID NO: 100192 - DNA, 735 bp, Cannabis sativa
gtcaattcgagggctaggtttgaggcctagagctcagtgccgaaggccaaagtcgaattgaggaatggatcgagattaggatttaaaacatacattttgtttatattttttgaaacattaatacaatataacaaacataatacaatttcacacatctattaatacaaatcaacactataatactgtatcaaaataataacagtacaatcaacgcatttctatacaacggtgtaccaacacctccttactgaaattaagcaatcttttttattagagtaattgaaattgactaaaattcaaatgaatcttgactatattcataatcctattattactgggaacttttgaactaaattacttttctattagaaaatgcatataaagaaatagatggatgtcgatctttttcttcctaacaataatctacaattgccttatcagatttgttttcataatcttcttttcaaaaaatattttttttcatcaatattaaaatatattttacttatatattatgtattttttgagaatacgaaaaagaaaaaagaacagagaaaaaaaatagtcaaaaatatacatttttgggagtgcatgtgtgggaatcatgggatcaaatcccaggtgagtaacaaaaaatatacttataaagacgcttttaatacaaggactttctgaaacaattctaaatagaattttccattcacttcaacaaaaccaaaaaaacaaccaaatact

SEQ ID NO: 100193 - DNA, 1584 bp, Cannabis sativa
ttggcccacaaaagtagaaaacaaataattgaatcttttttaagtagaaatgaaaatagcatttgttgtgaacgagattattaaagtcttccaatcaacatcaagttaaatgcgatctggataaataataatttgcatatatagcatgtactatttacgagaccttatagtgagccttgataaatagtacataagctaagatgtgaatagaggattaactattcacacgagtaataaaaaatatttaatacaagtactatttaaaagtatttaaggtttctctttacttgataaattggagagtataaactactaacacacaagttatcaaaaatgttcaaaaacagtcaactgtacaaagacattcaagtttgctcctcatttgatatttaaacttagaaaatatgttttgatgaagttatgtaaacaaagtttattcatgagaaaaaatatgtaacatattcaaaatattgataactcaaataaaattttctcgccagaatagtggaaatacatatatcatgatggaagaaaattattgtgtaatcaaagtaaagttggcaatccaacaaagcaaaataaaattaatcacatttataataaatgccatggaaggccaaagattgtctcgaccaaaaggtcattgttcaaaaattgatgttaataaaaattaagtctatatagtaggagatttagagggaatgtcttcttcttcctcttcagcaacctcggcctcattttccttgtcggagccaactctgttctcttccttacttttcttaaaatacttcaacatctcctcggtagcttcacccaaaaaactgagatccatgcctagattcattaaccaagctttataaatgcaacacttggccaccaaagtaacccttgcatgagtttcttccttagcctcgtcaaggactctcttagcctcatcaaggtctatctaggatttttggctagagttgagaagtttctgtttcaattcgttgaacttagtcttcaatgccctctcaaatttttctagatcttcaatgcacttgttttggcgagaactctttgattgggaatcattcctctaattagccaggagctcgtgatgtttcttggccttgtaaagctccaggcctatgtgattaagattttgaaaacctttctagtgagccataaatgctagaaaagaggtttgcataaaatatgaagacagaaagagaatgtgaagaaactattaagttgaaaaactaaccgactacataagatcaacaattcttgctaagagttcattgtaggcaccatcgttgatcaggttccaatcctctaattgaaaagtcctgaagtggcgcctgatttagttacatgccgcaagcaagccttggagcattcaatgctagcatccacttccaatagataagtgggctccaacagtatacttctggctgggccgtagaaaaggtaacttgatggacagaccctaaaggttgcccatctgtgctagcagatgcaagagctggagtgttgtattttatgccgtaaataaaactctatttcaatgtaatccagattattcagatcggaagagcggtt

SEQ ID NO: 100194 - DNA, 2069 bp, Cannabis sativa
ggtcggttctcattggattagatcgatttatgcacacccctatgaattttaagaaaaaaatatttcttgaaaaaattcagtatcctaaaagtttagaaatatccaaaaaaatatcaatagattagattatgtcaaatagttagttccttacttgtaacccctatggagcaggatgattttgttctaatccctgggcatgaggagattaggcaaactctcttctctatgggaagctttaaagctctgggtgccgatggtatgtcggccttgttctacaaacaatactggggttctgtgggggaggatttctgtgagacagtggtagactttttcatatctgggctatgcataagggaattaacgaatcaaatgtagttataattcccaaggtgctaaacccaaaaaaagtgatgcaatttagaccaatttccctttacaatgtggtttacaaggtcatctcgaacataattgcaaactgaattagaataggttctccccaggcttactttcctaactcaggctgcctttgtcccaggtcgaaatatttaggataacaatgtgctagcgcaagaaatcactcattcgtttaaagcataaaaaaaggaaaagaggggttctttctataaaaattgatttggttaaagtgtatgataagttaagctggtaatttatatatcagatgcttagtagcttcaaggctccaaaaagttttgtgggtgggtccgtcagtgcatttttgcgacaacattcaatattttccttaatggtggtaaggtgagtagacttaatccggaatccagtattagacaaggagatctcctttctctgtacctttttatatgggctgctgaatttctctcgcgactcttggagaatgccctagacaaaggtagaattaaagggatcaagttgagccagaatagccctcagatttcccatctgttctttgccgatgatcttattttggtgggtaaggccacgatggaagaagctacaggatttcggcagtgcctggagaaattctatgactggtcgggtcaatgtattaataaagtgaaaacatttatttttttagcaagaataccagtgatgggatgaagcgtaatattaaacatgccatggggctaaactctattgtaggtaacattaactacatgggtctcctgttattttaaagtcgtaagaaggatgcagactctaatttcataatggataatttggtctcaaagtaacatgggtggaagttaaaatcattatctaaagctggtcgtgctactttgattaaatcagtcgtctttctttatcactgtataccatacaaacgacgaagttgtccaagaagcttgcgacaaaaatagatggtatggttagagatttttggtggggttgtgataaaggtaacagtggcatgcatgtatcttaaggcctgggataagttgtgtctcccaaagtctagaggtggtcttggttttcagaggaccacggaaatgaatcaggcttttcttgctaaatggggttgggctctccttaccaaggataattcattgtgttgcaaggtgttgagtgctaagtaccttaaaggtagacccttcttgaagtgttcgtgtaagaattcaaactcatggttttagaagaaagttgtcaagtccaaggatttaattaagaaaggagcctgtaagctcatttcggatggaaaagatacaaatatttgggatgattggtgggtgatacatggtcatgattttcatccccatccaaaaaacagtcgtctcgagggtttgaagaaagttgctgacctacttactgatgatgggaattaggatgtttccaagctcaatttcctttttgacctagagacaactagaaatatcctcaaagggggtaggccaaggggccaagacagtgataaatggatttggactacgaaatctacctctcttgcttaggccttgacatgcaagagcaccccctaccacggaggctctcactctttggaacaaactttggaattctaggatcttggaacgccataaggttctgtggtgaagtatctgttggaatttatttta

SEQ ID NO: 100195 - DNA, 602 bp, Cannabis sativa
ttaatttaatataactttttcaatttgaaagtctggtatgcgattgactattttcttgcgtttgggtggatcacgttccgactgttgagggttcaccggtgaagcttgtggtcgactgtgtcgtcgtcggtgtaggttcgactggactgtgtgtacggtttctctccagttttcgtttggtttatgcgatcgactggtgttgcatttttctgttttctccaattgtcgactgcttggctgcgtttgtgataggtttgttgcgattggattctcctcttttttctgtttcgttttgtgatttcactggtggttcttctccaaagtctttgatcgtttttgtttcttatgttttgtgactgagttgcggctgggttcttcttcgtgttttgggttgtgtcgactgtttattgttaattctgggtgctacgttttctctggcagcttctctttcaaagctgcgtttgttttctttctgcaattgtgaatggacaggtgtgctgggattagtttgtttgtttcttgaatctgtgactggattattttcacaattttttatttgtcgtttctgcgtttgtggctgggggtttgtgtcgggtttgcct

SEQ ID NO: 100196 - DNA, 984 bp, Cannabis sativa
aaattagtttgaagcccgcattaagaaagaagagtcgggccacaggcccaatgagatctctttttcatgaggttatctacgattggagaaagttggagaaggcttaactagggccaattcatgtccagtctcttcaataacttctaattttgcatttcttttaagttataatttctgacctatcatatcattagacctttcctccataccataaccacaaagagaaagtacacgtgtaaagtagaaggaacacgtcacactacccatgtttgtggacttgtataaataggcttcacacctctctttacgtttacatgatataaaccataattaatataaacatggccaaattattgtgcataaactcatcagttcattcatcgagtactagaggtgacagagaagaactgtacagggttcaagaggttaatccaagctttaggagaagatgtgttgccatggctaaagagtacaggtcaaggttttacatacttcgtaaatgtgttattatgctattatgctggcacaagtttagatagtttactttttttttttttaaatctctttaagtacgtatggaccatgttctacactttcctgtaaagcctcatttgaagccatacatatctctttcaaacttcttttaatgtgaaaattatatcatgacatgatgggttgtttcatttgtaattgaagatataatgagtaaaatttggcaatttataatattattttcgtaactcgagatcccatatgttttcaaattggagtcgttaattgtataagttttttttttttttttcttttttgcagaaattaattgtataagttgaatgtattttgtttgtatcctagagaatattaaactatgcatttgtaagctgtgacggacacagtaataagagtgtagggtcaatagccccaactaaaaaaaagttaatgtgaaaaaaaattaaatatcttctatttaattaaataattata

SEQ ID NO: 100197 - DNA, 832 bp, Cannabis sativa
gtcaactaacttgccaaaaaaagactttacataatgtttgataatgataatagtataaacagtctaaattgtaccgaatcacactatattttacgatttaaaattttgtagtgcgattgtgatttgagaaatagcaatatctgcatatatgataacagtgagaatgccatcacaatactttaaatttctattcaaacacgaagatgaaggatcacatattcattttccattcaaactcctttcccccaacaatctcatgcctaaattaattttcttttaggtttatgaataaccctactaagttgttgaaggatcgtttgtcacactcaaaaagtcgtcctttacggtaacaatgcagggaaacaaaaaagaaaacaaaatattagaatagcaacatgatctcgctatatactctaaatactaaaaagatttcatgatatctaaaatatagaggggaaaatatagttattaactgatacaacatatgtgttgtttacttagaattttgattacagtgatgtggcaagaataacaacacgtggcacgaggatactagggcgggattgatgaaaaatatataaagttatgatcgttagtgtggaccgttagtcatgaccagttgttatgaccgttagaagagaagtctgatggtcccctttccccctagcttgagcgaggtggctgcctccagagagacggtggactaacactctcatagatggaataaacgatcaccacacacctacaaggtcaaatcagtgtaagggtagatgtcactacccctaccttaaatgtaatgatatactcaaaaggtgatgaagttagtctaggg

SEQ ID NO: 100198 - DNA, 1748 bp, Cannabis sativa
  modified_base (1502)..(1510): a, c, t, g, unknown or other
gccttagtccacgagtcttttttatttgtgagagtatttattacagagaatgttcttggtggatatcactcctatttactccctttaattcttacgagcccagaattctcgacccctctctcagtgtgtttgggggtatttatagtatttttctgggggcatccctaaaactgagtcacttgtctttctgtgcaggttcaataggggcacaaaatcctagcagatacaaaataggaaatacatgacctataccgtaggtatcttaggagttagatggagataatcttttatcccttcttgatgatgtgatccctcataaagtagccgttactggccttattaatcacaacgtaatagctacaaatgaggggttacgccgtcagacgtattacttatggcagttccaatactttttctcccatgcggcattaaatgcgagggaaccgttcaaatggagtccagtacctcccggagattccttagcatactcctagtctcctggagtacgtgaagccctctcacatgttcttcgagagctatcttcgtacttacactcctgttgccgaagacttagtcaatttctttaagagttgagcctctgagctccacgtgtcgttgctatactggtccacgtattttgtgcaaaatagagggcaacattcacccccaagccttgtttggtgtagagtaaacgaggcctgtttggtgcctccagttgtctcattgatttcctggcacgtgcttcgggcgcctgggctgcatttatgatagtcatcattaaaatttattgctttttccaggcaacgattcgcttcccatctattaatgatccagtccatttaattggtgtcagagaaatactcaagcgtttccagccaccctgattagcatttatcccaaccgttggatctgtagaatgcaaatcaatttgcgattcccaccctacgatgacgcctgatcacagctgatttacacccgttctggcctataaaagcaagcctttctccttcatttggctactttcaccactttgccattttttcacaacagcatcttagagaaataatttcacacaccatagatttcttgctgttattccttcgtcgctgccaatccaccttttaccgttgatcaacaccaacctccagtttttaacttccatgtaagtttctgggacactctatgtctttaccgcttatttgcatgctaggatagaactttgtggttaagtgttggatttctggggaataactttcactgagtctgttttgggacgtatagaatctcttttatttgtgtttcgttattttcctccattcttctttgcaatcgacccctttgttgaaagatttgtaaagggatatggggcgatttttgttcccacattctgcatttttcacttttcttctgctttcgctgcctttgggatttttgcacacgatgttcgctaaggaaaaaccttttggtttccattttggcaaacatccggagggggcctcttnnnnnnnnntaggggacccccattccctcttttaacattagggtttggtttgggggctaactgttggattctttcttttttcaaaacaaaaatgtctacccctgcgtctggaactaagtcttctcagaagggggcggttgccttggccaccctagaggaagtcatgaagggcccagttgtcttggtgaactatccttgttattctaacggctcggaggcggacgagcttcgctccaccctgatttgc

SEQ ID NO: 100199 - DNA, 1086 bp, Cannabis sativa
acattattttttataagttttattgaaatttgagttgattggatagttgtttgttgtgttagcttatatttttggtgataaatagttaatgggcttagcatctgtgtgtctaaagtatatgtggagcagaagtgtgagtttttcttgtgtaagatgatgttcctacccgagagaccaattctgacctcaagtgacacgttcgcttgttatggtctcgacctccgtaaagtatgcattgtcgatcgccttgtatgacatcatttgattttcttctagaattgtttgggatacccatgcctttggtcctcaccctaattggaccttgtacaatatttagattatcatggtgtgttctagttattttttcggtacctgtttcagtatttttttatataaaaactaaatttgatttttcttttttgttgcgactttgatatgaaccctaataaccaatataattaactttgatcaaggtcggtcttagtcaactctagggtatccattagtctctgttgtggtattttgcgtgcaagtgtatgtatcgtaacaagtaatagactaaccaggagtgaagttgatcccacgaggattgtattaagtacgttaaaattaaacttttacttctatttggttgaataaaaatttgagatacaattaaatttagaaaaacaagaaaaatagcgaaagtaggaagcaagtaaattaataaaggaaattaatagtgaatgaatgttagggctttcgatttcaattgtatctattgattatggcctaatctgattatcttcttattactaatttttatgcaatcacaggtttactaagataattaatggtcttctcagatatctaaatctcaattacatgcaaattttttactcttgtgataaattaaacatgcaggtactatcaaaattcagttctatctcactatagcataattgacactcacttctcagatctcgcatcaaaatcatagatagtcaattagtgattagacaattaaaattaattaagtacgaataaaatagaatacatagaaattgagggaaaataaatcatattaatgttggaaataattttacc

SEQ ID NO: 100200 - DNA, 811 bp, Cannabis sativa
aaaaaaaaaaaaaaaagtgtactgttcctaaccttgtgcagcatccattgcaatcctaatcctaccttcccaactcaagacatttgtgttactatcgcctgtaattagaaataataaatcagagctcaatgctataataacttcttcttgtaaaaagaacattttcatgatgcatgtaagaaaaattgaacctgaaagatgtgagcttaagtctccattggccatatattcatagataagtgccatttcgtccccttcgttgcaataaccaacaaggctagtcaagtttctgtgataaactttcataagaagttgaacctataattgagaaaaaaccacattatatataattcatatacttgcattgcatatattacatatctcaatatataattaacaattaataaagaaaaaacatgcctctgcttgaaattgttgataaccttgaactgaagtagaagaaagcactttcacagctacttgagtattctcatctatcaagccatggtaaacggtaccaaatcccccttttccaagaactcgctcaaaattgtttgtaattcttatgatctcagagtaactaaactgtcgttttgaggattcaaatgcattcttttgagcactgggatctgcaatatttaatgttataacaaatttatcatataaagctagaaaattaatttctatatattaattgcttgttcatttgtaataaacttataaaaatatagagtcttattattacttaccttgggtttttttctttttcaagccaacaaaaacagccactgctattaacaaagtcacaacc

SEQ ID NO: 100201 - DNA, 2300 bp, Cannabis sativa
  modified_base (1145)..(1152): a, c, t, g, unknown or other
  modified_base (1328)..(1340): a, c, t, g, unknown or other
atactatattttaattataagtaactttttgttgtgactaaaaaattacatttaatcacaaaatttatattgtgactaaaatattatcattagaggtagctcctttttgtagtggaattacaccattaatagtgttagattttgagtctataccaatttagtgttatttttttatttatttattttttttttttttgcattctagctcttattttactttattttaaaaattaatgttacatcttagtcctcaaattgaaatttatcacaaaagtaataattaataatttaaaatactaacataaagaaaaatataaaataacaataataaaaacactaatattaaatagaaaaacataacataacactaagttttgaaactaaaaaagagtaatataaataaaaatgaacatcaagtaaaataataatttaataaacattagctttgattttatttaagttttttttttctcttaaaaaatgtgtaatgtttaattaatttaattttattaagttattttaaaattttaaatttttactagtagtcatgataattatatatcataaataaactattttgagttattataatggaaataatataaaagacgagatcttttaaataaaatgcatttatttagtgagatatttagtgtgatatatgttgtgaatcattagagctgttgcaccaaaagtagaagattctacaccaaattggtataaccattggagatggtctaataagaattagggaataagtttacaataatgtatattttttgcatctaatttacaataataacattactactaatactgacgtgccacgtcacccaaatataacattttttgatgctttttgtatgttttgggtttttttttttttaatttttaacactacgagaaaccaactacctttagtgataactatatttttttaatgtagcataatattttacaatcaattaatagcttaatagcttaaaggtgctgggtttgaacccatgacctttctctttttcccatccctctctcaccactaagctagccttagtggctttagtgacaactatttagtcacaaaataatttttttgtgactaaatgtgatttttaattacaacaaaagttacttgtaactaaaannnnnnnnttagatacaagttgtcactagtttaattttagtcacaaagtattgtaactaaaaacacatttagtcacaacaaattttaatttctctgattaatacttttagccacattttagtcacaacataggaatgatgatttataattactcacaactattttacttttagtcacaaatttnnnnnnnnnnnnnagtaagattttttgtagtgtaaaagtaactttttggttactatattgttaatgagaaaccaattagttacacctttacaaaaaacttcatttttatatgatataattatttgagatacattttggttacttttaaaatttatttgtatatatcttagtaattaattagttatttttatgttatattatagtagattataatttaaattatatttagataatcttaaagattattttcaaaactaatgagttggcatgtaatataataagttataatttttatatactaattatttgaaatctaattaattatcgtataatataatataatttaattagtaaaattttaaaataaatgttagctaagacttaaaaaaattataaaataataactaatcactatattaatagttaagtggtttcttttttggaaataacaaaaaaatatatgcttttcacattttgaaatgttcacattgaagagcagattataatgatatttttttagactcatccaagtgacgacggatcgatctgtaggaattatttttaaagtttaagaaaagagagaaattaaaaaaaaaaagagaagagtagaaaaaaaaaaaaaaagagagagagaatgaaagaaaggtataaatgatgggattgaaacttacccaaacaaataaaaacgttattaatatgggtacatggtttctctcatctaaggagcctcaatagttgatttagttatcaattaaaattgataaagttaactttagttaaattttgaaagttttcgcaatgttataagagaatagaaaaactaagagagtttattaaatgacaaaattggtgtcataaaattatatatattataatttagtgactaattaggattttttttttgaactttgacatgtaccaaatcatgttctttgaacttttttggccgttaaaaattcctctgaactattaa

SEQ ID NO: 100202 - DNA, 2000 bp, Cannabis sativa
  modified_base (67)..(70): a, c, t, g, unknown or other
gagatagtgtacgcgagccacataatctcttcatcggctggaactaggaccttctcccacgaagagnnnnttggaaacttgtaatcacaagtgtactcatccgaggcaagtaggccaacaatttttagattggcttcattcaagggaaagtctgccaatcgtaatccaaatggaagacccagcaggattttacggcgctcggccatctcaggagtgggaattggtctcttagaaactgatgtaaacactacaagaataataagtaagcaacctcaaaaatataaatcagaaaacaacttaaaaccaagcggatggccaaacggaagtggtcaatcgatgcttatagacttacttacgatgctttgttggtgagaacctgaagaaatgggttaaatggctggcatgggcagaatattggtataacacatcctatcatgtctcggctggtatgacaccattcaaggctctctacaatcaagacccctcgcccctgctacgattcgaaccagctagcacaaaagtatccagagtagaacaatagttgcaagctcgagatgccaccttggtgttgctcaaagagaaccttcatcgcgctcaacagaaaatgaagacacaagccaacaagaaatgcagggaactcgagttcaaggttggggattcggtctatgttaagctaagaccttaccgtcaacgtacagtggttaagcgtgtcaatgagaagctggctccacgatatttcagtccttatccagtggtagctcgtgttggtccagttgcctaccgcctgcaacttcctccagatgccaccatccatccggtcttccatgtgtctttactccgcgctgctctcggaccgcaccaacagcccactcaactccctcccaacctcaccgctgagttagaatggctgctagaacccgacggtgtgctagctatacgtccaggcactcataaggtaccactacaagcattgatcaagtgggggaatctaccatccagcaaagccacttgggaagactttgctgtcatcaaagatcaatttttgcacttccaccttgaggacaaggtgagactcgttaaggggcggggggtattgataggccacccttaatgtttgtgtatgcctgaaggaataggaagagtaatgtggtcaacacctcaggggattgactactgctaaggtggcaaagttgttaggcctgagtgtttgtgtgtgtgctatttcgggtataccttggtgggaataaagggggtaggatttgtcttttgttggtgtgaaaagtttgattatcttgtaattaatttgggagagaaccaggctctcgaactcctaggtgatatattcaaggctgctcaaccatttttctgctatattgctctgcaactctcttcttcttcttgtattattgctgttgtggcagaaaatacctatcatgatgcttgtacatgttcgggtcacactagaccaagcaggttggggtctactagtgatgtacttttgtaactctaatttgccgcttaggtcggctagtgaaaaggacttgtaatattttgtaaaatatttttgagatcccatattatgttacttttgtttataaattttaaagttattacaagtttaattttcattctgttttagataaaagtttaaatttcccgcgcatatctatctagtaatcccgttttaagggattatggtttcattattgattagtgtagcgtgcctaatagttagggcgttacagtattgatgacgacttgttaacctataaataggcaatggcaagtcctgaatataaagcatggttagccgacatagattcaaaaatagattccatgaagaaaaacaaagtctagaaatatgtagatgcacctaataattaccatccaattagatgcaaatgggtctacaagaagaaaagaggtgctgatagacaagtaaaaacttttaaagctagacttgtagcaaagggttacacccaaagagaaggtgtggacta

SEQ ID NO: 100203 - DNA, 1321 bp, Cannabis sativa
aacatgcctaattagttaggatgttacattatcattctcacggggctgaacctctttaaaatctagtgttcactttactttgctgtttttactttttttatttatcttatttaattgctttattttttactcactgtcgttggctagaagtgaggtcaacacaaactatcactagatctataatggaatctaagtttgttgttctagataaatatagtgaagaggaagaatggctgcataatttcctaaaggatatttcagattgtcctgaacctatgcaagcaatatgtatatattgtgataatcaagcaacgattggtagagcaaagaatgttctatataatggtaagtcaagacacatacatcaacgacataatagtgttagacaactgatctcagctagagttatctcaattgacaatgtgaagtaaaaagataatattccagatttgctaaccaaagagttaaatagagatcaagttgaaaaggtattagaaggaatgagtcttaagcccagaaaaaattaggatatatataaaggaaaatgaaacctagttgactgaagatcccaagatttaagttcaatgcgacaagctagttatataaacctggtaagatcactatggggggttgaccctacctattttgttgatgaaaacaatgattctgattgtggaaaaggataagcattaagtatttaatgacccttgtgttggaagtccaaacggagcaatgtcggattgttcttaattaagaggtcacctatttgagagagaagtgggactgctttgaaggagaattatgggggctagattttctaaaacctctcaaagaaccaggcaaatattcatggccaaaacgaacataatcatgagaactgaaatgatgccaagaagatatctatgtgagatatatcatcatttaacagtagacagttcaaggatatcgtgtccactggttaggtagtaaagtaaatatattttcacaagggaaggttcaaaggttagcaccccacctatcctatgcaggtatctaccatagaactctatcactgtgttaagtcgagtagagtcctgtccattccttgtaagtcttttttctctgcgtattccttatcgttgatcaatttcattcatgtggggggttgtttgaaattttttacttaatatataataaataaccaattcaggctaatatgtgaatgagaaattgatgccttagttgtggtccattgaatagctgctaatgaatacaaaatttggtcaaggatgtaatcaccgtaataatggtgaatatatttattgatatcaaaaattatggt

SEQ ID NO: 100204 - DNA, 697 bp, Cannabis sativa
tattttaccagcgcaatactaacttttgccaacacaaaaatgtgctggcaaaagtgacatttcttgtagtgagtttaaggtacaaatgtcacatccacctaattagtcaaaattaatccttttatctaaacatttcatatagtaaaattccatcactaatattttttatataaatccttcgatttcactcttcaaagataaatatataatattaagcaactctttttacaactaacctcctacaatcacctatgtggagaagaaattccaataccataaaataaaatatcaaaaatttcataaatagctgttaaattatttttgtaattgtttattattcttttttcgaaatttgttgagttgttctctttttttttttctatttaattttaaaaacacatgcaattttatgttgattccatccttttctgtatttgtcaaaaattaacaatatctatctacatattttgaaaaaacaattgaattaaatttatttcaaaagttatattctgctacttttttttcataattcaaataacacaatatcatagtttatattatactacttaaacaatacaaaaaataaaaacaatataaaaagataaaaaaaaatatgttgaataatattgcgcaaagcgcggcttaatttcctagtttgttagataaaagaaatggccttctctctctctctctctct

SEQ ID NO: 100205 - DNA, 1736 bp, Cannabis sativa
tgtcaaagttcaggggcaaaaatcctaattagcctttattttttatgaaaacagaaaatatttgtggggaggctaaagtgcaaatagaaataattccagggggccattatatacattttcagtaaaaaaatcaaaatttaacggaaaaaaattacaatctaattttttttaaatatgatattatataatatagtgttatagaaaattccttaggaaattctaaggatgtgtttagaagaaattacacagtataatataatgtgtgtttggatatattagttttagagagtgaaaatgatttttattgatattgaagagctattcaattgaaatacaataatggcaagagtgaatgtttatataggaaggaaagtcagttaagctagtaaccaactaaccgaacataattaacaataacaacctataactaacataactaacttagcctcttggagacaatgtcatggaaaatgagtggggaatagaggcttcgtgaggatgtcagctaggttggacttggaggcaatgtgattcattttgatggtgccattggtgatcttttctcagatgaggtgacagtcaatttctacgtgtttaatacgctcgtggtagacgggattctctgagatgtgaatggttgcattgttgtcacaaaataatgttgatggaagcctattttggatgccaaagttgtgaagaattgagtggagccaagttagctcacatgctgcataagccatgactctgtattctgctttagcaaaagagcgagataccgtgtgttgctttttggactttcatgatatgagagatttgccaaggaagacacaatgacatgagattgatcatctagtgtgcaagcatgctccctagtcagcatctgcgaaagcttgaaggtggattggttcatgtgttaaggcataaaagaagagtccttggccaggtgttcctttcaagtattgtaatatgcgatgggctgcttggagatggggttctcttggtgcttgaagatattgacatagtttattgactcaaaaagaaatgtctggtcttgttatagtcagatatatgagctgtcaattaaacttatatatcgtgtgggatttgtaagaatttttccagcctcattgttgagtttgttattaggttccatgggagtttatactggtttagtcccaaggtagccagtttcttgtaagagttgtcgagtgaatggcctttgtgtgacagagatgccctagttgcaacgggctatttctaaaccaagaaagaaatgtaggctacctaggtctttaagtttaaaatgggaatcaagtgtggaagtgaaatgttgcaattcttctaggctatttgtggcaacaatgatatcatcgacatagattaacaaggcaatgaatatgcttgttttgtatctgatgaacagagagtgatcattcttggattggccattcatggtgctcgagggttgctccatgttggccattccttcagcataatgccgaggaccaaatccatttatggtgctcgggggttgctccatgctagccattctttcagtacaaggtgtcagtgaaaggttctccctgggcagtaaaggttggccattgaacaaccagattagtagtgtcaacttgaccaattatggtggccaagtttgtggtgtctgctgggttggcaaggttggccacatatgtctaattcatgaagattcaagttgtggctccaaaacaaacata

SEQ ID NO: 100206 - DNA, 1010 bp, Cannabis sativa
gccattttatgttgctgaaatggtctgagatatggaaagcagctgcaaccaaacacctttagaaaggtatagtcaggttgtttgtaaaacaaacattgatatggggatatattgtcgagtatgggagtgggaaatcggttaataacaaaggttgcatgttgaaaagcaaaccaccagtaggataggtccaaaccagcctgtacaagaactgtcatgcctgtttcattgatgtgtcgatgcttgcgttcggctataccgttttgttcatgatcgtgagggcatgagtgttgaaattgaacaccattagctgtgagaaatgatgcaaaacttctatactctcctccccaatctgactgcacctttttaattggaagaaaaaattgtttttccactaaagttttgaatgagagaaaggtagagtaggcctgtgattttaatgttagtggaaaaatccaagtgaacctactaaagtcatctaaaaaatatatgtaatatctataaccctccttggaaggaatatgggaaggaccccagagatcggtgtgaaccaattctagtgggacagaggcacggcttgtggacattgggtaaggtaatttgtgatttttgcctatcttgcaggcatcacagaatttaagttggtttaaggtgcctttgtaatttagtttagacatgactttagcaagagtattagggccagggtgacccaactttgagtgccagagattaatatcatggttgctagtgacagtgagagcagtaaaggagacattattgttattgaaagtagattctttattgattggaaaattggtacaaggattggagactgtattagtagtctctttattacaaaaacagagttacaatcaaaaacagagagacatttagactccttagttgctagttggcactgaatctgaacatgtgttctggtatggggttgagtgagcagatatagaccatttttgactcttcctttaagtaagaccctccctgttttcttgtcc

SEQ ID NO: 100207 - DNA, 919 bp, Cannabis sativa
aaaaaaaaaaaaaaaatccaggctacttcaattatgtctaaagctgaaattattataaaggtgattttttattcccaacaactacatactacatactgacattctccccgttttcttgtcccttctgcattcatgtattattccgcatgattgttttactctgagtttgctaatatccgtagcatcaccaaccaaaacccatcacatacataaagtcactttctgaagcttattaaacacaattatagtatagaagtagtatatataatagaaacaagaagaaaaaccatgggtgggaatatatttagtgagtcaaatttacatggccgattattaaagtgttttttgtcttgatatagggtctcattcgggctgactcagagacactataataaaattagctttcctattcattttttttttcaaaaaaagattagctttcctatttaaaatgaagatatattatatatacacatcattatatatggttagttaatagttagtgtataagggctccaccaccttaaataattccctcaaattccaactgaatttgattataagggcactgcattgagaaaaatactactcaactaactcctacaaattcaatgaaggtttgcttattaatgcttaagccatatatcctttctaagagaatggttattgatgaaaccagtctttatgttataaggtgcttaaagcgaaatacctgcgggataaataattctttgattgtgatgttaagagttctgactcttggttttggaggaatgtggtgcgtacaaaagagattctaaaggaaggggcttgcaaactggtagttgatgggagcgatacaagcatttggaatgacccatgggttatacatggcagggatttttaccctaagcccaagcacaactaccagggaacacct

SEQ ID NO: 100208 - DNA, 1126 bp, Cannabis sativa
ttctatctcaatgggagaaaatgtcatgccttgcctttgagtttgagtttttctctccgaataaaccttactgagagactgttagagaaagacgaggaggaaaaggcgcgtgtgttgcacgctcggagagaatgcgcgttaaattatgaaaccgccaaaaaccatttgaaggaaggatttttggtatttaaatttcagctgagaaaaatttttggatttcgattacagaaatcaaagtgggtttgctttaaagtttggattttttttttttttttgtaaataaaaaaaaattaggacagtgacaaaaagagaagaaatttaaagcaaagggattttctttaatattatataaattgatttagcttttactctaattttaataattattaattttttttttttttgatcaataataattattaattttaatacagagtaattggatatgatttttttttccttttttatattaccaatttcactactttcctaattggaaataattgtaaaacttgaagtaatctctcaattttttttaagttcaaaagttcaactcaagtaactagtttttctactcaacaaaaaaggaaaataataataataataaatactatttttttttctctttttatgtcattatagattctattgtgtaatatgcttctttttttttttaacaaagtaatataatatgctctttttggtagactacatttttttttttaatttcaacatcattttttaaaataaaaacaaattagaacttacttaccacatagatagctaggttttgttacaaattcatttaataataataatatttttcattttttagtgaagcaagtaagtttcaaagcctaattactaggaaaattaagcatataagtcaatagcatttatttacttcaatatatctctttcttttatatgtgttaatattcttttcttgttgaggttagcccaaactttacactttgcctttttaaaaaataacaaataataaaggagagagagaaagataggttagcaacatttgatttgtttgtggattaaaagaaaaacaacattaacaaataagaataggaatatttacaacgaaactctcttaatatttctagttgttaca

SEQ ID NO: 100209 - DNA, 1153 bp, Cannabis sativa
gtataccatgtaaatttctctattataaatggttaatagtttttatattatttattaattaataaattaacttaatatcttagttgttcttaatatttctgatactgaaaaggaacaactcttttcactcttttcctatcttctttttccacattgccctaattgcatgagattaaaagaaaacattaatgcaatataaaattgaacaatattatcaccataattaattaacaaatgttatgtatggatggtcttttttattttcatttttttgctaaggacatgatcaattttagacggtacgtgtaaactaagagagagagagagagaatgaatggtggagtaggttggttaaaatttgggacgaataagacaaaggagagagagagagtataagctttcccttagctcaaaaaatggaccacatggatcaattatgtctaaagacttattattatgcatggcgcgcccttctcacaagggggccacatgcatggtcctaccttattatatgtggttatgtatagctaccttaatctgcactactatatatcttttctctctaaacttcttttttttttttttttttgtcaccatatgcatattttattattttgtagttggatgattatgtatagtatacggtgtatctcttcaaggagtatttcgatatactttttatcagttttagtatcaatcagagagctttttaattagtttattattttttcatcacgttgtagctactaaaaattatttgtaaattttttaaaatttttaaatagtttaaagtgtcaaaaataagattttcataatttattgtatgcgtgactatttttcttatgcgcaaacaaactgtattttgagcactataaactattagaattttctgaaaaatttacaattaatcttaaatagctacagcaacaaaaaaattaactaaaaatctcttttagatgccaaaactgatatgaaatcacacaaaaccctctaaggtctactatataaattttctataatatatatgctatatatactatacttattgataaaaaaaatactatatatacttcgatcttaattttttgagaaattattttatatatttttttttaattttcttttttaaatttacggtttgagttgctccggt

SEQ ID NO: 100210 - DNA, 1982 bp, Cannabis sativa
tggacgcctcgctatcacttgcttaagttcacccgtctgctatacttagtttgtataatgtagattataagctaagtgttttcacaatcattatattccatccacgtgacgaggttagtgcctcgtcttgtacacttgaagttacatggtttctcattaatgcacaaggcaacaatttgtatatttgtatctcgcagaagactatttagtcatctgagtggtaaacatactctgtgaattatttttttacgagttattcctcctcaaatataattatagttatgtgcctaggttcatattttttctaggttgacacgagtcctcctttgatgtgctagccgaatttcgggtgtaacaatttcaccattagatcatcatctatactaaaaaatagcctaaatttatttttctatattttttgaattattttattgtgattgtaattggacatcattctctaaaaaaagagagctctctagctcattttttatgttcacaaaagtacccataaggtcaaataatctctctctagtttattgctctagaaatttaagtttctagacttagccatttttctgtaatccaactcttgagaaataaaaactcaaagtagaggtagctctattactttcgcgatacatggaatgaactactagaaatctttgtgtctttcttatttatacttaactcataatacaatctcaccgatctagcgagcaggtgtgaccagatatctgtgtccagatttttacgtcaataattttgtataattatttatttatgaattaaataattaaatttattgaactatttaattttattcacttaaaactatatattagttaaatataatattattgattaaagtatattatgagagaaaaatatattattttagtagaaaataatatttatttgattcagtttttattgcaaaataaataataaatattatttaagacgaaattgaagaattaattttccacattaaaataatcctatacgtgtaggtgacatataattgtcacactatttgttttgattattttattaaatagataattcaaaataaatttagtcattaaattaagtaattaaataatttataagataagatatttattagtaaacatttatttaaataaagatagatgattatttagttatttatttgaatttaaattttaatcaataatttatttttatttaataaatttaaataaaagactacatatatatatgatatatgctatagaatacacataagatttaattggtataattttcatcaaaaaaataccatagccaaatatagcactctctctccttctactagtattcatctcacttgtagagtctttcactctctcatcatcagagtgtctcatgagttgattttacactatgataatcaataatctcccctaaattaatcctacaggcccacacttgtcctatagtattgaagattgatctgtaagactttggtgtgagctcttcacaaatcaaacatcattggattggatgatcaataatatatataaaaaaattgaggatatcatagactactagaggtaaattattcatatcatgtagtgaaaattaatttatgtgaatgtgttgacatcctgggacttatgatttagattatgattcataaaattatttcataaaattgcttttgctttctactctgatatagataataaaaaccaacattgtaatcttcctctaaaatcacaaaatgatactagatataccttccttctagcacaaaatatttttgaaaaaaataaataacactaaaaactatgagtattcaagataaataagagcacccacaagaaaaataacgagtattcacttagagtggtgaatactcaaacataatgtaacgataactaaaagaaaatattgaatctttaaatgagacagagaattataattgtttaacaaaagcttggtctgcttagtttaatttt

SEQ ID NO: 100211 - DNA, 1447 bp, Cannabis sativa
  modified_base (765)..(767): a, c, t, g, unknown or other
ttgtgactaatacttttagtcacgaaacttttagttacaacataggactcatgatttataattagtcacaagttttgttgtgactgaaagtaagatttttggtagtgtgatttttttaggggctcagtagggtaggccctaggtgcgacaaatctatcttaagtgataaccttttagttacaatataaattttttgtgactaaacataatttttagtcacaacaaaaagttacttaattatgactaaaatatatatttagatacaagttgtcactaatttaattttaatcacaacaagtattgtgacaaaaaatattaagtcacaataaattgtaatttttgtgattaatacctataaccacatattttttagttataatataagtataatgatttataattagtcacaattttttttatttttaatttttaaaaataatttttttttaagtgtgttttttttaagtgtgggcctactccgccacattaccttcaaggtcgggcctcattcaatattttcatacatacactccacgtataaatattaaaataaggctagttaggatttttactctcgaactctgacatgtacccaatcatgccctctaaacttttctagtcgttaaaaattttctctgaactattgagattgttagatttaaggtcttttgtctaatttcattcaattttaatatttcagtgattatttatgtactaatccatgctcctcagattttgatatctaccaaatcatgtccctcgaannntgacatgtactaaatcatgtcccctgaacttttattcatgttaggttttttttactaaaattagataaaaatccttaaattcaacaatctcaatagttcaaggggcatttttaacgaccttaaaagttcgagggcataatttaatacatgtcaaaattcaggagtaaaattttcaaaaactttcctacaactacacacgattatattttggttacaacttatctcaatattttctaaaaaaaaaaaaaaaaacttatctcaatatactgaaaatatacaataattttctatacatacataccctttaaacaaagaacaaatatatactgaaaatatgcaataattttctatacataacacacccaacaaggaatggaaaaacacaaataatagtaatcaatcatactcaaacggtcaaaccatgcacgatgatctatcgttctcatgatttttgcattaaatttttgataggtcacttattttacatttatacactactaaacttaatcattgaaatagatagctttaattctgaccctttctctatatctctcttgtttatatatctattctatataaaatgtaactatataatagatttcttcatttatgaaaaattattgagtgattttcttttttaaataaaaaaaatattagatgtttagaattagttaaatttt

SEQ ID NO: 100212 - DNA, 691 bp, Cannabis sativa
tctcaaaatcaattgatggtgagtaaataactcatgttcttatttatgactcaatactaatacttttacatttattccattggaacaatgtccataatactcttattcttaatttattattaaaagaagggaatcatgttaggctggaaaagcctcaataacagaagacacagcaccatcaatagatctaacgttgtatcgtgtgaaacctgcttggtgaagaacgtaaacccattcatccaagctcctctctttccctttgttcgtatgagccatcattgtcatatcaagaaacaaacccacatcttttagctccagctcttttttcataacattttcctctaatttattgttttcaatcacagattcaacaattatcaccttccctttctccggaatagcttccttacacttctttagtatttgaatacactcttggtctccgcaatcatgaagaacccactgcataaaaatatatatatgttaataattatttaaattaattatttatatataggctaattagaatttttactcttaaattttgatatatactaaatcatgtcttcttaacttttaagatcgttaaaaatgttccctgaactattaaaattgttgaatttaaggatttttatctaattttagtaaaaaaaatctaacatggatgaaattttaggagcatgatttagta

SEQ ID NO: 100213 - DNA, 534 bp, Cannabis sativa
gggctttagacacgtgtcatctcagagccattcttatttgaatttctatcatccatagccgttagatcacctaacatggtatgcgagggcaagcatgctctgcatggtagcgtggcataggagacaaactttaacatcgtacatggaaaaaaggcatggtcaattggcctgttgccttgcatgcgcggattgaacctccgtctgttgaaggtgtatctcagactgacgcaccctggtggaagactcatacccttcatgggaacgaaaaggggtcttgtcttctagaataaagaatgtctctggttcgtggtcatctcttttgtggtctcctccgggaaggcatctctcgttgggacatgttctacgagttttatgctactatcttctcaaagcacatggtaaggaacttaagtggctcaatgactccttatccttcattaattagtatatacgtgtcgtatcaatgaaaatgcatataacacttattattacatatcattaattatattaactttgtcattactaatcattact

SEQ ID NO: 100214 - DNA, 1556 bp, Cannabis sativa
  modified_base (231)..(250): a, c, t, g, unknown or other
ccaaaatgaaaataagttttttctaactaaactcttgctgaaattacaaatgctaggtgtcactaacctagggatccacctaacccatcattgaacaaattactaaaataccatttaggttataacttaggcattttcaaacttaagggtaaaatagtcaaatttcataaccccgcctaacctcggtattttatattctccaatatatatcccactaagaaataaggttcnnnnnnnnnnnnnnnnnnnnaactagccatccatcgcattttttcgttgtcgctgagcaaaaattacaaaaattgcataattcacatataagccaaataatacccctagagtttaataaaatctccccatttctaacaatgggacccacagataattaaattcataactaattataaaaatatcagaaattagtgctaattgcctttactaatacaaattactaaagcgatcattacatctcttctattagtaagtaagagattgctgggcgcggagtccaaatatcctatgattgaaaaagctttcattttgcttaataattgcttcgtggaagttaagaccatacttttaagctcatgccaccaggttatctgaccaaccaccctctccgtcaattgctacagaagctggagtcattaggaagactcctaaaatgggcaatggagctaagccaatttaatatacagtattagccaaggatttcaatcaaaggtcaagctttaggtaacttcattgtcgaatgcacagggatacatgacgatcctaaaatgccaatcttggaggaagaagtctagtatatgaagacggagcatcaaatgaaaagggttcttgagccagaataattttgatctctcttcaacaaattcaactccaatgtgtgctttgctttgaattcgaagcctccaataatgaagcaaaacatgaggctatgatttctggcttacaattggcaaaataggttggcaccaagaatattgagttgtacagtgattcgcagctggttgtcaaccaagtgtttggaaagtaccagactacatgagaaaagatggctagcatagcaaaaaccagggagctattgcaacatttaagcactaatctgtgaagcaaatcctcagggataaaaattccttcacagatatgttagcttaattggcaacaaatccgaaagtggaaaaatacggactagtccccattgcatatctactcactccaagcacaaagacactgggggtatcagccattgatcactcaacttcctagatggccccaatgctcaaatatcttgaaacaagcacactctcggaagacagaattgcttcacaaaagatccaatatcaagccccttgatacgtgatgatggatgggaagttgtacaaaagaggattatcaatgtcgtacttaaggtccatagctagaattgagataagcaatgtcatgcatgagatacatgaaggattttctggagatcacacatccggacccagtctttccaagaaaattattcgtcaaagatatttttgtccaaccatgaaaaaggattgcac

SEQ ID NO: 100215 - DNA, 1281 bp, Cannabis sativa
cgatgtagagtataatggaggggggggggagaataatactctttttatttgtttggtaggaaggatgaagtgatagaaggatacatagttattaattcataaaattactattatatccttataattattttttaataatatttattaaaggtatttttgtaatttacaatatttgaagagagaattctaatcattctattaatggagggattttcaagtggaggtttgaatagattttcaatccttccacatctcttttctctctttcagtctctcttgccaaacaaatgaacttatcatctcctctcacctctctccctcctctcctctccatctctccacttctccttcctaccaagtgtaaggacgtaatttgggagcaatgttgcctaagagtaagatcaatatctcaaagttgagacttccaatgtggtgtgttccgttgttagggtcatgaccctatcctttggttgtcttttcttggttagggatttttattcttggatggttaggctcttataatgtaatctttgcgatttggtgtttatttggtatctgattatagatttgtgtgatttcatattttaaattaatgaatgaatactatccttttaaataatagatgttttgataaaaaattatcaatctttgatcaagaacacgtacactacagtcaagaatttatttgtatgggatttgttcttttcgttgttcatagtgagctttccccccctctattttcctacttttacgttgctactattcttttcttttataatatgtttctctgcatgcatggtcatgctaagctgtcttttttttttttttttgagatgtgtttttagttttatgattactaattattgcttttttttataatgcacttaattactacaaatttattattatttcttattcttgtgtcgatcttccctctttgggttcctttcattacattctttcgtatattgtctaagttatttcgattttgtcaatttgtacttaatgatttcagttttaattggtaagatgttgtttatatcgaaaattacttattccttcattttcatttctctcttttggaaatattcttttattttatataaatattttagatttctatcttgaatatttatctcaggactctattgtttcttgattaggcgtcacttacctttcttcaaggctcttagtttgtgattgtatctcgactaagaatattgttattggacactttaaggtgcctaacattaaatcaatgtgactcattgtgagttaata

SEQ ID NO: 100216 - DNA, 1480 bp, Cannabis sativa
aatccacatagcactagctttgttagtcaaagcataattggctaaagcatgagctactctattggcctcacgaaatacaaacgagataccaacaacactatcatacatcaatagcactctaatttgatcaagcaaacaatcaacatcatgacagccttcatcctttttttggattaattgaatggcttgtaaacagtctgattcgatgctaaatcgaggaagcttccgctgtataccatcctgcaatccccgaagaatggcctgcaactccaactgtagtggatcaagctccctatgaatgacagtagatgatgcatacgtaactcgtccctcatgaccacgaataacacacccaatacccgacacacctcctccacctctcacacccgcatctacactaatcttcatcatccccatagcaggtgcctcccactttgcctcctctctcctaacccgactcccaacagccgccccctcaccctgaaattcagacagaaaagtcctacaccagtcgaccatatcccctgccataggcatcttccctccatgaatgacattatttcttacattccaaatgttccaagttataaccagaaaaaattctaaccttgatttgtcccacagccgagccttcctcatcaagaaagagagcaaatcttcaccccgctgccgcttcatatcatctttgaatccactcatagcccaaaattccttgctccgtttgcactcccacaacgcatgagccgcattttcttccatatggccagtacaacgctcacaaatagtatccaaaaccaccccacgtttagccaaattcacctttgttggaatccaattataagcaagtttccacacaaagagtttaatctttggtggaattttcagtttccataaggctttccaccaatccacatatagctgatcattggattgatactgttcagttgccaaagtactcgccatcctatagccacttttaacggtatattcgccattcttactatagtgccacataaccttatcttcaatatcccaccccgagctaggcatagaaaggattaactccgcatcatccatgttaaacacctcacgaataaagttctcatcccacctaccatccccaagcttcatatctgccacacacatattctctgggagaaaaggcttatcatagattttgaaagtaaccgccctcggaagccaagggtcttcaagaacccgaaccgtttcgccattccccactctccacctatatccattagtaatgactttcttcccccatatcaagctccgccacacaaaagacgcatgtactccgctcttagcatccaaaatacttttattaggaaaatacgatgctttaaggacttgactacacaaattacccggaaaccgaatgcatctccacacttgttttgcaagtagtgcttgattgaacaaccccaaatcccgaaaccccaatccacccttatcctttggc

SEQ ID NO: 100217 - DNA, 1039 bp, Cannabis sativa
atggatgctccaccgcgggttgaatggatgctccaccacatgcctaaaggttctgcgactcacccaaatgctcccggctcacccaactgcccatgggctcgcacgaaatcccatgggctcgcacaagagctagggggtcgcacaacagcccatgggctcgcacaatagctatagctttacatacaaagcttcataattcaggtgccttagtattttggccataactgtcttgatatatatgggaattggacgattcaagatgcgttggaaagaagagaaatagacctttgaatcttatgtttatggaaagatccaatttttaacatatcactacaaaaatcctccaacaattgtaagttagtaagttgatcttactaactctactctaagttgttacggggttgaccaccgagttgcatggatataccccgagacttgcaagcatggatttctaagattaacgatccttaggccatatgcatcaactctgtcattctataaccgactcttacagtcgatatctctcgactgctagggctgatcgttgactaatctcaaaaatcaactatgtcgatttttggggttaacacttcccaacaaaaaggagtttaagggaaacttcttctagatgacagtgttccaacaaatcaataccaccagattcagtattttatgtaagtattatttactctcaaaatcttggttttgagtttttagtttttaacacttatgctaattatgttgattcttccacattttagctactacaaagagaccaatcctatcagctgagatctagaggaggcatgagatcttggtgaacatcccctatgggctgcgagtagctgacttcttgttgcattataataatttgatgtcatgcggtcttctcgataaggatcaatgcacaatggactacaagaactctaagtatcctacttggcagtaggttcaagtgcctgaggatgaagaagaccacaattatgtcgctcgcatccattaccttaaaaacataaccactcaagaggccaccaaggtt

SEQ ID NO: 100218 - DNA, 2687 bp, Cannabis sativa
tatatacaactgacatttgcaaaaactcggtttttcagaaatcttttggaagcaaagatcaaagcaattttggctcaactcgggtgataagaatattaagtattttcactcaattgctaattccagaaagaggaacaatagtatttcccgtcttcaagatagcaatggagagtgggttaattgggagacaggaatggctaatgttatcactagctatttccaggacttgttttccacctctagtgttaacatggcatcggtcttggatggtattcggcctactgttagccgtgagcagaatgaagatcttatgaggataatttctgaggaagaagttagaaatgccctttttcaaatgcatcctgataagtcaccagggcccgatggtatgacacctgctttttaccaaaagcattggggaatagttggggcagatgtggtgaagtttgttcgagatttctttgattcgggccagtttccggactcaataaatgacactcatattgtcctcattccgaagaagaaacatccttcccaaatgggcgatctaaggccaatctcgctttgtaatgtcatctacaaaatcgcctctaaggtagttgctaatagaatgaagaatgtcttaaactatgctatctcagaaactcaaagcgcatttgtggcgggaaggttaatttcggataacatcatggtggctttcgaagtaatgcactatctgaaaagaaagactagtggaaagaagggatacatggcacttaagctcgatatgagtaaggcttacgatcgtgtggagtggggattcttggaggctatactacgggtgatgggattcaatactcgatggattggcttggttctaagctgtgttaactcggttagatatcatgttataaatagtggccaaaaattggggccgattaccccaaccagaggaatccgccaagggtgtcctttatcaccgtacttgttcattgtctgtgcggaaggattctcatctttgataagggcttatgagtcgtctagatggctaacgggttgtaaagtggctagaagtgcaccaactatatctcatcttctgtttgcagacggtagttacatttattgtcaagccactgatgaagaagccaatcatgttctttctctccttcatttatttgaagatgcctcgggccaaaaagttaatctccataaattttcagcttttttcagctccaatactagtccggctacaagaagtcgtatctgcagtttgatgcgtattcaagaagctggggtggatagcatgtacttaggccttcctagtattgtgggacgcaacaaaaatgctgttttgggtttcctcaaagaaaagatgaggaaaaggatcaatagttgggaaggtaaatttctttctctggctggaaaagagattctcattaagtcagtggttcaatcacttccttcatacgctatgaatatcttccttttcccggttggaacttgcaaagaacttgagaaaatgatggctagcttttggtggaatctaacaactcttctggtaatggaagtggtatcatttggatgaattgggatagaatgacaaaacataagtttgaaggtggtatgggcttccgttgcttgagggatttcaatcgtgctatgcttggtaagcaaggttggagattattgtatcggcatgattccatggttggaaaagtctttaaagcgagatattatcctcaaggtgattatctatccgcgaagcatgggtcaaatccaagttttatttggagtagtatttttgctgcaagggatgttgttaaagcgggtttgaggaaaaggattggtgggggtttgtctgtacaaattatgacagacccgtggcttcccattgttgatcgagccactccaattcctgttgtgccaggacttgagcatttcactgttagtagcctttttcaaggaaatcatagatgctgagatgttgatgtggtgagggatttattttctcctgaagatgcagccattattcttggaatccctttaagctcggttgatgcagacacatggtattgggttgtagagaagaatggtttctattcagttcgaagtgcctataatttgctccaatctttgaaacacccaccggttttgtctgaatcaaatgacagatggaagattttatggtctctaaaagtggctcccaaagcaaaagatcttgtttggagggcggcttctaattgtctcgccaccaaagtcagtttgtgtataaagaaggttttggtcgaaaatacttgtcccatgtgtggagtgttcgctgaaactgaattgcacatcctggtttcctgcaactttgcctgggcttgctgggagtttgctggtttggctgctgcaaaccgagaagctccttctcttggacagtggctaaacgattcttttagccgcctgcaacctgatctccacagcagggctgtgatgttgtgctgggccctgtggtgtgctcgaaacgatctcatatggcagcagcgttcccgtagcatgaaggacgtggttacatttgctaattcgagtcttgatcaatggttaaaagctcaaggaaagggtaatatatctttgttgtctcctctcaaagatggagatggttcggagctttggttaaaaccgagtataggtatcaaactcaatgtcgatgcagccatttttgaacg

SEQ ID NO: 100219 - DNA, 1089 bp, Cannabis sativa
gagaaggattttaacaaggatgtaaagggatcttgtgtacataaacaagaaaatttggttgatcagggtaaagttccactgtaatttgtagaagcttatattatttatagtttgtactttgaattgatacatgtaagataccctttttaaattagtgaaggttattacattggttttccaaaaaccgaaggagtagacagttagaatgagttttcagtgtaagtgatgtaagcattttttatgtgattgtgtgtttgaatgtttatgtagtgtatttttagtaggaatggcaaataggggctttttcgcggatcgggtgggggccccgactcgatggggcaattctgccccgggacaatcaagtctctattcgggtcttcgccctgccctgccccgcccggttatgtttgtttcgggtcgggactgccccgattcgataatatcattaacttaaaaaaaatcaaagaagatgggttaggcattgaagaggtgagttaggcgctcgaatatggccatttggtgaatcaaattgtggatttggggaacgttggtgggttgggctaagcggatacgggtgaagactaggaaagccattagggtggagttatgtggagctgttgaggctggcgccggagaagttggtggtggtacaacgacggcggcggcagttagtagcaactgtatagtagagagtaatgactagattggttggagggaatgttgtttagtaaatttttatttgggttttttgtgtttatgaaaatttttactttggtaaaattcttgctttggcatggtatttataagatattcacaatctgtatgataattgtaatgaatgatgatgttataaataatggatgtgttttttatgatactaattatttaagagctcatgttggaagaggagaaatgatggtgagatttttcttctcgtttggtaaatatctcaactgaatttcagtattgtagtaagaccaatgtccaacggagcttggagcttggagcttaagctttagacagcaaaaccaatacataatcaatatatcaatatatataatataaaggaaagcacaaaatatcttaagt

SEQ ID NO: 100220 - DNA, 947 bp, Cannabis sativa
gaggtgtgtcagctcttgcagccgcagcttcgcgttctaactcaacattcctccaatctgatttagccaatctttatcggagttgtctgttttctaattcccctaatggtacatatctggtaggagcgtaagcatcctcatgggcctttatgggattccactcctagtttgttcaaattctctaacattttctctctcagagcgagaagttaatttcagttgtatttctcctatggaaattataatgttctttccctgaacgctgagttatttctcttggttgattatcttcgtttcaaggagtatcatctaccatgaatggaaggtttgaatatgtttcagggagggtatttttctaaattttttcttatcaggctcttaatgaaagcaccaaactattaatgtaaattttcgttaaccaattaataagccttaaagtaataaataaattctaaaatttaataaataaataatgataataataataataataaatgacaagaagatttttaacgtgattttaaaattaattcttcatagtccacaaatctattttattttgaaatttaataagtcatacactgaataccaagaaaatattggtataatacatacattaataagaaattcaacccaaatttattagaaacctcactcatggcagaggtttaccatagtaacaatcaagaaacacaacaatatttagggttaattgcggcaaaattctcaatagtttcactttgcttgcacttaactcttaaaatttaaatttaggcgacaaaactctcatgttctgttagcaatttaatattttcgtccattttaggtgttaagtgccatattagattgtccatgtatgcatctacgtggacacaatgtacacatgacacaattttatcggtccacgaaaaaattatttataaaagataaaaaaattaaaataaaat

SEQ ID NO: 100221 - DNA, 1165 bp, Cannabis sativa
taatatacagcccttagagcagccaaaaagaaagggagcacagcaacacaacttgcttaggaatattcatgtatattgtaatctcaattgtcatggaaacccaataatgtcttcttttattctacatatatcctcgggaatcatggtgttttctacagccaacaagttatacaaatgttaccatatacaataattcacaaatatatttcataaaaatagtgtacattattacgagtttttttggtatattatattaggtcatattttattgtattgtattatattatttattatatttttatataatattatgttaattttaaatttgtagtaaaatattatatatttaggtacctataaaaattagtatcacatataattttacataaaaatattgtataaaatacaattcaataaaatacttgtaatgatcgcataattaaacatgcgaattaacagataattagtagcttattagtaatttaaatactggttatgtttatatgtgcaacagtagaaaataagacttattgtcagaaataggcattagagaaataatttctcaattacaaagattttattgaattctaggtgtgagatgcatgttttttttaaattttgctattttatgctcaataacagtagatctcgatgatttggcaattagagtcacttagatacgatttataatcttgaattaacagggcaagattttatggatattttgaatatcgaaattacgcgggataattgtttatgactattattaacgcagattttcgttaaccaataataagcttttttcgtaataaatttaacacagaagttataagaaataaataaagtatataaagtataataagaacactgaatattttacgtggttttgcagttaaatctgcatactccgcgagcctatcttatttaagatatttttgagtatttaatacaatatacaattgatcgtatttctgtatttctctcaaagattctccatccctttttctgtgggatctactcctatttataggaatatagattgacagttatttacatttaaattcaaaatacgtaactgatttaatgaaatgtgattaattcccacatttcaattgaattatttactgggtaatacttgataactgcttaaccacttgtcatcctt

SEQ ID NO: 100222 - DNA, 963 bp, Cannabis sativa
atattacaactacaacgctaaatgtgtgcttaaatggcagttctgtgggtaagattttcccaaaatgtggcctcagacaaggtgaccctctttctccctatctatttgtttaggctacttaaattctatctagactttttgaagctgctttaagttatgggaccattaaaggtataaaactcaacagaaatgggctaaatttttctcatattttatttgcagatgatcttattttgcttggtaaagctacaactaaggaggccaggggcttatgggattgtttggatcatttttgctcttggttaggtcaacaagtcaatatgctaaaatttctatttcttttagcaataatacgatcgaaggtatggagagggggattaaagagatcatagggattaagggcattaaaggcaatatatgatatctggtgctccccctctttagaactagacaaaaggatgcagattttaattttattttggataactttacctctaagcttcatgggtggaaaattaaaactctatctaaggcaggtcgtgcaactcttattaaattggttgacatttttctcttagtgtattctatgcaatccaccaagatgaccaacaagtttgcttcaagaattgatgggatggtgtgtgttatcttgtagggccatgaaaaggggaataaaggaatgtacttaattaaaagcctgggataatctttgtcttcccaagtctcgtggtggtttgggattcctaaaaattagtgaaatgaaccaaactttcttagccaagtgggggtggaattttatatcaggcaccaagtcattatgttgtaaagtgttggaagccaagtacttgagagaaaagaaacttttgacttttacgtacaaagacgctgactctttgttctgaaaggggatagttaaagctaagtagattcttaagtctagagcctgtaaagttattgtcaata

SEQ ID NO: 100223 - DNA, 1397 bp, Cannabis sativa
taatttctcataattattatactcctactccttatcataatcaagatgccaacatctgttccatcatgtgatcattcatatatataattataattattattaataattaacataggtttatgttcatgatcattatcatatataatatatagttcttcaagattgggatttattagaggccatggattgagggagttttgtttattttattttgttagagaaattataaaaataataatatgtaataaaaaaatctgccatgagttaatttgtttgtccattttcttattgggtaatattttttcaatttgaattaaatgttaaattaattaattatattattgttttgggatgcttttgatatagttgctcatttaattatttctattaattagtatgtgaaaataggctcgtctcaagccaattagcaatctttggtaaaaaaatttaattaattgagcattttatataatttttttcatatctttttttttttttttttctatatatatagtagtaaaaatctaatatatagagtattttgaaaatataattacacaaaattatacaaatattgtattagtgaccaattagttattagaaaccaaagggtaaaatttattttttaatacctcctctcaaactaagtgggttagagaccacacctttggtcaagcaatctgcaatttggtcacgtgaggaaacatatcgatattcggaataattttttagtattttttttatgattgtgtacgttattgttattttaagacattttacaaaattttaaaaaatttaaaaaaatttaacacgacaaggttcgaatgttttgttgcacatggagatggagatttttccacagttcaagtattaattaaccttagttcatgagtcaattatattaagccaaatggcttaatgtattacaatgggatcttacaagctcaagaaccctagcttcttgctatgttgttcacactctaattttctccctaaggtttttctaacttctctaagaatagaacctaaaatgaagtgaagtggatcgtccccccttacatgaaagtataaaggggtatttataggctacgatctagatctggtaatactcgtgatccgttagggtttctatataaactaagtctaatattggggtaaatacatgaaataaatgaatttgggcccactggcagaattctggctcgtggggcgaaggcgtccgtacgtctgaggaccatacggtctaggacagatgtcttgcaggcgccacacatgtgtattgtggtgtcaaatacgtgctgttggacaacatgaaggtttttcttttagtggtgcgtgcactatcatgctctgacacatgggacaaaccctggttccggtgggaccaggtgtcaccc

SEQ ID NO: 100224 - DNA, 548 bp, Cannabis sativa
aaaaaaaaaaaaggagaaatgatggatggttgattgataggggtcataggtcagcacgtgaaccaatgctttgaatgagtgtgaatgtggtaaaataataataaaataaagaagatgagtaaaaaagttgatatagtgtagtggtattggtgtaataaagattgcattttgtatttttgatgtaaaaatttaaaaaaaaaaaactgtgtaaaaagaattattaaaaaacattaaaagaaattcacaaaaagacaaaaataaatctttttttattattattttttatctttttatgagatgcattcttctatatgtggtaagatatgttaatgtcactttaaaataaagaaaacctaaaccccaagttaagaggtaaagcccctaatatattttgcttttacttttttttttttttttttttatggggatattttacttttacttattttttatttttgaacgacaatggaaatagaagattccatcaatattagacatataagcaattaaaactgttaacaattaaaaaaaaagacaaccctataaca

SEQ ID NO: 100225 - DNA, 701 bp, Cannabis sativa
acatccctaccactacaccacacaatatgtggttcagttacctatgttatataaactaaattatatttaatagccatttccaacagtttctcttctctatcttttaaaatatatcactaaaatcttacttaatttattttacaacaaacttttatattacaccatctaccaacttctctatttcttttctcatattctatcttttaatatattttattcattataaatacataatattaatacacatatccatacataaaaaatcatttaaaactaaaaaaagttaataaaataaatttagagcgataaatagtactattctacaaacaatactatttattgctctatgctctaaaatgtaagaacatctattacatgccatatttttgatatatttgtatctctggggagtgctcttagtttcttactaatattgacatatttgtgctttataattagctttactgtgattcaagctgaatgtgtgactcttgttagcattggattaaattctttctttaagactttctactcaagtagttgaaacataacctagcaatctttttgtaagaaacatacatttttcaatgatctttttaatttatgtttttcggacgaccaatgtgactgcattaacagcgtataatctttggatgaatgaacaacttgtatgattaggggacttttcatattggatttgg

SEQ ID NO: 100226 - DNA, 1140 bp, Cannabis sativa
ttttgtaagacatattttaaaggataaaattgtcattatatatttaatattaaaaaataaaataaaaataattaaaatctattacccttagtggcattccttatgaaattggtgggagaagttctccttttcttttctcctttatttaatcaagttcttccttttctaattttaataatgtaaataaacaaataattaccttaccattgattctcattacttattaagaaatatgtgcttgattcaaaaataacatcacccttcccgcatttaactttacaaaaatgtatatataattgtgtatagaaatatacatacatatttgatatttatatttatataatattactaatataatgatcggttggaccccattaccagcgagttgatatttaaaatgaaaaattacactttatatatttatttattttctttttaaggaagaagtcgttttgcaaatatattttagaagctggaaagaaattaacattgtaatttaattaataaattttaagaaatatagtagtactttatatccaagttatataaaaaaaaatatgactaattaataaatatacatgatgaaattaactatagataacaggagaagcaggtgaccagtttggtcactcattgttattattttatatcataagttattctttttgtattatatagatttcaggaaattattgtataacactttgcttcaattattgtgtttattcctgctcatacttaaaatatatgaaagcaatattaaaagaagaaaaagaaaatagatttaataacataaatgcccaatcaaattttagagtagggatcgaagactaaaaacacacaaattacatataagagaaccatactatttttcattatatatacaattaagattacatataactatgtaccacataaatagtgtgtattatttaaagaatttttgacacttaaatttagtctacgattcaacacattttattttatacttacattcgggtagaatccattcaccttttttatgaatctccttctacttttgtaactcaaagaaaacattacttaaactaagaatgatttgatgtgggattaagcaactatgaatagatcaaaatatttttcaagcaaaaaaaaaaaaaa

SEQ ID NO: 100227 - DNA, 1288 bp, Cannabis sativa
tatgatgatcaagggaagcatcagtgtaaacctgcaaagaaccatccaaagaaacctccgaagacctgttttgcagaggagttgaagcactaggatggtgattattgtgttgtgcatctatatatttgaaaaagtagctaacacgccaatcaaaaatgtcagaagctagaataacattgtgatgatgaagataattgttcctttgattccaaaaataaaaaacagaacagaatattaacataatccttatccaaaacatcaaaagagcacaataaaaattcattgatatcaaggtgtttatatttattataatgagccacaagaagaagtgatcctgccaattgtcctccattgaggcaaacattgagggaggtggtagtaatacactgggtaacccaacttcgaaacttctgaggcaccccaaaataagagagcacatgatcaatgaacctccaactcattctatcatacgctttcataaggtcaatttttattgcaaataaacctactttgccttttttcttgttgaaagagtagataattttctgagcgatcacattattatcttgaatattccttcccggttcaaaagcagattgagtaggacagatgaggtttggtatgagcggcttaattctattagcaatgattttagagatgaccttgtacaacacattgcagagagatatcgacctatagtgattagttcttttccggttttggactttgggtatgagaacgatatttgtagcattgactcctttatgcatagtacccgtctgaaagaaatcagagaccacttcacaaaaatcctttacaacagacccccaatagtgtttaaagaagagcactaacattccatcagggccaggggctttgttgttactcatggcaaacagagtacgcttgatttcctcatgggaaggacccctgataagctctgtctagtcttcttcagaaattctatcctagatgaggtagttgcaattaaggtcgtgaccattattcgctcctgaggagattcctttaaagaactcaataaattcattaccaattaactctcatccaaatgttgtctttattcagaatactctcaataacattccttcttcctttgatagctagcgaaagaaagaagaattttgtgcaaccaacaattatcattaagtaaccacattttatacataaaaataaaagaataaacgtataaaatccattaaggaaaaaaaaaagaatagaacactcaaaaaatcaaaattaaaaaaaaaaattgcattgaaatagaatg

SEQ ID NO: 100228 - DNA, 1392 bp, Cannabis sativa
tgtgattcaaacactagaccaacatcaattcctccaaaaattattggatttcagttcaccattaaatataagacagacaaggaaaataaagtcacggatgctttacctagataacatgaaggaaatgattcttggcttcaatccactatggaaacaaccccccacaacttacttgctgccagagtttagcgtcgctaacaaacctctaatggtacccctagcaatcttggctgctcaaactacaataaccaactccaaaccggttcgttaagtgttggttcaatagtctttaacatatgggaagaatttgcaaccttctcgaaactgtatgatgtgagaggagtaatgttagtaaagcctaagaccaaggcctaataacatttgatcgagacaaatatggacaaaaggataaattagagtggttagacatggtagcccaaaatcccaatttagaagcagcagcttcaattgggatcaacatggaagagaaagagaacggggcagctgaaattgttcatgaagctccaacgcgtggaaaacgagtgtgcatgagacccaagtggctcaacgactttgtgatggtggagaggcgttgaggcgtgagctgggagagcaacccaattctgttaagatgtgtttacttttcatttaacaaacattataagtactatctattgtaataattttgggtttttgttgaatgaatttgcaaagaattgcattgaggagacttgtactgtctcaaaaaagggctctaaatctatcagttgctatcttcctagttagctagtttcaagagcttgatcaggctaatcatctcttgaatacaattttatgataatttctagatgaaaccacaaataaattcccatcataaaccaactcccattctcctttagagtttcaatgctgactgtagtaatatggttcgagtaagctgatcaactaattgtaagtaaagtagttaaacttacaataaaattctttgtgattgactgtgaaaattctgcgtggttacactatttggcaatgatggttgcatttatgtatataaataatttatagtatagtgtatagaggtcagagagaagtgaaagtacaacaagctgaacttgttatattgaatcataaggtccctcaaatatgggacaaaaacataaggcaaatgatatggtagaacctcaccgactaaaataacattaatagaaaagcccttcaacttttggattggtgtaatatttttataagaatggtaatttttcgccatgtgagatttttatgttttaatccagaaaaattattactacaaaaatgagattatcccataaaaagataatcttaatttttttaggaagaaaagttaattcaaagaacattcttttcaacatttaa

SEQ ID NO: 100229 - DNA, 991 bp, Cannabis sativa
aggtgtggagtcagaagttgcactacaggcattcggttatgctatggcgagtgattacgggctgccttccaactagagataggttgggatttgtaagggataagtcttgtccattgtgtgatgaagaagtagagtctgctattcatgtgttctgggattgtcattgtgcacgggcattatggtttagcagcccttttcccatatgtggaggggtgggaggtggaaattcagtcaaggaaaggctcgattggatgttggcaagacttccaagagagcaaattgatgtttcatatcctttgcaggctgcctgtttgaaggtatttggaaagttaggaatgaatacttgttcaagggaggtttggttcatattatacaggttaggaacttcatcttgggaagatactccgaatcttcagtgttgatggaggctgacgcggctataggcagaagaacaccaactgatttggctgggagaacaatctgcacttcaacggatgtgttttgtgtatcgaatgcttcttggaaggagggtactgcgggtttagcggtgggtttgctagacagatgaagtaacaaaatgatgtggtttgcaaagaaggtaagggcctcgtctgcggttgaagcagaacttttaacaattcagtgggcaatgcagttggctgggcagagaggattcaaagcgttcgctggtgcttcggatgcgaaggtgttgattgatgcgttgaaggaaaaagtttgtcccccgatgtggaatttgaaacctttggctctggaggtactgaacatgtgtaatgtgtttgatgattgtaacttcttttttatttctcgccaagacaatatggcttgtgatgcattaaccaaatgggctagagagaaaagtcattgtaatggctacattaacatagagggatcccctattgtgattcccaattctttactgcaatgaaatatccttagttctttcaaaaaaaaaaaaaaaaaaaaaaaaaaa

SEQ ID NO: 100230 - DNA, 1249 bp, Cannabis sativa
cgcgaacgtcttaaagagagcgacttagtccgcgactcaacccagaattcttcattcggtaatatcgttcctcttttattttgctagcagtttactcaacaccagcagggacaaaaccccccgtgggaaacacagcaaggaatagaaccagaagaacgagctaaaaagttagccgcctggttcccggaccgtttaacgaaactaatttaagcatactctttagaacaccattgaagtataatttttcttaaatatgctaaaatatagcaatacacaatctttttggcactctattggagatgctctaacaatttttttttaatttatcatgacgtaataataatcttatttcttttttgaaatgagattttttttatttaagcatttatatattaaaatatataatttggacttgaattttttttttatataatttaatagtattttacaatcaaataatagtttaataacttaaaaattctgagttcgaaccataatctcttctttttttcaatctctcgctcaccactaaactaattttagtgacttatttggactcaaaactagtacctccaacacacacccactcttctccactcttctatagtcatttgagttagtctcagtctcaattgttttctttttataaaccggaatcaataacaatcttaaatttacttgataggatcatctgaattttttttattgctttaaagggatcgaatccgaaattagaaatttctttctaaaagtcacctcacacgtcacaatttacattaaaataaacaaataaaaaaaacggaagacggaaaaaagaaagtgaaagagtgacgtggcaatttcctactgggcctagagtctgtgtagcccaaataaatatatgccaatcaatgagcttcatacattatagagttcagagacttctaaatatctccctctattctaggaaactctcaacctcaatcatggcccgatttagctcaccactattcctactcgtcgtctcggtcctcgccgtcgccgttgccggagccggatccaccttcgatgattctaaccccatcagattggcctccgaccgtctccgcgacctcgagtctcatgtcctcaacgtcgtcggtaacacccgccatgctctttccttcgctcgctttgctaacaggtaagtataattgccatctccaatcgtcgcatgatcttgtcttttttcggtttgtgtagatttaaagtgaactaagtgtagaaaatg

SEQ ID NO: 100231 - DNA, 1625 bp, Cannabis sativa
ctagatcctggtaaaagatttccaacactatcttcactagatggcaactcaaagccataggtcgagaatccaagggagaattaccagagcaaattcaacaaatccctaaaatcaaaccccttttggaatcctagcaactccaaacgggcatgtagcagatgaataaacctaattctcatctaaaggtttattctgcctagttcaagccctaacatcagagtcctaagaacacacaaaaatatacaaaaatcaggccaccatactctggctgcttaggtggcattagcattcccttggcggggaaatttcaacataactctattctagaaatgcaactctacagacataaggttgccatttacatatattaaatatcctagacctaggttaaactaagcatttcaatcttaggtacgaaatggcaagatttaataagtgtcaggatacttacttgatatatgagaggaagacgaggggttgttggggaaatcttggaaggagttgtgcacccagtcaatcactcgattgaagccagcttgcacgtcaaaattctcgttcagctagaggtggaatgattcaaggttcaatggctctgcatttggaaagtgggttgaatagagttctaagaagtactggattaagcaatcagaaaattattgcattcactagcgtaaacaagggcaagatcaaagctttttatggaaataagggctctggtttaaaattggaaagcaagggttttttaaaagtctaaaattgtaaagaagagaaagtggtttgtgctagatctatttatagtctgatccaactcgtgcaattgaaaataaatagtctagaccctccattcaaaaagtacaatttgatctaacagataggaagttgataagatggcatttaaaacctgctcaaggcctttatttttcatcattgcctgccatgagcagagtatgcattaaatgacagtcatgtcaatcgacctaccattattgcaacttcctctaaaagacatgccccttacaccacgtgttgttagcagatttattagaggcacaacatgcatgccacgcttgtggcatcattggttcttggaccttcaattgttgagcaatgtctaagtagaaaaatagcgatgaaaaatagcctatggcactatagcgcccaaattgttgcgctatagcgctgattctaaaaaaattgttttttgtgctaaaacgaagccccgaggagtactgcatgacgctatagcgcaacacttatctttttttataaaaaaatcctaattctaatgggattcttttatctttttttggcctatataaagaatgaggtaaattgaatttaggaacgacatgagagatagaaacaagcaactttgagattagaaaacacattgaagagcgagagagaagatatttaaagcaatcatcatcaactttcatcattagagttcttttcttcttcttgttcttgtttattcttttgcttagttatttaattatgaacatgattttgtggttattatttttgtgattatgaactaaacactcagtctagagtgttgatggaactattttagattatgaatttaagtttttagattattctcatatttgttcttgttattt

SEQ ID NO: 100232 - DNA, 1282 bp, Cannabis sativa
aataaaataattttttaaagaagaaacatgttgggacatccttgccgtacgaaataacgaaaatcaactatagtgctagtgcatggtcaactatgcatgtcgaagtttcctctaatcacaatatgacttaattaattgggttttttaaattgagtgaatatttaaataggacttaaattttttgtttttataatttctattttgatcaaacttaatttcaaaatttgcttcactagtctagatagctctacaaaaatcattttttttattctgcaaaaatatatatatatatgtacatttatcaaaaagaaaataaaaataaaattataccacttttaatcatccgatgtcttgatctgattggtaaagcatacaactttaagatgtctgactcgcacctaatcaaaatcacccgagaaatataaattatagtttactgtatcattaggtataatatcgtcgcgatatatatatatataatatcaacccatgttaacgcaatcatttgaactaattgaaagatccaaaatctcataagtcacccaaaaaccccactaatttactaattttataattttgatcataaatttttaaattgtataaagtttctaaatataaattaaaaatagcgccattttaaaaaggaaacattctctctctttacatgagtgattttattatccaaatattattattatttttttatttactttattttaaaatcttttatgttattttggctcttctccccactggttatagcctaatagcaaattagcaaaagaaaagacctgtctttgaatccaagtttttttttttttctagttgaatttccggttcctatcaccatccgaatttttgggttagtttcattttgtttagtgatttggctatggtgggtagttgctgaatcttgggtttaaaactatgtagtggtcagttattctgtttctttttcttctggataccattttcgttttcttgtttgtttgtcaaaaccaacccaaattttaagtgttggattcaagtgttagtaggatcttgaacttgggtagtatttattttttcataaaaatctcatctttacaaagttcattagtttttgggggtaagttttgggtaatgaattcttttgggtcttctttggtagagggaaactgagcgaaaaatgaggtcacttgccgagtatctgcttttgtttttgacatctggggttcttattgtggtctgtgaggcatttgtacacaaagaaggtatgtatttctgtgctagcatttctttc

SEQ ID NO: 100233 - DNA, 559 bp, Cannabis sativa
tggcttgtcatgacttcgggatgatcgaagttccttctcgatagaggcttgctgggcacgagtgcgagtggaaggaccagttggggtagaagcaggaactgttgtagctttgatgttggaataggaatcgattacaatatttgatttgatgttggaataaacaagctttatctatttctctttctttacttttactttttggtttggttattttgttgtttcaattactttgaaatgttgttatttcctttgttaaacggtttgagaataaggtgtctcattggttaggttgcttttcatattctatcctaatgattgtgtttttaatggggattgagtgctattttattggcagattgttaatgaaattgttttgatttgttcaaaaaaaaaaatattgtaatcatattaattgtatttggtttggtgagagaatgatgtaatggaataagagttgtattgatcataaataccattttggaccttctgttttataaaagttaacaattggaccctgtgttttgttaaatgacaaaatggatcttgtattttctaaaat

SEQ ID NO: 100234 - DNA, 968 bp, Cannabis sativa
ttcgatctgattaagttttcttcctaaacaatgtaatacattttgactttgactttttatgttataatgattttttacgtgcgaaccaattaatcaaaaatttatatttatatatatactaaataataacagaatttggtggacgactttgagaaattaattttttgaatagatttgtgttttatgataagttttgaataaatttcgaataaagtatatggtttgaattttatactattatttcccacaaaaaaaaaaaatcaaataaaaaaattgtacgataattatatatcttttatgttgaggaagtcttaaatcagtttttaattagttgcttttgctttacgtattgaagaatatgtctaatttatcttatatatctatattaattcaaaaaattatatcttataaatatccatagtaattatttgaatgggaaatgatataattctattgagccaatatgtaagataatgagtagtagaatagatctcaatattacatagcaacaaaaattaatattttcccatgatcattagtttcacatgtagtatatattggcatgacaataacacatcatccactaaaaagtcatgtaagcattttatttaatctaaattttcaatacaaaaaaaaatgaaagaacatgatttgatagttgttatatatataaatatatatatatatatacatatagttcgaaggtaaatatcatataaatgttaagaaaagtaataaataaaataaaaagtgtaagaatgtatataacaatagtagcaaaactaataatataaatgttgtccttaattaatgtgttttcatttgattatgttccaggggtaaccaacatagatccggctgagtgtctgctcccttaaaataaaattaatagaatagttttttttctattattattattattattgattatagtacatataagttataaataaacaattattatcaaa

SEQ ID NO: 100235 - DNA, 1235 bp, Cannabis sativa
aaaaataaaaaactaattaaaaattgttaacaaagggggcatttgcagtaacacttttgtttttaattttgtaatcacaaaaatgaaaatttttaaaattatgtttttaaaataaaaaaaaaatgtgttctataatcacttttgttttttaattttaaaaataaaaaataaaagtgttccataacttttatttatttttatttttttaagtcaggtctaggttcgggtgtggggtcgaagatcgtggttcgtgtctgagactggagccaaggctagagcctgggttccaacgtttaggttagggtcaaagtctaaaatatttattaaaaaaacaaatatttaaaaaaaaattgaaagtgattttttattttgattttttttaaaattttgattgttaattaaaaaattaaaaagtgaaaacaattttatagaacacgtttttgaaaaatacttttacttttctaattaaattaagggaatatactcatttagtactttctgtttttacgaaaaacatatttggtgtcttgtattttcaataatatttaattattaccttatatttttaaattgcatatttggtacctaaagtaaaatttaatcaatacaattttattaatttaaccaaatagatctcagttatatgtaattaaataattagatttaaattgagaatatataaaattttagacagtttgattgtattgataaaattttatcaaaaaaatttaaatttagaatactaaatatgtataattataaaaaataggtactaaataatcattaattaaaatacaactacttaaattgtatttagataaaatatagagtaccaaatgtgtaaacatccttacataaatgaaaaattgattaaaaagttgtctcttaattaaatagaaggggcttgagtgattaattaattgtgactcttgtaaggctaggagaagataattagtgtaggatatattttatatatttttggccgtgatagacggactcatgactttgtttttagttcactatatatacaatgtccactttgctgcgctcaagtcaagttgggattgggactcttgctactttgactacctacgatcgatgcttgtatatatattttaatagatgatgaaaagtatatggtaatgtacatatcaatgagcagtgatattacaaattaataatctatattatataatatataaatattgttgagaatctgcagctaagatacaaag

SEQ ID NO: 100236 - DNA, 746 bp, Cannabis sativa
attaagtttataattatttattacgcattatattataagctttgacttatttatttatcatatatttataattaaatgtttagctagaacccctaaacaaacttcggtgcctcatggtgtttgtttagctctgcgacttcggcatcctacggcttcggctagcttcacagcttaggcacctcgacggcttccacgggctctttcttttaagggtatcggcacacctcgacggcttcgacgacttggatggctctgccgagctgttctcccaaagtagtcaattgctgatttatgagattcaaacggggtggtgttgatggaagtaatggcgaattgcagtggtcactctcgagattatatatatatggttgcagagaatcagccattgattccgagttgtaaccttttatatgtgtgttagttttcaatattaacatatttttgaactatctcttttaatcttcaaaagtgtatattatacatttattttttcaaatcaattatttttatttgaacaccaaaaactaataataatgaaaaaaaaataaaaaataaagatcagtttaaacaggttaacctgactaaactgatgaaaatcattgggcggattatacttttttattttttcattggacgggttacaattaaatatttacaacccgacatttatattgagttggtaaaaatatactataacccgaccaaaccgactaatatacacccctaatggtatgggcgacaaaaaa

SEQ ID NO: 100237 - DNA, 935 bp, Cannabis sativa
tatgaattttcactaagttagggcttgattgtgaagaatagggattttaagatttatttgttaatttggcttttttgtttaatatatatatatattattatattaatgtttttgaaatgattattatattaatgttaatgttatatatatataaaaactaaaaatcaggttaaatcggtttggtcggtttaattgggtgggttgggtctattttcaacccgcccaattaagtgattggcagtttagaattttgttggattatttcggtttatattttttatcggttttttcggtctagtttgggcgggccaatcaggtttagcagtttataaaaattcttgtacaacaatagttgatagtttgtaatcattgatatgtctagtttcaaagcgttagtaaaatgttaatgcaactgcaatgcaactacgcatgaatttaaaaactactagaacaatgtttctatgtacgtggctctagatgaatgaaaattttctttgttatttgtgatttgatatgaataaatctaccattgaaaatttggaaaacaacattaatgcaataggagaaacattagctagtgtattgaaatattttttttttccagtttatacttgatttggattgatcagagttgaatttaagttttgaactagtttttttgcccagttttgcattaattcgaaattgtatgtgtttagatttcttacggtcttcttctcaggaaatttatggtgattcttcgtctggcttgatttttttttagttggcctactggtttatttgttgaaagttgtcgttgttggagaaggtgattcgtgaggttaaatggttagagcaagaagtatttttaaaaatttttattgctggactatataaatgttttagggtctgcccaatatatttgtgtaataagtatatacatgaaaaaagttttt

SEQ ID NO: 100238 - DNA, 1621 bp, Cannabis sativa
caaagaaatttgacccagtcccataatctcgcaccagagtcaacaaccagcatgatcccctaaggggaggaacaccacaggtgggacgcaaagttacagtaaagaaaaaggtgctccattgattcctcaccctccccacaaagagggcaagagacatcttcaatatacattcttttggcaaggagagcatggacagggagagcattagaaagaattctccaccaaagaactttatggcactccaacactttagatttccaaaagtctattccacaaggctggagaaatagtgcactgaggcgcgcagtccaaggcttgaaccaggtaggcagacttagttgagaataagccattcgaattcttggtccagacccatcttatccctaccattgccacaaggtttacctccttttaaaacgttgctaattgtttcttgctcaaatagaagatgaagtttagggacatcccaatctccattgtccaagagaaggtatgcaaccttatccagccccatatgttggggaataataggtttaggatagaaacccgcaccatgaatacccaagggtcggtccatatgttcgtctccttcccatcaaatattagcttacaagtaccctttataaggatatctttagatctcaccacgttcttccaaaaccacgaatctgggtttttataggagcaactcatgagctaactgcctctcaagtacttagcacttaagaccttacaacacagggactgatgctcattaagaagggaccaaccccatttaggcaataaggcctgatccatttctagtgtaatatcccagaaaataaaatgatatttaattgagcatattttattaaatatgtaattatcttgataatgaagtaagattatgatcttacttaagctaattagtgtgaatttaataaatagttaactaaaacataatttattaattacggagattttattagattatgcgcgtattgtagatattatttttgaaataaaatattttctggttcagcaatcgtgggaactcggcggagtggtcggaaatgtcacgataataaattatggatcagaatgggaattatactggataagtttagagtgttaggttgtcagtttggcggattagttggcattaccaaaatgcccctaggttttaaatagtttaagttttgttaaggagggtaaaatggtcattttgggtgatagttattaatgtttgtttcgtttaagttagtggctgattgacgttaatatagattaaggaatattcatttaattaggaaaataaaacgaattaagttattaaaacaaaaaaaaaaacaaaattggataagttagaaaacacttaactttgcttttctcttcttcttggcctaaccctaggggagttgcaacctaaggttttcttttgtaattcatcagattttggctggattggttgggtgttggagttaactaagcatcaaggtaagtattcaatacttttctcttgatttttttgagttttaagttagtttgggttagggttttaggaatttttcgggctgtgatgttaattcgaggttaaagtatgtttttaggttgtatgagagtttgtttgagtttgtaatgg

SEQ ID NO: 100239 - DNA, 708 bp, Cannabis sativa
gattcaaggtgtgagcttgaatttgttgatattgtgctcaagtttggagctttggttttaatgttgttgaatctgaatttctatacatgtggactgtaattttgagcgttataatttgtggtttaactccctattatagttgtttaattttgtaagaggttatggtagtcggatggtttgaacatcagcgggacaatggatgcaatgaaggaactctgaattatcaaacaatcaaggtgttaacaaagtgtcgtcgtcggagtgttcctaacacgaagggtctgctcagggaggtcctcccagggaggaatccccatggggagatccttgcaggtcccttctcatagggttctagcagggggtcctcgtaggtccctcctcgcagggggccttctcgcggttcctgaaactccgccttcctccgacttcaattggagaacctttctcgcacagattctcccaataacatcttcaaataagatgagagggaatctatatcataaatatttttttctttcaatcatgaatttcatcaacaatataccaagagaagaagaacaaaaattggataatgaaagagttgctatatcataactatattttcttccactgaacaatgtgtgattagtcataactatattattcaatattcaattttttcatatgatcacattgctctttttcttttcttcaaatatttaagcaaaa

SEQ ID NO: 100240 - DNA, 955 bp, Cannabis sativa
  modified_base (897)..(915): a, c, t, g, unknown or other
tttaagtatattctgttaaactaagaaatgtcgttagatagacacttttaatatataaaaatatataaatttgtatacacttgtatccttaatttttaaataattttttaaattactagctttgtgcaatttaaaatgaaagaaagaaaaaacagataatttgtaaatgtgattatgtgaggttattaaattattaatttgagatattaaaaaataaaagagaatattatattttgagatattatcagttagagatttattggtggtgttcgaaaaatttcaggctaatgtgattggttttattgactgttaatagaaattgacaaatcgagttgcccatggtgacacctttctttaatttgatagcttgatgcatgaaattcctgttaaatttaggccgtgaattcaaagatgaatatctctatttctatttgtatctttttctatatagaatatatagaatatataggggttgtttggaatgggttaatgctaacaaaggaatagtaatgtgaaatattaccttgtttttgaaggtttagccttagaatgttatttctttggtaatataactacccttgagaagggtaatattgaccttaaaaaaggataggatcaaattattatctttcattatattaatttagtatttttaaattaataaataaatttaaataccaataatattatcatttattataaataaaatattataatatatatttaatctgtgagatcgatttttttttaactgagttatttttatattattagcaataatatacatattcattatacataaattttatgcagatagtgtacataaatgacataaccaacaaaaataaataacacattgataaaatatatagaaatgttcattttaattaataaaannnnnnnnnnnnnnnnnnntttactaattaataaatatatttcttcgaataattatttt

SEQ ID NO: 100241 - DNA, 801 bp, Cannabis sativa
tccaccttcaccctttgttttgcaaagcagattccatgatcgccaatgtatttttgatccattttcattcataccccaccagaagttagccatcatactctcaagttgtgtacaaaagtatcctggcagccgaaaacaactcatagcgtaggtgggaattgattgaaccacggctttaagcagcacttcgcgaccaccagcagaaaaaatcttttcactccatgagttcatcaatttccatatccgttcctttatgttactgaaaagctcttttttatctcgtcccgcataagatggcaaaccaagataattttcatggcactctctaattggcattgaaagatgtcgatgaaagaaaacttgggcagccaaagttgtattcggagaaaaggataaaacagacttgtcgggattgagtacttgtccagaagctctatgataaatgtccaacaccctcttaatagcaaggcacgaactctcatcagctttgcaaaaaagaagactatcatcggcgaaaagtaaatgagaaatggtaggtgcatgccgtgtgagcttgaaaccatgtaaattaccaagttcttcctcatgatgaaggagacgagatagaccttctgcgcaaattaagaatagatacggtgacaaaggacaaccttgtctcaagcctcttgttggaatcaagtgccccatgacttcatcattgacaagaaaagagaaactatttgtagaaagacagcccattataagtctaacccaaccgctagcaaaacccatttgtagcattaccgcttcaaggaaacgcca

SEQ ID NO: 100242 - DNA, 788 bp, Cannabis sativa
atgcctggaagttcgatgattaccagcccatatcgttatgtaactttgcttataaggtgatagcgaagcttcttgctaatcgtctccgcatggtgctgcctttaatcatatctaccttccaatcggcttttctcccgggtagatggattgcggaaaacagaattatagcccatgagattcttgattcctttaagaaaaaacagggtaaaattggctttgtggggcttaaggttgacatgtccaaggcttatgatcgtcttgaatggagtttcgtcgatatagtctttaaggctttcagttttggcaatcggtttaggggtctcattatgaaatgtatctcctcggtttcgttctcagtgttattagatggaggcccgctcaagcaattctgtccttcccagggtttaagacaaggcgaccccctctcgcctttcttgtttatcattgggagtgaagtcctttctcgactcttgctgcgtgaagaggctactggtcacctccatggtttcaaagtctgccctcgaagttcccccatctctcatctcatgtatgatgatgacacattccttttttgtgctgctaaagtggatgagatcaacgtggttcaagaatgccttaagaagtactgtgattggtctggtcagatgcttaacgcctccaaatccgctattgtttattctaagaatacttgtccagaggtcaaagccctgatcaataatattttggggttccggcctctttcggacaatgataaattccttggaaacccgatctctttttctaagagt

SEQ ID NO: 100243 - DNA, 2246 bp, Cannabis sativa
  modified_base (2218)..(2221): a, c, t, g, unknown or other
gcccagccactcccaagaagggatattggctctggctagctaagctcatactggacaactgtccatggccggctagccctatagtaggtagagccttgccgcccgtgattccccgattagatgatattgctggtgtattgagaaggggtagatcacactagttgctagagttatgtggatctaaatacttgaagtgatcattttcacttctcaaatcgttgctttgggtgttttcacccgttcccagtcctagccggttgaagattggcctttgagtgactcgctcccctagggggagggtcccctgttgtaccttgtataaatacttctcccctaccctggttaactatcgtaagccaattctttgtcatcttatttcaccatccaaaagtgccttcttacctaatcgttttatctctaataacgtcatcattgggccagaagtcacacattctttgactcatcgtaaacacggtagagtaggttggatggctcttaaacttgtcatggacaaggcttttgatcgtgtggagtggggtttcctctggaaggccatggataaattcaatttcccatcctatttcatcaatctcattatggcttgcctctcaacggcctcctttactttttccatcaatcaacaactcctaggttctatcatcccttccagaggcatccgtcaaggcgacccgctctccccatatcttttcctcttatgttttgtggggctttctttgctcatctcgcaaaaagtccatcaacatattccaagaaagcacgctattagactaaaattttcctagactgtgccaatcatatcccacttgttcttcgctaatgatagcattatttttagtgatgcctcccccgttgctgccaaccatatcaaggaactacttcatgattacaatctggctttgggacaactaataaactatgataaatgatcgctctatttttctcccagtgcaactaatgagaacaaaaactgaatcaccccctactccaggttcctattcgggactctattgagaaatacttaggagtcccttaatcctttagtcaatttaaaaaggaagctttcctataccttcaggattgtgtgtggtcacatctaaacaagtggaactccacatttttctccaaagggggtaaggaattacttctcaaatcagtggtccaagctatattgtcttacgctatgagttgtttccagttaccaatttactttcacaaaagaatggagtccatgatggcacatttttggtgggatggaactgaacacaaggagaaagttcattggaatagttggtctgatctttgtaagtccaaattccatggaggcctaggtttctgctccatgaaagcctttaatcaagaaatgttggcaaagcaagcttggcgtcttcttcaggctccttcctcacttgtagctaccctcctcaaagcccgatactatccccattttgcatttcttatttctggtaaagggcattgcccttctctagtctggaataacatttcttagggcaaagaactcctcttgctggatttatgcaaaaaataaaagtgggtgatggtacctctatatctatctttaaggatgcctggatcctaggatataaaaaaattacctatctcagtacactaaaaacccttgatagcaatgtgtccactctcataatagccagcggagaatgggatgtatttcagattcaatcccttcatccaaattataataaccaagctattcagtctattcaactcctacatccaccaagccaagatcaaagctattagtcattcaccccatctagaacttatatagtcaactctggctatcatcatgcataagacattctacaccaatttaagccttcaccttcatttacaaataaccaagaaaatggtgtaaattgataaggaagatgacgttatcttagaaaatcaaacatttccattgtcaggtgtgccatgatgttcttcccactagtgtgaaccttcaccaccgccgaatagtgagctcaccattttgttgacggtgtcacaaaaaataaaaaatattagcacatgctttatttggatgctccaccgtccaaaaggtttagaaattaacaacctttcatgaaattattattaaaattaacttcttgtcttgtgttgatttattacatgtaatgaccgctctagtaatgtggattagtaaaggcaattagcnnnnatttttattattttattattttatt

SEQ ID NO: 100244 - DNA, 896 bp, Cannabis sativa
  modified_base (32)..(34): a, c, t, g, unknown or other
tctctaatcttatattattttattggttgccnnnaacctcggtcaacaatatatatatgtataaacataaaacccaaataacttgaattgaagccctcttattatagttgttagcatctccgagcgttctttggagaggtactcctatggtcgcatctctctgatcaccaagcctatcctctctttctcgaatgccgacatctgtgtggctctcccatggcctggttttcctaatctctaagtacacgacgacgattggtggtgagataattggatacggtttaatatagctgcgactggagcacgctagctgatggagaatagctctggtgtgtgagtgcctccttttaaaaaaaccaggaacaaaggtataggtgtttctgggtgtggtttagtcttttcaaattgcagcacacattttgcttaagtggactgactacctttgacgcaatggagtaattggatttggttaaataattattttgctgtattttatttttattaggctctttaactaattagtgtccaagaattttttttaatttgagaatgtagtatactatagactgtaaatactacatcaagccttgccaaaattatatcaaacttctagtacgaatgggaaaagcaagcacattttatgattcaaagtggtatttgggtatttatatataggtacggtaaaaaagaaattaactaacaaaagttatttttaattttttattatcatttcaattatttttattttatttttaatttatttgttttaaaaaagaataaagcttatttaggattttatttcatatataattaataacttatatttaaatcaattaaaaataatcaaatgatgtataaaaatggggtaattctaaaagtgtagtttttcaaatcag

SEQ ID NO: 100245 - DNA, 561 bp, Cannabis sativa
ctctcgaatgccaaaataaataagtgtgcatcggtacactctttttagtttggtaaattttaaaattttccaatttttaatttatcactgtaaattgaaatatgttaaatagtgaccgaacactttgttttaaccaaatcacattgactttagatgagatccattattttaaaaaatgtaatattattgtgcattaatatttagtctacaatattctaaatcatatattaactcaaatacataattttgactcaaataacgagtgcaatgcatataccgatagggaaataaaattcaaagttgtatgtatataaaatcatagatgtctattttaagttttattggttgaatgatgatgtgatttttttttgcaaactttaacacgttttgaaataatattcttagaaagtgtcattgttgcaaactggggatatatatatttgggaaaacacgtacgtagggagtgatcatataaatataatatatatatatatacatatatatatttcctatacatgcataaaaattgcatgaatgtaagatggtgaattgtttgtcatt

SEQ ID NO: 100246 - DNA, 1104 bp, Cannabis sativa
caacaactacctcgtgttatttttctcaactatagaaaaacatgcaacaaccaccatgatttatcaatttgtagtttgaataatgtattattttcagagatttccttaaatcaacttccctattttgccatgaattcattatcgaatgatcaattatgttctttatcatttataggcagtgataagggcataataggaatttctgatcacagggttaatatattctgtcccttgtattatttatggaacccaactactaatgagtctaaaaaacttcctcctttagattttattgaagataaatcttatcgtttacgtggacttggctatgaccccttaaccaatgatttcaaagtggtggttttctcatctcaacttaaagagggtcataaaattgggatttatagttcgagaagcaattcatggaaagcaattacaatgcctaacctatttccagaatttgaatctgttattgttacaccatttatgagcatgtccattaatgttaataacttcattcattggtctatttgctataaaaatggtaatacaagtgatgataaagatttggagttttctacaggaatagttgcttttgatataagtaaagagaaatttaatcttataaaattacctcaagttaagaaaggtaatgatggtgtggacatagctaaaatttttgggtgtctttctatgatatatgtggatgaagatacagtatttcacgtatgggttatgaagaattatggtgattctaattcttggtacaaatatttgtcttttagtttaaatgaacttattccaactaggtttagtaaattttgtcgaataagttttttgagtgatgagattatgttagttaatttatttttgactggttatttctgttggtatgactctaaaagtaagatgattaaaattttaggtgaaagatatcctgtgtttagattcaccacttatgctgagagcgttttcaggttaaatgagtcataatttggtatatatgttttaaaaagtgaatttacatgcacttttgctgggttagttttattttagttatcttttggtatttctatagtggacatcctataagggttagaagtg

SEQ ID NO: 100247 - DNA, 2301 bp, Cannabis sativa
catgtatttatgtgagtgtttagaactgacgctaaaaaaaggttatttgtgactgtggtaaatagacgctaataacataactgaggaaaaaaagataaaaagtttattaatgttcaacgtcggtttataaaggtcgattttaacttttttcgtcatttttaaaaactcacaatactagttttgaattttataaaccaaaggctaatggacctatatttcctacaaaccctcgtgaaatcagccacacacactactcattctcttctccaaatcaaatagctctggtgattttaacccagtcctcctcctccgttaatggatgacgagtggtcctcatctaccccgtcgttctcctctcacccacgattccctctctctgtgtgcctctcacccgcaatcgatctctcttctaggtttcttcatcctcggcagtcaactccacacatttcatcttctcttcgaagtcggcaatatagcaggttcgacctctctctcatcaagacctctcttttttgccatttgataccctgttctacaaccccttttccccaaaatttcaactttcaatagggtttttttgccattcgatctctcttctatgtactaattattttacgatttgcctcaagattaatttgttgtgtggctctgcacatatttctgtagttatatacatgtaaagttgtttttttagctacaaagtaaaaaattatggaatcactaattggtcattaatgcttgttcctaaattgaggaaatgtaatatttatgcaggaaagcattataaaaattactacgaaaagtttggtgttaagttgggctgggatgagaaattcatgtagtcaatgtgtttgatgttttatctcagtgagaatggacttgtgagctaactaatgatgagaaactctgctttctttggcttgctaaatcctaagtttaccatatttcttttccatgaaaacttagatacaaatttattcttcaatttattatttgttgaagattgcttatgttgctatttcatttgattttaaactattacttgaagtttttttttgattgggttttgagtttagtatattgcaaattaatggtgatttaattggcagggtacttttgatttgcttgtaaaatcataaacaagaattctgtatttgcttttatttcagtaatttgggtattcctccaattccaaactctagtattcagttttgatttggaaattgattttactaattttgaattgttttaatatttttttccttttaatttctgtagctatatatagctcgttttcttaggtaagttattatctcattaatgcttatggtgctatactcgatctctttacagtggttggtttagggttgattcttagggagtaattttgtaattccataatgatccccttcattcatatgaaatataattaattttaagtggttttattttagccaaaatataaaagaaaatttcaagatttagccgtttattacaactagttaaactttggtagctactagggatgtgactaaagtttttgtttgtataattaatatacaatgtttgttgaaattcgtattatatatgaacaagttgaattttatatattttgcattgtcgtacgagaaagagaatcggaaaattttactaagcctctcatttagctgatgagtatataatataaaggtacatggtacctttttgaaatgattaattgattttgaataatgttcaccttgaaatataatatggttattatatattatgaagattgtccaaaatttcatggtagttaatctaaaaaaaacaaaataatcatgtaaacatgaataatttttctttaattagttttattttaattatatttttaatgtaatgattaatattttttaaattttttgttttacagtttaagtcatacgctccctacaataacaaagagatcaatacagtgagatgagtaggctgaatttgtgaagtctttggttattgattgagtacaaggttaccactttttgttatgatacaaatatggatataagttttatgattattgttattaacttttttacattatgtaattagtttatagttagtttttatgatacatggaatataagttctatgattgtttctattaacaattttagtattatataattagttaatagttagtttcatcattattgatcatataattgattacaagttataaaaattttatataagttttctaattattattttaacattttttgtattatgtatttagttatagttaattttatagttattgat

SEQ ID NO: 100248 - DNA, 707 bp, Cannabis sativa
  modified_base (609)..(625): a, c, t, g, unknown or other
aaaaaaaaagacatactttagcagcagatccaacttcagcttcgtaaataggaatatcattcctgctaacgatgataaaacaagctgtagtcgccattgtcaaaatcaagagcttttatgctacctacaattgccgtcaatatcccatatataaatataaatttagttaaaaagtaacgattacaatcgatcatctgaaataaagaggcataccaaattcccaaatctttgcgaagaagacaatggaagaagattatcgattcagaagtcacggaattcgaattcttaatttataagagagtaacacaaacacttttttttattatgatatgataatcggtattcacttttgggtttcgatcgatctggagttatcagtaggcttgtaagtctttaagctgcggttagttttagttttagatttagatttgggcttttttttttttcttttgaagtattttaccaagaaaaaaaaattgagtaaaacataataataattaaatcgctaattagtaatttttcctaccgaactttgacatgtactaaatcatgccccttgatcttttttagctattaaaaatttaccctgaattattaagattgttagannnnnnnnnnnnnnnnnaattttagtaaaaaaattctaagatggatgaaagttcaaggaacatgatttaatacatatcaaagtttgaggggcatgattt

SEQ ID NO: 100249 - DNA, 640 bp, Cannabis sativa
aggtatgttcccatagtggaataggaaaatcgtcaattgccgcaaaggctagccaatttcaagattaaagtttttgttagacatatggactgtagctgaaagaaaggcaacacccaagcagttaataccctaaactcaacgagaatagtatgggtattgggaaggcctaccctaaaaactacttggagaggtccccgccggactggtcatctgaaagcatagattggtctatttgaaagctacacttctgcataactggttgagaacacaaagattaaacaatataagccctagcatatcatttggaaccctaatgattctagacaagagggtggatacctaatttaattcaggtataatccacgtcgacccagttcaaaaaacaaattaagaggaaggatgctcaaaatcctgcctacattcatgctaaaatgaccctgtcgtccctagactaggcagacctgatacgatcgaaccccatattatcacgcagacattttttccaggttaaagttttaacacaaatttctacaaaaacataaacttatgctgttaaaaaaatagagggaacttacttgttggaagaggttgggatagataagggtggcggtggctggcacaaaaagtgaatgcccaatca

SEQ ID NO: 100250 - DNA, 2521 bp, Cannabis sativa
atttataaggtaagaatccgaatatgaatgctcaacaatcttaccataaatggaaaaaatattttctcaactaacttgccaaaaaaaaaaagactttacagtatacaaccatcttgtggatgtgagattggagtatggtcgatgacaggagtttcgtgaaggtgttcgcaagttgtaagttggtgctgactaggatgagatagatggtagattgcttgatcttgtctcgaataaaattgcagtccagttcaatatgttttgtgcgttcgtgaaatgtggggttgttggcaatattaattgctgactgattgtcacaataaataaatactggtgtatcttgtggaatgtgaacatctttgaggaagaactgaagccaggtgatttcactgctggtggctgctaaagctctgtattttgcttctgtagagcttttagtgttgcttcttggtgcaccatgaaacaatgcagtcacctagaaaaatgcgaaaaccaattgtggatcgtctggctgtggtacaagaagctcaatctgagtctgagaatcctcgaaggtggagagaagacttagcacaatagagtaatgcttggccaggtttgcctttgaggtatcaaaggagatgttggatagcttacatatgaggggtgcgaggagcagacatgaactggctaagattgttgactgcaaatgtgatgtctggtcttgataaggtgagatacaaaagttgaccaatgagttgtcgatatgctgatgggtcttcaagtggaatatcgtcttgatcattcaatctgatttcagggtcaattggtgtttttgcaaggttactaatggtgtagcctgtgtcttccaagagttgcatggtgtattttcattgggagagaaacaatccttccttggcacgtgcaattttgaatcccagaaaatactttaatttgccaagacctttaataccatattgtggaattaaaagaggagaaaaagtattgtattgattctgattggatgatcgaaaataaatacagagtacaccagtatatataccaacataaactaagctagcaagagttagctaaacacaccagagttaaaataaaatctaattgaaataacagaaaagtaaagaccaactgcctaaataatcaagaaggaccaattaacttaatggactaacaaccataaccgaaagaggagaaggaaattcttgatatttagttctttatcttttgtttttttaatgagaaaaaaataaaaaactgaaaaataaagtatttttattgcttttataaatgataattaacctatatcttcgattatatataaatatataaaaaataaatatccttaaaaccttaagaaaaaaaatctaagacctatgctatcgattaggcctacatggggagatttatatcttaagttatttggtaataactaaagtcataggtctccactagtaggtttatattttaagcaattactaaacaattaaagatataaagtttatagttttttagaaaaaaggaaaacctttcactttctctcctcgatactcgtatttctaagtttaaacccccatcaccacttgttgaccactacattcgacaactacttaatcttatttttttgaaaattaattatgcacaaggaataatatttttacgttgttcaagtgttaattaaccttagtccacgagtctgttgaatttatctatgtaatattgttcttacaatggaatttcctttttatacgaaattctttcgctctcaatttcctccattccttccctatttataggcgagaatggggaagcatatcatggtttgaggtacgtcctctctatccctcttgactctatgtggccttttcctagatataagaaatgatttctaataatgggtgtttcaggtaggattttaaatagaagtttggtgagacaaaacttaaggtgtttgcggctgatgggaatatggaaaagaaagtcatcaatatgcgtttatggggtgacgcaacgtctgaaatgtatgggctaaatatcaaaacatcttctttttgggagcagctctatttttccatcttcatagaaagaaccatttacagtattttgtcttaggaaatgtatgaaggatcagaatggtttgtggatgtttaaagctctgggaggtcaccatcctctcgaaggttgagactatggcttagttttgggatatcttttagggataatgtttgctctcagataccaaggtgcctcccagacactttcatgatttggaggttaatattaattatttatttatctcttttatcgctggcccactagacacatgactaactctcgaatgaccacagataacttttacccgcaagttctagcttgcaatttcatatgttggggcttgttataggttcacctttaaattttcttctgaaatggttacaccatcatgagatggttatataaagtaggcctattcgcgtaggtacactacgggtttctagatgagtggctcttagtgctgcatgcattt

SEQ ID NO: 100251 - DNA, 1045 bp, Cannabis sativa
ttcttctcggcacgtggcttcttctctgccggagccttctcggccttctccaccggtttcttctcagctggctttttctcggcctttggcgccattgttatgaactcagaagattacttgattttctagagagagaaattggaaagaatgggttgagtgagttgagatattgggtttgtttgataatttatatgggaaggaaaaagattttcattgggttaaagtttgagacgcggattgatgacgtggatgagttgatccgtggaagggagggaatggacggtggatgtttattggatcatgacagggattgtttggattttgaaaatttaagagatttgattttggcgggtaggagtttcatgtttttggggaaatatttggattaggcaggtatcactattcatatcaaaattaattatatattttttccttttttttctcgcaaaatatgaaaattacattatttatttgtcataatttgttctttctttttttttttttttttgcaaaaacaaaaaatataatttagtaagttaattttttaatttgataaatgtatctaaataaactctgaattaatcttggttaatttttataaaatacaatcaaaatgcatttaattataataataataattaagtaaataaataagcatcattcacacaatatttatattagcatatatatattatataattgttactgcatgatatttttatgagatcataataaaataaacataatatactaacacgctcagagcttatagatagctttaaaacatcttttacgaatccattaagacaagacaagtaattctctccattgaactcgaggtgtacataaccaagaatgaaagagtgatgcaattttttttttgaaaaataaaatatcaacttcattaaaactagcattctgaatataatatggcatgaaggtcagcgagaacattatcctcaagaatgctacgatcagagtagaatcgagagcgtctagccacaaaatgggtcactcgatttgctgatcgtttaataaaatgtaa

SEQ ID NO: 100252 - DNA, 774 bp, Cannabis sativa
aagccaccctaggatcgagtcttacttgctttttaaactgtttgtattttgctgatgtggatatttgtaaagaggactggttataagtggattttattcaacatgaagagaaggtgctttggactggtaccatgcaggtaccttattttaatgctcttagtgggaaagtagaattttaatgctactaagaaaggcttacaatttgttaattgtggagtgtgattctgacagaattgtctttaaagttgtcaatgggttaaacccgagataaaaaattgataattttataactcaatatagataccttatgaacgggatgtaattttttaaaagtgtctaggtttttaattatgtagctcacaatttgaataaatgaggcgtttaatcaaaatataattggtataattgaggctttctctataccaaataatattatttgtaatggccatgaaacttaatttgttattatttcattcttaagttgataaaaatgattagtaataggctattatgatgagaggaatacaaatattattatagtaagttacattgaaacaccatattctaacatagcataatgagatcctaacagaaaagatttcttccaggtttaacaccgaattggcgacaatagttgcgatacaagtcaacccgagctttaacttttacacgttgtttaccaccacattctattctatttatttttctaatacttgctccaaaaccttgttctatgacaggactaacattctccacccaaaaccacaaggctgt

SEQ ID NO: 100253 - DNA, 1479 bp, Cannabis sativa
aaaaagcataataatattagacattgcacccttcacttgaagacaagtactcatctccaagtgtttggtctgtacatatataattggcctatgtatatacatcttatatatccagatttcttgaaatttggctaaattaaactaataaaaaacaatactcaattacgtactattatttatatatatatatatacatgtatagcttctcacacatcatgactaatcaaatagctcacaacttatttacgtagtacaatgaatctagaatatttttaataatcgtaaacaaatcatattgcgtttatagctaatatatattatatatagttacttgtttaattcgatctagatccaataatagttataattaatatatacatatatatgtacgtaacactcatagaatatacaattaagttattggttcatatatatatagtaacattcattctaacgtggtcgtcgtccaaatacaatccctctaataaaccaaaaattaatatatagagtccaaaatataataaatatatattaacaaaagttattactatatatttagtaaaatgtatataaagacgtaaacctaactatatattaatagttatataattaaattaaaatcatttatgcatgctggccaaatcgtctccattcacctcatgcatacgcttgtgcatgtatatatatatataaaaacaaaataaaccttttattattttttgtgtccaacaaaaataaaaagtaaattatatatataacattgctattggacggtacaatagtgcttaacactttttataagtggcaccttatgattagttaatgatattttttaaaaaattattttcttatatgaaattcaatagttaattagaccaataacaatataacaccgaaaaattaaagcgttaggcaagaataaatttttttaacatttctcatatatatagaataattatatggtagtgactatctttttgttcctaacttactatactaaacttacactttttaaccattgattatataacttttaaaagtcaaaattgtgtaagatgtatttgtttgtaggttattaaattttttttttttaaaaaaaatagaaaatctcacacccaaatgaaaaagtgagaattaaaagtatttttgtaaaatgccttggaatcataaaaatgcatttctatttggccaaatgtttgccaaaaaaagatatctattaaataaatgctaaaaagaatctgtaaaataaaaatagtacaatagggagttaactttttttttctttataaaatgaattttttttttttttttaaatttgtgctattactatattatgaaaaaaggtcgtactattatatatgtgaaatgtattttataaaattataaaaataaaatataagtggataagaaaaaaaaatttggagtatgattattttttgcagagcataaaaaaataaactaataacagattaaacaaat

SEQ ID NO: 100254 - DNA, 1021 bp, Cannabis sativa
  modified_base (972)..(989): a, c, t, g, unknown or other
ttgttattggtttaatttaatattcactctcatacattaatttattaaatacataatgtgagagatgatcaggcaatatataggaatgggtattggaaacttattgatattatagattaaatcacacaatataaaactgaaagtaaaacagaaataatcacaatttacaagcttcccctacatcaaaaatatattcggatagtgcttgggttccctaaaattaggtaaataattccaatatgaatctcaaaatatacaatatccacttttgtacaaatccacacaaaacaaagtattaattaaagattcatacacaatatatttaccctaagtactcttgatgaattcaagaccacaaatctaattccccttagatctctcaaagctaagatccccttgcttcttatttatcgaaatcccttcagcaacacaatctgaaatcccttcaaacaaaacaggacaaaaaattcactttgctcaagttttcttttccacataacacaaagtatagaataaaagaaaatgccctagagagcaaacatcaagaatagattctaacaaagatgaagaagaggttagaaaaagctaagcaagttatgtactcacagtttataataacagaaaccaacttattacagttgcctttgagctgttacaaatattgttaacactaaatcaagaagctgaactgctaacaagatataaaatgaatccagaaaacatatgcatctaacaagacattttgtattaattataacaagagttatacatatactccctgagatacatatactaggccgattaattaaataaaagaagtccataatttgtcaattaagtctacattttacacgaatatactctgtagatgatatctacgcacaaatttgatgaaacatgctaaaagaaaaaggccagaacttgacacaaatttgtccaatttgtttgatatatgaatatatatatatatannnnnnnnnnnnnnnnnntacgtgcgaggcacgtatactatattttatgc

SEQ ID NO: 100255 - DNA, 986 bp, Cannabis sativa
gagtatgacacgaaaatatcgggcctagggactatgctgggccacaaatattgatacgacatagaacgatccgtattttttatggtacaacacaacacgacctaatttttaaaaaacataaataaatacgagtcgaaccaactagcacgacacgtacgaacttacaacaataactagatgtatgcgtactggagccactcacttgttgtccttgatgtttattagattatataaaactgtctgtaaacctcatgggtatttgtaacaacaaaatataatgtattttttcaattaattgctatatatatatgcatatgctatatctaggtggccctgagttttaatcagagaaagcaggtttcttgaatggctcaaaactcattaagagccctcctctctaactagctttaataactctttttgttttgtttttgttgagagtttaatttcagaaagtatatacaatagatggatcgtacaagattgatttcatttccaacgttttctctgctacttatctgtctcaaccacaaccatacatatacattatatatataggataattctacggggcttacatcattccttatggtatacggctcaaattgtgatccatagattagaataaaaaatgagtatccatgtaactcttgtgaagactcgcatttaatttttttttctcttttttttcattattgttttttttttctttttgaggaaagtactgatatcagtttgttattcaattaagctaattgtttacgtatgttttttggttttcggaaatattttccaaattaaagctgcctaagtaaggtcgtcgtctcttgtctctcagtctgtatcgacaggttcaacaatgacgtagctaactctagcctccaacagcagcagattctatttttctcaacgagggcagctgcaagatctctctccatacaactttaacaaagagaatgggcagagagtctatacaaaatcactac

SEQ ID NO: 100256 - DNA, 876 bp, Cannabis sativa
gtcaacctcctgttacaacctatttaatcaatattcatgcctgaaaacataagtcgtaatattttttttatcaaattatttttacagcgatgttcattatacttacaacatcatctctataaatttttaaaatattttaattagtttacaataccgaaaatagattttatgttttttgaacacacgcgataaactggaatattcagatttttgtttctagtactgtaaactattcaaaaaaaaaattaaaacatacaaggatgatattgtaactataacgaatactggtatgaaaaaaattaaaatatattcttgtatgtgattttaagtatggagattgactaagggccagttttgcacagttgtgctacgagaaaaagtagcaataattgtgctgtgagaacaaacagctgtatcagaactgtggaaaaaaattgagttacgtgtttggtaaatataaatattaaagtgttgtgaatttttaagattctactataataatgagaatgttataatctagtttattataatcataaatttatattaaaaattattgtatataaaaatttattttgatatttttttaattattttttctcacagtataaatttatacacattttataaaaataatttataataatttaaattatatttttataacttgcagtttatagaaaactttaagttgatgtggttggttaataataaaaatgaaaaatataaatataaaatatttttttaaacaaaataaaaaataagaaattaaataggggaattaccccgtatacaatttttttttttaaatttacgatttgggtttctaaagtggttgcagcgctagttgcagtaggggtttctgtacgattttttgtt

SEQ ID NO: 100257 - DNA, 1071 bp, Cannabis sativa
gatcgacacaattactcatactggcgctcgttaattcttccctccattcgtgcacgtggacttgaagaaactcttcttggtaccactccacgaccaaattcatttcttgcaggtacgaacacaattaaccctatttttgatcattagactcgttatgatgctctactaatgagttggcttatgaattctttctctaaggctatgcttggacatgctcttcactgtgaatctgttgctgatatttgaatcgtctttgcaagcctcttcgccactcaattgaaggctcgacagcttcaactttgacttgccatttagagcaccaagaaaagatccatgagtgttgatgagtacacatcttgaagatgaaaaatctaactgattctcttgctgttgctagtcacaaattttcagatcaagaattggctatgtacattcttggaggtgttggccatgaatatgaaacggtggtggttttactggctgcaagagttgatgctctcactcttcaagaagtccaatacatgctccaaaatgaagaaatgctctcactcttcaatgagcttggcctacagcttccctcatgtcccattctttggtgagacaaccttggagctacatctcttgcatccaaccctatgtttcatcaacggacaaaacacattgaagttgatcttcacttcgttagggacagagtgcttgctcatgaacttgacatcagacatgtttcagtagctcaccaaatagcagacagtctcacaaaactacttccacaacttcaatatgacatgtttagagacaagttaacacttcgagagctgagtgtaacttgaggagggtgctagagttagttagtgatcactacaaaaaatcttacttttagtcaaaacaagatttgtgattaaaagtgaaaaaattgtgactaataataaaatattattcttatgttttgactaaaaagtctgtggctaaaggtattagttagagaatcgcacattgctaatgtgtgaaaagataatagaatatataagaggaatggactactcctcccattgccaattggttttgagatgg

SEQ ID NO: 100258 - DNA, 1635 bp, Cannabis sativa
  modified_base (1456)..(1457): a, c, t, g, unknown or other
ttttttttttttttcaattttagactgaaaaactttattttaatgaaaatgggtcgaattttaaaggaagtatacaaaatagaatcctagaaacacaagaaggagaagcttggaatgagtgtgggcgatccgtggcaatcctctatctagtttccttttcttcctctttaattttctatgttcttatttgtgtctagtttaattatggatttgattatgagctaaactcctaatttagaggtttgatagatattgtctaagatcatgatattagttaattattttttttccttgattgtgtgatttattcatctttatatttattacatgtttaaccttgatcacctttttcatgatttatgatcctaatgtaaaatttgaaaagtgaatattaaaaatgctctaaataaataaaatataggttttgatgtgaaacgaaagtatttaaatagctaatgtgacttttagattattgcttaatgtaaattgtatgttgttctatcacagaaatgcagtagttgacatgcagtttatgacatttatgatctaaaaagaataggttaatttataatttctcatcatataggaggaagaagaatggttaattagtattaatgattgggtaatcaaagtaattgaaattatatccctaattttacattcattgttaaactatatttgtttgttttatttaatttatttagtttaaaagtttatttacttatttgctaaataaaaataataatttaattaattttattattattacttgtaaacgatacgtagtaattttggcaatgctaacataattttgtattcaaagtttgtacgatcttttcagacacaaaaataggaaaaaaaatatcatttattttcttgatattaattaaatattgattgttatgttacataatatagctatatacaatatagattataattgcatttttgttattcaagtgagttaaaaggccattatcgtagttttgtttctattaaattaataagagttcttgtctaaaagacaaaactaaaaatcattctttaatagtttgttattttgatcaaaatggttgattattggatgatttatttatatttatatttttttaaaaaaatacaagattattttaaagacatatccactaacattttcgagtgaaaaaatcaacaaaactaatgatgatatccttaattatataatttatagattttggtaaaagtgatttgtatttatttattttccttcatgtccctttcatctgaattttgatggattttcctctcatgaaaatgcaaagtagaaaagttagtttactactttcttacaagatgacactccactaagtttaaagcattatctaaaacactaacgataaatatgaacatggtcattctactctctctctcttttttaataaaaataagatctattaattaataaattcgttcaaannaatagaacgcacttcagaggaacaatctctaactgaagcacacgacctgtagagaaacaagagtctcttatcaagcaatgagcaacttatttgcggatcgttttacaaaacacaaattgtgaaggcataaaataccgttctgaatcgcttggacacacaccaagctatctgtttctaa

SEQ ID NO: 100259 - DNA, 700 bp, Cannabis sativa
atgcatataatggagaacgtattcttgactcaattcataaaccctaaatcgggaaacgtccaataccttcgggaaatcttctggcaagggtctgatttcaaatcttgaaagagggttgattagacgtatggtaccaggtacgctttcttccattttgataagccagtgacctgagcttggttgattagtatttccaggcgagccaatgagaaaaatccggcgtttggctaggttgaaaccccggatggtattggacatgccgtcgtttgggaggggaaatcgacccagtaaatttcgaagcctggaagagacagatgatctccatgaagaacaaacggatcggaaacgaagcagataaagtgggctgtctaagcgtttggcgatttccacaagcagatcagcgggaagttgagaccaattcgccatggagaaagtttttccagggaaaattttggctagaaaatgggaaaaagaccacacaaaaaaaaaattaaatgccatcagtcatcaatacttttgtacgagtatcaatcaccaacaaatatagacacgtgtcagatttttgtcatgaactaatggttggtttgatcgatttttacaaaagaaaacaaaaaaaaaattgaaaattctgtttttggttttcatgagtataatctgaaagggaaatttgattttctatacttagaaaatcaaaaaattt

SEQ ID NO: 100260 - DNA, 865 bp, Cannabis sativa
atttctcataaaccaagaattttagttatataggcacactttatatagaatagatataaataataggaacagtaaaagtctaaaagtaaaaaacaagtatttgtgtaaaagccgtaacaaattaagcacacattgggccttagaaagcccattaaggaaaacaaaggcccaaagagttatatcaaggcccagcctgcagaaagcttgagtcaaaattgtgatgtgttatgttattgttattaattaacatcatcattttcaatcactatcaacaatacatcatcactatttggttgcgttttggaaattacttatcaatcatccactttatttttaatagagcctaactaaggtcactccaatctatctacatatctatcaatacatatctcaaacaaaaaatttccatcacaaaatttccctttcttttttctacttccaattaaccttttttctcctttttctcttttgatacttttattactaaataaaaagaaaaaaaaaaactacataaaaatgaaaaattgtgattaacattttagcaatgtgatactttcttttctttcacttcaaaagtacttacatggtaaagattttcaaagataaaactaatattaactaccatttaacttagtgcttttcgattattaaagtcaatgggattctttttttttttttaaaaaaaaaaaatcaagataatatagaatgcctattttatatattattctttggtcccattgaagctgtgtcttatcaattgcaaatcctgatcagagcccaccacaatttctggtttgttttggcttaactttggtgttgatgtgtttattttagataaattattcatgtatttttaaattaagag

SEQ ID NO: 100261 - DNA, 1921 bp, Cannabis sativa
taccaagaaaaccccatatgagattattcataccttgtcaattttttccttccagactcttctgacaaaaccatcgaatatagacattggggggttagccccaagcacataacacacaatagaaggagtccaaaaatcaatctcttcctgtataccctcacgggtaatcttaattttctgctttgagggtgaaccagagaaacttggttctaggtttcgaattatgctaccagatctcagaacagggggtataacagtcgtacctcttgcaacagcagttgcagatagatgttgtgcctccctgaattgttttgcctccatcagttgtgcgaattccagtcgaatactctccctcagtgaagcctcctgttccatttgaactcccgcttcatgttctgtatcctgatcttcgacttcaccctcttctgcatccgaaaagatgataggttcaattcctaacacctcatccatagtcttggtcttcttcccatctgctgaggaatcaggaccacgttttttcttcttcttcgctgtgaccttggcttgccctacttcgtcgccctcgtctttgccatagcagcagctcaaagagctgagagaaagctagagagagaaagcttttttttttttgaaggaacaagaatactttttattttttttatttttttttcatttattctcttataaaaacatatgtaatttttttctgttaattctaccatttctattatttgtaggggtgctcataaaatagtcgatccaatccgcaaagtgtggatatccgcacttgtccagattgaattggataggaaaattcaaaatctgcacttgtgcggattgaatattgattgacatgtaaaagtaaccgatccaattcaatccacatatttttatacaaaatattaaaaaaattatgtatacaatttaagttttaatgtaaagaaaatagtaatttaaaaatctaatacatgtaatacacatatttgaaaacttaatagatcaaatgtatattccattcttatatataatattcttttctacatataatttaaaacaaaattaaacatttctttatatatacaatttttttttcttcttttgaatttgttatttattattttgtttagtttaatttgttttcgtagtaataaaataacaataatttattttatcttattgctagttatttgaaaaaaaaatatattttttcataaataataaataatttaatattaaaaaataatcaatccaaaataaccgatctaatctacacttttgcaggttagattagattgaatttaagctattgtacaaattgaattggatccaaaatatgaactctgcacttagtacggatcagatacactatgatcaaaatagtacggatgaaataagataaacacccctaataatttgtcgcaaaatcgtcatatttctctgtactttaaaaaaaaaatacatttttaattttaatactattactttatttataatatacacatcaaaatattatattttaaattatatcactcaataaatataaaacatatatacatataaattataaaatttagacaacattgcctaaagcacaacttaattccttaatttgtgggcataaaaacatatattggaggagattagtgctacatcaacaaattgttttgatacaaatgagataatttaacacatgcaagcatgcatgcatatttacaccgattaacaacagaggtgttgccgccacaatctcaagcatgggtgaagaatttcccaggtcaatcattttgcagttgcaactgcataatttgagatgtgttagagcaagtccatggagacactataacatcaatatggtgtaaattctttctccaaggtaacactaaatccttcactaatttgctgtatatactacagtgcacgg

SEQ ID NO: 100262 - DNA, 934 bp, Cannabis sativa
atacgacttaatacggcgttccaaacgagccctttagctgttatttactttctttccacttttctatcatatatttatttcctccacttttcttccctaacaaacatagagaaaaaaagacacaagtgtaccaaaaagtcaattaataacaaatgataagtgcacaaaataacaaaattaagttaattttgcgtccttctattaagtaaactaatatatatttctaactaacactataattggtaagaaggagagatgggtaaatagggatgagtggagggagggagtagaaagaagaggtgaaatctattgtttagtaggagagagaaagggagggagaaggtctctctccaaatccaaaaaatctaatccctcatatcaaaattatcctttaattttttctcaaaaaaaaaaaatatcctaaaaaaaataataatagatatttatactaaaaagaatattatagtaattttaataacctacttcctcatcatgcattctcccaaaaaactcttactctctactcatcatactctcactccatcctaccaaatataacctaaatttaattttattatttgaactaattcctaattagctgcataaaatcttagtatatattttgtagctagaatttcaacatgaacaattttttttttaacagaacgtgagcaatttaatatattaatcatcacgtgttgtgtgggtagtggtaaagatattatttctcacatgctctttgctgatgacagttatatatactgtcgagccaataaacgcaatgtaattcgcttactggatttatttgaggatgcctctaatactccattttctttagttctaatactcccatgacactcgacatagtgtctgtgggttacttggtatggctgagatggataataacagccttcatcttggcttttcttgtaca

SEQ ID NO: 100263 - DNA, 543 bp, Cannabis sativa
  modified_base (28)..(40): a, c, t, g, unknown or other
  modified_base (67)..(79): a, c, t, g, unknown or other
aaatttttctgtgtgacagtatttttgnnnnnnnnnnnnngtgtgacagtatttttgtaaaagtgannnnnnnnnnnnntatttttgtaaatttcccttaaattataaggagtgacactttaaggtttaggttaagaggtgaattctatattaattacttactaaattatatgacatacatctttgctatagttttaagttccctctaatatttatctattataactatatgctcttctaaatgtttcacaaaaataatgttagatctattgaaaaatttaaataaaattttgggtgtgtttagttggggatattaagaatgagaatataaaaaaatagaaattaaatgaaataaaaattagtttgtataatgacttttcttcctattttaccaaaaatgtgaaatattttgaaattttgttatttaatattactaagttttatttatttaaattaaaaaattaattgttgtagtattgtgaatgaaatattcaaacaaaaactcgttgtgattaaacagattatcatagagaatataaaatg

SEQ ID NO: 100264 - DNA, 2127 bp, Cannabis sativa
  modified_base (2085)..(2085): a, c, t, g, unknown or other
ttaatatgtacatatccttaatctctttatttataattttaacttttttttttcaattatacataactttttaagcttatttttcacttgttgcgcaccgcttaggtaatgttttcccatagttcttactcttttatttttctcaaactaaataaaattatgataataagttgtgtttttttgtcatatttagagttgtgcgttttgttttatttgtacctactattaatgtttttgtcatttcttttttttttaacctcaaattttttttcttcaaaattttttactccatttttgcttttgattttttcagatctcttttacaagttttaatcaaatttttcgtatttattttttcaattttcttactagtaaatatataatagtataaataagactataaaatcatacatatcatattaattattttgttattattcttttttttttttaaataaagttttgttaattattattttttttttcaaaactatgcttatttcaaataatagtagaacaaattatatagacctacatttagacagcacgattaatgatcttaactttaataaaagaatctataccactcatttgttaaacataacttcttttagcaattgtttaaacataattactgaaactaagatatataattataagcgacaaattataacaagagttatgtatctctagcacgtcctccacaactaaaatatatatatatatatatatggaacatttttcaatgagtattattcattaatggttattaaataatttaactataaatattattttttttttttgagaaatcagtcgtgtttttcattactccaatacaattttacaacccattcaacaccctttttcaaaggcctgaaattagctttctataaatattaattttaaaaatattaaactattagattttgatctaatgacgcataataaaagaaaatttttaatttttatgtttaatttaattacttaattaaaaatataaaaaaatatcattttttacactatataaaaaatatacttacatataaaatacttaagtcaaatttaactttttttttgccgaaaaactttttttcttaattctttttttagccgatggaataaccctaactcatataatgtaaaaataagagaattttttaattagatagaaaaattaagcataaaaactcaaaatttcataatattatccataaataggtaatacccattaaaaatgcacccatatatataaactaaagagagtaaaataaacttatcaattttcagattaataattgcttgtaatcaatactcattattcaataaataaacttggtccataactttaaggtgtgtttgttttggttattgagattataaatgttttttttactgttatatgctgattatttcatttttaatgttaatttgtatattttgtctactaaaagtagtataaaagttgtgttttacccattttgcatttgtcaccttagggtgcttttttttttttaaataaaaagtaaatatagtgtgatgggaaactggtggttgtcacatctgtggcaatttcttaccttttttttaattacaatcaaattaagaaaaaaagtgttatataatccttctttttactacaattgttattcacttcctcttttttatttttattttttcagtttttgaaaattttagcttgatttgtgtatgttgcagttgtaagtttgttgtagtttcttttagatcacttttttatttttcaaagtccattttctctcttactatattatcatccatctcatagtaaaaacatagtatattaggattgttctatggtagcgtttggttggaggtaataaaatagaatggaatagaaaggaaataattttcattccattcttttgtttaattgcattttaaagtattggaatgacattccaatggaatgctctttccaccattttggtggaacgactattcaatttttaaaagaaaggaatgaccattctaatggtacaaggaaaaaaaatcaatgatttttttatcaattttttttgtgcattttaaattttattccattcnattcctattcctattcctattttcattcctattcatatattt

SEQ ID NO: 100265 - DNA, 1646 bp, Cannabis sativa
agctcagctaattagttttaattaactaattagaattttaaattaaactatgtcttgtttaagaaatttttactaagcaagggcttaattgagaagaaagaagattttaggagggttttttattatttgttaattacgagagagactttataaagtctcgttaataaataagttaaatggaaattttatttattaattaattataattattaaataagtagatttgatatttaaagggttaaaattaaaaaatagcatttgtgaaagaaaaagataagttgttaaataaatggcaaaattgaaacttgtggagtccactagtatggcgagccacttaaggcttatttagctattatttgatattttttaattctatataatttaaattgacttagtataagaggaatcctataaataaataatgataggctcataacctaacagcataagctcctaagactattctatcaaatagctgaaaaagagcctctctattgattttgaattctctctctattctctcttctaaatttcaaagtaccctatagtgaagagtaccttgcccagacatatcaagccaatactcaatcatagtgtggaggattgtgaagaattccattacctgagaagatctaggttcagatcttgttaatactctacggtagaaaggaacaagggttatagatctgaatggaaggagccttaatattcttctaccactaatgtaacattttctagaactttatatgtgtgttaattcattgtgttaggacattcatgattaggatatgagattattgaatataatcaaacatacatgttaatctagatcttggtaaaacaagttccaacactcatccccttggtattataacagtaaaagaggtcttgttcatcccctctgaagtcatagcagcagatgaggtcttcttggcgagtgacaatgatgcgttgtaacactcgcaggcagttccttgattttcgagacattcgataccactcgttgttaggaacttgacggacaagtggtattctgaggagatgactcaaaggtcataatgggtaggccttccaagcatcacgttttacagagacttcacatgcacctctataaatgtggtcgtgatgggtgtctgccttggggcagtgctgactataagttctagcttgatcttgctacatggaggaatgtcagctccgctaaaaccatacgttagttgttcgcatggttccaagtcttctaaagttaagcccatcatgagcagggcttgctagaataggatgcttgatgatgcttcatcattgatcattaccctagacaccatcatattagctattttgacctcaaaaactaaaggattgttgtgagggtggctaacatgataagagttaaatgctctaaaggtgattggttcacatctgtaacattgagactttggaggacatattgctacctctaggactttggctcttggttcatgtcaacttgctcttgcatacctttctaaggccttccttgaattcctagataagggagcgcctccaatcaccatctctaacctactggtaattggtgcaggctggagtggagcattccccctagctagagcttcaggtcgtacataccgctaaagagcaacatgttt

SEQ ID NO: 100266 - DNA, 671 bp, Cannabis sativa
taaaataaataatagtaataattaaggccagaagatttttatattattttgtagttaaatctacatagtccatgagtccatattattttttaattatctatctttacaaaatacaagatattcaatattaactgtatgaaatactgagtttctatcgttgttctttaagagtaatttttcttgaaccccaactgtacttatatcgtaggttctctccctatttataggattttttagaataaaaattattctcttttggtcttatctagacacctgcttaggaaacatgcccatgtttcatatttacaacatgtagaataaataaattaactgctataaccactttttatccttacctaaaaacattttcatggtcgagataacatacccagaatatgcctcacattcttcaataatgttaggaatgactacgcgaattttgcgagacgctagttgaggtattttctttacttttgttgtctaagacaagtcttaagataacccttaggattgtatctattttgctccttagagttaatcctctcacgttgtttatgagcttttcgagatgaatcctcttttgctcatatcccttagtctttcaatatattcatgagtatgtagatcgataagttgcaagctcctacagaactcgttatctaccctatcta

SEQ ID NO: 100267 - DNA, 1178 bp, Cannabis sativa
  modified_base (48)..(65): a, c, t, g, unknown or other
ccatgcaacataaaagtgatttctgatctttattaattagaaaatctnnnnnnnnnnnnnnnnnntttatttatggcacaaaacccaacacatatctggttttgatttttttgttggtttttctttttttttgtttttctattttaaaggtggttcttttggatctaattttttgtatttttaatttaatttgggtttttgtttattttatgagatttggatttgatatggtgacatatgtattgtgtagatttgtttatttgcgtttggatttaaaatgtgggattgtgtttgggtcatggtaaatgattatgctattatgttgggtttgtgatcttaaaaagaggttttagtggtggtgggcagttttggtggtttgtggttgtggatggtggtggtggtggtgattgtttgaagaagaatgacgaaaaagaaaaaaattctagaaaaaaataaatagtagaaaagaaagaaaaaaattgtttttatatttttaaattaatttatttttattttattttaaatatttatgtacgtgtgccaataacatagtaccatgtgtacattgtgtccacgtaaacaatactctatgtactcatggataaccaagtcggcggttaataactaaaaatagatagaaagagcgaagtataagaacttagatttatgaggttttaccgtcaaaaaataaattttaggagttaattactaacaaaataagactttaagagttttgccgtacttaactctactataaatcctaacaataactaaagaaatattcttatgaagaaaaagaaaaccccaagaaatatgatcgattgatgggtacatagtctcttacaaataatttgcatgaaaatacaaaataatcaagtgaagggtgtccttttaaaaaacaaaaaattggtgattaggggtttatgtcgatgattagattataacatactttcactaatactatataaattgggttacaaatttttaactgtagctcatctaattaaaaattaaaaaatatttaatttgcctgaatttttttaagaaatttgtggtaaattttaaatatcaactttaatattcaaatataatataaaaattattagatataaagtttaattttcaagttaaacactataaaatttaaactttaaatacaaaatagtttcactaataaa

SEQ ID NO: 100268 - DNA, 768 bp, Cannabis sativa
tatggtctgtattctatcctcagttaaggcttttacatctaattttttttctagttcctgttgacaaaatttggagttggttgtgtcgtttttcctggaaaaatcataactatgatttccaacttaatgtttttttctttttggcttgtttgatccataatttcctcatggatcaagcttgaaattagagagaaatgaggtgattatagtcagctctagttgtttttggttttgtttttcatgagtctggacagttagtttgtttcaagtttagttcttttcagatcaaaaatttcctaatctctctatctctcttgtgtattgtgttcttgtcttactgaaaagaaacttatacacagaaaacttaagcaaagaagcttgcattttctagactcactcttcaacaagcttattcatgtttagaggattgtagtagaaatcatagtctgtgcacataattttattagtatttttagtgttcaggccaggattgtaattgtggctgcacttgtaaagggttgttgagttgtcagctgtataattataggaagagaaatgagatggatcaggagtaataattgatatgttcacaacggaaattagagaatctgagtgagagatggtgtcaatgtcaattctataccagtaaccttctgctttcaattggatcttcagtccatcttcaaaacatttcagtttgagcaccccacattcatggttcatcctattgataaaaggagactccatctggtcatcatctccacaaag

SEQ ID NO: 100269 - DNA, 1147 bp, Cannabis sativa
ttttcatgaattttgtgcaattcatttggattcaatcttgtaatgacacactctctatactaagctaaaagttcataaccaaacttaggagttgataaatattaaaatgtaccaatttgtcatcccactgttaagaatttggaagtcatgtggtggacgaaggtagaatagggtgtgtgtataaaaagttgtatgatattttatctcaaaaccaatcgataatggtaggagtagctcatacatcttatatatgatattaagtttctacattatcaatgtagaattctctaatattctccttaagatggtggctattttttgctcaccaatcttagacgactaggtcaaaagtgacacttttggctcctcgaatcacaagcaattattttggttcctttttttggaatggttattggatttagatcggatagtcgttagatttttatttggctttaatactatgttaagaattttgaagtgtggtagataaaaataaaataatatgtgtatggaaagataaaaaggtatgacattatatctcaaaactaatttagtatattagattatgatggttgcaatatttatattatacaactatactaccatgcatgcataggtttgacaaaaagtaaatgattattaataaattaaaaatgtaaattattgcaaaaaaaatccaaaaatcattaatggtaatattaaaaatttaaaaatgtatattaaaacttatcattaataattactagcaaaattataatttaaaaaaatgtatttattgtgtgctaagtttagcacaataatatattttaggtcaaaattgatataatttttaacatagaccaaatttagcacaaaatttagtaaggatagttaatattataaaaaaaaaatgctaaagtatagcactacacactattttagcactttattaaagatgctataggatattgagtcatctattgaaagtagtataagtgttttgagctatattttagctttatagctattatacttatttattcagaatgcttttaggccaatttcgtgtctttaaattgttgtgtactgtcccctttttagtcttttattttgggaaatttgatttccatgcaaatttgaggggtaaaattaattaggtaaattagta

SEQ ID NO: 100270 - DNA, 2434 bp, Cannabis sativa
gtggacatcccagggctcaacttgcgttcagtatcagtgttgggcacccgggttgacatcatgtgcgccatctcgcatcaattttagttcccatcaacatctaatggtcaatctgcttagccattgtcctaagatacatgagagaaatgcctcagccaagctttaaaatttgaagatgagtctacatgaaatgacactcaggcacccggaagccctaatggacacccaagttaacatatagtcaatctaggcgcaccgtggctagggtttaaattttggggacatacttggacccaaattcctcaaatccatcaaggaacatagcaaggacatgaaatttcataaataaataaaagtgatgaataagagtagagattgatatcatgcgcctctattctcgtgcaaatcagccactattccttctctcctctctccatgcatgtgccacatggcacttttccattcatcagccactttttagcttcttaggttcccagggtgccaagcatgcaacttgtatagaaaataattaaagcaaagcattaagggatcgtttgttacaaagtttgacttgatgggaatcagtttagcatttcttggacattaaaaacgggaatattaaagcataggaatgcaagattaatttgtttggttgtgtataaaaaactaccttactaaaagttttgatatttttataaaaaaaattatttattattaaataatcatcaaaaattatatatatttcagcggaagaattttttcattcaaaaaaagaaaaagttcaattaaatatatatggaagtataatgattttcattttttattccatacattttatttttaaatatcattcacttattccaatgtcatataattgtatatatagataaaattatatgtaatattttaataaaatttagtacagctcacgttaaaaaaaatacagtagtattttgtctattcgagtaatattaaactcaaaaattggaaggagtagacattacccccaaatcaatgtcatcttaagccatgacaaaccaagcaccccggtaaaaaaattaaaaaaacaataccaaacacaagttggatttcattttcctattcccatgctaataaatccccataccaaaggggccctaagtgctccactttcccatagttctccatcatgatgaagtcatgcatgcttagtacattaattgcaatatatatcacttgagaacttttgttttatcctatgcacaaagaaaggaagaagcaagtaaatatatatcatcttttccttattcttctcccaatcacaacctaccacatgtaaactattttgtcttcatctctccaagagtcacccctagcttggcattgaaaagaaatatcatcttccaacaacatagttaataataatattattaataaataagattttatttttaatattattttttattattcctaagaccttaatttatttttattttgcttttaagtcattttaagactctataaataagagttcattttagttgtttaagtgtaacttggagagtatttaggtgtctttacgattaggagtgcttatgacatgttgcagaaccagaaacatgggcaccatggtgtgaacaactcaggttttttgtataagctatggcatcttaaaattccccttaaggtaaagaatttcatgtggagggtcgtcacaaatactctccctacatgcctcgaacttgcttctaaacacatcaggatatctcctatgtgtcctgtatgccaccattgtgcagaatcagcctcccatattcttttaagttgtagtttcgcaactagctgctgggataaagctatgttgatagctcacattgatacaacatcaactattggtcattggcttgaccttatgtttaacagttatgatgatgatgtttcttgtcgtgctatcatgatttgttgggctttatggaagtcacgaaatactattgtttgggacaaaaaagcttcattcccaacacaggttctcacatcaacatggactacacttgaccattggcgtaaagctcaagataaaaattgtttattatcattatatctcttacatcatgataataaaattgagcgatatactaaacccgcttcaaacacagttaagatcaatattgatggagcctttttgagaaagaaattgcatacagttttggagtagtggctcgtgattcggttggtcaccttatcgacataacaaccaaataccaaggtggcacttatgcggctgaagtcattgaggctcttggagttaaggaggcacttagttggttaaaagtcaagggcaggagtaaggttgaagtggagactgatagcatgattatggttcaagcaatctttagtaagcaacaaatgacttttgtttttaggttgtttattaatgattgtaaaagtttat

SEQ ID NO: 100271 - DNA, 531 bp, Cannabis sativa
atctttgtctttgtctttgttcttctaattaattatttaattaattttactttctattttcaatctatacgcatttcgtttacgtttctagctcataataaatagggaattaattaatactaagccataattcacccaatctaagctatatttcaaaaactcattaacataaaacacgttatgagcttttttttttcccttaagagtcaatatgaggagggtttaattcaagatgatcatgactttgtttttatttttaaacttgtaactgtagtatagttagaaaattattggaaacttgaaatgaatgatacgaatatataaaaattcttattgcaactagcgtagaaaatattatgttcattttcaattatatatatgtagaagatatgaaatattttttttcatatatattgtagttagagtagagaatattatgtccattttcgataaattttgaataatttaggtgccgtttggtaacacttttgttttataatttttttaatcaaaaaatgaaagtaaaatttt

SEQ ID NO: 100272 - DNA, 764 bp, Cannabis sativa
tatatatatatcttcaaatgtggaccccacgtactatacctttttctcctatttttagttgtgtatatgtctgtgtctatatatatttatgtgtttatatagacagagggacatagaatgagactgaatgagctggtggtttaattggaccattcatttcatatatatatccatggaaccatagctcagtccttgcatgcatgggctcacccaagccaacatttattattacttgttaataaattatatatatatttatatatatgtaggtgtcatgcatgtagtgtcaaaattattttttgtagtaaatttattaataccaaagtaaagaataattaatacaaaacaactacacatgtcacaaagctcaaaatcaatatttatctacgttttcttttaagggaatgaaattatatatcctgttagtattattatttttttattatttatgtaacaattaaatattttcaaaatcacatattcacggtacaaaaaaaccattatatttttgacaaacattcctcttatactccttatttatgaaaataagtataacttatcaaaaattaaacttaaattacgtaatactttgaaacatttccttaaattttcccgaaaatatctcattgatcgaatcctacccttaaaattctaagacatattgttgctataattttaaacactacgcaagtatacgcaatcaagtagtaaatctcacacaggtgaggtcgatcccacagggaattggattaagtaccactaaa

SEQ ID NO: 100273 - DNA, 2208 bp, Cannabis sativa
ctctctctctctctctctctcatatgtggcaatgacgaccaccaccacttctctcactcctttcttctttgaccatttgacccaacaatctctaaaaacccttactgagccaccaccactgcgtcttgggttacggatcaccactaagccaccaccaccgagtgaccgtcgagaaattcgttgtcgacagatatttatatattttgtttatttattaatttgtaaatattttatttatttattactttataaattatatttttatatatttgtttatttatatattcatgaatttttaaagttatttttttttacagatttatgtttatatatttgtgagtattttaatttgaattaaaggtatatttgttagtttaattgaatatgctaaatattaaatatataaatgaattagatgtactagaattttattttgataaagttagcttttttttttttgaagtaactgtaacaaaagagagaaaaatcaaagaaaccacgaaaccgttacaaaagtaggaagggaaagctaaatcctccaaacccaatccttatcctgccttaaagcttccctagcattttgatgggcatcacagttattattccttgagatgtggtgaagagaagaattagggaatggagataaggatttctaaattaactcaataacactgggcaaagctaagttgtccttctaagagctcttaacctttgagatcaactgtaaacaatttgattcaatatatacaagaggaagcttgattgcagtacaccaatgaaggccctccaaaagggcttgagcttcagcaaaaaggggtgtagaggcaccccattttgagagagaaaaacttgtaattgggtggttctggctgtttcgaattgaagcccccagacctgttctaagctacactaaatcaagggcagcatcaacagtaattgaccatgtttgagagaatgagatgctggttcattttgtgaagttggggcctgatccgatgcaatgtattccaaagggctgaggtggggttgtgagagtttggacttcttgataattctacaataatgaacaaacaaattcttccacctcaatgggattgttagtagttcggttaaagagagcattgtttctcctgttccaaatcaaccaaattaagctaataaatagagtgaaagtatcattattaaggtaatctaagcctcttggataaatttttttaatatcacaattaaaatttgaaagataaaaggctttgagagaagaatgtttccacacagacttagccctgggacagtggagaagggcatgggtaatcgactctacattgttgtttaaaaatgggcagtagaggctagcaagagatttcttatggaaaaggttcagactacaaggaagaatgtggtagaaagctttctaggtgaagtgttttatttttgggagggttttggtgttccaaacggttatccaccagtgtttaaagcagtcagtattggatgaagatggtaatgttaatgtggggctggagttggctaaatggtaggcataattgacagtgaaatttccagagggatgatgcttccaaattagggtatcatttgaggaagggtcaatggggatcttgagaatctcttggacctgatatggaggcaaaaattggtgaagtttagagaaattccagcaactatcattatcaatgaaaacaagacattgtgatcaggatgattaaagttatgcaagaaagataccgagtgcaaacctgggacccagttagggtcggtcaaggagtggacctgccagttcccacttttcaaacaaggcctttctataggagctccctcccccataagagacttctccaggtatttgaagcacaatgacctttaggggcattaagaaaatcattattttttaagtatctagctttaaggagagtgtgaagcaaggaggaagggttggcccatattctccaagcttgcttggcaattaaggcttggttgtgattcgtaagggatctgaagcctaggcctccataaaatttagaagtgcaaagggtggaccagtttttccagtgtatcttgcttttgttactgcaagaaccccaccagaacctagcaataagtttatgcagggtgtgacaggtggttttggggagtttgaagcaagacatagcaaacgatggtatagtctggaccacaaccttgataagagtt

SEQ ID NO: 100274 - DNA, 1639 bp, Cannabis sativa
ttgaaaaaaaaaaaaaaaaatcttgagattaatcaatttcctctaataccaactaacatcaagttttagcttataatcccagaagtcctagtttctcagataaattgcattaatctacttcacctagagatcgtcctgctttgttgtgatagcctaaatatatttggttggatcatgttactttgcagaatcagtcatcattccaagaattagccaaagtgacatatccatgtatactgtgtaggtatgagactacacaactgaagttaaggcgttacaagatcccttgtgggaaaatgaccttttgccattagctaaaaaagaataataatctatccttaggaatagacaaatgacaccatagagattgaaaattttcaaccttaacacattagctagaaagttatcagataatttgctgattttgaatttgtcactcttgtcggcttctaagatttcctcttgaaaaaaaaagtttcttgagattaaccaatttcctttaacaccatctaacatcaattttcagctcatattccaagaagtcttgatttttttaacaaattgtatcaatccactttactaagagattatcctgctttattgtgatagcccaaacatatttggctagaagttttattcgatttaactccttcctgaaggcccacttcaccaaaagactttggtttactcccaagaagtaatgtgaagcttgctcgagttacctttaactactaacaaaaagtttctatataatatgtaaatctcttcaatcacaagttgaggtaacaaaaagatacccatccaatagtattttatgtcaatcaacactaaatgaaccttttttattttttggaatggaaatgaacctaatttttagtacttaaactatttggattttttttaaaaaaatttacaaacgattttaaataactacaacgtacataattaatcatgaaaaaaataagactaaaaagttatcatgaatgttgaaaacataaagagtataccaaaattattcttttaagaaatatactattgttaagcaaaaattccacatttagaaattaaaaataaatgcaaaacacaatttcacctatgctaaatttatagcataagagtttattaattttaagttcgacccatccaagattaaaagaataattacgtactgggttggttggctgaacatttttgtgatctttatagtggttggagctccctaattgacttgccctttttaagtatgctggagtgccacttgaagatcgaagtttgaacacagcctgtcgtatcttgaggaaagaagatcatgtcattcaccgaccatcttgctgaagaagatgttgattgtatagaccatgaagacttatctgatgatagatttgaaatgcttgtttctatgcgttcatttatgttttctgtgagagtaggcaaggacttattcattgaaccatattttcccaatagattcgctcgccagtttggatttgatcaaggtgtgtcacttcgttctagtttttcttggaggacacaatgtgggataattattgttgctgaagcttgggcattactattgagaaggaacactagtattcaccttcatattcccagtattactcgcatgggtcagtgtacttgg

SEQ ID NO: 100275 - DNA, 1006 bp, Cannabis sativa
ttttagtgtgtgaaccatgcacggtatttttgggtttcaagctggttaagccattgttttctttttattagtttcaggcattgaataagaaagttacgttgtgatgaggatgacgagacacggcagaatatttcagtcatttaaacaaagttatttttataaataatttgataatatagtatattattgaaaaagtcccataagttaaccatattcgtagctttctaaggaaatatatattttttaattggaaaagcttcatcccaattatctccttttagaaaatttacatcacattcagttatggtaggtttgcggactgctttggcttgatattagataccaaaactatcaaaacaacctacttatttaatgtatggaaactttccttacaaaaataaatgtatggaaacttgtactctcatcatttttatctatatgttttaataattgtgtaggcgcacgtgccctatactgctagtatatacatatgatatttcttactttccaatctaaataactttaatgcataatttaatggtataattataggttggatttttttaatacgggataaaattggcacaaactttggaagtacgagcacaactcaatataaaaaaaaaaattggttaaacacgacacgatatggcatgaaaaatataaatttaagtacgacacatcataataagctcgaatatacgacacgcaagcacaaatggattagcatatgatgttccttactttccaatttaaaaaactatatcacataattcagtgctataaatatagggcagactttttgacacgacacgagctcaagaggcacataaaaaaatataaatttagacacgacacaatatgacataaaaaatatagatcttcacaacacgacatgacaagattgaaagtacgatacgtaagcacgaatagagtagcttgaaaacatagcacattaaaaagttctatagtttgataataataaaaatgacaaatatatatttat

SEQ ID NO: 100276 - DNA, 604 bp, Cannabis sativa
gtttcttaggcaataagattctcaaatgggaaaattaaaatgcagcaaatgtttaagaatccattgtttgtcaaatgaactctacaacattaaattaatactttgattgaacagtgacaaaaagcggaaggaaaatctattgttctggaaatctgtgttgttctgcaataagaatgaattagcattatgctttaattagcgtggtgaataactaattaaatcgttatgctttgttacatgaagtcctacctctataaaattgtctcgtcattttcttactgctttcttataatgtatagaagccaataatattcattgaaaaagtttgacaagattacatttttctatgcagatgttgatctatgagtttatggccaatggcaccctaagggatcacctttctggtaaaaatctatatttcttcaaatataccttcaaattcaattgttctcctctatttttagcagagcttccttaagcatgtcaaaactgtaatgaactgcaagctgtttttcccattaatgccataacttttagtttgcttgctttgctactgacacaagttatgaaataattgatctttgtatggcagtcaaatccaaag

SEQ ID NO: 100277 - DNA, 1553 bp, Cannabis sativa
ttttttttttttttttgaacagttcaagaaaattagtcaagtacgtacattttgaaaaagaaaatgattgcatgtattgtaatattattaattcaaaagatgctattatctcactgttttgtaaaattactatattgtaattatttgtcatgtaccaaagcttattaattataatgggcctagtacttagcaatctgttcctcatttttatattaacaaaggctagggttttggattaaattaagatcaaatttactagctagcacagatacatagaacaacaatacaagtagttttaaatggaagaatatagaagtttgtgtttaattaaataagaaatatggaacatacagagaggtagggaatctctttgcatcgtgaatgagctgctgtctggcttttagcagcagccatcaatgcgtgccaaccacatgccttcatcaacccttccatgcgcttctaactctaatgcttacttatttcacgtgcaagacacacgaatttgtacatatataagttcagtttcaaattttatttaagcaaaaataaaaactaaaaaaaatattattaattgatacatatataagttcagttttaaagttgtcattttattccataatttataatattttttaaatttaaataaatagtacatctttcaaatttgttttacatagacaaaattgagtactaataaaagtttgtaactgacgaaaacttgattttatttccatcaacctgataatgtatataacattaattaataaggtacaagtagttcagactacaaactatatgttatttgtttaatgaatttaacatttcaaaaagtagtgaaaattttggataaaagaacataaaaccaaatagaaaaaatatatacaaatgtttttttttttttttttgaaatgatcacaaatgttgttaatttgtaaatgattataaatcataatcaaacatttgtttatatttataaaatgatacaaaatttacctactatataatgcattttttatatgtagattatagaaatatataattcattttttttttcctttcttttagacgtttatcttgagtcattttgttgatagggagacattttaaacatggtgaataatttgaggatgtagtgagtgaggtatctgggatgaagaaatgacatctgtgcataatatgtggctagctagctagaaaatgatcaactcattgattcttttatataagtttttcttatggttttttgaatcctatctatagtttcaattccgaccacactatattatattatagaaatggagtcacacactccttccacaagtacatcaactaactctgcgtgtgtgtttttctaatggatatataatacataattcattttcttattagcataaatattttatattcacgaactaataaaaaaatgtacagatagaaaaggacgaagagggatgtatacatgtgttttgtgtactatatatatacaaaacatgtacgcctattaattaaacaagttaattttcgccgtcagatctgaaagtacggatactaat

SEQ ID NO: 100278 - DNA, 1332 bp, Cannabis sativa
  modified_base (1306)..(1307): a, c, t, g, unknown or other
cataagtgtaattcagccatgggttggattttaagcccaattgtctttattttatcccatctcatctaaaactaacccaaagtgatggctatataaaggatgtaatgagagaaagcttaagtgattctattctaacctaatttctaaatcttacacaaaagaatctctcatccccttaatattgccaaaaattacatagtatttctctctaaaaaagtgttccaaaggtgaactaagtaccaacccacactatttacaccaagagtagacctaatgatatggacatgaatgtttgacacgtggcaagaaagatgacatctcgcagctgagtagtccccagtcataacaggtcgaattgggagggtccatagccctgcgcccaagttgactttgagaactctaaaattgaagtctggacttcaataacttgaatccaactcactgtttttcaatattttgtaccatgaagatatggaacaacttgatccaagccccgagagctgaaattacacgaacctacaacttggaagccaacttgggaacctagggtttaactcggtgcccaggttgacattctcaactaaggtttcagtttttgggaccgtcttagtgtaaaatgttcaaaaaattgtattggcacatcaactatacgtaccatagacatatttgaggcatcataatcagaatcgaagcaagttgatttttgagcacctgaggccccacggcccaagcacccagcgctgaggttaacaatatgttagtctgggtgcgttccaagtgtttgatcgaagatccaactttttcatcgtatttgtcttcatcaaaatggggaaataggtccttttgaaggaaaaacaacaattcacgggtacaaataacaaggcccgacacacaggttgacacttgagactggccctgtgcccaggttgacattttctcaacttaggccatttaaaattgagttttccaggaattccttcaagtatcttctcactattaataaaatattaagactcaactatttttgaggatcaaatagaattttagaagggccaaaagagggatccagcgccaagcttgatacttggggctaggccctgcacccaggttgatattttgtcaacctagcctatttctgatgtagttcaacaaaaagtgttctgggcattttttccgtcataaaaaataacgaagtttcaagtaaactctgggagaaaaccacaatcccgagtccctagaaacagggccaagtttatgatatcttagccaagttcaatatcagtccaatccgatgtatactccatanntccgatactagcatactttaccaat

SEQ ID NO: 100279 - DNA, 1410 bp, Cannabis sativa
aaaaaaagtaaaaatgatagattttaaaaaagaagataaaaataaaagaggacaatataaaaagaatataaagtgtaatttcctcttcaaaaaatatacatattatcataatttcaaagtctccaatgtcatatcaatcgatattaaacttcttgtcttaaatatattattattattattattattattattataatattaataatgaaattaagaagaaaaaaaactaaagaaaacaatatatataaaaataaaaaacataaaattcttgtcttaacataataataataataataataataataataaaaccagacaggccctctagttgaaatatcagctaagccacgttatatattttatttaaaaatttgattttattgaaatatctacctacatatcacaatactataatatttaaatacaaactgtattatatatatatataaaaaaaaaaatgtacataactaacgtacgcacgtgtattgctaagaaataataaagaacttattttagctttccttattaatatgggttatgaatatcatccatttaggaaaaggattagatatgaacaacaatgctcaccaatatcaattataattgatgatgtattgttggaaatattggttcgacttcctgattttaaaagcgtagtagagtgtacttacgtctgcaaacaatggcgctcaattattttggcttcaataacttatttcagttgcagattcaatcaccatcatcgtcaaaaaagattaagaaataacttattatcaccacctatacctttcagtttactattttcaagctctttttcttggactccttcatcttgcttgtcatttttctcagagagatcaaagatttttgactacgaaaagagattagcattagagttcttaccttgtaaggatgatgttaacgaatatgcttatatattgtcatcgttcgaggatttgttgctgattaaaatacatcctaaattagctttatatgtttgtaatccttttactagttattctgttgcgcttcctacacctccaaatttcaataatgcacgttgtagatatgcattagtagtatcaggttatgatggtgctagtaacaaactcaacaaccctacaatcaaagtggtcatgatcagtacagatttaactccaccaacattcatattacaattagccattttttctttcgagactggtaaatggactgaatcagctttcgagtgtccacactataggcccttaagccataaccaagctattgcttccaatggtattgtatactggccatatggtaccggaaataaaattgaaggcatggttgcattgaatattttttcaagaaaatgtcgctcgattaatttgtctaaagtgctaggttgcctacattgttcaattgttaggc

SEQ ID NO: 100280 - DNA, 2016 bp, Cannabis sativa
caagacccaggcatgaaccgaccagctttctttggtgaaaccctagaactggccaacccccatggaaaaaccctaggcctggccaagtctcaaacaagacccctaggactgaccaaggttagtctcaaatcaaaatgcgtgtttttcaaaactcaaacgtgttcttcatcactctaagagttaagaatcagaacaaaggcaataattgaatctttttcattagaaaatcacgcattatgcattctaatattatcatgcaaatcaaaatacaaaaaagactacaatctaatgtaaaaatcagtaagcttctaaaagcttaaaaagcttgaaacttatcaatggtagactcaaaaaagggatgtcgaagaaaagaagatgaggcatatatggagggtggagacaaaagatctaaaagcatgccatgcgaaaagctaatacttggctagacaaggctgcttgatagaggttacaacgggcaagatgaaagctaaaaagtccctatctggccaaatgtttgaacaaggacttaaaggaaatgtcaccctaaattttttcctcctgtcgtggcatgtctatgtaagccaagactaaggacgtgtggaatacaaccttttcaatagtaggacaaagtctcctgacaaggcatggtaaaaccatcaagcaacaagcaaaaggagttaagcaagccttcaggaagatgcacaaccatgtgtggctggaaaaagagagtacatcggccaaccaggagatgcttgtatggtcggctaggctttgagcacaagctagctgaccaaagggtgactgtcaaaaccaaaaaagggcatgtttgatcaagaaagcctagcctttgggggaaagttgtacaaattctatcccaggatctctctcttttatacctgggatttgcctactgattctcatattataatcttaagagagccacgttagaatcaacaactcttatgctttgagtggtattatctctagtattaatataaccaaaagggaagtaggtcattacccgctaactaaaggggttgaacctctataaaatattgtgcctctcatacttttttgttttgatggtgtacatgtggtagcatcaataataaatatgaattctgtgttggttgatcaaatctaagattaacaaatttataccacaagctttttctctcttcaaaagatcataactccatgcattaaccattatccttattacatgtattaatacataaaatatactaaggaaactaaatggtatcaattttgttttgtataggatggcatgtatatagctggttgtcctatgttccaatattggtaagtaaattaataatttaaagttaaattattgtttaaactcaataaattttatttacacttttataatttcttttgttattattttcataaattaattattaataggttttaatatatatgtcagattgtgctcgttctaggaaccaaacttgaagtaattgtagcaagaatggctcttcaaatgaaagagcaaaacaataatgttataattggagcccctctagttaaaccaaatgataatctattttggttcgggaagccaaaattcgtcttaacacttctgcattatactctgttcgtggtaattaatcattatatgatatatttgttaaaaaaacaatatatatttaattttgaatttctatatatctccacaaaataatattgttctaaactgatcaacctttttttttgttcatattttagaatgcattcgagctcgctttcttcatttgggtttctgtaagactatcttgttctctaatttaaatttaattaaatatatatagcattttttaaaaggcgttactcatttaagttactttagattaaacactttgagaaatgtattttcttgataaaagtgggcattgataaaaatatttattactatagtggagaaaaaatataaattgtattagaatagaaattgttattagtggttccggcaaggaacacgtggattccaaa

SEQ ID NO: 100281 - DNA, 1837 bp, Cannabis sativa
gttaaagacggtaatttgtcttgttggggtgatataaaaaaaaaaaaaaaatcttatattcaacagacatgaattttttcaagtgattaaggttcgtttttttcaattaaatcttttgaccaaatgcaaattacgtaaagtatttccatatttttgttttttttaagaaaaaaattactacaattttttatagctgaaattttaatatttattatttagctcatgaaacttgttttggttaaaagtcttttctccaattccatcttgacaatcaaactaatgaaattgttgtattctacatataaattatacgggacgttaggtattaatgatctaagcacttcaccgaattcatcattaataatattgtttattgtaaaataggcctcgcatatacataattgcatatatctattttacataagtttataatttgcaatatgatttattttcaggaaggattaaaaatgaagaaggagaagaagtagaatattatttggtgtgtaatttttttttttccgcaactaattgtttgactcttattttcaatatggtaaatttttttcaaaatattttaataatggatatgatcatatataccataattataatatacattatcatatatataattaaattataatttctccattgaaggcataagtgatttaataacatatttctttagagtgatattagacttttttattatttaattattaattaaaataataataataattaaaattaaatctattaataccattcagttatatcttttaaatatatataatttaatctaatttgaaatttatttatgagaataataaataatttatatcaaataatcacatttaatataagatatatgtagtttaccaaaatatttgagccaaaatataataataaaatctctttttcttttttttaataaaagtaatctttattagacagaaacatccgctaatataatggactgaagagtaaggggaacattactctcagtaaaaagacgacctgaccaataacaatcaccacgtgccatacagtgcgcggctttgttagctaataataaaatctcttagtaaaatagtatatgaaaaaaaatccaaataaaaactcaacgtttggtataaaaaattaattaattttttatttttaattagaaaaggaaaaatatatgcaaatatatatatattctacaagattgatttaatttttattatgtttaaattgaaaaaatgacttttaaaatttatttaaacaatttttttttcttattataggccgagtgtgtttaataatatttttgtaatcagtttttttaattaaaaaagttaaaatatttacaaaaacacatttttattttttaattttaaaataaaaaaaatacaattataaaatatttttttgtttctcaaaaacaaaaatattatcactaccctagatattacaaacatactttattgatcttctcccttgcccgcaataatgtctttagtaatcaaattaattaagtacctaaaagtcttattaatttaagtgaaactcttactctagataaattgctgacgatatcctaataacaaagtaaccatgaatataattaaggacaaaatttaattaaaagccaaagaaaaagtaaaagaaattaaaatggggcacaagtttttttgttaggcattctgatactatgttgagaattatgaggttctatctcaaaattaattggcaatgagtggagtagtccatgttcttatatataacttaattctctactatttattccatgtaagacaatgtctacgatatatatgaactatgaactgatcaataa

SEQ ID NO: 100282 - DNA, 604 bp, Cannabis sativa
caaacgttggagaatagagattaactttagccaggacgcagttctgatgctttcctcaatgaacttacctgatggtatccaggtatgtatacataatttcagtgtctgtcaaggaactgttgctgcaaaatttgtagtctttggtggttttaggaggtttttcttttgattgatattatttcctcaatgaattatagggcatttcatttttccgataggcagaggccatgttaacaatctgtaatgaactgtaaagagaatggaaacaaggaatgatttccctttcccagtcatttatgtgtttcacctgcacactgcagttgttatcgcttagatagatgatgctaataagtacacattgttattgtttttcttcctggcatagctgatatttaaattctgttttttcaattgctagaggcggcgtactgctttagatgaactcaacatgcgcagtatttttgaagagaatgatgtcatttgtgtaagttcgtttattggtttcctggaaaaatacacttcttaattactttataagatgaaaaagagaaggcaagtaagggaattagctaatttagttgctaattttagtgttaattattgt

SEQ ID NO: 100283 - DNA, 667 bp, Cannabis sativa
attattattattgttatatttcaaaatatacttttaatatgtgtaaattagctgttcctgtcttatgatgtaatcttctaaaatttttattgttatttttcttttccacctgtacttggaaaagaaaaagttgtgaaaattgaaaacatgtatatttttttttttttcatgaattattgcaataatgttagacattatatgatttgtacggaaaacaaaaaaatataaagaatagatagaaagacatcacttctggcgagaatgatgcttctatatatgtgttacagtgttagttaggtgccagttcaacatctaattgagggccattacattatacggctgactcctttccaatctatagtagtcccataaaattttgattatgtgtaatatcatatttggtatgtgaaaatatgtgatttaagtatttctcaattttgatttttttttttcttttctttctttggattctgtatcacatttgatcattgattttggcctcggcaactaaaaacgctaatccagcaattaaaaaagaaaagtttttgttaaaaaaatgttatagtaaatgtggtattgttaagaacttgatctgttgttcgatgggctcatacggagcccaagaacctaactacaactatcgatcttaggcccaccttgtacgata

SEQ ID NO: 100284 - DNA, 1846 bp, Cannabis sativa
  modified_base (27)..(28): a, c, t, g, unknown or other
actaatcagattgtaaagagttttatnnagggcataaaacccaacacccatgccgttagttgctaggatatggatgtttttcacgttagatctttgaggcaaggtttgtcctgcctttggcaagggaatatttttcctagtccctgagggccttggttgttcagcttgttgatagaccttccttgatctatcaactagtcttccttgaagtggatctttgatgagatcatggcctcttccatcggttctcttgttgaattgccttattagatcactggcctctctattgcggcgatcaaactctgcttggtgagatcaaatgatgtactcttggtcatccatccacctcaggaattcacgtctctactaagcgaagacatcgcaattagcagcacgtggttcgtcagttaggccagcttggccaacgcttctctaagtctggctaacaacttgagagatcttctcccaagtccaagtctacacgtggctcgccaatcgcaggctcgccaactcctagtcatgtctctccacgtaatactagttacgagatccggttgttgttccagggggttgccacccatgagtccttcctttagtgggaggcgccaatggaaagtcctcccttggaggcaagggcctgctattcagatccaccgagatatttgtatcagtttggccagctgtcatggctagatttgtggcgcctgttgtggtgataggattgaacacatttgtagtgctcataggaattccaattgtgactggaacatgaacatcaggatctgcagtctgtggatcttgagggagacccaaaaatgcagatggtgtgactggggttcttcttgtgctaaccatggtgtttgatcatatatgagatccaatcgctctcaatgaaagcacgaaattgttgaccctaaaaagtggtcaaccgacagcggggtcatatgaatctaatgtttgccacgtgctacataataagaattagagagcaaagaacacgcaaaattttatagagattcggccccctaagatagcgggtaatgaccaactctccttttagttgtagtgataccgagagaaaatactattcagatcgctataggtgggatctgatttagctcccttaaggatacaaagtaagaatcgaggttggtaaatcacaagtgttgagattgcttgtatgggcgttatgagagagagtgaggaagagagttatcagacttagaggtttagccttggagctttatcacttggaggctagaatgagacttagattttctaggttagagttaaggcctttatataggaaagcctaaaccctaatttataacttaaacccttcgatatttgtctattaaattagttaattacaaaagaccaaaatacccttgaacatagatatttttcagctgttttattgagttgttagggcccaatttgcaacccaacttgcagtccacttttggaattatatagaaaatcctgccatgccctttcctggctggccagacacctgcaggaagtaaactggccggcatttgtgttatctagaggctggccggccaggggtggctagccagctcctgtgaggaagctagtctgttagttgatgtcttgtttaagtactgggattcttgttggctgaggtactgacttggccttcttgttggtgagctgtattgccacgtggcacttattttgtccacataagcaataccacgtcaggtggacaaaaatcgggataacaagtatggaatagttcgagtgtgagtagtaaaaaaaatgtaatagagagaaaaatagatagaatgagtgctcctaatttttttaaaaaaaagaatagtag

SEQ ID NO: 100285 - DNA, 1210 bp, Cannabis sativa
cagttggaggatcaatgttaccatgagaagctaaaaaggtggttgcttgttgcagcacatgaaaactacaacagagaagcttggagtaggtgctacttcagtagccatttcacttggtgcatcatcgattgagaaaacattaacattagtatttaagggagaagtgatgaaacttgtggatggaaagagaggtgtaggatagggagttacctgcttggaagctactgaggatagagtaaaaaattccatctaattaaaaattacatttcgagctatgtatattctcccatcactattttggcataaataccctttacgatgcatggagtttccaacaaaggtacatttctcatatctgaggtccaacttgtgaggttgataaggtcttagatgtggaaaacagacacatccaaatggtttaaggaatccatagtctggtatcttatgaaataaacattcatagggagatatataattaataacgggtgttgggagcctgtttattacaaaggcaacacgctaaaatcccaactattagtaacataagtcaagaacaaatccaacaagcaaagttagacttattttagtaatatgtcgatgctttctttcaaccctgttattttgttcatgatcatgtgaatagagatgttgaaagtgatccccatgttgtgtaagaaacttagaaaatgacttgaatttcccttcccaattaaattgaacagtttttatagggagattaaattgtttttccattggcttttaaattcaagaaaaatgggttaggcttgtgactttagattgagtgggaataatattcatgtaaatatactaaatatactaaagtcatcaatagagataatgtaatacctatcgccttctaaagatgaaaaatgggaaggctcccacaagtctatgtggagtaattttaggggctaagaggctctaaactcagagattggataggataattcgtgacttttgcccattttacaagcctcaaaaaattttaattcttttaagtttcatagaatattaatcttatacagtatttttgttagagtttttggtgctggatgacacaatttggagtgccaagtattaacatcaattaaatttacacgtaaaaactttaaggatcagtagaacaaatttctttattaattacaaatatagttcaatattattagctgataaaacaactttattacaa

SEQ ID NO: 100286 - DNA, 1697 bp, Cannabis sativa
cacttgagctagcctcaagtggtccctcactctctacttaactttagtatataatttacataacttaaggggtctaatggggacatcatccataacagtgggtatatcttaaaaaatatgaaaatggaggtaaaaattaaaacaagtaaagtaaagtgggtatacaatgtaatttcctccttatttaaaggctcaatttttttcctaaggcccatttcattttgatccatgtgttttgtaaaagttaccgaaacttcttactttgttaattaataaaatagatattgtattttctaaaatgataaagaatgatacactaaattcaatttttctcaatttgtttttaaattaactaatctaaaaccaatatgtaaaaaatataatgagcttggttacaacatgacgtatgttattattaagttttattttaatgaaaattgagcttaaagtatcaatttttaatattttaaaaaaatacagaatctaaattctcatataacaaaccaaaacgattcaattggtaactgttgtacaacacaaaatctaaaatgatatttactcaattatcattataagagcattattgtacaagcacatgtggtctctaattatattatgggtgacgtgttacaagtgtttaacgatttgttaaagactacgaatagtatccagtatcaggcgatatattatttttgtttggtgtaatttaatattaggatatacatattgtaatttaataaatattatactacaagttattctcataaggtgtcatcatggtcgggttggagttaagatggcctagtctgcgcctaaggcccatctaattcaagggcccaaaagcatattttttttaaaaaaaaatatatacatattttcttaataatttttaaaagtatcacataattttttaataaaggactcaatacttttttttttctttatgttagccataggtatcatctcaattaaacaccactaatatttaataacaataatgtttcataatatttactatacattagaatatgcaagacctaataataaattacaactattatgacatttcaagtagtgttgaatattatttgtaccattaaaccacttttacataatatataatatacagaaaagctaaagactacaacattattattagtgtaaatgaatactttgttttgtatatttgaattttcatgaattttatattaaattatatatgggatttaaaactatattattaaattatataaataataatgtatcacatattatagagaacagttaaaaggtatcttaaaatgtcaagtactacaagaattgatatattattattagtgtattttaatatcgacttttatatattttaatttaataaataatattagaaactactaattaattataaaatatcacaatgtaaatactaatgcttatttaagagtatcttaatcatttaataatgcatggtacgagcaaaatatctaacaaataacaatgcagtgtcaagcaccacaaaagttaacataatgttattaatgtattttaatatgaggccttacatattttaatttaattaattatatgagaaaccgttaattaattatagtgtaaattacaatgcttatttaagagtatcttaattaattgttcaataaatttatggtatgggcaaaatacctaacaaataacaattg

SEQ ID NO: 100287 - DNA, 1874 bp, Cannabis sativa
acttgttgagaattttccaatcaggtggacattttctgttagctaaggcttgtactgcaactttacaatccgaaagcaaatgaacctccttcttcccttcttgaattgcccaggataaagccattaaaattgcacttaattctgcatctagacctgaacttgctttgctatacgctgtcttagttgcccattggtctgtgtctttgtttatcattactgctaatagacctgcttcgcctttgtaccaagaagcatcagtacaaatgatccaaggtacttcctgagaattgccacgactaccttccctctgtaatggtaaaaaatgcctctgatctgcttctgcatcagcactgtcgttgctgaaattcaagtaacaatcgtatgagttccgaattctactttgaacctgttggacttgatccttttttccctccctgcacaagcggtttctatatatccagagatgtttaataatgcatcccagatatgtgagaatttcctttcttcctatcccaacatcagagagactcctgactagattttgcacaaacgactgaatggtatcccctcgatttttttctatacgcaaaggaatcacacccgagaaccataagattttcacaaagctgcaatccctgaaaaggtgtaaacagctttccaaattgacgttgcaaaggggacactccttgtccataagaaaaggcagtctttcctttacagggattgcgttattgagaacacaccacagcaaaatcaagattcttgggtgtaaatccgaatgccaaagccatttccaaatttcctgcacctccttaaacttgtgcttctgatcaacgatgtaggcactcttaactgaaaactgtccattttgtttctgtttccatataattttatccttgttaggatatggaagcctagggattttaagaatcctgtcccccaaatcctttccaaaaaactgtaaaaccacttctttattccaagcatgccctgttgagagatctgcaagagttctcgccgtgtatcgtcttggcctaaagctgtccattaagtttttaaattcttcaaattccaaccaaggaatccaaggctggttccaaatgtcgatcgtttctccccccaccggtaaagccaaggagcctttgagaattatgtttcgagtatccaggatgcacttccataaactagaatcagtactctttttctttactgtccaaaacgattcgtgcttgcagtatttacttaagaggcaatctatccacggcttccttgtgccttgaactatactccacagaatttttgcaattaaagctctgtttgagtcctcgaatcttctaatcccaagacctcatgactcttgtggttggcaaattgagtcccaagattttagagctaagtatcttcctttacccacactcccttgcaaccagtagcttctaatcatcgcatccagatctctgcaagttgaaattgagattttgttggtgctcatagagtagatcggcatggccgaggctactgtcttaattagagttaatctccctgcataagacaataacctcatcttccacccctccagcctctgtaacatactctccctcaggttcatgtagttttcctttttccttctcttgaagacaaaaggattgcccaagtgtctttcctccccttgagtttggtttatattgagtacatgcagaatcccatttcgtctttcaacagagagattattggagaaaagcacacttgatttggccttactacacacttgtcctgaccatttctcgtacttactaatacaatccatcaaattctttgcctcctctttatttgctcgagcaaaaagtatcgtgtcgtccgcaaacatgagatga

SEQ ID NO: 100288 - DNA, 1133 bp, Cannabis sativa
tagaatccaatcaaagcagttcccacatgggggtccaaatcaaacagcccgtttctcaaacagtaaccatgtatctcctgccccaatctcaacttataaacctccctacaagccgaaagtaaccctacaattgtacgcgaattgggttttagaccctccttttgcatctccacaaataacttaatcgccttctcaaaactacaacaacccacatacccatatatcatagcattccacaagacaatatctttcacacccatctggtcgaatacctcacgggcatcatcaacaagcccacacttaccatagaagtcgacaattgcagtcccaactcgaatatcacgaatcaaactcgtgcccctaatacgaaaatgtactttccttcctttctcaaccgctttcagccttgcacaggccttgagaacaagaggtagagtagctttattgggtgagatgccgagagattccatatgggtgtatgtagtgagaattgcctggtcattattggacttggtatgatgcttgatcatcaagttccagtctttctgctcggatgtttggaactggttaatgggtaggagagataagttttggaagactcgggttgaaggtatatccatgaataaggaaccctataaatttggcagcaatgcgaagaagataaccgaaggcagacattaactaataagtggtggccagtggcataattgatttacaaaacctgatatttagatgtaattgtggttttgtaagtcacatagtaaaaacatgatgaaatattttaacaccattaggaagataaaaatggattttctgtgaaagacacccatttgcaagataccattgctgagagaccataaccaaaagattttaattttaataagaaaaagacttaaatttcaaaacattaatagttctgtttctttttcttttcttgtgttctcaattaattaaagttagaacttacatgtagggaactttacagagctgctgatgaattttgcagatatttgaacaattattgctgagcctccttgaactaataagcttgacatgtcatctaaatagaagcaatcaataaataattacaacattgttagaacttatgacaatccataatcattcaagtcata

SEQ ID NO: 100289 - DNA, 775 bp, Cannabis sativa
tttttttttaaggacattgaatctactacattcatacacctttttaccttctcaatatttatcaagtacaaagatgtccattgtttaaactttaaaataaataaacttataaaacttgaagaatctaatgtacattaatttgaacaaaaattactccctcaaacctggacgccagaaacccttcttggccaaaagaaaatgattttgatggaagattacagaccaatgaagtgattgcaaaattggcttaacagtttcaatcacctccattgtgtcgttaactattaaataaccgtttggtcttaatattctatcaatctccgccaccatttctaccatctcacatctgcaaatacataaaaattcattatcacttatatcgtaattatgaagttaaagttgaaatcaatattattgactaaaatattttagatgttggggtatgaaatgagaatggaatcaatacctttgagaaagagtttggaatagatagttggaatgtagtagatcatatgttctaggataggtattaaaagactcacaccagtcatggtagactccaattaaccctctctcatatatgatagacaaagtgtctgccatatcaatagggacaacattcattacccatactggttgatcaataagagctgcaccgaaactgagaaagaagagaaaaatctaatcagttttcttaacaccctttacttgtttgtctattcaacacttaaaatacatgataaggaatttttgagtaggaattggtttcacaata

SEQ ID NO: 100290 - DNA, 954 bp, Cannabis sativa
gtcacatttagtcacaaaaaaatcatgttgtaactaaaaaattgtcactaaaagtagaaattttttgtagtggaacttaatacttaattagtctttatagtgatattaatacaaaatgctaaaatactactaatactttttataatttctatgtttatatgtttcttcatcttggttattaagtacacttgatttaatttgtcatagcagtatctagatatcacgattctctaggtgaagttctgaaacatttatgagatggtggttccttgtttattaaatgaaagtgcatgcttttaacaaaaagactgtcaaatttggaggagaatctaaccaaggattgcttatgtgtgcaagtctttaaagtcaaacaaattgttactgagaactgcttctaagtcgaagtgtttactttatccattaaattgttacaacaatatttggtaatatatctacacaaaaaaagtattcagttgagatatctacactaatttcaggtctctttaacctatttattaaaacaaacaatggcaaaaagatattcagctgagataaaattggagtttatgaaaacaagttcacactaactagaaatagtactgcgttttgtacagttatttacaattaattatttcaaaaaattatctaacataaataaaaaaaaacaaatctaataattttttataaatttaaaaataataataatgttataaaaaattatttatattaatgtccaagtcactttaattttttctattaattacgataattactagttttttaattggttaatttataactcatatatatatatatatatatatataaatagaggatcattcaattaacaaaaaaaaaaaaaaaaaagcactaaaatattcctattcaatttccttttttcatcattttcttattctttttcttcttttctattttgtattattcatcataatt

SEQ ID NO: 100291 - DNA, 1027 bp, Cannabis sativa
tctgattttgagcattgtatttttttttaaaagttcattaatctagtcctcttctgtaacagcatttgagcttcacagacatctcttgtttttaaattgactaagatttgtgttcatctagcattgtttcttctctgagaaaatttcttttgtggatggtcactggagtaagattcttcaaaatattgatgtgattttaaattgtggtgggagattagagtctccatgatcctaataaatattggaggacactgatgaaatttttgtattaggggaacttgattagtgactttatttttggttcattctgttttctgtggaatttaataatattatgtacttaagaagtagaggatggtgtttaagcttcgtgggtttaagtttcttaaatattagctcaaacttctaagctttgtcaagttaccgaatcattatgaatcggcactacgttagtttgaatattcatttcattatttcttaagtaatgataattacatctcagtggcttcacctggtctcaaggatatggaaaaatgattattacacttctcttccgcgaactaataacttcttcacacttgaagttgctttttgatccagtctgatcaattttttgtcatttacaacctttaataatttgtctgattcttgtaactttgtgactttgatcaggtacctggggttactgatcttggtttggttccaagaaatgtgaagaaggtcgctataattggaggaggattgatgggctctgggatagcaactgcattgattcttagcaactatcccgtgatcttgaaagaagtaaatgagaagtttttgcaagctgggattaatagagtcaaaggtaaggctataatggattacaaatacacacatattcataaagcttcggtgagaatgcacttttgagtatggagaaatagtattaacagaaggcaaaatggaaaagagaaatcaacattgtcttttgtgcatagtgttataactgctaaatcacttatacctctcctatcacatgattcag

SEQ ID NO: 100292 - DNA, 836 bp, Cannabis sativa
ctttgcctattattgtgtttatatataaaaaaacaatatcgtgttatgcttgtaacacagaataagatttcccacctgaattaattttgtattgtcctaagcaatatattaaatataaatatgcttcctgagaaacgtagtcatatctgggaagtgaagtgtttttcagtacaacaaattggaaatcttcgaatgggaagtcacttaaaacctgctactaattcgtagctcggagtttggtttaaagtcactgctccacacaacagctaagaatcaaaaccattagcttccatatttgttatgagaatatcaatatgacatctcaaaataacaacttgaatttttcgtagttctctcctatcaatcatatccttatcagccaccacctccagcattaagtcatccaagctcccgcccaccatcttttcctcctgttcaccctcctctactaccacagggctggcccaagagtggggcatctggggcccacgcccaagcaccctacctaggtttaaaaagtcctttagtaaaaattacaattatttttttaaaaaacctacgtttattcatggaagaagttgacaaatactacttttttttatgtgagctaaccaaaatacctacattttaaatttacttaaattatactttcttttataagcacattgccgaatatacccttcctcacatatgctaccatattgggtccctagtgcaaagactcttgcttctgccatagtaacccaacccagcaagctcgacctcctctgccattgccaacgtccttctaccttctctattgagaacatcatcactacgactctacaagggcaaca

SEQ ID NO: 100293 - DNA, 1080 bp, Cannabis sativa
  modified_base (767)..(767): a, c, t, g, unknown or other
tatatatatatatataaataagatgaaaaaaataattgtttgacacagaaaaaataaaagactactatttaaataaagaaaatatttagttaattattttattaaataagatatagaaggtttgacaaaattaaatagtaataatggaggtgtatttttaaaattgggattaataaagaaagtagaaatttaagagaaactataagaagaaatacaaatttttcaaaaaaaacaaaacaaaaatttagatgggtcctttattattgtgggccctgtgcaattgatctggttgcacagcttttgggccgaccatgctcgtaatcatcatcatatatcaccttgttgtctcactatatcttacccattgttattatcggaattcacttgtagtcatcactatgctccttcccaaatcttaattagtcttagattctattttaaattttagactgtcatattaccgcctatgtttcagttttatatgaatatgtaaatttatatagatatttaaattattactcattcaatctagttatatatttatcatgtattgtatatacatgatgccatgtggatttttatattactaatattggaatatatatttcaaaagaaggtagtgagatgactatttattgagcttatttttttggaactgtatgattatttattgagcttgtcttttttggagttgaaaaaaaaaaaaaaaagatctcttatttctctaataattatgttcaacaaaatacattcatatatatatatanatatatagagagagagagagtttagtaagtgataaaaaaatatgtgagttatgatttttaaaattatgtgatattttagaaaaattagctaataaaaaagtcgtgtagatttagaagaaagtgattttagaggtgatatttgaggtttttttaggaaaaaaaaaattgattttatatttgtgtttaaaaagggaaatttacgcctggtattgtattttttacttttatttcatttttactgttgagcgttatttattatatttttactgtgtcttaactttttgttaaacaaatttgttattccattttaact

SEQ ID NO: 100294 - DNA, 1687 bp, Cannabis sativa
tactatagtaaaatgtttatcctgatgtatttttgttgtttttaaaatttttaatagtcaatgttttcatattaaatcacgaaaggacatgtagatagagttatgtacgtagaaatactgttttgatttttaatatttcataacagttgcataaatattttgctaacagttatttctccacatattactattaaggtacacgtaattatcaatcagtgacaaaaaaaaaatactgacaaatagttttttacatacacattcacatttaatatttttaatttcaattaagttgcacgttagttgaataatagttttgctactacaatatcataatattataaaaaaaaaggctcaaaattattaaatacgcgacgtgaacaaataaaacacgattgttgtaatatttgtttgtatcaaatatgtgtaattattagttgttttgtggttttatattagttggctcggaataaatataactattttattacagtttcatcacagttgtcttgaagttgacttcttatttcccttctggccgtcaaaattgaaattttattcaggcaaagacaccttcgacttcttattcttcactggacaacaaccacttttagccacgagggagcaaaatcgaagtcaatattacaaaaaactttcagccagccaaataaacaaatgtacaacccaaataaaaaaattaaacaaataccttttacaaaaaccttcaacccacgatccatgattcttggaatttaataaactttcgtttgatgcaaccttcggtcaaccacccaacaacccagcacaaccgaaatgaaatccaaccagaaagagaaccaccatctaatgcaatcttcggtcaaccacccatcaacaacctttcctaattagaataagtttcctaaatgaaaaaagatcaactgagaaagaatcttttcttagaaaaaaaagagtaattagagttacaaaattaatgtaataaaatcaattcaaatacttaataaaaatattttgataactaaattgctaaaaaaaagacctaacaacatataagtgtgttaagttttgtgtcatttatacgaacgaattttataaggagatttacctgaatattgttaaaatggagaaaggtagtggattaagttatatttgatgagatcgatctagtgtagatacgtatagtaagatatacgaatttcatttcaaaactaattattcacagtgaaaaatagatcgtatatgttatatacagtatcatattttaagtgaaactcacaaacaaatactaatcaaactaaaataatgtcatgaaaaccttgttgatataattatttatatgagaattgctttaatatatttattagtttctatttttttggtattatattattattggtgtaattaagtattaagtctcatatataatttaagtaaattatttttaagaaatattgctaatatatttactaaaaaaagaagaaatatcgctaacaactcatatgagtaccactagtatccaatgacaatctctattattattatgtggccaagtactcttgagttgctgtctaattaagaaatttatttcttaaattatattggggctaatattgtacaagtgtcaacctgtgattttggacagcttaaagtgcaaaataacagcagtactgttagatgctcgttgttttgg

SEQ ID NO: 100295 - DNA, 1087 bp, Cannabis sativa
acttgcacgtacttatatattataaaatagtatcatacatagaataaaaaattaaattttgtatataagaaaagaaaattaaaaaaaggactaaatcatattaaataattattatattaattaaataatataaaaaaattagtatataattacacgattacagtcaattctcatagaagtacgagaagagagtaattgaaacctctcaattatctcccgttatacaattattatattattacgtggccaaataaatatattatactatgtaattaccttcaattacatttaattccaattcttaatgtttcaataaaattttacaaatggcatgacttaataagtgtgacaactaagtaacacatgaatgtcaatgagactagtaattgagtagactgaccaaggtcaaggttttgggagtcaatttgaaaattcaacaaatcaaaactagaccaaggtcaaggttttggaagtcaatttgaatacattgagacgatgagctttgaagaatccattagataaagtaacagaattatctgcaccattgataatgaacggttggcttgaacttttcatcaaaatctaaggtcttaacaaagaaaagagtacatttttaacaaacttgttatgtaaagtacatttttagtaaaccaattgtataattagatttgactcgtggaaatggagtgtagtaatcgcataattagatatagaaattataataattaattttacagttcaaagttataattttttttattcttgtaactttcgtaccaaatttggtaacacatctctaaattattatagaaaactatttgtcatgaaagatttaggagtaaagagtgggtatttggcattatgaaaaaaatcaatttttaagaaaaccgttcattatctccttaattaaataaattttgataaaaaaaaacaatgtaatagaaatgacaaaaacactaataaagctactaataaagcttaattatatatgtgcaacttttcttggcaatttcctaatacatgtattacaaaatagttggtaatattaattaagagattattttagaaatacataaaaataacaaaa

SEQ ID NO: 100296 - DNA, 1118 bp, Cannabis sativa
tgcctatctaacggcaattcttggtttaacgttttattattcttattctgttaattttaacggaggctaacccttccgttaactattgtcattcaaactcaaaataaaaaccattttatgcgataacggtggattcctctttctttttcgtcaaactcaaaatcaaaacaattttatgcgatattattgagatattcttgatcctcatttattgggattcttctttcctttgatacgatttgaaatcttctaatgtatacgactgagtttcgagggaattccccaagagattcagtatataattgatctttctcttttgattgtgtatatccattatgtgcatattttgaattgatttgtttgggtgaatataattgtttgatttggagtttcatcctcgactcagtcaaaatgccgctcgagttcaagacttccagatttggattctcaccgctgaatgacccttctccaaactggagccaccgcccgcttaaagaaacaattcttctcgatggctgtgactatgagcatttgcttgttgtaatggagtttgccaacgaccccaaaccctccgaagatgaaatggccaattcttttgtcaaaacccttgctttggttctgagaaggtactacgctaactctattgttatcattgagattcgaggacaaataaactccaaaaatgagttataggaagatgagttataggaagatcctaatataaactccaaaaatgaagcaggcctttcgtcagaaaataaaaatccatttatacaaatttttcaactaacacgaactctcattttatttttcgctgcagatgaaatatcttccacagctcgcaaacattccttgaaagtgcttttgggtcttctccaggaagacgataagaacgtgatgatcgccgttgctcaaggcgttgttccggttttggttaggttaatggattcgagctcggtggaaatgaaggagaagacagtggcggcaatttcgagagtttcaatggttgatagcagcaaacacattttgatcgcagaaggtttgcttctcttgaatcatttgcttagggttctcgattctagaagtgggtttgctaaggagaaagcttgtgtggctct

SEQ ID NO: 100297 - DNA, 2550 bp, Cannabis sativa
atctttttaaacttttgtaataactcacaagtataagaaagatatttggccaaacgccctcctctagctaggtactctccattgacttggcaaactatgatttgcgagtcgctaaatgcttgaaggtactcgattttcatctcgagagctagttttaatcctgcgattagagcctcatattcagcttcattgttagatgcaaaaaattcaaacttaagggcattgtgtaccttgaatttgttgggacttatgaggattgttccaccccctgatcagtcattgttggaatccccatcaacatacagaatctatcctttgcttgttggaatgtcagggtcaactcgctcgtctgtgattatggccacctcgtcatttggaaactcgagtatgaaatttgcaagggcctgtcccttgattgctgatcttagtttgtacctgatgtcgaactggctcagttctactgaccatttgagtaatctccttgatgcttttggtttggccaaaacttgtcgtaaggggtagtttgttaaaatctcaatgctgtgtgcttgaaaataaggtcgcaactttcttgaagcaatcaccagtgcaaatgctagtcgttccatttgtggataacaggttttaacatccaagagacgcttgctcacatagtataccagatgttgtctaccttggtcttcgcggattagtactgaactaatcgcgtatttggacactgcgaggtagattgataaaacttctccaggcatcagcttggatagtatcgggggttgccccaagtgcgttttctgggcctgaaaagcttcttcacactttttagtccattaaaacttttttatttccttttagaatctagaaaaactctttacatttaccagagggacgtgatataaagcgatttaatgcagcgactttacctgtaaggctttagacttctttcggtttggtaggagatcgcatctccaccaaggcttatatttttgcaggattagcttcgattcctcgcttatttaccataaagccgaggaaaattcctgagcccactccaaagacacatttgaggggattgagtcgcattttatactatcgtaagattttgaacatggcctcaaggtgaatgacatggtccctcgcatgttgagattttacgagcatatcgtcaacatgcacctccatcgtctcactaattagattttcgaatatcatgttaactagcctctgatatgttgctcctgcatttatcaaaccaaagggcattgccttataacaatacaaacctcgctctataatgaaagaggtatgctcctgatttggttcatacatcaaaatttggttgtatcccgagtatgcatccatgaagctaagaagctcacgaccagttttggtagaatgactcccttatgaagccacatgccaaaaggcgatccacttcttctttaagcgcttggtacctcgcggggtccattttgcggtgcttttgtcgaacacctcgcacttcggagtcaatgttcaatcaatgacacataatctgcagtgatattctgaccatgtctgagtgtttccacgcgaaaacatctaaattttgtttgagaaaagtgacaagcttttctcactgttgaaaggttagtttagaaccaatttttaaaacttaattatcatcagaaggatcgattggtacctcaattgtctcctctgtagcttgtgtggtattggtataatcgaggatccttggatccacatcgggcttctcaacatgctgtatctccttaattttgaaaacttcttgttgaggaggtggcgcttccactaaatataccacatttaccgatttcttcttttctgcgagttttagtgttgtgttataacactctcttgaatccaattggactcatcgcacagatcccacacccacgggggtaggaaatttcatcgtgagatgatagatagaggttactatcttcatctccttcaaaatggggcagcctatcactgcgtcgtacgctgaatactggtcaattattgtgaagtcggccattgatttagtagtgacatgagcggttcctagagtgattggtagcttaatcattcctttcagtgcaatcgtatctctagtgaaccgatacatatttgagactacatgtcgtaaatccttctcttgtaaccccacttgcttaaaagcttggaagttcagaaggttaactgaaatgccattgtccactaggatttggtggacattatctcatccaatattcgcgacgatcaagagtgcgtctgcgtgtgggtgatgaacccatatggcgtcactctccacgaaagttatgtcatcgcattccttcttgaaaaacttctcaggtcgctcaattagattgttcatgttggtgagtggtttctcttttgcttcctttgaattttgttctttcaacttcttggaatctccagcaatatggggtcctccaataattgtcaagatattgcgaggagttcgtgaaccactcgcattgtttgtttgtgtcatcattatcatcgctcaattagattgttcatgtt

SEQ ID NO: 100298 - DNA, 961 bp, Cannabis sativa
atatattaaggatatagtcatgaaactagattttaccttaattatatattcatattcaaccaaatcttatataatggtgttgtaataataatgtaatcatgtcttcgtatctttatttgtcaacttgttaaactatatatttaacatatcggttggtcataataagatagcaactatataagaactttcctcaaaataatttaggaattaatattaattaataagttttttttaattcaattaaaaaattgatataaaatccattttttttcttttgttataattataaaaacaaattgactaattaatatataaaaatttaattaataatataataaagtaattaaaaagtttgtgtagctaggcattcttatttctgagtgagaatcatgccctctattattggataattattttttaaaaaaataataattattacattcgtagcaattaatttttgttcttattgtagttcaatataaattaatatacaaggttagattaattttaaaatgttaaatactaatttaggttctgtgttttgaaaaaattattaattgcactttctgttttgttaaataataaaatgaactctttattttccaaaataataaaaataagaaccctgaactcaatttttgacaattttattttttaaatataatcaatttgaagataatgtctaacacaaacagatacataaaatataatcaattttgtcataacatctttaaattagattattattaagttttattttgataaaaaaaaatcagttcaaaattctatttatactattttaaaaaatacagagttcatttatcatttaacaaaacagatagtcaaattaataacttttacagaacacaggatctaaaatagtatttatctattttaaaataattaatgtgggtgaagttatcattgaaaaataaaataaactaatattaggcatagtata

SEQ ID NO: 100299 - DNA, 938 bp, Cannabis sativa
gtctcctaccctatttttgacaatgacggagagaatttccagagcaaaatttgtatttgagtgacagaaactaggataccaggttgattatcaatctgggcgatgggctcaacaccagataaacctgggtgctagtaaacctgggtgctaggcttagtttatagcccttcgagattctcgttttctccccgcatttacatgtatctttgttatttataatggcagaaaaaatagccataacacttttttagaaaaatgattggaaacagccctggttgaaaaaaaatatcaacataggcccaacaccagatgtcaatctaggctctgggtctagtttatggccaccagatggctttgtttgattgtcagaaacacttgtatcttaatatttgatgaaaacagagaatacgcccagaagactttctagaaaaactccttggaaacgacctaggttaaaaaagtatcaacctaggcactaggccgagcgcttaggtcaacctaggcactaggtccctactctggcctacaagttcatttgtttctttcccgaaagcacttgtttccttgttctggatgaagatgaagaaagtgctcaggatagttcttcagtttgatgattggaagcgtctaaggttgacaatatgtcaacctgggcgttgggggccaactggtgctctgagtgctaaattttgaagttgctccaagtctatttatgatgcctcaatatgtttgtgacatgtctaattcatgtcctagtataaagtttgactcatttacgctaagacgatctcagaaaccaaaaccctagtttgaatgtcaactgttagagatattattacaatacaagaaaatcaagatatatacatctcaatagtaaaaataatacaaggacaataaaagagattgattaaatatatgttataatacacacatatata

SEQ ID NO: 100300 - DNA, 822 bp, Cannabis sativa
ttatgatcaatttactttgtcaatttagtcataggaactaaatttttttattctctaagatcaaaatatattagaatgagagcaaaatgaaagttttatgagcatcttccaatccaatttctatatacatttcttttacataagtaataaacaaagatattgtgcactttgatagcatttcacagtccatttaagcaaaaaggccaagtcattagatgctggtttagctagcctctgtccaagtcacaaggcacccaagtcagaatttgatggttttcaactgcttgcctatttctttcaactacttaattccttcacttttattttaaattggtttatctttttaggctataattttttgagccaacttccatagaatgaaaatggtctacttgactgtgcttgaccttcaatccttattgagtgctgactatgaatgcactagttgaagcatcatatgcctaattcactcgcttctactttttattttttcatttcatttttataaataaaactaaaattgttaaattccttaagagctttcccaaacagttatcccaagaaagaaagatagaagatttcatcaagcatgacaatcttactgtttatttaaaagaatgtaatcctacaaagcaagatacatatcagactactcttttaagttatagttaatttgtggcgaagcttttaatctgatcactagttaaaggaacaagtaagtgagtgattttttaagctagatatttttattttctttcccaatgatatctaaagacgccaaagtgttataacttgttagagcacgaggggttcttaatctta

SEQ ID NO: 100301 - DNA, 745 bp, Cannabis sativa
tcaatttataattgtgactcacaatttgtttgctagttaattaaagcatataaagttatgcatcaatttgaagatttaaagtgaaattaaataccattaaaatgtcttaaatagatttgaagactatatagatttcaaacactccattataataaaaagaaaaaaaaacatatgtaaaaaaaagagttgtagtttatcattgtactacaaaataatatagggagtgaattttgtttgcaagggtagatgcattgggtggttttcatcattggatcaagattgagcagatctaagaattagaagcggaaatacattaaactgaatccagagtacattccactttaattaaagtacataaaacaaaacttatagtacacaaaacaaaatgtaatatgtttttttttttttatgtatataaaatccattccatatataaccatagattaattttaatgagcacaaattgttttgatgtctaagtttataaaagcaaaagtcaaagaataactttgttattttgattagcaaaggaaggaaattgataagaatttcctaacaatttagtatgaacaatagcaaatataggacaatagtgacaaaaagtatcaaatatacggaaatagtaacttatatattaataaaaatgataaagagaacaaagttgatgggtattcgagagaatcaaaaggaagtgatctaattcactgggttcaaataactatgttggcgggaaacgaaagatgct

SEQ ID NO: 100302 - DNA, 996 bp, Cannabis sativa
ttcgagtattagactcaactcaacatgcatgatgggagatttggagtgtagctcataactcctttgccatcactatctgatctttagcacaattggaggctagattggagaagatgcgcgaagccgccactaagctaggactgagactaggttccacaatagaaaagcggtttggattagaaaaaatagaagaagacttagttatttgcattgtgaacataaagagatgggaaaattttctacaaccacatctttttctcaatatctattctatcaaagtagttataagcataaatcttttccactatatctattctaagaaagtagttataagcatcaattaattagatttgtaacatcttatgttataaatgtgtgtttaataacattatatctcataaaatataaacctataataggtattaatatgtaatatgtatcatttcattttaatttaatattatatgttaaacaaataatataacaattggaatatcttggattttgtctcaagaattgtaggtcgttgatcaatgaattcgtttgtcaatattcttggattaaatgtttcatttccaagtagattccttcttcaagcaacttgaaaaacatatattataatttcttttacactttggttcttgatttgatgcagagatgtttattttcttatatatggaaaaaagaaaattaccttctctaggtctagaaggatgcgttatacatttcataatgaaaagccaaatgaagggataattaatttatgttaattatgccttttgaacttttttaaccatactaaattatacctcttaaatttttctagccgttaaaaatttttgaattagtgagattgttagatttaaaaaattatgtttaattttattcaattttaacaaaaattcttaaaatccaacaatctcaataattcaaggtatttaaacgatttgaaaagtttgaggcatgaaaattagagagattcctaattaaccatct

SEQ ID NO: 100303 - DNA, 1257 bp, Cannabis sativa
aaaaaaaactgatttaaagtgtaaaaatgaaaaaggtcctaacttttatagaataataatagtataattaaaaagaaaaaaatcttgttcaatccacagctccttttcttttcttgggctttttaccttttggttgaagactatcgcaagtgatttgcttgcaaaatataaacaaagtagaaagtttttttttttttttggaataataatattattattattttattaccttttgttttctagttttgtttttgcttttttcttttccccacatctgagttagttgtaaatgttatctttgctttgaagcaaattataagaggagaggaacaatgggatgatcatgtgggctcacatgttccacagctccaggcgtattttaggttatcacaaagttgtgtgttttatcatattgtagactggagagcaaagatagtgaacatgtagaaattaacgtgaaaattatgtagaaattaattaactttctgactccagtttctttggtaatttatttaatttagaataatgaactttttctatgaccattgcatgtgactcaccttcttcaagctttgaactttaactgtttgaaccacttttttgttgtcatttttaggattttgtgatcatttaaagctgctacttttgaatccttcaaataatacctattgagcaaatctagtagtgacacctgtcttcaagaaccaaaagcactccactttattcattggaaaagaaacattaatattaattcttctttttcaattaaattttgattactaattcacaacatggagtgccaaatttatataagtaaatactatttacatgtaaaagttgtaaaatatatgtttttgttaaatgataaataatatatgttttatataacaaaatagtaaattgtattcaatattttattaaaatgaaatataataatgactcgaattataagtgttatgattaggtgtgattcatctttttacacctatttatactagaaattaacttaagtttgattatgtttaaaacaattcatgaaaattaagctcaatatattattatgtatcattttaaaaaagataagttttaaattattatggaacgaaatagagggtttgataatttttatttttgtccaaaattatatttatatgtgtctatatattctatatttttcagataaaaaaaaaaaaaacttgctctatattttataaaaaaaatgtttcttcgatgatactgtagtattaaatcaaattt

SEQ ID NO: 100304 - DNA, 1927 bp, Cannabis sativa
atagtgagaaggcgtcgattatgatgaaaccttctctcatgtggaaatggttaaatccattcatattcttctttccatagttgtcacttatgactatgagatatcgtaaatggacgtcaagactacttttctaaataacaatcttgatgaaaccatttatatggaacaactagaagggtatgtgctaccaggggaagatcgaaaggtatgcaaatttcttaaatctatttatggattgaagcaagcatctagatcttggaatatcacatttgatatgactattaaagagtatgtcttctaataaaacaaagacaaagcctgtgtaagcaaaaatattaaaggtaatgtagtgttatttcttgttctttatgttgatgacattatacgtattggaaacaatgtagaacgattattagacataaagaagtggttggctgaaaaattctaaatgaaagatttgggagaagtaagctatgttctcggtattaacatctatagagataaaaaagaaaattagcactttttcaagcaacttatattgataaggtgctcaaaatattctcaatggagaattccaagaaaggacaattactctctagacatggaattactctatgtaaggataaatatccaaagacttttcaagaaatggagaacataagaaagtaaccttattcatcagcagttgggagcttaatgtatgaaatattgtgtacaaggcctgacatatgctacgctataggcattgttactcattagcaatctaatttaggtttcaaacactggatagttataaagcacattctcaagtatcttcagagaatgagagatctcatgcttgtatattatggtggagagttaaatcctactggatatagtgattttgattttcaatcaaataaagatagtaaaaaattgaaatctagatcactattaactcttggtggtagagctatagtccggagaagcattaagcaaaccagtattacaaattcaatcatggaagctaaaaatataggagcttgtgaagtagctaacaaagaattttggttgaagaaattctacattgatctggaagtagtttcagaagtagaaaagccattggtgctgtactatgaaaactgtggagtggtttccaactccaaggaaccaagaagccacaagagaggcaaacatattaagaggcaagtatcatctactaagaaatatagtagagagaggtgatgtgacagtcttgaagattgcatcgaaacataacctggcaaatccattcataaaataccagcaaaatcttttatgggtcatataactaatatgggattaagggagatacccaatttaattttagggcttgtggaaaattgtaagggtttatgccttgaaaagcctttaaagatatttatgattattaataagagttaaatattttgatatatgcataaatgctaaattattaatatttaatattgaataatttatatgaggttgtgacttgtagttgtacggagaattaagatcatttagccatgaataaaacagtcaacaatatgttaaagtttaggaatctttaatcaatagttgctagtgcaattcactgatgcctgttattcagtgcaagtaatctcaattcagattactgatgtgtatgacatctaagtgaatgtgttgtatataataaagattatatatgacaatgaccgatatgaataaagttgtctttatcaaatttatcatttactataaagacctaattcatatcataatgatgatcaattatagatcgacctaaatcttgagtaatcgtgaactcttattcttgttattaggctctttgattcactcgctaaagtttctcaaagaagatgactcttataacttttgttttgggaatctaataatatgtatagttgggaacatgatctacaat

SEQ ID NO: 100305 - DNA, 2086 bp, Cannabis sativa
attatgaaatcaaatttccctttttaatattttataaaaaataattatttattaatataataaatagttattaaaataatatttaatatattattaaaataaaattatattatctaattctatattattattaataattttatttatcaaaaaataaaacttcataatattaaaaaaaaaaaatatattcacagttttattaattattattattcggataacaaattgatttgttaaaaaaattactgttataaaaatgaataaatatggtggtgtaggaaaaatcagatgttcttcgtaatgcattatttttgtatcccgatcattcaaaatcgttgtcatcattttatatcactcgttgttatcattgtttctcaaccgttatcaacaccgtatctcgcctattgtctcatcatatctcatctgttgtcatcacgatatcttacttgtcgtcatcgtatcttatttgttgtcatcaccgtatctcatatgttgtaatcatcgtatcttatctattgtcatcactatagctcaccaccactactatctttcataattctcaattttaatcttagattccatctcgaaatttaaacattttaatagacattatagtaactctgaactgattatttgtcaaaataaaaattaataataactcaatctagagtttttatgataaagctgggtatgttttttgtatctatttgtgctaaaaattgtaagttggttaattatattagcaaaacattatcaaaaattgagctcagcgtactattttagaaaatacatggtctaatttattatttaacaaaacttaaaatttccaatcgataatatttgcaaaacacaatatccaaaataatactaatttaacccatataaaaaagattactaaacacttacaaaagcaataataaaagaattattactttattttatatatatatatatatatattccgttggaaatttagttttgtgattatataaatatatataattattagaaaattataaaaaaaaaaaataatataatatttttgaatatgagaaactaccaattttttttttttaaaaaaaataaataaatatcaagacaatatattattaattctcaaatatattctcaaatatatttggtgtatttgctcgaaaaaaacttgtagatgttttttcttaaaaaagaacacctatacaacataaaatcaatatttgtgttagaagtataaaaccaattttttttccattatccattattaaatcatatgattcatcattcaacaaatttaggtcttactcgttaatttgatagtaatgttagtttacttggtacttgcttgaagaagaggaaagagagagacacccataaaaactacaaagtacaaaccaaaattcttgagagtattttatttttgactttttctttttagatatgatttagaaaatatatataaacagctaattaactatttttgtgggaacatatagctaattgggctaattaatatattaaaataataaattaaatgtattttttttgaacaaataaattaaatgtattatatatactattattatttaaaataaataataattaaagtgaaaagattacgtgatgatgatggttaggtagatattttattttttttaatatttaattattattaagtaatatttattaaatcattaaattgaaaaagtggttatgcatatatgaataaaaaaaatgcataaaatagtcctgaagtaagtgataatgaaacacaaaaatctaataaatataaataatctatgtatattttttttattattttcaaaataataatttgttaaagtactttggcaaaattttcatttgatattttgtacaaaatattttaaaaaataaaagagaaaagaaaatagataaataggttaaaaaaaaagtagataacaacgttaatatttatcacattcgtgctttgactctgtttggttaaatttctacttttgttcataggtgggtaaatactattttggactctatgttttacaaaaattaccaattagaccatgtgttctgttaaatgacaaaatagaccctg

SEQ ID NO: 100306 - DNA, 1124 bp, Cannabis sativa
ttgcatggcctcaaaatcaatttgcttttagtcaagaaccttccaacaatacatcatctgtcatcatagtcgttaccaactgtaacactagcatcataagataaaacaaccgcctcctcctcttcaagcgaaatatgcactcctgtaccctcttccataatcgcacaagagcaaaccaatactccaaaaataagaaacaaataaaaccagcaagaatggttaaaaaaaacgagagagaaagactaaaaaaccatgtcaatagacatgacaattattacttaaaaatatgctatgaagctgtattgatcaatgaaattgaaagctttacgcacataaaaagactgtgaaaactcaagaaataaagaaaaactctaaaccattgattaccagtgggtgcacgggttgccaaaaacaagggtttgattgattaggtcaaattcgttgtggaaatggtttgaaaataaattaagtttttggattgctctgcataaggaatacatatatttatacatatatatagatacccaaacctaaatgtcgccttttctttctaacaatctgaatcagcgagtttgagtcatagccatggcgagtaggattctgaagcgaagctctgactcgacttctttctcaattcctaagttgttgtcgtttgtcagcgactgatggagaagatgtcgttgtcgataacgagcaggggagaagcaatcgtctgcgattggggaggtaccgtcttcttcaatcgtcatccacaacaattttctttatgtatatttgttaattatcaaaaattactgtcaaattaataaattattatattaaaaattttaatttatatctatgattaattaaataaaaatttaaatatgaaaagctttaattatcattatttatttatttataattatatatacaatagttttttttacacaacttttaaatctgaacgtttgttcggtatatatataaattagtaaacatctcgcacttcgcagtggatatataaaatattttaataatatagataaaaaataaattgtatattttaattaataataattacttaataaaattatactaaaattttaactttactattaaaaattttgtgacataaatactta

SEQ ID NO: 100307 - DNA, 2474 bp, Cannabis sativa
aagactggcttgatatgtacattgtctgtgaagactcattcgactcatggttcagtaagtgctaattgttagattatttgttaattacctgtttatctgaattatgttagttgtgggaaacgtatagtaaggtttaaagagtatgtgtatatgaggaaatgcttattagcattgctcatgatttgagctgtactaaacggtgaaacagttaggattgcaggtgtgttagagtatgcacctggggcagtctggtaggggtaattgcgagcttttcgggcatggagctcgcagttttgaaagcaaagtttgcttgtgtttgagagtggtgcagatccactcaaggcagagtaatggatgagcatgataataccgatttcttgatttcatgcgggttaagagtaatggttgggttagatgagtcgtttacatgatgtgtagagatgcttgcatctagtgggacagtatacctttgggacatgatttgaatagcataacctgtgatgctttccaaattttgttctatgaaaatgttgcaacaaattttcttaagctactaaggcagaaggattgatacgactaacatagagtaatgaggcggtgatagagtatgtcactaaatttgatcggttaaccaagactgcattagatgaatagccactgagactagaggggccaagtttatttgaatattgaaagagaaatagtatgaggagatactcattgaagaaaacgtctggtgttggacccgataagggtgctgaccctagtgactgtaagaaaaaggtctgatgattcatcaactactaaactgaataagaaatttcaaagtaaccaaagatttcaaagtggaggaaacaaaaattggtggatttatctaaaatgccgaggtgcaagggatgatagcactttagttgttgttcaggtgtttgctttgacccaggcagaggctgatgttaatttgataagttgaacttgtattgatggtattttgttggtagttttaatttatttcagtgcaatgtatttctatatttcgagaagggtgattggacatctgtataagcttaatgatgtgttaatgagtagttctggtgcctttcagcaaactggagaactggctattttccggcatgtaatttaattactttccgagttgtaggaaaagggaatggttggttattttagttaagctaaatataaagaattcggatgttattctacggttgaactaatttgcaaggtataatgcaaccatcgattgagaaagaaagatggtagccctggaatcacaaaatgagggcttaaatggattgattggtactactaggggcggaggcacattcaagtgtaaggtggccttggcccccccaacccatatacatgcacatgttatttttataagttttagttttattagtagttatatattcatttatttagtacatgattcctttatagtcaaactaaaattaaaacatggtaaaaaaaattgtcagagcattaaaacaaaaattttagaatgctcagtgtagtactattagaagaaaaataaatattccgatgcaggatatacatatatatattatgtattaattttttattttttacctcaaaaaatagtgagcatgaacaaatataaaaaatctagatatcaaataaaaattaaggtattcataaaagaaagtagtatatttgtaaaaaatgacatgtgatgcatttatgtaatggttaataaaaattagaaaatcataagtttttccacttctatatatagtagcaactcttatttttacatatttagttttacaactatcacaaatttatcttttgcactttacgaaaagatggaaaataatttttttaagtaattgtttgctaactgttagcgtatattaaagaaaaattgctaaaaaattaagatatatttacttatatatgactttcaattttaattattaatttaataatatattttaaaatatttattacttaggtattatagtttgcccccccccctaatttttatttttggcttcgcccctatattggatgatagaatttaacattcgatcgaatttattttcagtcatcaaatcgatccaacatccaatgaatgttggaatggatcggttctatccattgaatgtatttcatgtatatctattagtttaatttgggtttatctaatattttaaacctaatttttattagattagatcggatccatccaatatttagatttaacatctattggattgaattggacctatcaattctaaaaaaaaaaaattaatgttaattttatatatatatttttttttacgtataacaatataaagtctaattgctcattcaaactaaatgaacatattcattagtttgattagatattggatgtattgaatttttagacactccatccaacatgtgatctgatccgattggatattcaaaaataacatccaatctgatcc

SEQ ID NO: 100308 - DNA, 570 bp, Cannabis sativa
tcgttcacaggccactctttagcaagcagtgccaatccacctcaaacaccaacacagtcccaatctcaccctcaagctcaagcaaatatggcaacaaacaacaactccactgatacaagctggtaccccgattcaggagcaacaaaccactgcacttaccaggcccaaaatcttggagtcagcacagattatggaggctcagaccagctgtacatgggagatggaacaggtttgtgcataaaacatgttggtcaatctcttcttttaccaaataattcttctgaaccccttcttctaaacaacttgctgcatgttcctgaaataactaaaaatctcattagtgtgtctaagtttgctcgggataataacgttttctttgaatttcatgctgatatgtgttgtgttaaggacaatttgactcgttctacattgatgatggggaagcacaagaatggcctgtattcgtttgaatccagccatgtcaagattgtccctccacctcttgagcaacctgtccaagcatctcacaccagtagccttagtgtttttgactccccagaaataaaaacc

SEQ ID NO: 100309 - DNA, 1096 bp, Cannabis sativa
acttatcaacataatgttctaaaagcatagggaaaaaaacaataatattcaaatttcttactccttacctctccaaaggatttccccaagctagattgccaatccccatttccatctgtaaccacattctctgattgcaaagagtcctggacagctgacagcgaaggatcctcctcgatagagcataaaactgttctgtccattaaatttgaaaaaccggacgcaactcctctagttccgccctttcgaggctgagccttcatcttaggccggaacttatgacctgctaaattaaagaagttatacctgcccttaaagcatactcaaatcatcgtaatggtagtagtgaactgatgttcatacttactgttatttgtcttggaatcagagaggaaatcatccaaaggatccacatcaagctgcattgttacaacctaaagaaagcaaaactatactgatcaatatcaaggatcaccttgccattattaaaattcaagaattcaaatattcacctgtgttactcaaacttgaaagaaaggctgtaaactatcataaatttcttgaacagagtaagtaacaaccaagaatggaacatgttaagctttgcctgaaggagtatgaggatttagatttagttatgtcggtactataaattttatttgttttaacattgatctaatgaaattatcaattttctccataattgaccaaatgctgcattcagcttattaaagctccttccacgatcaattttctcactaatatactcactaattattcgatgcaatttcatccaactacaatagcagaaaagtaataatataatgttagacatataatagataagaaaccctagtttggaggcgaaagtgagagtgagagagagcatttgaaagtgttgtgtacagagaatgaatgaagaaagtgagtacaaagattacctgctggttttggagtcggacggtggagaagagcgtgcggttgaaaatcaccggcggagaactactttttagtttattacatattaactaaaaataattttgagatgaatattggaattttaaatattttataatttttttttattttatttaca

SEQ ID NO: 100310 - DNA, 583 bp, Cannabis sativa
agttttattttaacaaaaaatcaacttagagtactatttattatttaacaaaataaagagtccaatcggtaacttttgcaaaaaaaacaaagtccaaaataacatttacttttaatataattaaatatctagtcgaacataatttaatataataaaattttatagaatatccctaaccactaaatcacccaccttgtagtaatgtgacttatagcaatgcacaaccacataacaactttgagagtccaatatttacacaaataacaaagcttatgttattgtacttagtttgactctgattataatggtgttatttagggaggatttaaatcaagcttaaaacatacaaaataaacataaagatcattatatctacataactacatacatgtacatgaaaacacaatcacatatatatatacacatcttttctttttctcaatgcaaacaacaatcaattgtatgattacaacaacagtaataatagtcataacatgatttttttttttagtttttacacgtgaaaacaatttaaacatttcagatctaatattacatcaaaccaaaatattgaacagtaatc

SEQ ID NO: 100311 - DNA, 826 bp, Cannabis sativa
ttaatataattaaggaatatatatctcacttaatttcttaaatatataattatacataatctatttatttctaataataattctctctctgtctttacacaattctatgttattttgtatttcttttatatatgaattgtgtgaaaaaaaattattttgtatactaagtaaattgtaaatatttattataaaaaaatgtaaaagtagatgttaagaattcattcattaatcttttacctaaaattacattctctactatatattacacaaaataatttttgctgttatattttcttattatattagtggcacatttattatataatatttagaatcataataaattaataaaaaaaaaatgtaacaaaatgaataaagagtaatcgaaatcaatatttgtaatatgttgtttactaaaattatttagaaatagaataataataatttatcttgtttactttatcagaaaatgtaatcataatgctaaattgattaaattaccctttataattaaactataatatatgatagttatttagtaagatatattataaaggacaacattatcaatgtatatttaatattaaaaaataaaaataaaaataaaaatatataaaaattattatccttaatggcatttcttaaaaaatggtgggaaagcatttcttttttgttatctcatatttaataagttattattttttttaattttaataaagtaagtaaatataatataatggctaccttataactattgattcccattatttattagtaaacatacctaatattttatgatatattttttttacaattttagagccct

SEQ ID NO: 100312 - DNA, 831 bp, Cannabis sativa
gttaaattggcaacatattaaattactaattatgtgtaacagctcattgaacgaaaagttgttgagaacttgcttgcctgtagaaagtggtagactggtagctgggctgtaatgaatgaagtccattcccaaaccaatgataccagatcttacaagaggttaaaatatatctaaccataatatacttcatttgtggtcataaaaaaaagtgtcgacaacaaactactttaaggaaatttaaaatttccaggtagattgccatataataataacaaaaaagagtaggtaactacagcaaaatgcaaaattgagtttgtaattgtaacaagtatttatctggctaattaaagatataaacaaaggtcaagaacatcacaaaaatagactaagaattcatttagtatgcaaaattggattggattgtgtggacacgattggaaatgattgaattaagcttagcttattagttgtgattggtaaactctcagattaagagactagataaataataatgtgtttggtgctggactggactaatcagcgagataagttttttatgaatggaatattatcccgctccattttgtctccgaacatgggatcgggactacttattccaatccaggttacaatatcatgctccaaacaaggcctactataaatcagaaaattagactaaaaaattaccacaaaggtaaattttttttgtccccttaactatttttcttgtagaattgtggcaaaaattttagttcatattattttttgaacagcttgttgatgtagtcacaggcaacatagttaaaagccaaggaattttgttctctgcag

SEQ ID NO: 100313 - DNA, 686 bp, Cannabis sativa
agagagagagagagagaagtggggtttgaaaaatgagaagcgtagtgtttttaagtttaatgtaaagtgaacttatttttaaatttttgaaatacatagtttaagaaattaatttcccatgcataaattatcagaattccctatatatttatgcaggttccaatttcaacaatatgtccagaccattcttatacaactctttggatgtgtttcttagcaacaattcaatcagctatatttgcagtctctattgatcatacaaaatcagaggcatggcttctcacttcacatcttgaaattggcagttgtatatacgctgtaagtatatatataattaattatttaaattcattattaatcttcatttaattaaatatgatgtgttataacattaattaattaatgattaatttagggtattgttgctagcttatcttttacccttcaaacatggtgtgtttcacaaagaggtccagttttttcagcaatctttaatccactggccactgttattacaaccatcattgcaacttcatttctacatgaagagttatatataggaaggtacatatatatataataataattattattattattgcaaaatatttataatatttttttaatatgacatagtggtattacaactctttacttaaacaaatattattaggaattaattaatt

SEQ ID NO: 100314 - DNA, 992 bp, Cannabis sativa
tcttctactctccaccacctctgatgataataatgatgatgatccaacaactccaaaccctctcttttcggttgcaaacgccgacataatatgaagggcgctaggcaccataaataccctttaacatttcactataaaaatagataattgtcccacttaaattttatttctgactttggccttgatcacaatcttttaatccaaaatgttgtttgttatgtatatgtatagggtgatcgagttaagaaagatgtgaatttgttggtggaaaaagagactaaaggtttgatcaaagaaattttgtgcgagagagaaagattgggaccaccactactctgtgttgcaaatgcattatatttcaaaggagcatagcacgagttttaccttctcaacgaaaaaacaagccgactatctttcatgaatgctggaatatcaaagagacatgatagattcggaatacaagatatggtgaaagagagtttaattcagatccgaatcggttggcgcctaagtaagaccgttgatctggtatcgacctccttcatccagctttggataatttcatcttgtattgtggagcttagttggatcttttatggccttattgtgaccaaataatgttttgaagaggttaaatagtggtgtatttctgtacatgaactaattatattgataacaagtttgagctgtataaaaggccacatttggtaatatgtgtttttgctattgtgttagaaggaataataatacaagtaaagtacaactcttttctctaactaatttaaaatcataagcttacttaaaagctaaacaatttaagtgattatattatataaacaattatatattaaatattataaaacaaccattacactatacacgtgattcaccatagaaactctcaacttatttggggcacagtcatcactataataataaacaaaagaaaaagatacaagaacaaaaaaggaccattgaagcctagtccacta

SEQ ID NO: 100315 - DNA, 1668 bp, Cannabis sativa
  modified_base (660)..(665): a, c, t, g, unknown or other
atgaagcaatttcactacaaggtagtaaaatcagaaatgcatatatttacaatgtgtacattactatattagaggcggctttggatatattttaatgctcatgtgaattacacaaaattatggatcacgctttggaactagatccaaaaaaatttggtcaaaccaaattaattatatgccaaacataaagtttggattctgacttttgagaattaagaacgtgatggaattagtagattattattaggatcatcaaaattagtaattattacacattcatatcaacaccatgaaaagagttccaacaacttgtttctctcttcttcttcttcatatttttgtgctttccttgcttccattgaagattacttcctcaccaagaacacaagcagaagctctcataacatggaagaaaagcttagcaatggaatcatctaatctagcttcatgggacaacaacaacatcattaatctctgcaactggactaatgttatctgtgatggttccaatggagaaatctcacaaatagatctctccaacttggaactcaatgtaaaattggatcagttcaacttctctcctttctttaatatcacagtcttcaacctcaacaataacaaactcgttggttcgataccaacagccattggtaatctcannnnnntcactttgttggacttgagtgacaatcattttgaaggaaaaattccagtggagataagccaattgtcagagcttcaatatctcagtctctgcaacaattcccttgaggggccaataccttaccagctcacccatctaccaaaggtatggtacttatcccttggagcaaactcttttgcgaattcagattggtctaaattttcaagcatgccttctttaacctaccttgatctttataggaaccagtttaattcaacattcccaggtttcatatcaaagtgtaggaacttgactttccttgacttgtctcaaaatagttggactggatcaattccacaatctgtattttctaatcttgtcaaactccaatctttcaatctcacagataacaaattcgttggacatttgtcatctaacatttcgaaactttctaagctcaaacaccttcatttgcaaactaattttctcaaaggttatattcccagtgaaattagtcttctatatgatcttgaggttcttgaactgcatgaaaatttctttagtgggagtattccttattccattggccaactcgaaaatctattacaacttaaaatattggatctttcttataacaatctcacaggtccaattccaacttctttggggaacctcaaaagcctcatctttttttatataaacaccaaccaactatcaggagaactaccagttaacatctcaaggctaagtaatttggaggaattatttgtttttgaaaataatttcactggtttaattccttcagagattggaaacttgacgaaacttaaaatattagatctttcatataatcatctcacaggtcctattccaacttctctatggaacctcaaaaatctcacacttctgcaacttttcaaaaacaatctggttggaaccatcccaccacagattggaaatctaaaactcttgtctacttttgatgtaagcaacaatcaactaacaggagagttgccggttaatat

SEQ ID NO: 100316 - DNA, 1874 bp, Cannabis sativa
  modified_base (832)..(833): a, c, t, g, unknown or other
taaccaaacaacttaatcctattcctactcttattccattccattaccattcctattcttattcctattcctattccattgttttcattacctccaaccaaacgggccctaagttcttgagatggcatcacttgaaccatgctatagtttcttagtttaataaggtgatgagtcttttttttcctgtaaggatatccaaaccatgcgttataataatgacactaaggcaagtctttttgtaaggtgtgtattttattgtaaagagagtaaggaaacattgacatactttgctctattgaatgatatataccgctttgatcactatgttgattgacgtgattcctctaggaatgctaaggaaatatccaaaccaatctaatctgaaatgtgtagagattcacacttccatagaaaaataactaatttaactaatttttctttgagcaaagtctccacctcaacttaattatcaggacctccagaaacatataagagcattcatactcgtggaccaaggatactcgctgatgatgcttccagataagaaatagcctactgaggtcgactatccgggtctaccaatctaggagagatatttagccagatggaactcttttctaggcaaggactagttatcctgaagactgaacctagagtggacatgataatcatctgggaactcccatccggactcgactatcaatcgacaagacaccttccgggatggacaagtaagttgtctaggaacaaggtccgggagacacctaaccttccaaggatgactttccaggaatgatataggagacttttttatttggaggaactataccannaattccacctagttacttcaaattaaaagaacgtcaataatgaagaaagaatgcaattctccattttcctttttcataggtcagaccataatctcatgtgcccttcaaatatctcaataactatttaacgactttccaatgttccaattccgaattggacatgaaccggcttaggatgcttaaagtgtgagctatgtctggtctcgtgctcaccatcacatacattaaacatcctaaaaccactgcatagggtacatccttcatttcttctttctctttcgtattgttaggacattgttcctttaacaaaacaatctgtctccttaacggaacgaatgtactctttgtgtcttccatgttgaacttctgaataattttcttgatgtacccggactgctttatgctaatagtcccttccttccgtttctaagagacttcgataccaagtatcttttgaactggtccaagttctttcatctcaaatttaaaataaggaaagtaaaaatttgaaatttatgatgcaggaaataacatttcagatccgaaacgcgtaaaattgaagcatgatcatgagaattgcctacggtttaaaaccgtcggcaatactacaagcgatggcctatgttattgccaacagttttaaaccgtaggccattccattttaaggcacgtttaaaaaccgtcatctatacctttcgtcagtttaaaaccgtcgggaatatcctatttttctagacggttttaaacactcaatttttttagcgacggttccccaaaaaagtgtttttaaaaccgtcgcgaatactcttttttatagtagtgaacacacatcaaaattaaaattagacaaattaggtatcacattcttattaattaagagtacacatactttatattacacaatagaatattataaaattaaaacacagtcaatagtacataaaagaaggtattataaacttaaacatacatttaataattaaaaggctaattaggatttttgccccctggacttttacatatactaaatcatgccccctg

SEQ ID NO: 100317 - DNA, 1066 bp, Cannabis sativa
ccactcttactgcaagagtaccacaacagcaaaatggggggccattctggggttttcaaaacatttcagcatcttgctgttgatttttatttgcgaggaatgcgcaaagatgttcaaaacttcgttgttgaatgctcggtttgtcaacaaaataaatacttagcgcaattgccggcgggtttgcttcagccccttcccttccccgagcaagtgtgggaagacatatccacggattttatcgagggccttccaatgtctaacggctttgattctattttttgtggttgtggaacgtctcactaagtatggacacttcattcctctctgtcatcccttttcagccatcaccgtggcagcggtgtttgtcaaagaagtaatcaaactccatggctttcctcgctctattgtgtctgaccgggacaaaaaaattttgagcttattttggaaagaactatttcgtttacaaggcacaactttgaagcatagttatgcttatcaccctcaatcggatggccaaatggaggtggtcaatcgctgtctcgaaacttatctccgttgctttgtcagtttcaaacccactcagtgggtcaaatagttgccttgggtcgaatattggtacaacacttcccatcacacctccactgggatgaccccctttcgtgctttgtatcatcgtgatccaccacccatcatccggttcgagccatctagctctcgtgtttctgcagtcgaagaggtcttcactgatcgggatgccattttagccctactgaagcaaaatcttcttcgcgcccaacaacaaatgaagtcccaagtagaccgtaagcgtagggatgtccatttcgtagtgggtgatctggtgtatgtgaagctccaactgtaccaccagcggtccctcgccaaacggcccaatgaaaagctatctccacggttctttggtccctttcccgtcttagctcgcattggaccagctgcttaccgccttcagctccctcccgactccttgatccatctcgtgtttcatgtgtccttgctgcgtgcagctttggggcctcaacaacaggct

SEQ ID NO: 100318 - DNA, 1030 bp, Cannabis sativa
taaagagtcccgagtcaaaagttatggcaaaaaacaaaaactcaaaaatttataggaaagcacggcctcgcgagcccagccgtggccgcgacgaggggccctgtaacccaaaaaaaaagccattttcaatatgctcgaattttaacctaaactcataccaaacttgctcaaaacatgcagaaccacaaatcccatcatacattatctatatccaacatgtacaatagggatttcaaagattaaaacaaactccaaatcaagtctaataccaagaaatccaagcataaaacccaaacaccacaataactcaaaaaattcaagcttaaacttcaaagcttcaaaccttcaagtttaaaaccccgaaattcaagcttaaatccaaaaattgaaatcataatttcaaccttaaaatcacacaaaataatctagatgcaacctatatcatcccaatatagctcaaatacactaataacatcacaatccatataatccttaacaacatgcaactcataagaataccattcaacaagttcaaagagtttcaaataaaatcagcaataacacaaatagaagagctaaagagttttatcacaacccacaagctccaagtatgcaaaaacccaccaatgatactccaattcaagcttaaattcaaaacttgataatttttgatgaaggtgagaaagagagggaggggggtcggatagggcttagaaaattcagaaaaaagattttttaattttctcaaaattacttttgattgaataatgcttaaatggtcaaaagaccaaaatacccccataatcaaaaataagcatacttatatagttaagggtaaacttgtcctttcatcacacacataataacacataatttcagatttctcatttatcatattaacacaactcttaaatcctaaaaatgtattttgggctctcaatccggtttggcccaaaatacccggttatgactataccgcgccgacttgtcagaaaacacctacaggtagacagaataaacatactatata

SEQ ID NO: 100319 - DNA, 1120 bp, Cannabis sativa
  modified_base (1059)..(1059): a, c, t, g, unknown or other
tctctctctctctctcactctccatttttcaagaaccaggaagggtttgagattctttcagctcaatttacggattttctagcaagattatagtgttccaatccaaggtataacccccttagctctctctctctctttgatttcttatgttcaaagataagttttatgcatgctttgaaaactaggttgttgtagtgattgtttgttggtgtttgagtattttgtagtttaattgaaggtatttaggcagaattagagttattttgtcgcttggttttgtgtttggataaggtttgagctttagaactcaaactttagtctttaatggtgaattgtgttttgtgggtatttcttgattttattgcatggattatgtctattatgatgtaaataggtgttttggaagttagtgtgaattttgggattgaattgagttgtttgggaggtgtttggtgttttctacactgaactggtcgaccagttcagtgggacctgtaggaaccaaaattctggttggtccccaagaaaccccacagaattggtcttctagttagggaaccggtctgccggttggagcagttctggaaacccttgtttttcccatttttgctatatttagggtattgccatgttatccattgtagggaaacttttagtttcaattttaagtccccaaaaagtgatttagcgtgtcaatcaccagttttatgaataatgtgatttaggggcctgtaaatcgtcgagcaatagttccacttaggtttatcgacacatttaaattcagaaataaggtaagattagtataatgatatgcatatgtgtttacatgtttagcatgcatatttatggagcatattagattagattgatagcggtatcagtatacatagagttgtactggataccgatagatgtatgtttggctcaagtacgagattgaagctatcacatcagtacgactagagtatgactagagtattgagtataggctgataatatggttgatagtactgccgtaggaatgttctagacttagtaccatgttggacacggggatanggttatggttgggtgtatgggtgcatgattataatccgttatagttatgttattgattata

SEQ ID NO: 100320 - DNA, 1729 bp, Cannabis sativa
taaatattaattattatataatatgaattttttatgtaattactaattattttgttaaacaagacaataaaaattaatatgaaattatcacttttacatcgaaatacataatttacattaaaatataatataattattagaatgtataattaggaaattaataccatagtaattatacaattatatctaaacactccttattaataatttttgtaacgtataattctataaaaatattttgttttaataattggcccccctaaatatttcgtcctgacttcgcccgtcattgcatgtgatgaatattgattaaaaaaaatattaaaaggcactttaagaccgtcaagtactataaaaggtattaaattactatttgtgcaatttactattgaactttttattttttatttaataaataatattataaactactaaatatttacaatataatattatgcaccttaaaatactttataacaatactctaattaacatccatatatttctcttaaatagcacacactcctactactataatgccactactataatgtcagactcaaaccttgaactcgaacctggacctggacctaaacctcggaccccaaactcacattcgaatccatatttaggctgggttagagttggggttgagtttatagtaaaaataatataactttaggcaagttattaacacaagtcaatatatcaaacattgtattgtattaaataatacaatacagtacaatccaactcaatacaatataatacaatatcattgaacaaggcgtaccgaacaagccatatatgtgtctgttatgaaatattaataataatgttcattttagttgcataatcaaaataaatcttcgaaaagcttagagtagaattttattgagaaaatgttctatgctttaaattttctttcagaatttatcaagttggccatggtttgtgtgagaaaacctaaattcttcctaatgattaatgtataccttcatgtttttttttcgaaaggaatttaagacagagatcatctctcccaactcttatttgtcaatgaatagtacctctctagaactctttcttaagttgccgatcatgatggttttaagctttaccacaaatgcaaagaattgagactaacacttccttgttttgcaaataatgatatcttattttctaagggtgattacaagtcagttgttttgtggataagagaatttaagagattctttgatactccaggcttacaagttgttatagtacgaatttttttcctaaaaatataagtacaatctcgtattaattgactcgtggattcgattcccaatcagaaaaggatgatgtgtcaatactacttccaatagagctatcctcgcatgaaagaaacttgtaagaatgtgtgactgatacaaggtctaaccgcacactatgctcatcatagtaaagaaattaagatcaagagaagttagcatgtcacgcatataccgattatacgtgacgagcagatatatctctcctacaactcacataaagaacatcaattcaaacacatttcaccaatttaaactcccctattttcgagtttttttaaattcactattcatactctacatttatagaatattattcattactctaaacatattttatcaattgttcaaaattttaattttactttttatatgaggatatatgtgtaaatattaatattatatgtttgaaa

SEQ ID NO: 100321 - DNA, 571 bp, Cannabis sativa
gaagacaaaaatgataattagcgttttatttatttattataccactttgtatcataaaatggttttgcacattgaaacacaaatataaatattttgctaaatatatagcatttgcttattactttttgtgctaaatttaatttaactatctcttgcattggagatagttttaatgtagtgctatatattttagaacttttctaaaaattaaaattttgatattgtgctattatataaatttggcaaaccctaaagattgtatctagctaatttaacataaaatatgtataacaatgtgctaaattttagcacaacaataatcacaattttttagttccagttttaccattaattattattgatagactttaatatatatatatatataaatatatatttgttttaaaataattaacaaattttgtatgtaattataatagactaacttctaacacacaaatgtatatataaatatatggagaaggttccaatggttacattaaatatgtaaccatgatggttacatttatttttagtcgttggatcattattagacggttatgattaattt

SEQ ID NO: 100322 - DNA, 928 bp, Cannabis sativa
tagatgtaataaaggtataatagagaaaaacccttgaaaaaaatagcatggttttttttttaaaaaaaaaaaggaaaaatagcatacatttaaatcaaagacgacacactaataacttgtttcctttttcttcttttctttcaaaaagggacaatagaaaactcgatcggtttgttattaataagtatacaatataaattattatgtttttaaatggatgagtacaatttaaacttggtaatgtagtgatttcattaatgtaattaaaatattataaatacaaaagatgggttcggtaaggtaggtgtccgttagacagttgagatatgggataggcaaggcaggtactttactaataaataattaatttattaatatcatccacctcgagagaagttattattaactgtaatgggtatgtaatcaaacttaatttatttcatccttacaaaaaaaaaaaaaacttaatttatttcatcctaaaaaaatcatttattttcattagtttatttaatttagagcatcttcaattaaagttgttcaacaaaatttaaaaaccaccccacttgaataaaccgtccaaaccaaactaaataaatcatcaaaaaacacaactcaaataacctaacgaaaaatttaaattgcgcaaaccaaatgaataaaacgacaaaaaatataactcgaataacctaataaaaaaccaagcagtcccatgaatatgttgggcaagttgaatattattctaacccgcccaaataaactcatttgtataattttactaaaattatttatagtataatatatataaattacatttaataataattgaactattttatatttaaaatttgtattttatagtgtttaaattgaattccaactttatagttggtaattttgattatatttgaatattgaagctgaaatt

SEQ ID NO: 100323 - DNA, 874 bp, Cannabis sativa
ttttcaaatttacggtttgcgtttctaaagtggtttctctggtggtttctatgtgggttgctatacgatttttgttgcgatttaggtcgcagcgccagttgcaatatgagtaatttctatgtagaattctataaaaatgcaaaaaaaaaaataaaaaaaactgttttgaagtgtaaaatagaaaagccgcttaaatttataattattatttttaaagttaatctaaattatgtttatataggtatttattttataaaaaataattttatttatgaattttgctatcaatttatttatactaataattaaatataataaaattaattccttaagtattagtaacgccatttttttttgaactcatagttctgttctacctaatcatcttttaaattaatttttttatcaagaaaataatttctattaatgaaaccgagccaattacatccacgaagggattccctttcaaaataaatttgacaacttttttttacatttttaagaacaattttatttatgctagataacttcttttcatatacaagattaattgtacttttgaaacttttttaatgctaatatttacacgactcggatttgtacaatttttatatttatacactaattttagttaagctaaatctataaattgtacttattaacacattcttataaacaaaatatatataatttttatgacacattctaatatatattttttaatttttaaaattatatatgcattttgttaaaaaaaaattgttttcaataaaaaatattaaaataacaaagcaattaacttatagccaaaaaaaaaaaaagtttattaatatatacgtatagatcacatatatatatgaaacaatcctctttt

SEQ ID NO: 100324 - DNA, 2578 bp, Cannabis sativa
ggttttcagtcctaaggtagaagtgttgaagcaacttcaaaagaaaccagaacaccaggggatgaaactacagtaagaatccttttgcttcttgacccaaaagtatgtaatgcattctaatagaatgaacacaatatcatcttataaacatattcttatacgttgatctggcacttctgttctgcccacttgtatatctggtactagtattgtttaaaatcttaaattgtgagtgtcatttgatcagctttgtggaagatcgactggcaaccctaaagaatgtcattaaagaacctgagttagatggttggaacttgtatctcggttagtacctcactacctctcatacatgtatttatctgtacctagctatgttctttcttcaatattttttggtctgcagtgttgtaataaagtgctaattgctaaactaaaatcatttaatcagtggactggggttacaacactcagaaagaaagagaggaagcagctagcattcccaggattcgtctcctcgaactttctgacttcagtatgaagctgaaatagctttgctgtttcagtaactttatctctattcttctcttgatttattgttttacaaccgatgatgcaaataagctattgttctaattttcactttaagggaaattaatactgtatactcaacagaaatttccacccccttgaaaaatctttattctctttttctttggcaactatgcacaacattgctaatgaagaaaccaaaagcattccaatgcaagtagattttgctttcaataatctaattacataaaaaatattaccccaaactaattgaagaagaaatttagattattcaaattcatcttttaaattgattgaattgttaccgtacttctcactagtatatggatggtttttcatatgtaggtaataacaataagatacttaagaaagaaagcgcttagcaaatcaaactaaatcaacctaacaatgattttcactattagttgaattcatatcagtccaactataactcctctttagcatttctatcattctgcctctgcttgatccttaattttcacctcgtatgcctctcattgacccaacacaaactctttctcctattaaaaaaaaactacagaaaacagttcacatctccaagatctattacaaattgactacaaactaaatacatagaatttcatacatatatatacacagagagagccgacctctgaaacatcttgtccactttcaatggcaaacatgatagttctgagatcaacgcccatgaacttagcttcaatagctccaattttagaaattttgaccatttcatagccgtcttggacaccgtgtcctgaaaaattgggaacaaaatttagagttcagatcaatttgaataaacaaaagggcaattaagatgtcaaaatatctagatggttattgtggtatagttcctccaaatgaaaagcctccacaatcgtcatttctggaagttgtttactcacggttgccagtcctgaaaggagtcttgtagaatgatagtcgagtccgaaaggaagttctcgaatgactatcatatctactcctggttcaggtctcaagatagctagcctcactctaggagggagttcttgttggctagctatccatcatggaatgataatttcttgatagtcgacatcagtagactttatcttatccggaggcgtcttcagcaagtattcttggtccttgagtccaaaagctcgtttacgttcccagaagctctaatacttaagctgactttgagactttgctcaaagaggagttggtcaagttagttagttagataactaacttaacaaccttgtttctcgcagctaccaactttaggatcttgatcctaagtctataaataccactttcacttatctttttaagatactaaatacgagattcagaaccctgttcagatgagattaagagtttgagagaaaagattgagaggtagaagagagaggtgcagagaaaagagagagattgagtttgagttttttaaaaaaaatcttctgtagatgaagaagattcttgagtgtaagtgtgagagttgaaacacttagtgagtactcaacaaagaatctcatctcaacctattctagctcaatcaataaaaaagaattacggtggtgttccataactggaatagagctatagatcacattgatctatcaaaattgaaccagtatatatcttggtgttgattttttttattcaatgcatttatctttttttgatttttcacactctatttgctatgttttatgcccgaatgttgttcttgatttgtcaatcttgtcattgctaattgtttcattgtttaaagtttaattgtgattctgcactattcatagtaattttcccacaattatacttgttttcccggtagaactatatccatagacaaaaagaggaaccgtggggcaattcacaggacccaaaatgcgcatagccactataatctgaacacgtctaccagggaaactagacaccacattatcaaggctaatggatttttcttcttcaccaaggaaaaggtcattga

SEQ ID NO: 100325 - DNA, 1377 bp, Cannabis sativa
gaatcttaattttcaaataaaaatttaataatcagaataaaattaatttttattaattttttaattaatttcaattagttttagatattagtagcctttaatttaaaaaaattgagttttccacaaaaatccatttatggttatttttgaattattcttattatattttggtttattaattttaattataaaatcagatatttaaatattttattattaaaatttaaaaaagatcttattttgacattaaaatattaataaaacctaaaaaataatctagataaatttcaaaatcgctaaccatattagattttcatttgttattttaaaatatattttattttattaatttaaattataacaatagaaaaaaaatgttattttttgacattttatcttattagatatttatcttaattaaaatttatatattttttgttaaaataacatgaaatttttaaaaagttgttaatttttgtttgaataaatattttagggtattctaatcataaaattttcaaatttaagatattttattttaaataaaattgataatatcctgattataaaaatatcatatttttaaattatttattttgttaaatttaatttattaaattataagatttaaaatataacattagaaatatctcaatttcaaattaatatattattttattagttatttaattaatttaaattaaattcaaataaactagatatttgacatttagggtgttagattatagattataatcaacatacttgttagtaaatctcgatcctggtaaaataacttccaacaccaaactcctttgtcaagtggctagaacagttcttataaagaatgtgatctcggccattactacttacttgatggctattttttctctcctagtcaaaattaccaactctcttgatgtacttatcagaagattttggtggaccggtagtagcaaagatggtcggtatctctcccttttgaattaggaggcaattttcaggttgaaaaattgtggaggcctgggtattagaagcttcaaagatatcaatttttgccttctggctaagcttggttggtttattgctgaaaaatagagatgccctctgggtaactttgatgaaagaaaagtattgttcctctttaagcttttgggataacactctccctaggaatgcttcacaggtggctaaagggatttagaagaccagggattttattagagataatagttcgtggattattggaaatcattctaatgaaaaaatctggaactgatattagtcctactatgatggtaagctcattaatccttcaaattgtaatcactgcataaaactaaaagattgaagtggaggatttggtgaggcgtaatg

SEQ ID NO: 100326 - DNA, 784 bp, Cannabis sativa
aattaaatctatcataaggttaatctaattttattaaatttaaaacttagcccacatgcaattttagatttaataaaattttcatcttcagtatatttatacattggtagaacataaatttattaaagcctcaaatattagacacctaattatatactccttctcttgcagctacctcatccaccttaaaatacgctaaaagcattagtgaaattcctgagcctttaagagtgataatttcaaaatctggaaggaacgagttcttattcacttagcttgtgctgacatagactacacaataaggaagggcgaacatattgttgtcattgcgaccaaaactactgctaagattgtactacgtgagaagtgggagcaatctaacggtctttgaatcatgttcatcacgtctaaaatttctatgggaatgtttgggttggtggagctacctgaaaaggtcaaagacttgatcaaacaaatggatgagcagttagacacatcttataagtctatattcaaaaacctcattcaagagttctcattcacaaaattcattggtgttaaaaaagtttgagaacacatctcaaagatgagggatatcactgctcttctaaagaagctcaatgttatagcaactaaaactttcccggttcattacatccttcacaatattcctcttaaatatgggtctttcaaaaattcctacaacactcatagagaaaaatggagtattaatgaatcgataatcgttattcgtattttcaaaaaaaagacatgtgtaattcaa

SEQ ID NO: 100327 - DNA, 682 bp, Cannabis sativa
aatgacacacagcagctgtgtgccctattttgaagcagacttgatagagaagtatgaagggtgcgattcctcgaccaagataccttcctgtgggtcgattgggttggcctccatatccacgaccattataaccagtagatcgtgagtgaggcatttcgaatccaaatcttgatgaatttgtagagagattggcagttggtttggaggaaggatcactgacagtgtaatgtcgttcaagacgactttcatgagtcaagagaagggattgtatggattcgaaggagagattgtccaccaagcttgtgacatggacaacaactggatatactcagggcctaggccattaagaagatgcatgatcaaatcactttcctccatgggatgtccaactgtggataaagaatctgcaagaaccttaactttgtcatagtaatcagaaatggagagattacctttctgaattgtagaaagttgtgatttgatctgtaataatcttgctttgggctgagaggcaaagcgttgctccaatgctttccatgctgaaaatgaagtgttgtaatgagccagggagccaagaaccgttttagacatggaagagcgtagccaactaagaagaagttggtcttttcgttgccaggccagaaactcagggttgacggcaccattaacgagttgagttggt

SEQ ID NO: 100328 - DNA, 1058 bp, Cannabis sativa
ttccgtgaaaccgtatttttgttatttttgtgcatttgtgaaattaacctttttttcaaattaaataacacatgtagtttttgtgatttttcaaattgtgactgcactataaaatctcaaaactacataaattgcaccataaaagtacaacatggtgaaagtggtttatactattgtcaaataattcaataaataaatattataataaaaattttaccgaacaatttaatgaaaatacgaatacatggggactttagtaccaaatcccacatatatcttgagcaacatttgttcatatattattttatctaatttaataaatctgaatctcataataatcttgcatatatatagattttgataaatttaaaaactatattcaaaatttggtatttgtaacaatacggtgctgcaatttaaatagctttttagaattcaaaactgcacaccacaacattttcataatttcatattgtgtgatttagaaaaattgcaaatcacaactatataaaaattgaaacaacccaaattctaaatttaaaaaaaaataaaaaataatatataaaatagaacaacaaataatgaggggtcatagccaacctcattaagtcctaattatatgtaaatagtgtacgtgtgcaaaattaatatacatagtaagcggtatatagatatagataaagtagtatgtcttttttgattggagcgtttatatattacattacataacttggaactcgaacttagaacctccaacacgcatgcacctttctatagccacttgagcagtaactacttacaattaaatattcgagaaaaaaaaataaaaaagatatcatttttgctactaattaatcatgacattaataaagatgagtaatattatgtaattgtactataccaaacggcaatatattatataaattaatatatatatacacgtcatatatatatgattaagaactcgtttagaacgccgtatcaagtcgtatattgtattgtattatattatattgaatttgattatatatcatatttttatataatactatgttaaa

SEQ ID NO: 100329 - DNA, 678 bp, Cannabis sativa
ataaataaataaataaataaattacaaaatgaaagtaaaaaagtttgagctgaaaaaagggtacctggagcaggaattggagcagcagttgctgtaaatacaagaaagaccaatttcactcgttagttttacacatattgaattggacaaatggagtaaataataagttagagatatgaatttcatgtgattgacctttgcattggacagggacaccagccatgttacaagctcgggggagggatatggctagagaacggttgatggggacttggaaaggaacacttccagtaacaatgaggcacaagcagtccatgcctgagctggtgagggtcttcaaggcgttgcagcagtctgaggttggggaagttccagcggaactgctattagtcacgaagttcatgcaaggtgtgaagctagagatcattgaggcattgcagggtgtgctgacttggccgaaaaccggtgtgatcaagaccgcaaagatggccagcgctgccactagtaaccgtgggagatggactagagactccatgtgaatctggtttggctttttgtttttgagttgagaaagatgatatagtagtagtactatagtaagttttgagtgttttaagactgaagtgattgtgtattgtgtttggaagaaggataggatgaaaggggtattttatagga

SEQ ID NO: 100330 - DNA, 839 bp, Cannabis sativa
ggccaatttctcacaagaggagatgaaaaatgcagtatttagcatacttggaataaaagccccgggtccagacggctttgttagctatttttttcaagataactgagagttaattgtagttgatgtatgtgcagctattaactcgtttcttcaatcgggaaaattgctgaaggagattaactcaacagtgtttactcttgttccaaaaatgaaatgtccaaactcagtaagtgattttcgacctattgactgtagtaatgtgctttacaaaattgcaacaaagctaatatgctccaggttgaaaattactttaccggatctaattgctccaaatcaaggtggctttgtcaaaggcaggtttatagtgcataacattatgatatgtcaagacttgatttgacactatggaagaaaaattagtagaccaaattgtatgatcaaacttgatctacaaaaggcctatgatactatggaatggggttttttagaagatttattacaggctttcaagttcccaaacaagttcatctccctcataatgaactgtgttactactccaaagttttcaatcctaattaatggctctatgcagggtttctttgaatccaaaagaggtctccatcaaggagatccaatgtcgccattgctttttagactggaatagaatatttaagtagaatcatggagaaaattggggaaagaaaggacttctactaccatgatagatgtagtactttgaagttaaatcatctaagtttcgcagatgatgttcttgttggaatttattttaccaggatcttagatctaagatcggaagagcgtcgtgtagggaaagagtg

SEQ ID NO: 100331 - DNA, 1345 bp, Cannabis sativa
cggcccaaagtatttttgtaattttttttccttttttgtatttttttgtttttttccctattttatatcctaggaaataacatatgaggttaggtaaccgtatgatatttttataagataagagccctagtagaattcattaatataatgtcttgaaaaaatcaccgtaattaatattaatatgagcatattataatattcaattgaactatagtactactactataagtgctataaatattgttattattgttattatcatcaatcagaatcagaaataatcaacggtcaagatgaaaagattgggactattataaatataattttgaataaggaaagtttgtcacaatgtggtggtcaaacaaattgctcccctcagaatacttgcccacctggatgtcaatgtattggattagggttctaggttcggttccgggtcagggtcagggttagggtttgggtctgggtcctgggtccgggtcctggtcccggtccgggtttgggtccgtgtcccgggtcccagtccgggtctgggtcagggtccgagtccaggtcccaagggatctgattcttgaattaagttttttttttttaaataaattgtaatcgggtcgaatcagatccgatctagaaaaaaattagcggggcggagcggatctaatccaagatctaataagtatctgaatgtttcagatcagaggtgaactgtcaggtcggagctccaaccctatccaactaaatggatctttttgacatgcctatattggaatgccatttggtttaaaaccaatttgcatttaaaaatatgtactttatccatggattgacacctacatataatatatatatgtgtaaaatatataataataatgtcaatcgtatgtataattataatgaataataattaagaatgttatacatgcatgttgaatctcttcgccattgatgaacactcaagcaaacaacaattaccagaaaacagagaaaaaacagagacgaagagaaagatgaagaaagagagagaaaggtaagaaaaaagaagattgaaacaaagggcaatcttatcattgaatgaaaataagtgttggcattatatagccaatgattacatgaaagagaacaagatagtgataacaaaaattagttagagccaactgtaacaactaactgatttaaacaaacactcaataacagaacaaactaattcccctaacacggcccctcaaggttacaatttgaagtatctagagaatctttgatgtcttcaattgtaagcttggatcgaaaaagagagaaccagtttgtagagattgcctttgtaagaccatctgcaagttggtcttga

SEQ ID NO: 100332 - DNA, 3856 bp, Cannabis sativa
  modified_base (1954)..(1954): a, c, t, g, unknown or other
tatccctaatctataaataccacttacacttataattttaagatacaatgagatcagacgagtttcgagaggtgatcttgagagagaaagattgagaggtagagagagaggtattgagaaaagagagattgggttctgattttttatgaagaatcttctgtagataaaaaagaattttgagtaagagtgtgagagataaacactttgagagaatctaacagagaatcgatctcgattgtattgtaccctattcctgctcaatcaataaagaagatttagtggtattttagaactagagtagagtcataaatcacatcgatctataggacttgagctaatatatatctaagtgtcaattttaatgttttattactctaccatttcttgtttaaatactctgttcatctgtgttttaatcttcgattattttgtgtgaatttttaatcttgtcattattaattgtttgttgattaagttttagttgatttgattttgcacattagttataatttttccacaaatcaaagcttggtaatcgatcaagagaacacagaataaagattctttctgttgcaattcttggggaaataattaatgttgtcaatggcgagattcaaattagataagtttgatggaatatgggactttgcgcaatggagagaaagttcgaaaggaattctagtttactagaaattctccaaagttcttggagatgagaagttactggctgagaagaaatcagaagagaaagcagaaatggaggagatggcttattacacgatcatcatgtacatgtccaatagtgtgaggagaaagcttgttacagaaaagacgaataaaggaatttggaacaagcttgaagaattctatatgaagccatcaattgctagtaagattaatttcttagaaaggttatatgattttagaataatttcttctcttttttgtttgatgataatattgacaggtttaatgagattattgtaggattggctaatataaatcataaagttgatgaagaaagtcaagccatcattttattgagatcgctagctcctaatcacataccaagaaggcaaggttgccatcaaatatggcaaatatatgattgaattagaagatgttcttgctgcacttaagtcgaaggattttgtattacaattggaaaagaaatccaagaaggaagaagtgtatttggcaagagggagatcacccaagaaattaagtttaaagagtaaacacaccatcactctcaatcaagatcaaatcaaaagaggaggaaactcgaaagtattgtggaaggcccaaaaacttccaaagatattgcaagaagtacaaggagtagcaaggtttcaacaagtctcataatggagataggaaggagaataggcatcatcacgtcaggaaagattcagctggagttgcaaaagatagtgacgattgctcaacgaatggagaatcgttttccatctcgaaatcttcaatgaacaggagtggacactagatgcacttatcatatctgtccgagtcgagaattatttttcgattataaatcaattgatggatgtaaagttctaatgggaaatgatcattcatgcagggtcattgaaactagaaaggtttccatcaaatagtaagatggtggaatcaaggtgctaacaaacgtaaagcatatcccagagttgagacgaaacttgatatccctgggtatgcttgaagatgagggttacaaatacaagtccatgcacgaaatctttaggatcaccaaaggttcatttatagtgatgaaaggtgaaaatattaatagtttatatgttctctaaggagaaactgttgtagccagagaggcaagtttggtgaaagggctagaatcggatatgcagttgtggcatcacagaattgggcatatcagtgaacaagcctcaaagaactgcacaaacaaggtataattganaatttaaattcttgtgccttaccattttttgtgaaccttgtattttagggaaacaacataagctgaagctcactccagcaagacatatacctatgaagatactcgaatatatgcatgttgatctttggtggccatacaaagtgcctactcacaccggtaagaaatattttctttctatacttgatgactataataggtgtgtttgaacctacttactagcaactgagagtgagtgcctagaatagtttagagtttggaaaactcaggtagaaaatcaaacgaatcttaaaattaagaatcttaggacggataatgggttaaagtttattaactctaaacctgacaagttgtgtcaagaatatagaatcactagccataaaactgtagtgaagaccccagagaaaaatgttgttgcgaaaaggatgaaccgaaccctattgaacaaagttagatgtttgttgttcaattctggattagagaaaccattttgggggaagctctagcaattgcaacctaacttataaatagaagcccaaacctagttataggcttaaagaccccgtataaaatgtggtacacagagccccaaacctaacacacttaagaacctttgggtgtatagcttatgtataccaatctattgacaagctggaacctagaccagttaagggaactttcctaggttatgccttaggtaccaaggggtatataatttgtatttctaataaaggtagaccaaaggtagtgattgctagaatgtgatttttaactaattagaaaatcctcacttgacatctgtagtctgtcttcgtgtgatgcagggaaaatggggaacaagaacactacacgcttggaaatagaatacagaacaaaagatccagaagaaagttcatagtcaaaagccattgtggatctgaaagacaatacaaaagtgaaagctagtagagatccagaagataacaacgaccaaacagatgttttagaaggatccggacaggcagttctggaaggttactagtttgctcatgatagaaccagaaggaagattcaccttcctaaaaggtttgctgaggcagacctgtttgcatttgcactggtggtagtacaacaaactaaaattaaagagctcagaagctacagagaggcgatttcaggtggaaacaagtcaaaatggctccataccatggatgaggagatggattcactctagaataaacaagacttgggtagttgtaccaaagttggagaacaaaaagattgtgaagtgcaaatagattctcaaggtgaaaggattggagctaaaaggattcgtagacgctgactatgctttgaataaagatacgagaaaataaaccacttcctacgttttcatgaaaaattggaactgtatatgctggaaggcccacttacagtttgtggttgccctttccatcaaggaaggggaatttatggctactatggaagcattcaaggaagagttatggcttctgggaatgttgttcaaattgaaacaactaaaaggtggagtgactgatagtcagtcatccatccattttggcaagaatccaatttatcatgaaaagaacaaacatatagacataagactctactagactagaaagaatgtagagggtttggcgaaattagagaaggtcagatcaaaagataatccttctgaatttggaactaaggtcttaaaagtaaacaagttcaaacatttcttaaacttgatcaatctcagaagttaggatactaagatatctagaacaccaactatgaatgttgcattctttcttcatcaatatcaatattttaatttgaagaaactaggtggaatttgtggtatagttcctccaaataaaaagatctccaataattgttctagttatagaaagttagatg

SEQ ID NO: 100333 - DNA, 1873 bp, Cannabis sativa
  modified_base (27)..(30): a, c, t, g, unknown or other
tactcttattaatttgttgttgatttnnnnttatctgtatgttatttttttgttgttgatttgatgttattttcttgttcttgtgccttatataattatccaaaaaaaaaaaaaaaaccttgcattgttgtaggaaactaataataaatggcttgttgaatatctatatctttccaaagtatgttatatttttaaataataaatatatcaaaattaattatactctttattcaactaataataaaaatcataccctaatttttaaaatctataataaatattatattagctcctatatataaatacatatttaaaaaaagcattgttattagattcaaatcgtactttttagaggtgacacctacaagtaattatcgatattttttttaaaattattacattaaatatatgaaatttgatatttaattacactaatagtgatatgacacctaaaataatactaacaaacaataatatattttagcatttctcatttaaaaagtatataccttgaaaccacaacaaaaataggtgtattactttaaaatgtatacctttttgagagagacacgagatagataaagagaacaacatgaagtgtttgagataaaaaaaaaatatgacacatacttttgaaataatgaaaatattagcataatttatgtgataagtatgagggatttatatatattttcgtaaagtataaaaactaaagagtatgttttggtattatttttttaaaaaatatttttagaaattattgtaaaaattctaacgcgcaagtatacatattgattttgagtaataaattcacatgagtaaagtggattttacaaaaattgtaactaagtatcaaataattaaatatttgtttctattcagcaaataaataatttgatatttgaaagtaacaaaaataatagaaataaacaaataacaatgatttagaaatataggaaatttaatttcaattacatcaactttctatggtaaaatacaatctaattattctttaaattttatgtgatagcagattaaaatttaatctgcattcttataagacatatagaatctaaattatacgacaaaattctacacttttgtgttaaattacacatataatttgcatgaagcaaataaatcttaattactacacagaccatataggtacttttgtccaatatcaaaatctatgtctatttctctataacataatcaatactcactttttaaattttgcgtgaaatcataaacaaataattgttgatcaagcagttataagcattaaacacaaatgaaacagattcacataagaaattgaagaaaaaaactaaacttacattaaaatctattaaaaaccccaaatatgagtttagctcctcatgatcattctaaataattgattaagactaattaaaaacataaaaataaagatagaagaaaaaaaactctttgaagatcaatggttgtagcctccaagatcgcttcctctgtctatttttgtcctcccaaaagtttcaattaaaaagctcccctttttttcgaaattagggttgaaaaacccttctgggcctgaaattaggtagtaggttgcgacatggtgctttcaatggcacggctcgggtggataatttttgggcaccgagctttgtagtacaatgactaataatattttagccataactttttgagtattttttgaaattgaacgattcaagttgttttggaaagttgaaagagagatctaaaacttttactcataatagttttcctgaaagtgaatgcatcatagttaaaaattggcttgaagcttcagacttgatttttgatcacaaacggaacgtattgaacatccaaaacttagaatttttca

SEQ ID NO: 100334 - DNA, 1003 bp, Cannabis sativa
aacctagtatacatgcttacccatacgagaggaagctattatttccttttccggtagaatttttgtacttttcatgatgctcttatctttttctcttcttaattttcttatatattttcttagaaatttgatgtatagaggttttttttttcctctctctcatctatatatcaatatatatatatatatatatattttttgagtacatatattggttgcgttatatttatgttttgcatagtttttgctttagatttattcttcactcattttggcttctctacaacaataaccttttttaccttgtggtttaccatgatcaagaagggttgagacaggtttgttattcatcactcattattaattatttaattatccaccaatgaaaaatgctagaagtcatcatctagtaccgttcaaaatatcttattgttacaatcaaatattaaatattacctaatttgatataatgatttgtataaaatatggctaactatttttaaaattagctctaatgagattatctattatagtagtattatttggtggtcagaaaattttaattcagagtttgtcgatactattttttaataaatcctccctccaactttagtcgagtgcttattgttttcggccttggtccaacacaattttgtatcgtgctttaatcgaatcccaccatttttcttctgtaatatttttatacgggctctgttttctcacatttatttcaaccatgaatgagataattaaccgtatattttatgtgtttcttattattaaaaaaattattttaattctttaagttaaaattaatttaattgttttttcagcatacaactaaattacgttaaaacaacaatgaacagtaacaaatgcaattatcgtgccaaaaaaaaggtcaattatgttggtgaagacagttcaatatttcatttcattaccttatatgtgtgaccaaagacagaaaagaaaagcctatatcatcatcatgtatataagt

SEQ ID NO: 100335 - DNA, 1724 bp, Cannabis sativa
atcaaattctggccaaaaatttacaatcccctttaacttctccattcctctttatagccttttttatcttattattatttttattggtaatgaaaactcacttaatgtaaagtggtagaagtggaaaaaatatttaatttatttactctattgttgactgactcattcccattttattattattattgatttgtaaacgaaatatttatatattaaaataataataataatagtaataataatatatatttttttcgttcaacaataccaaagagtacaaatctagtttattttaatcttatatggttcaaaatggtatgtttcatgaaacttcttgtgttgatacttcatctcaaaatggtgtagcaaaatgaaaaaaataagcatctccttaaaacagctagagccctcttatatcaaatacatgttcctaagccgttttagacttatgttgtttctgttgcatgttttttgattaatcgtaggccatcttctattcttaacggtgaaatccattcacttgttcatgatgttcaggtaaccaaattagatctcacgacattgaagtgtatattccttggttattcttgtctttgaaaagggaataagtgttattgtctcgatcttaataaatatcttatttttatcgatgttactttgtgaaaaatacactttatttttcatcttcacccattcctactcgtcaggaggatgataatgatttgtttgtttattttatcacattttctgtgtctgacacatgttctaacaagtcttttattcacttaccttggtcacaactcctgacatgcctacacctcctccacctcttattagagtgttagatccttggttcgcttcacctatgctaggaaaagtgaaaggtctcgctataattaatttgttggttaatttctttagtatatttattgtgttttgattgttggcttttggtttcgctttgtgagtgctataaatttatacatatatatacatatgtgtgttgagtggttgagtgagcatgcttgatctgaatattgattttagcatcaattagagagaccccatgctctcggaacctatgggcattgtgccaacttatttacttaatatcaatattagattttccttcactctcaaatcagtatattcctataattattattttatactattatatgttactaccccaacatcagtaatttaaatcttatcatttggtatcagagcaccgattccagtgaatggagactatagatgctgagatttcaggcatgaaagaacatctaaaatcttatgatcgcagcttagttgtggttacagaacaattgaagacactaatgaatggtcaagctcgcatcgccatgaactcactagcatccgtgaagcctctgtgacttctcaaaccccttgtacgcagattgttggtgagaattcgtcaaccccaaatgcaactagatttggtacaaatgagaacaaagctagaggaaggcggcaagagttccaagccaaaaaaaattaaactgcccgtatattcaaggactggcccgataattaggcatatcgtgcagatcagtacttcaatttacaacgactgactgtggcagagcaattagaagccatcgcgttgtgtctcgaaagggcagctttgcactggatcaggtgggaaaatcttcagcgaccgatcaatacctaggaagaattaaaatccatgctcattaggc

SEQ ID NO: 100336 - DNA, 831 bp, Cannabis sativa
aactattatagctttccacataaatttccagcttaacaaattgatatgcagtagtcatgcatatatagtcagtcatctagctgcatttcactagttttttagtaatgtgtgctcggctgatctatttttcattttttcctaacggaatcctctcagagatgaacaaaagggtcaaagttcaagccagagtcaacgcaagaagcgcaagttgtcgccgaaagaaggcagacatataccgatagatgtgttctttgtgaagagcaatcagaacttttaaaagtatgttctttttatttctgcttgtcctgtacatagttctgttctttgtcacctattatgtgattgtaatactatagtgcattcatgtataatgtatttaaaaaaaaaaaaaacaacgcattagaaccctcaataattttcttaattatgtttttcatgttcatctagtgccaagtgaataagagtacatttatttgcttaaaataaaaataagaatatttggctgtagctttatctcccgaactcaagaacagtagaaaaatcaattatgattattagatgtgggaaattccggttatgcatctatgctatcgtagtagattttggccattagagcatctttaatgaagatgcaaataatacaaatacaaaatatagttcactttatcaaaattctacttcaatgatgtgttaaattgtgatgtaaatatctcacataaatttggatcacaatattacatgatgcaaaatttgcatcataataaatgctatgcttttatatttatcattatattatttttaatattttattattaaagtttaattaggatg

SEQ ID NO: 100337 - DNA, 910 bp, Cannabis sativa
  modified_base (777)..(783): a, c, t, g, unknown or other
cacttacctatgattacatcatacgaagcattaaccacgtcaattaatgtttcgatttttgtttgtaagacatgtttccttcaatcaatatgtatttttccaacatgttcaaaaaataatacgcatattttaaacatttatcatcaccatcaatttaaacatataattataaactataccatactgtttcaaaaaaaaaaaaaaaacatataaattatacacacaattagtttatataatatctctcaaaaaaaaattagtttatataataatatttatatatattatatagaaatatttaaatatacattaggaaaatatattgtacacctaattataattatatagttatatatgttgtaattatttaagacattttataaattttttgaaaaattcacaaaaaattaacacaccaaaaaataagaaaaatttacttgtaatagattaaaaatttgaaaaaaaaattacaaaaatacatcaacacagaaaaattttcattttttactatttaaattttattttatttacaaaaatatctctttagtaaaaataataaaaactatttttttgttattttataatttatttatagttgtattataagtgccatgagattgtttttctatttgttttataatttatttatgcctgatttatatttgttttgaggttaattttttgtttgttttttttactttgatctgaacaaaatatgtttttgaaattttaaaactttataaccgtatttctgtaattaaaaattttaggccgtannnnnnnaaataaaacataaaaaatagtatttttgaaaatacaaggttcaaataactttttatatacttgtctattttattctatatacatgtgaattataataataaataattatttttttagtgtaattttt

SEQ ID NO: 100338 - DNA, 1636 bp, Cannabis sativa
gtacaatatataaaaaaagaggtaaaaatgatagactttagagaaaagagggtaaaaataaaagagaacaatataaaaagggtatagagtgtaatttcctctaatataattgaatattgactattgggttgggtaggtgaggtccaatgtgtaggcagtcgttgtttgtacacagacgtatgttgacagtgaaaacttagcatgggcggctgctagtttattgaggttagaatagtggctgatattgacccaaaaaggtaatttccttttgttgtgtgcctttttgaggcccgacagaggggacatgcaaccaatttttttttttcaggattcttgtcgaaagattgccacataggatgatctcccaaacactcatatgttcccagatgcctctttgacttcctttcccagatgacctctgaaggtattcgattttgcctttttgaatgcatgttggctgaatttgaaattatcttccagaacttgtgtccagcttagttctggggaagcagttatgaaatccgaacactttgtctggcttcactcatgggttgagtgattgatccatgtggacctagtgaatgggtccaataactttaatgggcttgcttgaaggtccatgtgtcatttatatccggaaaagtgaacaacgttgattaaaaaaaaaaatatatatatgattaaatataaatcatcatttttatattatcactaaaagtctatgactaaaagtattatgtggcgtttaattggaggtaaagaagtgaaaataaaataatttttattctattaatttgttatttgttgcattttaaagtattaataatattacttttattcttatttttttaatttttgaataatcatttatgaaaaatgtgttatacatggaccttgaattctatcctaggtctgtgtactgaaattatatatgttgctagctaaatccaatcactataacataataagttagctttataatgtaaaaatcttatatgtaaaaaaaaacctcaaaaattattgtaataatcaaataaatagttaaaaaaaaaaaggttgttatcactaacacatgaaatataatttgtaagattcaagactaaataaaagattctatgcactaaagataacaatgattccacatatatgaaaaacctaattacaatacaaaatatagttgttatataatctcaatttatatatatggtggtatagtaagttcacacttaaattttaaataatttacaatatactttaatattcagtgatctatcgagatggtaacaaattttgttcactaatcttaaataatcactttattataagtggccaatttttcgattttttttcctaagcactatcttagataactacatagaatgaatggcccacaaggaataataataatgataatcatgagtttctatcttaaaacgaaaagacttagttgtattaatctaataagcttttgcttaaactatcaaagttcaaattctcatcttccactttcgatgaattcaaatattaacttttagttgttatgatattccatactcaaataataacagaaattgaccaaaaagtattacactaattaatcttttggtagaaacgttgttcatatttgacctagcta

SEQ ID NO: 100339 - DNA, 538 bp, Cannabis sativa
ccgttaagaagcccgtaaacaggaagtggcggctgccaccgttggtctcggggtccttggcggtggcgtttctcatgactactgccttgtggctcttcatgccggctcttatgagattagaagtcgatgtcaaggcctacagtgagatgatagagtttgttgaatcaatcaaaatcaagtagcattcctatttgacactttaagataaactttatattattttaagtgttgaagagaaaaaaatgttgtaattatatatgttctatcattttcatgtacttaattatgatatgtattttaatttaagaatcatggtttgtttttccaaaatgcatatatgtacttattctcatttaaaatatttaaattatatttttatttaaatcttgagatatgtatggtatgtatttaattaaaaagatagaagagaaactacaaaaaaaacatggctacatttattgacaatttttcactcataacataaattttttgtggctaaatgtgacttttagtaccaacaaaaagttacttatgatta

SEQ ID NO: 100340 - DNA, 1039 bp, Cannabis sativa
tatatctatatatatataaatatacatggcatgacttatagagtcgatcctgaaaaaaagtcagaaaaagaatatatgcaattttagttattaattaaatatttgtacttaaaaatgatattaataaacataataataataataataataataataataaatacatacttaaattgtacatttattatatataataatatgtattaaatatattttttttaaaaagaaaaatgacctcattcaagccttcagaataaattcagtagaaaaacctcaaaaggaaaatatatattaaatattattcatttatatttttaagtgaatttctatcatttttaattaagtggttgaaattacaaatcataaaatttaagaagtgtgtaattttttatttatttatttattttttgaaaagaagaagtttgtaatttgaagtgtgtcaattattattgtgtttgagaataattattagatatgttgttgaaatgaaattgaatacctatgtaagcaaagaaagaaattatatatattcatatgaatttaattcccatgtgaatacattaaatgccacacaaatttgtgggactagcttgttgaatagtagtttaatttaaataatcattaccatatatgtaaatataaccacatttaaatttaaatcatttatatttttcaaaaataaataaataaataaaccatatatatcttcaaaattgaacccacaaaaatgccacccatgttttatattaagggaaaatagatgcttttagttatacaattcaatttggtggtgatttttcacatgaagtagttggcttgaaatgatgtcaatcaatggggcactctatatgcactaggagcataattgtctctgagttgaaatgagttatagaaaaaaaaaatttttagataatggtatttttgaaaattattaaaaatataaattttttaatagattaatttcacaaatgcacaaaaataataaaaatacggtttcacggaattttaaatatttttacggtttttttgattttattta

SEQ ID NO: 100341 - DNA, 1162 bp, Cannabis sativa
tgtctttgcaagtacatcaatatggtttattaccactattggtattttgcactttatagtgaatgtacttgtgctaataatcgtatgataccaaacatttcaaagtgttgttttaaggtatcagtagtgtctagtactactatgaagtgacagtggtaggtgtgtaagttttttttttcggatttttgaagtgtatagaattagcttaccaaactcgtccgtttgtgtgactgctgagcttttgggttttgggtgtgggtggattttgattgggtttcggattggctggccttttttttatacattttttcataaaaataaaaacagtaataatgaaaagaaagaaaataaaaggagttgaagaaaataaaaatgatatattataatattattgttttgaattaggtatttttttaagtttattttttaaaaaatgtataaaaaaatgagagaaaataaataaattatatataatcggatttagggtgagttcgggtgtaatctgattttttcgggtattaaagtaatcaaacttgaatttggcccagtgaatcagtctataattttttaaatccatttttttgagcttcaagtcgggttagtgggatttttagtgtaaatgtgacgctttaattagtggggcattgcgaatgattagcatcagtggtgtctaatatcactccaataattagtgatattctataaaattattatattaaatataaaatttaacacttaattatataagtaacgatataaacattatgtggtattaagataaatttttctatatttttatattattttaatattatatgttgtaaacttttcaatttattttgagtacaagggaagagattactttttcaagtcaaattttttcatataatttgtttggattttttaaatccaattataccagctcattgtgatatgaaattgtgaatgcttttacattagcaaactagtttttattattattatatatatatatattttttgtctaaatcagattactatctagtaaaataaaatggtggcatacagtaacatatatggactcttgtactcatttttcataaacactttgttagaataaaaagttagttagcagctgttagttaaattcttcttctggtttttctgttttcaaacagttgta

SEQ ID NO: 100342 - DNA, 1220 bp, Cannabis sativa
aaaagcagttatcgaaatgttctcgaaagcaaagtgccttccacattgttgatcgtctcaactcggtgaacaaggccaatatggattttccattgatgtcatttctcatgtagaggtgaaacttgcacattcacttgtgctggtaattaatctccgtgcaggttgaattattttgaaactccactgctctcagctgctgaatatcatcgacgatattgatgctttgggagtcgctgacgatgtgtgtggctataggagtaatctccaattgattggcgactctcaatggttccacgggatcgcagatgtgattgtcgacttctagagattttattgttaaaataataaatatctactgttacctttcttttgcattttattactttttgcttacgattgaatttgaggatccggttagcaattagaattatttattttagtgacaaattatattttgttattaactttttattaattaaagtttaccactttataagttttttttttattaatatattttgatatataattttattaatcttctccaacacgtccgtccaacttaacgtgaatgattaaaataatagaaaaaaaaatatgtcaaacgaagaattttcattagcacttttaatatataaagatatatgtatacataggatgtttatttattaattgttaagaacttatacaattttatcaataacaattctcaaccaatcacgacatctccttgttggaaacacaactaggattataaaaaaaaaaaatgagccaactaattagctgtctgattctcagattattttacaaaagaaactaaaataaaattataagaaaaaagattgcagcatcacaattaaccttaagaacacatatattctgtttactccaccgctcagaagatacaacaatagatttgttgtagcaggtttattcaacccattagcttgagcattcaactattgtgcaaggtgcttaattacactactagcaagcccactcacaaattacttgttacagagttaaaacaaaataaaaccaagtcacatagatatggctgattgtaataacctaaataaaagacactcaaatccatatcacaaaaacaagagtaatcacaatagcaaaatcacagacaatataaaatatttagaacaacctcaagtgtctaagaatttaataagaaaaaccttaacatacaatataaaatatttagagaa

SEQ ID NO: 100343 - DNA, 1637 bp, Cannabis sativa
aattgtttgactcttattttcaatttggtaaatctttttcagaatattttaataatggatatgatcatatataccataattataatatatatatataattaaattaaaatttctccacatactaaaaacaaaaacaatgcacttgaagacataagtgatatctaataacatatttagttatattagagtttttattatttaattattaattaaaataataataatgaaaattaaatctaatagcattcaattatatcttttaaatatatataatttaatcaaattttaaatttatttatgagaaaatatttttaactaattttattaaacaataaattaaataaaataaatttaaatatatattaaacaatataactaataaatttgttataaagtaaaattaattaattgaattaaggtgtaattcaaattaaaattaaaatttatataaaaaaataattattaaattgtattgatacttttaaataattatttaagttatattttgataaataaattacatttagatatttaaactttttttaaaaaaaatagattagttaatttattaatttaacagtgttaattttaatagaaaaatataaaaaatccgtcaaataaataatttatcaaataatcacatttaatataaaagatatatatagtttaccaaaatatttgatttgagccaaaatataataataaaatctcttagtaaaatagtatatgaaaaaaattccaaataaaaactcagggtttggtatgaaaaattaattaattttttatttttaattagaaaagtaaaaatatatgcaaaaaaatatatattctataaaattgtttttaatttttttaatgtttaaattgaaaaaaatgacttttaaaaattatttaaacaaattttttttcttaattataagccgagtgtgttttataatatttttttaattaaaaaagttaaaatatttacaaaaaaaaaaatatgtttaataaaactattttaatttttttaaaattttatttttattttttaattttaaaataaaaaaaaatacaattatgaaatattttttttgtttctcaaaaacaaaaatattaccacatttaccctagatattacaaacatactttattgatcttctcccatgcccgcaataatgtctttagcaatgaaattaattaagtacctaaaagtcttattaatttaagtgaaactcttactctagataaattgctgacgatatcctaacaaagtaaccatgaatataattaaggacaaaatctaattaaaagccaaagaaaaagtaaaagaaattaaaatggggcgcaagttttttcgttaggcatgcatatatataatgatatatggagttcaatattttttcacaagttagatatgatcgattaattatacggcatgtcaaatttcattatgtatgaactatgaactgatcaataattgccattgaactgtatatagtttggaactgcagagaaattagcttagactttgacaagatgccgtgattaattaattatcttttgttgactccacacagtgtatttaattaactaattagaaaccctttttgataataataaaaaaaaaactattgaaaacgataccctaactcggg

SEQ ID NO: 100344 - DNA, 691 bp, Cannabis sativa
ttcgtgcccctatagctagtgcttccctatcatcagctcctcccaagaagataacaccaattctagattcacacgagctttccaagactggcagtgaggatctaaagagcccacgatgaatgaggatcgcaactgaacaaggtaccttgtcaaggacatttttgttcataatcaaggatgcctttttgtatgattctaccgtaccatctgcatgtaatctcttgtggaaaggtattatgacgagtgaggactttttgtcaagcgctaacgtgcatacctggtcatgcattgctgtacatggggataataagctgtagggataaactgagacacattgtaggttgctcaacttgaaagttctgaaggcctcaaaaatgtcttttgaggaacccaaatggaaagatgatttctcgacaagattttggggaatgagaatggggctgctgtgaccaacaacctcaacaaggtggagaacgcagacagcaagctggctatccacccttgggttaaatgcttctaggatgttgattgtggtatgagcaatttcttcatcaggcacacacaccagcagccggagttgagattttgattttgaatccataacacttcttctcttgtaaactacatatgttcttgaaggatcatagagccgttttatgatggggacagccaaaccactaacgatcaacat

SEQ ID NO: 100345 - DNA, 1602 bp, Cannabis sativa
tcagaactaaacaaaaatacgctcatttcctacaaagtgaatcaaaactactgagattgtaagcctaaccattcgaacaaaatctcaaactcaaactttctttaaattaccattaaattatctcagaattaataaaaaatacgctcatttcctacaaagtgaatcaaaactagtgaaattgtaagccctacattccaacaaaatctcaatacgttcttttctacaaagtgaatcaaaactactgaaattgtaagcctaagcattccaacaaaatctgaaattctcaccaaattaccattaaattatctcagtcctcaaacaaaaatatgttcttctagcctaagcatacgaacaaaatctcaaatttcttcaaattaccattaaattatctcagaactaaacaaaaaaagttctcttttaacaaagtaaatcaaatagtgaaatcgcaagcctaatcattcaaacaaaatatattagagagagagaacacttactagggtttcgcggaactcctgctcggcgacctggcgctcctgagcacgagccttagcagcctcagctttgagtctcttacgttcctcggtttggagcctgagagcctccttgtgagcttcgtccttgcgaagcttttcgagcctcatgagctcaacctccttaatgtactccttgcgaacctccttgacttgtttagcgtagtctctgcgaagctgagctagtcttcgctgggcctccttggggtttttgggagcctcccagcttcctatataggaattgggctccgagtaggtgtggttgtgactgtgatgattgtggtgagaaggttttggagcgctgcttgtggagaagaaacgcaccgttttggagatttgggagagagaagaacgagaggacgccattgttgagagagagagagaagagttgggagttctgtgagtgttacagagatgagtttcagtagggttctaatatttgggctagcccaataacatttaatggaccaccccaataagttataatgggccagcccaataactttcagggattttcacaatttttttttaataattacataaattattatttttttaaagatttttttatatattttttttaattttctataaattaacataaaaataacaaaaaaaaactgcaaaaaataatacctaaattacatacaaaataataaaagtatcacatgaaaatatattaaaaaatcgtattttatgtaaataaaatcttaaaaattataataaatatttaaatttgtaatttttttttggtttttttttttgtattctttttgaaataatccttttttttttgtttaattgactattgaatttaggagaattgtaggtaacttttgctcctgctactcaagtgtaagattaattttaattcaggataaattttaatttgacaattaaaattaaaatgtaagattaaattttaaaataaattaaaataaaaactagaatgcaaaaaaagaaaaaaaaagttataacacactcaaagtctagcaccattaatggtgtagaattatacacaattttggtgtataatttaatgtactattagagtgaaatagtgttaaaattc

SEQ ID NO: 100346 - DNA, 3565 bp, Cannabis sativa
tgtaataccctaaatattgaaaaaacatgaaaacctagggtaccctaaactaccctaacaagtaaaccagttcccaacggaaaactggttccatggggtctacctagggaggaactggtagaccggttctacaggaccaaattaaatcggtcgaccggttcagtgtaggaaccacaaaaaacctcacaaatatctcagattaaccccaatttgttccaaaccttccagagtacctaataagaccataataaacttaactgaagcaataactccaagtaagaacctcagaaactgaaatcaccattaaaggtcaaagttaaagctcaaactttatccaaacttagccacaagccacaattcacacacaaaacaactcaactaactctaattcagcatcagaagataaattctaacatttctcaaacatacatccacagaaaactaaaattgtagaaaatccaacttaattcaaggaaaattctaaggtaaaaagaagcttaccacaatcaaagcctaccaccaccttgatttgagttaacagctccctaaatgctcaaaattgaaggtgcaaactctggttttttgtgagggttttcctagggccgactaagagagagagagagcggaaagagtataatatttctgcaattttctaatttaagtgaaagaaaataaacctaatgtttatctatcatcgaacactataaattcgattaataactccataataatccactaatggacaaaagccaacataagataaaagaccattttgcccttgcttaaacaaaaagtaaccttgccacctaagggcattttggtcaaatctaaaaccacaaatattctcgacattctcaatgtctatctaaattgccccgctatttctaaagtactaaactataagaaaaagtgactctatcggccaaacgttgcgttacactattactgggcataaaatatgaaaaacatgaaatttcacatataacataaataacacactaaaattcaaacatatctccataattacgtaaaacataattaagagtctaattctgaattaaaccctaattatctgctaattcttatattaaagttaagtgatcattacaattatcgccccgttaaaagtatttcgccctcaaaatctaacttgaataactctagatattgagccctcacgtcggactccaactctcaagtgccttcctccaccttattgtttcttcagagtgccttgagcaaagatatgaccttatttcgaaggactttatcttttctgtccaaaatctgtactggttgttcttcataagataaaatcggctggagttctagattttcataactcagcacatgagtgggatccgaaatgtatttccataacatagaaacatgaaatttggtatgggctgctgataatgctggaggcaaggctagatggtaagctccaatccaatgtttttgaggatctcaaaaggccctgtaaacctaggtcataacttgccctttttcccgaaacatttaatccccttcatcggagacactcatatgaatacatgatctcctacctagaattctacgtttctacattttggatttgcataactcttttgcctgctcttagaggcaattattctggccttgatctaatctatagccttgctgctccgttatactaattttggaccaaaatatttcctttctccagtttcattctagtgaattggacatctgcacttcctaccatacaacatctcataaggaggcatccttatggtattctaataactattgttgtatgaaattctatcagtggtaagaacttgctccaagagccttcaaaattcattacacaggctcgcaacatatcctcaagtatttgaattgtcctctcggactgtccatcatttgaggatggaaagttgtactaaacttcagcttggtacccatggatcactggagaatttgccaaaactttgaggtaaactttggatctctatctgatatgatggacttcggagccctatgtaacctcactatcatataagtttgcatattgatccactataattgttgtttttactggtagagaatgtgttgacttggtaaatcaatccacaacaacccaaatagaatcgaacatccttgtggttctaggtaatctaaccacgaaatccatggtgacatcctcctatttccactcaggaagagtcaaaggctgcaacaaccttgcaggtctctggtgttcagtcgtaatttgttgacaagtcaagcaccgagatacaattctaccacatccttcttcatctcgcactaccaatagaagggttttaaatcctggtacattttggtagttccaggatgcaatgaataaggagtggtgtgagctttctcaagaatttcattcttaagttccactctgttcagaacacaaactctagttttatacaacaacatcccattatctgatattgtgaagtctttagcttgaccagataaaaattcttctcgaatctttaccaatttgggattaactagctgggcagctctgattctatctaacaaatcttattgcaatgtcaaatttttaagtttacccacaacaaactcaatacctgatatgaccatgtcatctgctagctggggtgaaatcataatcatgttaaatacttgtccgagaccccttctgcttagggcatctgccactacattggccttcccaagatgataaagaatttcacaatcaaaatctttgaccagctccaaccatcaccgatatctgatattcaaatatttttgggtgaagaaatatttgaagctcttgtgattggtgtaaatctcacacctttccccataaagatagtgtcgctagatcttcaaagtgaaaaccactgtggtgagctctaagtcataagttgggtatcgctgttcatactcctttaagtaacgtgaggcataagcaattacccgatcagcttgcatcaatagacatcccagaacctattttgatgcatcatagtaaaccacaaaattttcttaatctagtggtagtgctaacaccggagctgtaatcaactgttatttcagctcttgaaagcttgcttcacacttgtctatccacaaaaacttctgattctttttagtgagttctattaatggcgttgagatcttagaaaatccctcaacaaattgacgataataaccagctaaacccaaaaaacttttgacttctgttactgtcttcggtcttggccaatctctgacaaattcaatctttcccagatcaaccatgatcccatctttactgacaatgtgtccgagaaatgacacttgggatagccaaaattcacactttttaaacttagcataaagcttatgttctcttaatcactacaaaaccatccggaggtgttgttcatcctccacttctgattgggagtacacaaggatgtcatcgataaatactataacacatgtattgaggaaatccttgaataagtgttggttagtccaaaagacataacctaaaattcataatgtcaatacctagtacagaaagcagtctttg

SEQ ID NO: 100347 - DNA, 1764 bp, Cannabis sativa
gagaagtctatatttagtacatgtctcctccagtgaattcgctgagaagatgaatccttgcaatcttatttgcaataacctattatatgacttagtcaaagatatcgcggttacctcttttattataaatacagatggttatgtgtatttctcgcctgttagttagttaaacatattaacgtggacattgtttatatttcataaccattgtatgtattagatcaaaaatatctcctatcatattcctataaatagtagaacaaacactgtaaaggaggactgtgagatttcagagagagagagagagagagagagaggacttttaattgagaaagagtagttctgttattgattagctagaaagagattacaagagattatatgtatacaataacaaccactttctaactaactaactgtaagagctaacacagctcagtagttctaacagaaataactaactaagctcccttgacaacccccttcaaactcagtgtggctagagatataacactgagtttggacatgaaatcactgaacttgctgctgttgattggcttggtgaagaagttagcaatttgtgcacatgtatggacatgtttaacttgtatttactgttgtagaattttgtctcgaacaaagtataggtcaatttcaatatgcttggttcgaacatgcaaaataagattggcagccaatcaaactgtgctttggttaacacaccacacagacggagatgtagatatatttgaatatgaagttcttgaagcaatgactggatccatacaacttcagtaactgcacttccaaggcttcgaaactcagcctatgttgattatccagatatggtaacctatttttgggacttccacgcaatgagattacatccaaagtatacacaatacccagtagtggattttcgatcatgtaagtttgatgcccagtctgcatcacagaatacatctaaggcaaagtctggagcaggtttgagatgaagaccatagtctagagtacctacaatgtacctcaaaattcttttgacttcagtccagtgagaaaacagaggaccttgcatgtattcacagactttataaacacaataagagagattaggtctagtaatggtagcatattggagagctcctaaaataaatctgtagatatttgcatctggtgcaggttcaccaccataactagacagttgttcattggtgtggattgagtgttcacattttcataccaacttaacgtttaattttttatttaataaaataaaagatttgatggataattcttataaaacaattaagacaagaaaataatatttatgagtgctgctgtcaattattttttacaatcttttaatcaatcttttgtgtctgaaagtacataccaaaatattttctttaaaaaaaaatcatggtgatatttattatagttataacattattttttattaatttttaaacttttttaaatattttacccgtgccaaaataaatttaaattttttgaaatagtagactaaaagatgagaaactcttttgaataatatttagccatatatttagactaatcatatacaaatagtgacttaaccacttgaggctagctaagtggccataagagggtgtgtgtgttggaggtcatgaattcgagtcacaagtaaaacttgtaatatataaatacttaaataaaaaaaaattatacaaatagtgacataaacattccaaaaaaaaaaaatccattattatttatttaatg

SEQ ID NO: 100348 - DNA, 1272 bp, Cannabis sativa
agttcaggggaaatttttaacggcaaaaaaattcatgggacataatttagtatatgtcagagttcaagcggaaaaattactaattacgctttaaagttttaaaaaaattagttctccaataatatattaatcttatactagatttaacataaagtatgataatcttatactaaatttgacataaaatataataatatgcctaatttaatatacaataaatataatctttctaattacagttttaccattaattattaataataatttttaatatattcatatatatatttaattacaatattacctttaattattttttgaatatttaaattattgttgtttattaatgatattttacgttttgtcataatttataatataaaataaaacacaataataaatataacatttttttttatcaaatttaacacaatatttacattttatatagtcacttaataaaacgtcacctattttaaatgttagtaaagaaaatgctatataaagtagtgggaattttaaaattgaaacaaaagtaatgatttgggtaagatggaagtgaaaagtactgaaagaagcacccgtgaggcagaaagtcacgagtgactcccccatgtggtgtgtttgttaaagtgttcatcatgtgcttaatcatatattatcaaaatcttcttctttttattttcattattttttttttcttcttcttcttcttttgggtcaaataataataataataataataagtggtgtgtgtcatgttgtggtggaccatttgagacaaaggttaaaaagaattcacctctcccaatgggaatgccccaaattgaccactccattccatataacatatatgtataaatgttcaaatttcaaagtaaaagaatagacaagcagacaaaagaagattcagagcgtgatttgattttgaacgcctttttctacacaaactcaactttcacacacacaaacaaaataaagtccttcaattcttcaggcaaatcggcaaaatcttttcatttcataaaatccatttgtatcctaatgtcatgctacatattgtattaaataacaaataagattgtatttaaataaaatttcgtattgtattatttaatacgtaataaatcatttgtggtgaatcctcacccccaaaacaagttgttacaacattaacaatgttcaagaaacacaaatcaaacctaaaaccaatcacaaaaccaaaacttgaacttaattgaaataagacaaagaaaacttaactcaataatg

SEQ ID NO: 100349 - DNA, 1544 bp, Cannabis sativa
aatcacctccctgtggaatcgaccgcccgatctatactacaaccaccgctagtggaagtcacattttgggcgttaaacaaacatcaatccatcatacgctggatgttcttcttcaggctttctctggttgttgtttgacactggtcagggaactagcttccaggtcgaaagcctttactgctacaaactgctttttaaacaatgcttgtagatccctccagatgtggatcgatcccagagataacctcttccaccagtcttctgcagacttgcttaaagttagtgaaaagtaaagacattttacatcatcactggatttagcgacttgtatcatgcaattgtacttggacaagtggtccctggggtccgttctgccttcgtaaaattctatttgtggcattctaaagcgctccgacagtgttacatctatgattcttttaacacattattctgtatcttcttctttagaatccaacctcgtttatctcagtcaagtttcgagattagcttatgatcttgttatccttacgaatcattatatttataacataacacgaggtcattacatcttttaactgtcgtctatcctgaggtagaacatttattttattcatcgtatttattattttcctcaatcttggagacctatccacatgccatatttataattactgtttaaaatatggacgtaacaaaagtatactgtcaaaaaacaacattcaaatatcgagtttcattagtataaacaacaaaacatgcatatgcatcatcaattaactgaattaataatttaattaaccttgttgttggcactatagtatgttctaactattatttacattgttttatagaacaatttcattgataataattttcccataagctagaaacaaagatgcccttgtccgtagtaggtataaaaatgacaaatagttttaaatggcacccacaaaacataaagatacaaataaaaaagaatgggcatctcttcccacttgctcaactctcacagcttaagtacagttaaacctcagtgtaggtccccacacccacacacaaatataaatgtaacaatttgatgaaaccatgcaacttgcaaggcacagaccataccccccacaactacacctatatgacctatatatataattgtactatactatatactctctatacgtacaactcaaaataaattaaaattaaatataggactcttactcccatgttcattttcccagtcttgatcacatgatgcatttgccttccaaataaactttgatattatatatatataatattcatacaataaacatacaccacaagaaaaaagaattaaaaagagagtatctgaaacatttaagtagtcggtttctttttgacaatttaaaaacaaacaaggaactataggccgacctcttcaaaatttaaaatgtatttttatttacataatgatgatcttcaaattcaatattgagagtgaccccaccctaaccctaaccctaaccctaactcttaacatatctataaatttatggtgcactctc

SEQ ID NO: 100350 - DNA, 1112 bp, Cannabis sativa
ttttctataaaaattactctaatattattaccttcgtgtcgcccaccatgttcgaagtaccactttttaattaaattttattactatacatattatctcaaaaaattggttagtaataaagtaacttatttttaataaataaataaataatatcacatgattattacttattttaaacaataatattcataaaattaatttgaaatgttgactaaaatacatgtggcaaagatcactccatagacaacccctattggaaatgcccttagagctatcatggggtgtgaaataaatggtcaaataagtggtggaattaggaatgcacattttttttccacaaggatgggaccttcggagaccggcccctaatgaggcagagattcctcgtttaaatggggaacatagtggggacgaagattattttttgtccccaaatgttaaatggggtgggaacagggatgacactctctgccccgatggggactcgtttagtattttattttatatttctaaatataatttttaatttatttgtattttttgagtatattagtatcttatttatgtattttaaattgtgttttggataataattagtttattgtataataattaatatttaatatttgaatttttctgtagttgaatatttttatatatttgaatttttattataaacattattttttttattaggaggttccctatcccatccctgatgggaaataaacgagaatatgaattaaaattcttaataaagatgaggacaagagagtacttcatgccaattctccgccccgtgtgcatccccatgtggaatgctatttcttaatatttttgtaaaaagaaacatagtatgctaaagcttgtgtctaatttgacatttactaagttaaatttaacataataagatataacattgtgttcaatatgacttactttaatatattttttaattacaatattactatcaattatcataaaatatttaacttattgattatcattaatgatgattatcttttatctcaacttgcattttagtttgttattatgtattagattacaattacaaaaagtattgttattgggcatcagtagtgtctagcact

SEQ ID NO: 100351 - DNA, 954 bp, Cannabis sativa
agggcataaaacccaacaattggccctcaggcaggggtagccttccttttccacaaaggttggttgactgtaggctagttagtcctaggaacagtggagcagtcttttcctgggttcacctgtaacacctttccccttgtcttttacaggtccagaatgtccaaaatcaactgggcttgctttttttgtgaggttatttttgttagggacaggctcttctagagcgttcttctctgaggtttccttatgggcctcgaatctagcctgtagctgcgctagtattttttgcatttgatgggagatatcttcttgtgcaaccagtttttgctgagctactataagttcttcagccatccgatatacctcgagatctttctcataataatattcctctttgtaatacccgtctttaatcttactgttgtctctgccatcatcctcactgtcaccttcgcccttagggtcttcttctcggtcatccttctcatcttcatcgatggggttttcaccaaatttctcctgatgctgggctttattggctggacaacccccatctttaaaagtctaccagtctctcgcagttcctagtgggcatgcactatgggaggtgggttaacgtcgtccatgacggtgtcctgactgtgggcggtgggcttagtgatgacatttctggtagccaccattgttacagatacactttggctctaagtctttcctcagctctcaatgaaaataccaaaatatttacccagattttcaaaaacttaatatgttaagtaaaaataaatcaaataagcaagatggagatggagtttttaaatggtttgggtattaatgaaccctagtccatgagtcggtggttgttaggctagttttagcctatattttggatcgattttatgttcgcttttcactgttttaggacggaattacgcttgttttctatgttttcag

SEQ ID NO: 100352 - DNA, 1903 bp, Cannabis sativa
tttgctagcttagttcatgccaagcaactcattcagaagcctttctcaagtacaaaagatgttccaaaagggtacttggcagtttatgttggggagaagagaataaagagatttgtaatcccgatatcattcttgaaccatccatcatttcaagacttgttaagtcaagctgaacaagagtttggatttgatcatccaatgggagcgcttacgattcccagcaatgaagaagccttcattgaactcgtttctcgcttaagcacctaatgatgagtaaacagaaatagaagataactgctaacaatatagattgccacaattttgtaattaaggcatgttatgccaataccatgtacatatttttttctagaggacacaaagtaaagtccccaagaaatgatacaaatgaatacaaattcacttattcttcaattcttagttacaatttgttttcttcctcatatattctgctaagaatcttactttatgtataatttatttttagtctacagttaagtgtgaggagaataatgtgtaactaaaaaatatactttttggtctagagttagatagataaatggacttattgtttgatcccttgtacgaatgggctgctaaggtatctcttcaattaatctgaaatattaatggagaatagttaggaagacaatcccaactgatccctcttggccaatgtaaagattaatcgagagagagaacgaattgaatggactgatcttattgaattgagaaattgagagtagtatttatactagtacaagtggttacaagtaaccaattacttaagctaaacaactaattaacagtttaacataatacttaactactctaactaatctttaactaaagagtagttagttgtactaacagtattttcaatagtccccctcaaacatattcggctttggaagcaacaggaagtttggctctaagaaaatgaagccttgagcttgggattagcttggttaaacactctgccaattgatcgattgcttgaacatgtttaactttgatgagtggctgaagtatcttaacattcttgtttgtaatttgatgtatgaaaaaatagttagtaattacacggaaaaacaatatatttttagtagttaatgtttaaaatgaaaaaatttagtaattacacgcaattcaattcttaaagggccataaaaattaaagagtgtaattagaactcctcaatgattttttcattgtgtaattacattgccagtgtaataatctctaaatcaatcacacacaaatccaattacaaatccaattacactgatttccaaatgaaccatttatgtattttaattgttgtgcagatccatcctattatattttattttcttttctcttttgaaaaaatgatgtctatttttcatttattattaattgtcatacaatgatgaactaatatgtgcaattcttaggaagattcctaataacattactcttcattcccatcttacttcgcatggcctcaactcctgttctattcatttccttcatcactttcatcctcaccatacgctctcttgattgcacagttgccagtcccatgctcttgtacctgaaaaccaacattcaagaaatcttcttttaattgtcggttcacacaacggaggagggccatcgataggcaatgtagaagaaaaagaaagcaaaccttgaggccagggcggctgatatggccttatcatgcattggtgatggacgtggtttctggcgatagtaacgcaagaaatcccgagaaccaagtgttttgcttgaaactccattgctagatcgtgttgtaataaggagctcaggcccagcaagttccacagcattggtatcacctgacacaaccagttgtttaccatcctcatccatatagctg

SEQ ID NO: 100353 - DNA, 844 bp, Cannabis sativa
caccttaaatatgaatacaatttaaagataaattggtttgtaaatctacaaattccaactaaaaaaccaaattttgacaatcaaaacctttttaaaaaatcaatcatggaattgtgacaaaattttataacaaaataaaactttcacttacatgcaaacaaagaagacatgcagtaacaagtgatgaatacgataagaaaaaaatataataaaaacttaaagagatgggaaggaactaatagtcaattcaatatgagagacttgtaagttgtaaccctataggtgaaagttaagttaaagagaaagaagtgagaaatgggcttatacatgataatagtagtagcccttatcattactatgattctttttgtaatgcttttaattttcaacttaatccaattctattgtattattatagagaaactgttagctacagatgatagtcaaaactttcccgaagtcccattgagcattcaactttaacaagcagtcaatatgctagctgaaagcgaacacaaaataaaagtatgatttctaaatagtaagcttgatagaaatttgacaaaattaaccttttctcaggtcttggggtcggatgccactaatttgagttcgaaaatcaacaacccgctctattggccgaacaaactcatcatagataacatttccccattgattgacctggcatggaagcaacactagtcagagacaggaaagtaaacaaaaagctttgctaaattatttgacatttaagaataggctgtctcacacaataagacagtaacataacatgtacatatattccaactagtttagtctgatactgcaaaagggaaaaactaaa

SEQ ID NO: 100354 - DNA, 681 bp, Cannabis sativa
aagttttaaaattataaaaatactatatttcaataaaataaaataaaataactaaaaaataattctagaacaacttaacaaaaaacgtgaaaacaaagacaactacaaaacaaatgaaaaatattaaccattgatttttttttttttttgaaaaagtctcctccatagataaaataaaattagacctgacggtcataacaaataatgtcagccggtatagtagatacctccaccatactagttaaattatgagcaaaagcccatatagcgacattgtgagccgtaaaattacaaagtcttgaaataaaagagaaactataacccataaataaagtagagagtctattatattggtgaacatagttatcaattctctaatcagcagaaatccccttcagagaattaataactatctcagaattgctctccaccattacaaaatgatgcttccaaaggtttgccatcttcagggcaagtaagcaagctataacttcaccaataagggtatcaacaaagtccagactctctgtagtagtccacaaaattttacccaaataatctctagccaaagcaccacacacatagtcccactccctactctgacatctccagactctctgtagcaatccacaaaattatacccaaataatctctagtcaaagccaccacacacatagtccc

SEQ ID NO: 100355 - DNA, 1160 bp, Cannabis sativa
caactagtttcttatattaatttaaataatacaagtgggagcgagctgaaaccttaattaaatataatgtagcatcaacaatcaaagcaaagagaaaacacacagtatacgtttttattaaatcaacattttaattataaaattacataaaaatattaataaaattaacattgccattaaagcaataattaatattattacatattgaaagatatatatatgtttcagagccaaggagagttataaagaggagtaacaactgccttaacttgaagatacttgtggagggcgtccatgccgaaatctttaccaaaaccactcattttgtatccaccgaacgggcaatcattatcgattgcgaggtagcaattgatccatactgacccggctctcactgatcttgaaaccgtatttgccacatttaagttatttgtcacaaccactgcggctagtccataccttgtcttgttagctctctctattgcctcctcaacagtcctatatatatatagattaatttattatatatttggaactatacaaataatataacacctcttatggtggtttagagtaggtaatattccttagtattttttataaatatatataaaatttatgcttacttgaacttcatgagcgccaagacaggaccgaatatttcgtcctttacaatttgcatgtcctcctaatataatattaaagcaaacaaacaatattaattttatatcttcaaaggtatatcatgtaaagaaagtttaaacacttttattattgttattaatattttcgtaaactcatgtcattattattttccctcatatattaggacatcttttctgtgtgtgtgtataatttcacttcagcagttcaattttttatatcccattattatagattaaaaaacattccatattaaattgataattgaacaaaaactgatccaacttattaatttattaccttagtatcggcaaatatggttggctgaatgtaatatccagtgtctcctacacggttaccaccagttaacaaagttgctccttctttctttccctgctcaatgtagcttagaattttttcaaactgtcttttgtcaacctgccattgtatatataagtagagtaatattattataattttcagatcgatttctgttt

SEQ ID NO: 100356 - DNA, 808 bp, Cannabis sativa
caaaaaaattcaaaattatacatacattatacatataatcatatataaaatatatataaatcaattatttattataaacggtccggtccggcataaccgttaataatttattaggaatcgcaactaaaccattacacggtaaacggtccagattaaccggaccaccaaaagtggttttctcggttacggtctacagcggtttggattgtcgtggtctggatttaaaccacgattttccggtttcgatgaacaaccctaatgggcgaaccctacatggaggcccacaagtttaaattttgccattttattgcttcctatatgaaatttatcttttcttaaaaaaattatttctctgttttaattatttaaatgttaattttacttatttaataattagggaaccaagccgcactttgtactggtttagccctatttttgtaatttagtgtttcatatactgattgagtggtataatttaaaatataacattttaatttgtgcactataaacaaaataacagttttactataagattctgataaatagtattatgaattataattattttgttataataagttttactattacaaatgaataagacacaagcaattacttcaatatctatttatgtttatgattaatttttttaataaaaaaacttttcgctatgtatcaattaattacatttaatttagctaataattaaaataggcctattttaaaaatactggaaaaattattaaggttatgataaatatgacataaaaagtaaatgccactaaatatgacattatctaaccaatta

SEQ ID NO: 100357 - DNA, 1393 bp, Cannabis sativa
aaataacattttaagttattaaaaagaaaaactaacatttcataattttatcatttctattttcttaatgtaaatagtctttgggaggatattttttttttgataaattactaaatatttattgacaacaaaactcaattataaccaagtgctatgctgtaaaaaaaattaattacaagctcttatcagcatcccacccaatcatgatctagctttgtaatttaatatactgtaatcactaaaatcaaagaaaaagaagatccaggaaaaagaatagacattaacagaggataagcaaaagttgtgaagaacataaatctggaataaaaaaaataaacgaatttcaacaaaaaaggtatgtaatatcaaactttacatcttatacattcataatctaacacattcatatttaatattcaattatcttgatctattaaaaaaataacagatcgagaatctcaacactcatgaaaagctaacattggacaagctgcaattacaccttacaaacaaaaaacctagtcggataacatttttttcccagaaatctagtcttgaaaaggttgttacttactatattttgaatctttaactttctcaagaaatggatcctatgacaataatactatcttacaatgaattttaggaagagaatgtcaattacaaaaactatgaagtgacaaacatattatttcaaaggaatttcttttatggaactcttgttcacacaatttgtgaaagtttggaacttgacaagaacaggtatgaacttaatgttcaattccaagtgaaaacaggaataccacctatgaagattaaagatgacaatagttgcaaattctaccaataactaagaataaaaaatgatgatgagacaacctatcctttaatggtgaacttcaaagagatatctacatttaccagaattaaacaaggaacaataaattttgacacattctttgaatcttacatagacatcaactatatcctaataattactttggatgaaatttagaactctctaaaaaagaacacaagaatggctggttacatagatggaattgcaaatatagtagatgcaattgaacaatcagatgacacacaattagcaacacaagtaattttgcgtcctcaagtacaacaaattgaagttagacaggtttttaaaaacaaagaaattctaaagactgccatcagcctttactccatcagaaaaaaccaacctttcaaagttaaaagatcatcaaaagtttattacaaactagtatgtttggatgataattgcaaatggagtttgctagcatcaaaacatgggaaaacataaatgttcagaataagaaacattgaatatacacatacttgctcaatagacataacctctggagaccatcct

SEQ ID NO: 100358 - DNA, 653 bp, Cannabis sativa
tttatctgtttttggttactaaaccttacctgcaaggagtttaagacccaaaatttgatggagcaagttttggcatatgtctgcatatagagagaaatttattacaaccactataggttcttcttctagcattaaaaaatgtacaaataagaacaatcctgtataaagggggtatgcataaaggtatttatctaattatcaaaatgggattaaaatttaataactgctaagtttaagataaaccccacaaatctcacaccaaccaaacacacgcaaatttcttactttgataggttaaatcatagagaaatgagacttactttaacaatctgaacaataaggaaagccacccaaacatacactagaagtgataagtctttccaatatatgttttgcagcataggcacctgcatataagtagtaatggtaaaattcaagaaaatgaaagcataatggtttaaattgaaagtttttcaaagagtatttatgtttagaaaactttaaaatccttggtagtggatacatattaaatgcactcttcgacatagtatcattttccaaaatgaactaaagttctattttttcattccatatcttttaatctataaacaattacatgtttatagattccattttcataacggaggagtggt

SEQ ID NO: 100359 - DNA, 2167 bp, Cannabis sativa
cggggtctcagtgttttggtcggtcgaagttgtagatttagctgcctcaagattttctttgtctgtctagcccacacagtaactaagatacgcctctttggtttcaccgaggtaatcaaagttcccctctgggttggccttccacaattcgtagaaaacctctagggcgggcgactccaaacttttgacctccttcagtagcacttcctcgcttgtttcactgtattttatgtcctcttccaggttcatcttctcttgggttaatgtggcaagaagaatctgaagactctccctctcgtctttcaaacaattgacctcctcgaacaaaacatcgacatccgcttcaagttaggcggtagacgacatgtcttgaatctccttttgtacctcatcgaccctcttcttggcggctaaaagttttttattcacctcgcccaactttgcccttgtgacctcagcctccttttggctacatccacctccttttgtagattgttggtgttggttatagtttttaaggcactggacatcgctcgggagtaggtgtaggccatcttcatgttgagattcacaggaaaaggttaaaacctgcacgaataaagggacaagaaaagataaagaaaaggcatgcgtggtctgttctctctcttccatggcaaagaaaaagcgcacgattgaaaagcctgttgtgagattgaacattgcagaacccccttcaatccaagatgatgagaacaagattgaatcgaatggaaatcttaatgctctagacttaatttctcaggcaatttcgtctgaagatcttcttgaagtggaagtggattcgactggggaaaaatttgataaaaatgaagatcgagaggagaagaaaacttgggcagatcaggtggagcaggcggattttcatgaaaaagcacagcaaagctagaagaaattcacagaaggtaagctttcttttcgagagactactttgacctatacaaaaccgcttattaaagaaggaatcaaaatagcccagattgatgtagaagaggctaaattgcaagctgagaacttgaatacaatagttgtgtgtatggtactaggtgcaaaccctactctttcggcgtttgaaggattcataaaacttaaatgggggcatcttggaatttttcaagttgttcgaatgaatgggggattcaccattgttaaattcaatgatgaaaccacaagtgatctagtcctggaagagggtgtgcttcagtttgataggaagccggttgtggtgagaccatggacaactgatttaactgctgtgtgtttggttaaattgattccgttatggattcgtcttcatctccattactaagggaagaaatgccttagtgctttggtaagcatgattggaaaacctataatgactgataaagttacgaaggaaaaataaatgatgaagcttgctagggtgcttgtggagatggatatcactgatgaacccccaagaataatccattatacggatgaacatggcagactttctgaacaagcagtggactatgaatggctgcctgttcgctgcaaagcttgtaatggttatggtcacaggatggcacactgtagaaaaatgtcaaaggctgtagagggataaaaaaaggaacgtaataatagtcataatgctggcaaggaaaaaggaaaaaagctagacactagagatgctttaactatagatgctactatgtagcaacaactgatgagaacaagatggtggactcgggttcaatcgctactggagaggagattaaaaagacagagaagtcagagggagaagtaattgctattcgaggtagagcaaagaaagttggcagtggggaatggagacaccaaaactatgcaaaccaggaacaaaactatttttatgccgaatgacgaagaaggtaatgcttctaggtctaatacttttgaggtttttcatacacaacagggcagtgagaaaactgagatagttactaatctacctgtttatggatagtaataacattcttagtaggaacgttaggggcctcaataactctatgaagcaagaggcagtggttgaagtttatagaataaagaaaattggttttggagccttacttgaaaccaagatgaaaggttctaaagtgactgatgcttttgtcaataacttttg

SEQ ID NO: 100360 - DNA, 672 bp, Cannabis sativa
agtcaataacatcataaaaactattgtgatcatagaatattctagtaatatatcacgtgtttctttactcggtgaaagtataaataagtttgaattacacttcttcaaatttaattagtaacaaaagtaagaccaatttgctacatagtactatgtatttcaaccaagatccacatctcgagccaagtggtaggataggattggcctagttaagattatgacctgctgagtaacaactttagtactgtcaaccaatcccatcctactacataattcgagatgtaagttgaatcgaaatgtaatatatgtaaaaataatataatgtgaagtacgtagtttgaaagtagaaaaaaagtgcatggtttaatctatttagtaataatgaagtagtttcatgctttcacactattgaagtgaaattctggattgatatgattatttttttctcgctaatcttaaatagtttgataacaagtttttagttcactattttcgaattacatttaactctctttcttatactagtattgaatttcgatcaaattagggtttacaataaaagcattcatttcgaaaccatttggtaataaatcgagtatagctagctatctcgtattcttataaatattattaagttttcacacagactcaatacgagagacattcaaataa

SEQ ID NO: 100361 - DNA, 1158 bp, Cannabis sativa
cttgtgtgaggttgacttaatgacttgaactaagcccatttctctcgaaactaccaagtgggcatcaattttggcaatcttggaaaattgtttatgttctccgagaattcctacttggagtaggatttcaaattctcattccctcttgaatagtagaattcaaaattctaagtataaaagtagaagagaactttgggtaggttgtctagcattgactaggacttgcccggtaattgttggatctttcctggcattgactgggtctttgagtctaaaccctgcagatggatttgcccgaggtggtagggcagggttgatcgggttgtcaccaattgatggaacttggacattaggatccacatccattagatctcggggttctgtggacacgcttttccttgtgaggaccatggtgattactaggttaaaagagatgagatcttcgtaataattttaaagctctcaatgaaagcaccaaagatgttgattggaaaaatagccggctgactcggagtcaaatagacgttgattaatcaccaataaggagttaagaataataaataagaacacatagaattatagaggttcgacccccttatatgtgggtaatgacctactccccttttagttatgttgattgttagataatatcgtgcatatcactaaggaagacaaagtaaattctagctacgactctcgaagtgtttacagagaatatcttttagcaaagtgctcttagatgcatgagtatattttcaagtcccttccctctgcgtatgcattcactatttatatgggatgttgtaatgataggctccgtaaaaggagtgatcaaagagtaaatatccatatattctagagtgcagtaaggatcaattgaagctcctatattctttgatagactggctcgacactcttagcatcgttccttctggctggcatgttggtcactcggccgcgtcttcctcaaggcttttctttcttgtgagattacccgtggagcattcttacaaggtgagtcaaacttccttctctggccggcgtaatgatggtgtggccagatcctttttggaaggcaattagcacctcatggagttcaaccctatgtgggacctgccaattatatttctgctcggaagtttctgttgggttttatgc

SEQ ID NO: 100362 - DNA, 720 bp, Cannabis sativa
gtttggtgtgattaaatttaactgaaaaaaagaccggtgcatgtgtaatgtctcacattactcatgtatgaaagatttatgaagtaatatatctttcaaaatatattattgaaatctcactttttttattttatctcaaaattttacattatactatacattaactttttttataatatataacgttaaaacttttggttttttttcttcttcttcttcttcaaattttaatatattttattcattcaaaaatataatgttaatatttgttcatattttgaccaaaaaaaatatttacacatattctcgtattaaaagataattaaaatctaaaataattaataaaatatatttataacaataaatagtattttataaatatagattatgaatattaaatttcaaacaaactttaaaataaagaatatgaatttagaatatctgatgtaacatattcttagtaatcaatttttcaaatgttttaaagtcttaatggtatgatattgatagggttttgataattttgaagtaaatatcaaatttagtgtgagtaaatctatttttatatttatttatataatttgcatatgatggttgcagattttaacaaatggattatatccaagcattgagcacagagttgtagtgaaccctaagcaggaaaggctctcaattgctacatttcttaatacaaatttagattgtgatataggcccagcc

SEQ ID NO: 100363 - DNA, 560 bp, Cannabis sativa
aatattgtgggttaggtgggaagccgcactttcaaacttaggattgccaaacgagtttggggaattttagtgtgtttgaaaaagaaaaagaaaacagtaagttgaatttggaagaataatattcaccagtcctaacctgaaggggtggtcttgtggtaaaccaaggatcgaatccccacacactcaaaaagctttggggccattgggaggtctcctggtcgaactggcagggcaaaaaaagaaggaaaaaaacttgccagtcctatatttgagtcctgtaggctgtagtttctgtgatctctcttttatatgtatgttttttatcttatctttgctgtcagtaaatacatttcagtatccatgctaagatgtgcatttgattgctaatttcaattactttaatagtccatgcttaatcactgtgaaaatagttgaagtctttctattcggaatgttttgtatgtaccatgcctgctgatttattaatttgtgctataaatgttgaactatttgactttaattctgactcgaagctactttctctggttttcctattatag

SEQ ID NO: 100364 - DNA, 1498 bp, Cannabis sativa
acaaattaccttttaaaaaagtcaccaacataataatttaccaaaaagtaattaaaataataaattatcatatcaccaaataactcattactaccatattagaaaaacagtatgccactttacaagttttgatagtgttgatgcaaaattccgttaataagataagaagagaattagtttaatggttaactttaccaagtccaaaataaaattattgattttttttctatcataaaaaaaaaatattgagtaattgctttaaggcttaaaaatgcattttgcataaaaattctgtgggattcaattttaattgcttctgagatatgtgtatcacttagcttgatggcttcgaggtaattattcaggccgcaatgagaaacaaatatggagaattacatttgtcctttgattggattatgatgtcgagctaagaagacaaaacaagacaagtcagaaaacgttatagaggcccaaagagctagcccaattcctttggacccaagaactatacaagacgggatgagttgaggattacctcttttttgtatccattaatcaaaaatactctcattatattttatttaaatctacccacttttatgagtgagttgtctaatatatctttgccctctacttaagtgtagcacatgatttatattactttaagcggtataatagagacattatttataaaagtaggtatatcttacagaatataaaaatgaaagtaaaaattaaaataaatattggaaagtaagcaaatgcaatttccacatacaagacccagtgaggactgggatggcaagaaattgggtattaaatgtaaactctaatttttggggaatgaatgaattggcaagaaattgcaagtgaaaatttgttgtgtctcgaaaagagcctgttactaacaaacgacctgtactcacttgcacaagctaaacagaatactattcacataggcgtattgaatgagtaagcctatcttatatcttagcttacaaatggttacaatcagtaaccattgttttattttagaatgaaaattgccattagatttttagaaccttagttgtcaccttcatagtttctaggatttagatggaaataattttattaataaattgatggatttgattggaacaattttaaagatttgttttgataaataattatttcgttattcttactagtcagttaaatatgtaaactatactatatttttcttatgaagttttttatttttcttatgattttatgtattaggaatagtcatattaagagtctatgtcacttctatctaaaaatacacttaaggttaaagtaaattatattttaattaaaatgttataactttataaaggtacactaagataaaaaaaaaaaaatcaaaacaccaaaaagtatcaaatgtaacaagaataaaaataagggattatttcacaaatacacaaaatcaacaaaaatttttttttacaaaaaatacggtttcacggaattt

SEQ ID NO: 100365 - DNA, 1102 bp, Cannabis sativa
aaatttaaaatatatgtatattttttaccgggtattacatttgaacatctaaacaaaattgtgttatgattttaggtgaaaagtatattgctttaagacttaaagccagaggaaatgataaggaaatagcaaaatatttttcttgtattttttatttctttttttgaatttttcttcttcttgtatttgttaattacaagggaaactgatccaaaaaaaaaaaagaagtttataatagttgaacgtgattagcaaatatgtatgcaatactttataattatatccattgtaagtacatttcacaagatagtttattttatttattttttagtgaacatgttaacatagtatattctaaaaaaaaaagatagtatttgtttttaaatgacaaaatattataggaaatatctagcacaccttaaaaggagtttatcaatgcattcattatttgttttattatctaaaacaattagtattttcttttcacagttgtttacattatagttatttaagacatcttgaatttttttgagaaattcaaaaaaatttaagacgctgaaaatttagttcaagcagtttatttcacacacgtataaaataaaaaaatcacatgaaatatactgtttgaaccttatttttgaggtgttaaatttttctgaatttatcaaaattttacaaaatatcttaaataattacaatattaatgaatatgaaaagaaactaaaaactctctccaaataccaaatcaaataaaaatgtgtcattaaacttctactaggagatgcattataaaataatccaatattataatggattaataaatactctatctttcaaaacagaaaattgtccattatttaaagtagcaacacataaaatgcttattatctcctttggtttcccaatttattagttcaattttgagtgaaagattccaatttggaatcctgcaacaatttattgccaatgaagttgaccatgactttaattataaattaattacttggtgagctctatcctagccataaaaaagaaaggacataagaacccactgggattaatttaaagtaataaataactactatagttttttttttttttt

SEQ ID NO: 100366 - DNA, 1456 bp, Cannabis sativa
gtgtaggtgcaggtggagtctagttggaagctgcaacatctaagttgcaaaaaagtgggtcggccatggcctctacaggctagccgccctcctgtttaggagcttggctgaccacctcctcagtagatgtgtcaaacataacctcgttaaagtggcctgatgacgactctttgggttgggcgatggtctggtctagttgcatcctgccctcatacaattctcttccctatgctagttttctttcaacgaaagaagctcaaatgtaggagagatcatcattagggttgtacagcttaatctcatataagttctttgaagacaagccaacatactcgtccgtaatggcttgctggccatcaagcgtaagcttcagtgctttatccctcttcccgagctctacctccaacctggaggtctcagcagcaagtgtgttgttctcttagtttttgataccaagaatgtgctccaatctagtaatcatgccctacctctgttcaaaaagagcctctacattggtgagggcttcccactttaccagaatctcagtctcttgggctttaagcttctcccagagagctccctaggatcacttggtcttgccatgagagtggctgaactttaatagggcctgaaatcaaaacaaaactaagttagtgccagaaaaaaaggcatggccggccatagaagctccatagaatggcttgccggccagcttctcaaaactccagcattggttggccagctttgcaaagttccatacctgggcgaccagcccttgcaagtacaataatttgagaaaaatcagatgtgttaccgaggtcaactcttggagaccactagatggcaacctctctggctcgacatcgtcatgttcctggagctcaacgatgggtaggaccttataatacgtctatgagctgcctctgcaactctttattttgtggtagtatctgccccatggcaggatctctcggcgcccttaccaaaaggtcagcgtggaggtggggtccccctcaatggaggatcaataatcattggctggccaggcgatgcttgccctagaggaggaagaggtagtgaagaccccgcaacatcactagatcgggtgatttgggtcaccttagccctaggacaaccagaagcctcgcttgagggctctctagaaagatctctaagcctagaagccatatctacaaaacgaacgtaacaaagtcagaatacatgctacaactattcaataaaagaaaaaagcagaaaatttgatgcaatcaattatcaactaccatcatcctcaaaagtggagtcatctaaactattagcaatttccttacctgtgcctctagacgtaggcaaggggaaagtgggcctggaaaaaccctggccttcaggcctaataaggaaagtggtgtccccagcaatgcctcctcaagccaagcattggcggagggctttttct

SEQ ID NO: 100367 - DNA, 684 bp, Cannabis sativa
caattctcttacaaatattgtcaaatgaactctaccactcatttataatagtcttataataatataataataactaatagagatagagacaataccattcattggaaaatttaaaaattaattaaaaatgaaaaattatacataaaaaagaaaaaacttgtcttctcaacaaaaacatttaaccaaaaagaaaagccaagatctgaacaaacaagattttgtcagataatatactaaattaaaaattagaagggacctctcataaaaaaatgtttagaggggaccaaattaaagtttctgaattctgatctaaaattaagctgactttgtcagaaatatatataacattgccccataaataaatataattttgaatttaaaagtttgaaatgaactttcttgcaaaaaaaaaaagaaaaagaaaaaagaactcttgtagtttttctctaatttatttaattgctcatccacatttgagtttatcttttaaataagtatttttgtccctcactaattacataattactcattgcaaattatcatatatttgtttaggtaaaaattgtgataattttctaagaaaaaaacattattattaaatattagtagtgtctaatacaattataagaatatgattttgtctcgtgatatatgtattccgtggtacattaaatgagtctcagg

SEQ ID NO: 100368 - DNA, 1263 bp, Cannabis sativa
ttttaccaccaaaattttagattagggggttagttgcaaaaacctgcatactttagggggttttgccgcaaataaccctttttaattttagggtttccagttgttttcaaattttttatttttttttatttacaatttttgattttattttaattttttaaatatttttttatgtggactaataaaattgtgtcatgtgtacactatgtccacgtagatgtatacgtaaatattccaacatggcacttatcacctaaaattgataaaaatattaaattgctaacagaacatgagtattgggagttttaccgccaaaatttgaattttaaaagttaaatacaaataaaataaaagtattagagattttaccacaatttacctttaaatataaacattgtagaacttctatcaaagaaaaatggccaagttaattataagaagaataattatattttaataaaacatacactaaataattatattatattcatttaaaataattttattataatatagtgttaaggagtgtttattgttattattattacattgatactttttagtgttttaattttttttctagtgtaactctatttagctagaagaaaatttatataaaacatacaaaaatttaaaaatattactcatatgcccttacaaggttactcttatatttttacttttatttttgttttatttacactaatatttcttagacatgcatgatgtcattatattaccttcacacatttatctattttctatcattttccatcatctttttttttcagcttcatttcattctttatagttttctatttgaaaacttctcccatgatcaaaaccattttttatttgaaaaaaaaaaaaaattaatttcatccatctttctcaactaccttcttccatcatccgaccacgtttttttctttttttttttgctctataaatagccaatatttggtcttcatctttctcatcatcattgctgaaaaaacaaaatgaatgtcaaatcttttatcaacaaatataaaggcaaacagcatgttgttgaagatgatgatttagactttcgcctataaaaaaaagtgattgttgccttgttaagaagaaatcgaaggttaatgctgttaaaaatatttccctcactaaagttaagaaagggaagaactaagttgatgagagtctaaaggtttctttctagtttctttatcgttttgccctaacttctcttatttcttaccacgatcgagttttctctgt

SEQ ID NO: 100369 - DNA, 592 bp, Cannabis sativa
ttcaaatatcacagtttttgtttagaaattgattttcatggtttacaaatcactgacggagataataattcataaccattattaattagtattaattaaaatcaacgctaaaaggtcaatggatcaggaattttattaattaccacataatattgattaaaaaattaattaaaaacatatatatatttttagcacgacggacaaatgagaatggtgaatacaaacatgtcccagttactctgaactaaaatttagtgtgtatatataaaaaggtacaatatgtaattaattttatggacattataatagggtgtgccggccactatataaatattatataatatagtaaaaatatattgactactgatttgtcacacggttatgatcgacctattaaactatatatatataagataaatatattaattctcactttccgaagtcacatattatttcaataacgctcataaaaaatcctaattaattaatatataatttaaatattttttttaagaaaataactttattagtattactatttaatattaattaattaatagccgacattaaatgcatggcttatgatttttaa

SEQ ID NO: 100370 - DNA, 742 bp, Cannabis sativa
cttcaacatgcaaaagttttcgccaattatgataaggatgggttgaatgtaggggacttggtcacgactactaactgcaggagggctaagttgattttcgaaggccactcagtagaagattttaacttatccaaggttttttgccctaatgtccacaaccctgagaccgagaaggtgcttcgagaggacatcatcgcctccgtggaagatgaatacaagaaatacctattcaggaaggaacaagagttcgcctacagtaatgcccaagctgctgaggatcctccgagtagaatcggggaaagaacaggcgtcctctcggccaaaattccctttctcggttcctaacactggagctcctaacgccagcacttctagaacttgtaagtctccattgactattcatcacgttctttctgctcaagattactgtggttgtaggccaatgaaatttgatgaccgattgcataaattctgaatgccccattcacgatgggattataacgccaaaagtttttatttttccaaccttaatcatttcctaggccagtcccgaatgggttaaggtccttccgtacccatcctcttggatcaatctgcccatctgtcctccagttggttcctcccctcagatagctttctaggggacgattacaccagccttttactatatacctttgctagggcagaattagatcgccagggtaggattagtctaattatgttattcttgttgggttttgtg

SEQ ID NO: 100371 - DNA, 582 bp, Cannabis sativa
tttttttttttttgtatttttgttcaggttctataaaagtgtttcttcaaatctgattcattaaccttaccacatgcatggtcatattaaagtgcttaagtttagttaggtagttataattagttggtttagttataactaacttttttctttctaaactatgttctgtagtagctaattcactttattgggatatatatagaaaatgttattacaatctatgaattagagagcttatagtttgttcaagtcattatttgagagtgtttgtgggttgagtgagagaaagagagagttgttgggtttgagaatcttgggttatcaaagttaatcattgttagctattgctataaactttgatgatgaggcaaaaatagatgtagcatcaattcaatgtggactagtataattgctttgtgtttttggctcaatattttactatttattctctgtaggatagtattttttgctcaccaatctcactacaagaaatgtcatttttaccagcacagttcgctactatactggtaaaagtaacttttaccaacgcatttcgcaaactgcgctggcaaagaagtcaaa

SEQ ID NO: 100372 - DNA, 1835 bp, Cannabis sativa
gagttgcttggcatgaactaagcttgcgaagcggaatcccattgttgtgttttaaactaacaaagaaagatgcaaaagtgagctgagatatctcagaaaaaacttgcaaacagaaatatatttaatatttgagaacttgggatggtattttgatcccagtcatgactcttgttgtgtgtatttataatcaataatacccttgatatgatatgtaggacagatatatggattgcattgaaattaggtggattgcatgctatggggtctagtgagaggcatatagttcttgtgcaatcacatggtattgtcttcctctgcaattttctcgctcttctttcccagccccaccaaaccaactcgtgagatcacaaaatttccattagattacatgtcttaggcatgtcccatatccacaaggacacaattttcatatcaaaactaaagaaagcagtaatgtgatttctttatagcctggaattgaaggaagataaaggctaagattgtgatacaatattagaaatcttctttgacaaggccaataatatatgtggccccttgcaatagaagacatgtcttagacattttattacacaatttgtgttcacagatagatgaaagatctaagcattaaatacagaagtagaaatagtgaacaaaaatgtaagctcctcatgttctgtgattcaagtgaagctagtacatcctgcaagtaacaatctgtactctttttttaaaaataaacaataatattagttaatttggcagaatcaaaaaaggactgttgggcctggtgttgttctgttttcttttcaacaagctggatatgaaagcttttgaccacacaactatgagaacataaaacataagcattgatgagtaagatggcaatagcatgtgatttgaaaaggactattcctttcaatagaccacatctacatatatcccatcatatcaagggtcttcaaaatgtgtatatatatacacgtgagattgggttcattatcacctcaactttcacattctcaaatattcaacttaacttccttgcaaaccctttgagatctcctttccttcctttagagacataagtcaagaatcggatttagatttccaagcatagttcatgctattgaaagacctttttcaagttcaaaagatgttccaaaagggcatttggtagtttatgttggtgatgagagaagaatgaagagatttgtgatccctgtggcatatttgaataagccatcattccaagactttctaactcaagctgaagaagaatttggattcgatcacccaatgggagttcttacaattccctgcaatgaagatgccttaatcttattgctcttgaatgcctaatgatttttgcttgcacactgattattgacagcctaacaaaaattattgttacaattttgtaaggcagacattgccaaatactatgtaaatatttttccttggggaccaaaagttaaaagtgtccctaagattgataaaaatcaatactaaaacactttttcttcattcaattctatggttgatgtttatttccttgtccgtattctattctattgtttcaaatttagaagctgtagggattatttttccccatatgaaaaaaaaaaaaaaaaattaccttttatactattttttaattttttttttttaaatttaaagtttgggttaatttttatgtgggttgtgtgaattctaattggaatttagattttcgttaattgctatatgaatttctgtgtagacttctgtaaaaatgtaaaaaaaaaaaaaaaaaacttcaaaaaaaaagataaagttaaagttaataatttaca

SEQ ID NO: 100373 - DNA, 608 bp, Cannabis sativa
aatgaaccttcccatactacttccaccttacttatcattaaacccatataacatacctataatctaacaaaaaagtgtatatatagctccaacattcaccaccctaacccatcaatacaattacaatctttttctatcattcaaactcaaccatggcttgtctagtgttgtttgctgtttttgggtctttggcattggctgcatcagctggtgatctcaacaaagattttgagatcacatggggtgatggtagagctaagatgctcaacaatggagagcttcttacattgtctcttgacaaagcttctggctctggttttgagtctaggaacgagttcatgtatggccaaatcgatatgcaactcaagcttgtcgctggcaattctgctggaactgttactgcttattacgtaagtaacctctaattaaagtttactttgtttctttatttggttatatgtattaatttgttttgttatgtgaattttcagctatcttcaaaagggtcagattgggatgagattgactttgagttcttggggaatttgagtggtgatccttacattcttcacaccaatgtgttcagccaaggcaaaggcaacagagaa

SEQ ID NO: 100374 - DNA, 1869 bp, Cannabis sativa
actgtgtctcaatcatacaacacgaagaagaccctaaggattatgacaaatcagttatgctccgagataaatcaacctgtgataacaacaaagaagcaatcgatcatttgaggaactacttgaagacaaagaagtatgtcattattttcgatgatgtgtggtaaagagatttttggggagtcattaaacatgcttttcctatcaatgataataaagggaataggatcattattacaactcgtaatacttcagtctcatattctattaaagagagcccttttgacattgtgaaaaagctaaaacctttgtgttgggattcatcttgggagttattttgcaaatgggcatatcattttgagccgtatagatgttgtcctgaacacttatacaatatatcttgtgaaattgtaagaaaataccaaggtttgccacttgttattgtggccatagcaggtttattgtcaacaaaagagaagatcgagtttgaatggcaaaaagttattgataatctcaattatgagtttaaaaataatccccagcttacaggcattttaacagtgttgtcttttagttaacatgatatgccttatcatctcaaatgttgcttcttatattttggcaggtttctagaagattacttaattttcaaccaaagattatacagaatttggattgttgagggctctattgaatcgagaagagataaaacgttggagcaagtagctcaagaatacttgaatgagctcatccacgaaaaacttagtttcctttcatataatatttggattccaacaatggtgttatgtccatgatttaatgtttgagatcatcttaacaaaagtagatgcaatatgtttttctcacattctcaacacaagtaaggctaaatttaaaggaaggagtcgtcgcctatcagtatttagtactacaaaagatgttctagaaattgtcagggattcaaaggttcattctgtcatttttcataatatcgatcagttgactgattcttttgtaactggtttattcaaagaattgaaacttctgaagttgttggattttgaagatactcctctatatgatatctccaaagaagtgggacatttgtttcatttgaagtatattaatttgaaaggtacgcatgttaaaaggcttccaaagtccattgggtcactctacaatttataggtctttaatctttttgataccttcattgaggagttaccaatcgagattaacaagctgcaaaatttgcaacaccttttaggatatcgatatataaatggagatgagtgtagtgtgaaatcctacggcagtgtgaaaatacacccagggattggatgcttgaaggagttgcaaacacttacacttgtggaagcataaaatggagttgattttgtaaaagaacttcaaaagtttacaaaattagtgtctttaggaattggaaaagtgactacagaaatgggaaaacctctaacaatctccattggcaaaatgagccaccttgaagagctcttcataacttcttttagggatgaggaaattctagacttcgaaagcatttcatctcctcttcgctctctgcgcttcagcttgcgatatcgattaaaagagttcctaaactggatctcagtgcttcagaatctaaggggattgaccttacgtttcactaggttgagaaacataaaagatttacccaatttagaatttatctatttgcaccaggcttatgatggagaggaattgcactttcaggaatgtagtttcagaagactcaaacttctaatagtcggaaagttggaagggttgaaagttgtgaaaatggatagagaagcactgccacatcttgagcagcttgatattggagattgc

SEQ ID NO: 100375 - DNA, 1901 bp, Cannabis sativa
atgccaattctgatgacttttttgacgccgacagtaacttcggtgacttttccgacaccatcagctgctccgacaacttttctgacaccaacagcaaactccagaatagtcgtcggaattggcattgtcgccggtaaaatcaccaaaaaaaataccaagaaaccggttttttcatcaagaaactgaccaatttcttggtgattttttcgacgacaattctacttccgacgaattttttggtgccgacggcaactctggtgactttttcgacactgactcccacaactccggcaactccgacgacttttttggtgccggcagcaaactccggtgactttttcggtacgagtgacaactccgacgattactgtagtttcatttgttttatttttttaaaaaataaatataaaggaaattttaatattttttatggtaattcaattacatttttattttttatgaatcttaaatttagattctctttttaatgttttttatatgattttttttttaaaaaaaaaaacatatttttagtttgattggttagataataccatatttagtgacatttactttttatgttatatttatcataactataatactttttctcatatatttgaaaataaccccaatcgtaatggtaaataaaagtccattaaattgtaatccaattacaatgtaatggttattacaataatactcattaaaataaatcaatgtaatgcttactacaaacatttacacttcattacaaaagtaacgtaaagtaaaataataatataatacaaatataataaaagaaactcaaaagcccattctcatttgaatattttattttataggttaattaaaattttcaatttatatttgatatatatcaaattatgatttttaaattttttcaattgttaaaaattcttcctgaaatatacagattattaaatttaaattttttttgtctaattttactaacaaacgtcttacgtggatgaaaatttaagagacataatttagtatgtgtcaaagttcgggtagcaaaatttagtacatctcaaagttttggagggcatgattacatagacaattatcaggttagtaaaattgaacgaaatcggacagaaattcttaaatccaataaaatagtttagggagaatttttaacggtctaaaaaatttggagacacaatttaatgtatgtcaaaattcagaaattaaaaatcttaattagcctattttacaattattgaaataaaaataactaggataatttggttaatatacctctcattcttttacattttttttaccaaaccaaatacaataattttaattataatatttattctaacaccaaactaaatattgtaattaattttcgttactattcaaataaattttaattgtttagagtaccaaagaaagtaatttgtgcaggaaaaaattgtttgacaaaaatcatatagaatgtaccattttttgtacagattttattaatacaagttacccaatacaaatgtatcaaattagagggttttaataattaaataaatgcaatgtttcatgtgatttatcaaacaaaaaaaataaatttgtgtatatgtttatcgtaatttgtaatgtttatattatacttggtaagtatttattttgaattttgagtatcctaaaaatttgtgagaagagtttagatggaagcaggccctctcaaggtgttcagaggcctagggcgaaatttgaaacggggctttttttacaaaaaaataaaataaatattatataattctacttatttttactttgagattattattgaaattttgacacaatataatttaactttttatcttcatataacaaataatttttctcaccatataaggtaacttaacgtaatattt

SEQ ID NO: 100376 - DNA, 1743 bp, Cannabis sativa
  modified_base (1502)..(1508): a, c, t, g, unknown or other
  modified_base (1693)..(1697): a, c, t, g, unknown or other
cggtcccaaaaaaaattcgtttttaaaaccgtcgcgaaaacgaatatttgtagtaaagcttccttcaatccaaatctgacttcgatagatacatatagtaaatgaggattaagttcatggggtaaagaattttagagttaacattatagagttgtgtgattaatttgtcatcttagcatctcttagcattgatgtgattaatttgtttattgctttgtatgtaaaaatatcagagaaagtttcaggacctttggacttcaagtttcaagatttaactatactcatatattggtgtaactaatgagatttattgaacatgagtttattggacatgttttgtatttgactttttaaatattttattattttagataatttgaattttgaaacaagttttatgaaataaaatttaactagtctttctaattaattgtgttatgaagaaaaaaaatatgtatcatagaaattaattttttattatttaagcttgtgagaatgataaaataacataaaaattattaccaaaaaaaagtattattgttgattattttataatactctttaatataagtgttaaaatgtattatgaaaatttgaataataagtatattttcaacttattaaaatgataaaatattacttaaaaagtattattgagaattcaataatactttcaacataagtaaaaatgacttataaaaactaataaaaataatattcattaaaacatattaaagtattaagataatactaaaaaagtctttaataatactttagtataagtcataaaaagtattataaaaagtggcatgacttttaataacacaacattccttaatacatcaaaaagtaatatggaaagatatttataatatttttggctattataaaaagtattatttcttcttgtggatcaacctaacatatggatttaattatggagatgatatggttaatgtcaccatgcatgcattgatcatgtgggaaaagtaaattattaatattataattataacataataatgctataatactatttattataattacaaaaatatcaaaatttatgttataatttttttaaaaaaaatttacatatctgtttatttatttttctttcaaaaatatgaatttataagcatgcatgtgataaaaaaaattaatttatcattatgaaacattacatatttagtttaacgatttgttttaacgttttattttttttctaaataaaaattaacaatttgtaatatatatatatctttaaagtgtgcatgctttagttgtatattagttgtttgactagtttaatatatatctttaaagtgcgcatgttttaaatatgaccgcatgcgagcaaagcgcaaattatttcctaattaattaatattacttgaacgatttacgtattatataaataaatttaaatattgtgttattagaggagtactttgaaaaaatatatatgaaattaagcaatttaatcataaattttatacttnnnnnnntgcaacaagtgatttattaatatgtatcaaacctatattcttttctttataaaaatagtctttttttttttgaaggttataaaaatagtcttgatgtggctaattgtaaaaataaaaatgaaaagagatgaataatatgtaatgttatatataaaaaaacaaatttgttatagtgagatttctcnnnnntagaaactcgagaccagactcctctttaaaggacacgtgtattcag

SEQ ID NO: 100377 - DNA, 1270 bp, Cannabis sativa
cttgatccacgtgtccctgtctgattggtccacatatattgggcaaaattaggggcaacacaaaccacaactgcaccgaaaaatatttcaaagtacattttttggacagtgtagtgtggtgcgggcaatttgtacagttgtacgcggtttgatgaatacccctagttataatctaacttataaaataaaaaattaaattgggttatataataaaaataaaacttgagtttattttatgaatataattttatttatttaaaatattattaatagatatttattaaaaatattcgttgcaaaatgataatatttattgaaaacttttacagtgtacttcactgatgcaccaaatcagttttagtatctgtaataattttttgttaaattttttcttgtagtcatatacgttatagttatttaagatatcctgcaaaattttaaaaaattcagaaacatttaatacaccaaaaacagagttcaaatagtatattgcacgtgtgaccatcttctttttgtgttatttactttaattttttgtgttattttttatttttgtctcctttattttttttaaccctctcatactattattatttttattattaaaattatattcgaggcttttaattaattacttttttcaatcactcgtagttataatgttttactatttcggtaagtattgcaattcttatatcttaattatgttatgaaatatattaaaatttatgaattaaacattaaattttaattttttaatggaagttccaaaaaaaaaatatcaaaaagcatattcgtaaaaacatttagaaaaaaaaaaaagagaaatcttttatggaaaaaaaaaacatgtaaatttgaatcttattaattaactttattatctcatgatgttttcatcattaatttcttttagtttaaggaccccctcttggatatatatatatatatatatatatgaagcaagttggttaataatgttactaacttctcatagtttagttatattgtacttgataatttatcttgggaaatttgattttttatgcttacaaatacttagggtgcgtttggaaagccacaatgtaattgaatttgtgtgtaattggaagcaattacacaatttggcatgtttgtctgaccatgtaattacactgtaactatgtaattagaagtaattgaggggttccaattacattctccaattctcatgaccccctgagaattggatgtaattacactgtgtaattactaaaaactttccatatta

SEQ ID NO: 100378 - DNA, 698 bp, Cannabis sativa
aatattctcaaaatataatacagctcaggatgggccaaatggtttgtactttagtgtcgtcccaaggctgatctgaaaagtgttccaagtaaatgacatacgaaatctaccagtttgatatcatatcctctttattattagttagggtagatattatatgcatgtgtgaaactgaatagtaccatacatatatcaatatcatggggtgtaatgtctactttataatgtttatgtagggtcaaataggtagccactcaatgagttttgtcgtggtgctagaactaaaacaatggagcggaacgaagatttgacaccataatcgactagtggtgggcatggcaaaattggcctactgcttatgtataaatttattaggttttttctcatcacaaacaattgattttcgggagaaaatgacatatatatatttatatatatcataattatatgtttcgttgaaattagcagaaagaaagattgaccaaagatttggagtggtaatggattaatcatcttggatatatatgccatgttactgcaagcaatatatacaatgtaaataaattagcattggtatttggcattaaatgttttgtatatcataataaattaaaatgtgtgtggcaactaatattaaaatatatcaataatagtataccatatataagactacgaggaagcaccacaaaatttgttat

SEQ ID NO: 100379 - DNA, 2149 bp, Cannabis sativa
  modified_base (2069)..(2106): a, c, t, g, unknown or other
tggtaaaatatttccaacacctagaaccctagctggccaaggccaaggcacaaagtgggcagccaaatttttctctttcttttgacctcaggtagggccccgtgatggccttggaagcatatacaattgtggccttatagttggtttctcttggaaactcaatataaggctcgatagtgtgtctattattgtcaattatacatcttaagacttactatatttcttagtaagtgtacttaagacggtacttagccgccattgatcaatcttgtacattttgttttaccaagaaggtacccttgggtactgttgacttgaatgtgtttgtagctttgtcaggttactcacctcaccttatttcttccatgtaagtagtgccgagtgtagaataggggagatgacaactgcataggtatcttgtttaccttgtagttatggctgatacaaaatagagtggtggtagagtaaccctgtgcgaccatcatgcggttagattggctgcgtagggtaaaattaagatggcagaaggggttacccagcctcctattgacattagctccaaaactaaccatgagaatgagtctcaaagctggatttagttgtgaggaagttctaccagttaggaggaagagacacacgtcctatccaattgccctctaggtcactatgatagtgatagtaatccactgaataagctcattgagcctacggtacttagcttggatcatgtctcggattatcctcagagcttcagattctcaatgcgggttcataaggagacatgtggatttcccatgtatcatttctctcgaaggacagttttgagataatagaggctattaggctagtgggcagtatccattgtaagatacccccatcagatcaactagcacataagttagctctcaactggatggcgtggtcagagtaccacatcgagcaaggagatgtactgccttttcatgtgtacttccaagatgttgctgcttatttcaaaatgtgtccaatataattcaccccgaaaggtatcaagtaccttttggcgatgttttttctgtacaaggagttaggctggcctcagcccactccttatgagattgggtattactttgacacccacattgattaactcgggatcttttatctacccaaggagggactctcttgagatattgtgtgtgagccacgaagtcatcactttcttcttcttttaggatggggaccttttgccatgaagtataactgggtattttataatcgcaagtatattctttagaggcaaggaggccaacgttctttaggttctgctcgtttagcaagaaatctgaagctcgtaacccgtatggcagactcagcaaggtcttgtgatgctctgctatctgtggggtagggactagtctccgaggaaccggtgcaaaaaattaaaagttcagtaagcaactttaaaaactacaagttaatattgttggtttcacgaagaaagaaacttatgtatgattcgaaagtcagttgtgtttattggagataagcccgtcgtccaaaagatgttttctttaaaatttgtctagttaggtagtctaattatgagcttgcggtcgccagtataagccccaagataatagaagcctctcgcaacattcttccttgtgagaacttctttgacagagtaaaagcaggctatctccaaaggagtggggcactcccagcctaggatatggtatagaaccttgacgctcgcaaggatcctatatgagatagggttcatctggaatggggaaaccccgaggtagttgcagtattccttaaagtaatccttaaggggaaggaccgctccagcctggatatgttcgaggctctaagctccaacactcgaggagttactcgtgttgggtccactacacttctcgcatattactctttttgggggaaaataactgaattccccaggtgccacagaccttataatgcacccattccgctgcttaatgtcataagacttcaggatgccaccaacataggccccaataaacctaaccttggacgcgataagtgttggatatattttaccnnnnnnnnnnnnnnnnnnnnnnnnnnnnnnnnnnnnnncctaatatgaattctaaagcaatgaaataaacacataagagtt

SEQ ID NO: 100380 - DNA, 1709 bp, Cannabis sativa
ctatatatttcccactatcaacatctaaaatcattctttactatcaatcaggaagcagttaaaaccacctttaggaaattcataaatcgaataaggaagggtggacatctcattttatgtggggataggtatgtcactatatactttggacatggtctcagctagcaccagcaccagaagatattgatacatgctatgtatttgggttgcatgtcttagttaagttcaattcattttgctgttaaaatcaccaattttcttttgaaggaaactacagtgaaggtgcaaaatccttgctgtgccactgtgaacagacaattggagatggtacaaggagtgtaatgccaatttcaagctcagaacaatgtgctgataactataagataaccacatatggaatatcaagttctaatgactggcaggcatcatcaattactcaaaactctgagggtggtgttgattatacagtggtatttcacgattcttgtttgaagacttttttaataaactatgttttactattcttgtttgaagaatttatcaagttccgaaggtcaaagatgcatgctaaacaacattggaaaacaaccataacaatacttgaaggctatcatttttctttttaaaatatgaaattgattttctcaaaatgaacacagaaagatactctctttcatgtaaatgtggcagatcaagttatgatgggtttaccattcagagcgagcactgtatattagtttccttgttcccatttcaaggttctttggcttttctttgttttgttttcagtaatcataaaaatgaaaattttaaagctttgagctgatggactcgtgcctatttaataatttgttatgcacagctagtcactgatggaaaaaaaaaagtcaattggaaatctccattgtgtgcttctatttttttcttgaaaatactagatgcatacttgcattttgttttcaagctttagtgtaagaaaaaggttgaattcttgcagtgtcattggggatgtccagtggcagacatcagcctacagatttcagggattcataacatcctcaattccttagcggtgagtgatttgtaacccttttgttggtaaataacctcaggaatactttggcattttataatattgagtttgtaaaatctatgtttgattaaatactcaagattttattcttcggaatggagagcttaagatgtaatgatcatctgtttgctaactctctgatctgtcatttctcttcgatacaaccttacataacaggttattgctacagtagctgcaaaagttacaaaccaaagccagatttatgatacagttgatcatttgaggttgcacttgaaaaaatttagaggcctttcaagacgttttgagatgattggaagtatccatggatgccatgtgtttgatgattatgctcatcatcccacagagattcgtgcagttcttcaagctgcacggcagaggttccattcgaaggctctgttggtagtgtttcagcctcattcttttaggtaataactattatactttattgaggtgcatagttgcttagctctctattttcacattggtcatcataacctctgcagtcgtctagcagcactgaaaaatgactttgccgttgcccttagtgatgcagatcaagttattataactaaggtacatttatcttgtacttgtaacataagtttagcgtaac

SEQ ID NO: 100381 - DNA, 1369 bp, Cannabis sativa
taaaatataaatatgatatttttaaaaattaaatttagagcttttttgttaaagggctttttgggcttaagtgagagcgggttttgggcgtgggcccttgttattctaccattgagttccaattatactttccaattcacatgaccctgaattgagtgtaattactaaaaaaaatattttaaatattaactactaaaaaaatattatttttctgtgtaacttttaattatattcccaaacaagatactaaatttataagtaattactatcttatatccaaaaatatattatattttaaaatatagtgtaattactaagttgtgtacttacaactctaataattatactatttagtaattacatagttctttccaagtacatttcaaatttattacccaaaatacaagttgaaattattttaaatatatattttagctagtatttttttctccataacaagatgaggagaggactaccaagtgtggctcttctatttgggcgtaactataagagcaaccccgctcacgaatgttcgtcaagaccctttgaggcgggtcgctccccctacaatgaggtgtgtcacatgagccacaattgagcactaaattcgtgagtgctcgtgagatggatgccaagagtgactagaagggcaaactttatcatcacatttaagactctcaaatgagctataagattcgaaccaacacaaaaaattctttggagtaaacactttgtcactagaccgctcactcagtagtaaactatgttaaataattgattgttgagaaatggaaagataataataatgtacaataatgcgactaaaatatcattttttttaacttaaatactatacttacatgattttttttcatgtgttttggtatcaacaattaagtttgacttttaacgtgttaataacgatgttatcatattattgcttcaatatcgtaacacattatcataaattgctattttaactagtatttttttttaaaaaaaaaaaaactacagtattttttctccataataagaagaggagagggctactaagtgtggctcttttatcagggcttaaccacgagagctccaaccccgctcacaaatgttcgtcaagaccctctgaggcggatcgcccccacctacaatgaggtacgtcacatgagccacaatcgagaactaggtgcatgagtgctcctgagatggatgccaagaaaggctagaaggacaaacttttttttttttgtaagaacccaaattcattagctaaaacaaatagatggagatcacatgggaatttccctccccttgaaaagtagcagaaacattgctagaagtcctagcgctttttgctaaaccatccacaaaa

SEQ ID NO: 100382 - DNA, 1118 bp, Cannabis sativa
tcacaataaatattatgcttttatatttatttttatgctatttttaatattttattattaaattttatctaacatactcctttacattaaatgatttatattataattatattagtattaaattttacatttaattgtgtattattattattttatattattttaataaattattaaatgaacattaaataatatattaaattttgtatcaaaatttacaattatatattagaatacaataataaaaattaatgtaaaattatcacaaaatatatttattttttttataaaatataactcaatttttatatcttacatctaacttagaattattggggaactaaaaatgaaactaacctcgtgattcgtgaagagtgggaacaacgacataaataacgtaccgaaagatcatgtgattttttttgttttacttttagaaaatatcccccactactactgacacgtggccccaccgtgggaccaacctataatcttttctagatctcccattattattttttacataaataaaattcaatttaaaattaaaaccaaaaaaaaaatacataaatattattattattattaattgagagtcgggcctcccagaaaggacttagattagattaaattaaagaaaattccaaaacgccacgtgtaaacgtgcgaagaaaggtatagataaggtgtaacgcaaggggtgacacgtctgacggtggtgtcgactaaacagcggcggctggcttccttcttttggcttctcattctcaactcaaccaaaccaacaaatgcaacttacatagagccggctaagccgatgttgagccggctagaatttgagcttggcttggggcaagtggagacgatgagggttttgattggttgcgagtgggaatggtgatggtgcttggagtgtgtgagtgtcatgtgtggatgagattaaggaggttcttcccttcatttatattaatattttaaaaagtaaattcccttataaatatttaaatttaatttttaatcttaaataaatatttaagtttttttttttttgagaaatagaactgttattattaaataagagagtcttttacaataacagagagaatagctgaggggaa

SEQ ID NO: 100383 - DNA, 856 bp, Cannabis sativa
atcaatgaatcttagtaacccgagagtcttgctatactgtcgaagaactcctttccacataatcatcgtaacaatttcatacaaaagtacttgatgacgattattatctaaggaaacttctgtggatatgttactcattttttgaatgttccttttatctaccatagaggtgaaattatttatgcatgaaggaataaatccagatatgttattattggaaaggtcaaatatttgaataaaatgaagatgacacatacttggcggtataactccatgaaaattatttgattttagtctaagaaaaatcaaatttgtgagtttttctccaatccaaattggtatgttgccttttagtttattagctttgacatcaagaactcgaagttgtgtacaattctttaacgatgaaggaaaatttccagaaaaattattgtgtcccaaaagtagatattgaattcgattggacaaaccaattgaagttggaattactccaatcaaattatttttatctaattttagaacaattaaattcttcaagttccaatcacaattaggaaggctcccacttaacatattatttgaaatatcaagaagttttgttgtcccatttattggctcacaaagaagagaccttaaattagtattaaacctattatatgaaagatccaatatctccacaaatgatagataataagggatatgaccataaaattggtttgaagaaaggttcagaaaattcaattttgtaaagtgattactaaaccaattagtaatagtatcttgaatactagagttggaaatgtcaagagaagataaatttatttgagttttgagccaaataggaaattgtggacct

SEQ ID NO: 100384 - DNA, 1556 bp, Cannabis sativa
ttgtactttatcctatatacccatatgcatcttatggcatgtttccctagtggtaggggcaccattgtccaagtgttgttggtgagaagagctaacaattcattgtccatagcctgcagccactatcaaaactgaattgcttgtttgtaattttgtggctcgaattcaacagtaactgcaagaatgagggctttgtaagtctaaaagttttgagtaagagataaatttagctattggatgaggagtagaagttttgtcctataacaaattgtagcattgaaagtcttgaagataactgggtggtcatgtgacacggcttgttcttcttgattgcactagagatgatgaagagtggactagatgtttttcattgttgggaggtattggatctttagttcttgtttcattagtagtgtcatcctacaagtggggttagggatagtagcactagtattgtgtattggataatcatgaacgtgtgtgcctgtgatgtgaggatgaggcaaaaccagaaatgagaaaggatcgatagtggatctttcagtgtttagtgtgtgaaaagggaaaatatgttcatggaagataacattgcgagatataaaaatttgtttagagttaatgtcatacaatttgtaaccttttacacctctagggtaacccaggatgatgcaagttctagcacgtggctgaaacttggttctatgagatgttaaagtagtggcaaaagccaagcacccaaaacatcttagattggtgtaatcaggaattttgtcaagcaaaagttcataaggaattttgttactcaaattaggagtaggagtttggttgatcaagaaagcagcagtcattaagcactctgtccagaactgaattgggactttggattgaaaatatagagctcttaccacattgagaaggtgctgatgttttctctctgccacaacattttttttggtgtttctatgcatgtaacatcgtgcaaaatgccatgccttgagaataaatatttaaatataagttgtagtgcattatcagacctaaaacacttaaaaacacaattaaattgggtttgtacataagcaagaaagtccagtatgatagtaagaacatcagatttttgtttaaggaggtatatccaagtgaatcttgaatgatcaactaaagtgagaaaatatgtatggtctgaatgagaagcaacatgataggatccccaaatatcacaatgtataagatcaaaacattgtttagcaaactagcattattagaaaaacacaatttcttttgtttagcaagggggaaaatgtaacatggttcaacattatgtaaatttctaattttacagtgcaaggaattttgaagtaaatctaaacatttatcagataaatggcttaatcttttgtgccaagtttcagctgtattgtaaaggttttggcaaaaatggatgtgatgtcccagatggatagaccattagctgattcacctttgccaatcatcttcttggtgttgatttcctgtatataaaattgtcagcaaaaaaattcaatgcaagattgttc

SEQ ID NO: 100385 - DNA, 572 bp, Cannabis sativa
ttttttatatctaacattttggctgccatcgttagtattatatataacaatattttaatgcttagatagagtggctaactaggattgatattgaggaggctaactttatttttgtaaatgagggtggcatatattttttttttcaacatagtataacatattaaaaattaatataaatttatatttttataatattaaatataatttaaaatgaacaaaataacaacaaaattattggcttcaataattaaaatagtaaatataagtcatattggtaaaagttaaaaaccaaaacttaaaatactaaaacataaatattattttgttagaatttgaaccaatatacttctgttatggatatggtgtttaacactttctaaaagagatactctataattagtcaacgaaattttttaaaagctattttgttaagtaatatgctatttgattattaattacaccaacaacaatgtaacatcgaaaaatatactaagcatcagtagtacttttttagcaattctcctctattatgcgtataaaatagcttacttattatatattatgtttattta

SEQ ID NO: 100386 - DNA, 846 bp, Cannabis sativa
tacactatgggcactataaatccgaccactagtgcgaaggcaacgatagcctttttggttaggactataatcaatagaaaaaacatttggtagaacaaatataagtttgtgattattataggcacgtaaatgaggaaaacatgcacaacaaaatatcttaaggaatatcagatttggaatgattgaataatatttaaagtggagacttatgagctaaagtaggggtggagagatggttgattaagaaagtggtagtactaaaggcatcccacaaaaatttaagaggagtgcaatcttgcacaagtagagtgatcccaattggataacgtgccctatgtttttgtttcaatttttcattttaagcatgtgtaatagacaaggatgaaaaagtggatgcctatagatgcaagaaaagtgaccacacttctgtactcacctccccaatttgagtggtgtgttttgattttggcatcaaattttctttcaacaaatttttgaaaatttatgaaggtttgtttgacatcggacttcaatttgagaggaaaaatccatgtgaagtgactagtccacgaccaggaaatgagtggctagaggagtgatttggtgtttaagatgagccactaaatgtgaaattcttgtgcatctgggtagcaagatttgtaggagtaaagtctccaattgtgtgttgttgagttgttccaattagattttatggctctgcttcatgtactggacttcctgcagagtgactgtgtcacatcgacatgttagattcattacaacaacttcatatggatggcctagacaaaccaaaatatatagaatcaactcatcatctgataggag

SEQ ID NO: 100387 - DNA, 883 bp, Cannabis sativa
tttaaaaaataaataaaaaaaattaggttaattagggttttcacttgctaaattttgacatgtacttctatcaaatttcgttcattttttaaagttgtttatgtaccaaatcttgcccctgaactattgagattattatattcaaggacttatgtccaattctattgtccctaaaactttgttgtgcatcaaatcgtacctcctgaacttgacatgtagcaaactaaattatgtcacttgaactttcatctacatcatcaggtgtttattagtaaaattggacggaattctttcaattcaacaatctcaataattcaggagaatttttaacaatctaaaaagtttaaaggcacaattttatacatgtcgaaattcgaaagcaaaaatcatagttagtcttattttattttatcaaactaaagaaattatcctataatagtttatattatagaataattttatgagtatatcgtgaaatagatgttcattatatttttatgaatttattttatttgaaatttttttataagattataaatggtcttaaataaaaataatgcagagattattaaaaaaaataataaatgtgaaaataaataaagaatgtaccataacaacttttttaagagtgtatttcctctagcatatataactataatatatttctattagctttcaaaaaaaaaaaatatattgtattaatatagaaaatttaatagtaagtcccgaatagaagtttatattattgtataaataataataagttagcttagtaatttatcctttataattaatttgacatagtaattaattacaataaaatttagttgattgtaattctttttttttccccgcatagtaaaaaattatattagaataaaca

SEQ ID NO: 100388 - DNA, 1329 bp, Cannabis sativa
tttgagaaagaaatatatgttatttaataaagtggcaaaattaaaactagtcgggcccacaaggggttcaaccactagggatcaatttaaagccaattttattttttttaatccatatatttaaatcctaacttaaccctaataggtatagtataaatagataattataggctcttatttgctagaggctaatcacaagaaatcacttcgttagacaaataagagagcttctataatttttgaattcccttcttttctcccctcttgaattcgtgccctatagtggagagagtatatgctcacacatatcaagtcaatattcaatcatagtgtggaaaattgtaaataattccatcacttgaaggagatccagatccaaatcttagtaatactctgcgacaaaaaggaacaagggttagagatctgaatggaaggagacattatattctgctgccactaatgtaaggttttctacaactttatatatgtttattttattattttatgaaattcatgtttagaatattagattatagattataatcaagcacatacatgttagtaaatctaaatcctagtaaaacaagctccaacatgaactacattggaaaaggcatccgatctctcttttatggaaagcttttctcgtatctaacttatccaaattacccttcctaatcagacaatcaggtgaatcatctaatcttgaaataggccatcttgactatctcaatcttttatcattcataagtcatattcacacccagtagttgaagctactaccaaaatttactggacttctaatggcgtcatcccaactcttttggcgatcacatatgagatgtgggatcaaccccgtgagcccttcctgtttctacatcccaacttctttgacaaggcctaagtaaatatattgttctttaaagaagctttcaatgtactttaaaaaattgtagttttatcattctataaatatatttataacataaacattattattttgtttttttgttgaaattttaatttttataattactaagtgaattttatatacaatttatttaaagtgagcctgtgaaaaattgttggaacagacaaaaatcctaattcaagagattagacatacattgaatcaaaaactaaagaagagtcataaaaatatgaataaaataaaatcgcacacaataacttttatttggtgtcaatatcctatggatattcctattcaatgaggtcatgcccacaaaataaaatctattagagaaagtctcaaagttacaaaagtacttgatttatacaaaaataagatttcctcttgtaataggagtg

SEQ ID NO: 100389 - DNA, 952 bp, Cannabis sativa
atgtaagcatcaacccatatctcctatattttatctgatcctttcaacaaggctatcttttagaagaagaaagtagcaatcttttaaaaaaacaaagactcaatttttaatcaagaaaaaaaaaaagaaaaatcttaccgctggtaaaagcgcaggtcagaccaaccgaaaatgcaagagaaatagtgaaaaccccaagtagaagataattcaccggatgcttctggtagtaataatacaaagggcacaaaactgaaacaacagaaacacccaaattaaaattcaatcaacacataaccaaaaaagaattatgttctttgctttaattaattacataccgatgaagggagtgattattaggacgatgtaaagagctaagccagccccagtgctgacaaagaaatgggaaatcggatgaacggagacaacggtggcggcaacggcgatggtagcaagcaattggatggtaatgatggaataaatcttgcgaataaaagaccagcggagttcagggctctccaacatcatcgggtaaagaggcctactcccgccggcctcgacatcagtcttccggtacggttgagcccacatcgttgttgttgttgttagagaaaacaagaaagaatgagaaaaccacaatgaacgagagaatgcgtttggctgtcgggattctttgcgggaaagtaagggaaaaagagagagtcttttttaaggagttagttacgtgtggaggaggagtcgaaagggggatttatatgaagaggagtttgagttctgtttttggatgaaatgagagacttcgggatggatccccgcacgtgagccaattgaggcggttgagtctgagttggacgctcaccacaccgcaacacaactcgacaaacttctagacgtgtcttacgttatttttattttagtctccttcaaatattttaacgacatttgctttttt

SEQ ID NO: 100390 - DNA, 738 bp, Cannabis sativa
caatccccccttgaaaaaaattgagaaatattttggttagttataatggatatttataactaaaggtgataaatataaacataatattaatttttacatgttggttaagttattttacacctattataaaagttaagtaatcaaatcctagtataagtatctttatttttaatatttagtttactttttgtccttttaaaaaaaaagtttgtcctccgttcaattttaattatgatggatatatatagagaggcggaccacatagaaacgatgttaaatcatcttccaaaaaaaaaaaattgaaaaaaaatgaatatttagttagttacaatatatatttgtatttagttagtatgtttacataatagagaagaaattctctttatgcaaagtatttaatattatttatatttagtcatcattgattggaatcaatccttgattgatatttttagttttactatgtataaatagattttgtggtgtttttatggcacatattgaagaaattgtgaccttggttatacatgaaaagtttgctgatcctgtccgagttgtcactatagagtgtgatttttccagtttattttagaaaaatttgtacacttgtcaaaatgtgtttgtggttgtttctaagatttcaattttctatattcatctttgtgagaagagagtttcttgtgtgaaaacctagagtgttttactaggttttaatctctatattgttgttctttcact

SEQ ID NO: 100391 - DNA, 1229 bp, Cannabis sativa
tttttgtgttattttttgaaaaactgtaaaaatgtaaaaaaaaacattctttgaacataaaaatgtaaatattttacaaaaaatggtgccttatgtaattattcctttttaaaaagtactttttctatttagatctctaaaataagtggactctcgctttagtctagagccggccctgactacgagtccatatgagtgtccttgaaaattaggtcaaataaccctaatatgatagaagctcggttttgtaatctcgagccattcttatcatggtctaaggtcttctcaaattagtataattacctagcttgagatatggtcactttttctcgaagtggcttgaccagctgacaggcaagggccaatcctaagattggatagaacttttttttaaaaaaataatatatacatctttaaaaataaatattttttgagggtttaggctagctgaaccctaagtattactcatcactactaacttgtttcggagattcaagcaagctcaacaacaacaataccagtctcaaactatcctcataaatttttcccataatattctcaaaattaaattattttgtataattttttttcttttgtataaaaattgtacatacatacaattaagtgagttggagtaatatccaaagtgaaaagtgaaaaatgaaaaaaataaccctaataaataatgggtttctacaagatgatatataacaaaggaccacctaatttcttgtgttatcaattcatccatttttatttatttatttattttcaattaattaattaattaataacactctttcccacctttcttacatttattttctcttttggagaaaatttataactacgtgtggcttacggtattttcaatcttggaaaatgaattacataataattaataacctttttatacattaaaagaaaaataagatatttttggtaatattatccataaaagtatatatatatacataaaaattcatatagtacaattgatagtcacattaaagattgataactttatttttatttatatattctttttacttatttttttaactaattcatgacttgtacgtaagagtttttaaaatttaaaaatataataaatgagaagtgaaattttcattctatttaaatatagatatttaattaaaatacctcataaaattaataatggaataatgatactttgaatcttctatttttactaaaaaatatattta

SEQ ID NO: 100392 - DNA, 948 bp, Cannabis sativa
aggttgatgccaacttccttacttgggccaagtagctaaccattttgtgttccttagcctcaaaatctcccttgacctgttgaactattaattgagaatcagattgaactaatactttgttggccccaatttctttgactaatttcattccacgaattaaagcttcatattctgcatccttgttggttgctcagaatcctagctttagtgactggtccagcatctctcgttttgatgataggaggactattccgaccccgcttcctcggatgtttgatgatccatccaccttcaatagtcagtttcttttttcaaggtttcctttacgaggtatgtgttctggagttatctcgaccaggaagtctgccaatggctgccccttgaccaccatttgcgggagatataacatgtcgaattcactcagttctactgcccatttcattagcctccagatatcttttgtttatgcagtactctctttaatgggaatgacgtcattactacaattgtatgacattggaagtaaggtcagagcttccttgctgagatgaatagggcccaagccaattttttgatcatcggataccttccttctaccctagagaatgttttgcttgtacaatatattggtagttgtgcctttccttgctctagaactagcacggagctgacggcgtgtcgtgacagggataagtaaagaagtaacgtttcctctagcttaggctttgacaatatcagtggagtagctagatattttttcagtgcttctagggcttgctggcacttatcatcctagttgaacttgtagtttcctttgagcaagtcgtagaacagtagactcttgtctgaaagttttgagataaagtgactaagcgcggtgattttcccagtcaacttctggatatcttttgcagttcggggttatactgttgcttgaaaagcttctat

SEQ ID NO: 100393 - DNA, 2551 bp, Cannabis sativa
  modified_base (2003)..(2005): a, c, t, g, unknown or other
  modified_base (2109)..(2111): a, c, t, g, unknown or other
ccctatatataataggaaatatgagctgcaatataaaccgggtctatcgcattgactttttaacatggctttcatattctccaatgatataaaataatctatggtacaataaagtattgaaatttagatcataatgttataaattataatagttataggatggacccagtttttcttagattatctccatagagttttggtactagattgcatttgtgatcactgcccaagaaaactgaactcaaccatatattatagttgacttattatatgtattatgttattcttattcttattctggtccataactttgcccataattaatccaaatataaactaaaatttctatgttttgcttccgtagaaacatatgaatttgggataaatttaaaatatcttaaaatattatattttattaaaatatgcctactcttttaggtgggttgtcaaatatactcttactttctccttaagtctagcatataatttacattaacttaagagatctaactggatatatcttaaagaatataaaaatagaagtaaaaattaaaataagtgaagtaaaatgggtatacaatataattttctctataaattttgagttagcaatatggtaactagttttacacctcgttttggggaacgcaagataaaatatcttaaatttttatttatttatatatattaaatattcagttttgtgaagtattttaaatattttattttttaaattatttataattgtaacttatacatttttttaaattattattaatgaataaaatatttaaaaaattgaaatgataaaataaaaatttaaacttcaaattttaaagtatttatattactgagaatatttaaaactaggtaaaaattgttaaatattttcagttgatatttattataaaattaaaattatatatcataaatattttaaataatatatatattaaatctagttaattcaaataatttttttattttctttatgtaaatttataaaaaaaaaaaacaaactcatcaaacaaattaaaacaaactatttatttagttgattgatccaataaactatttatttagtttgtatttaaaattaaaaaaattaaaaaaaattataactaacgaaaatagaaaaaatagaaaaaaaaaataaaaaaaatcatgatttttggatgtattttttaaaaatgtgttaaaaactataaattacaaaattttatctcatgtgataagttacaacatatttgaagaaaaaaatatattttagttgtgtaaattgaaacattaaaaaaaaagttaaagttattgtcattaccgtatctaacttgtaaccactactatattcaaagttgttttaatcaccatatctcacttgtagcgctactgcattcaaatttattattattaatatcgtatctcatatatagtccttcaaacttgttgtcaatgtatttcacttctaatagacactgcattaaaaacttttatcatcaccggtatcgaaaatattgactaagcattattgaaattaataaaactattttaactaattctttttaatatatataaatattataataaataagatttctttcctacaaattataattgttgtacctttaacttcgatcaaataaaaagaatatataaaacttattattaaaagtagaaattacacaatatatggaaaaattataaaagtttacttttttatggcataaataaataatgctatgaggttatagatattttttttttttttacatttatatgtgtttttttatgccatatttttgtaaaaaagatagaaatcacatatttgtaaaacaataataaatttcgccagaaaagtcaccggtaccggaaaagctgctagaaaaattaccgtcgccggaaaagtcaccagaagtaaatgtctcagatataaacaaaaatagaaccggttttattacataatgaataaaaataaataacataaaataactcaaaccggttataannnaaatataaccggttctgtaacacaatgaataaaaataaatagcacaaaataactcaaactagttataattaaaatggaactgattctataacagtgttataatnnntaaaaataaataacacgaaataactcaaaccggttattactaaaatagaaccggttatataacataatgaatgggtattttgggggtaaatatggtatgagtgttattattcatgaatggatgcttttgtttgattattttatttaattaatttttgtgtgtgagtttttatcttagttgctttacggaacccgttttttgtctcaaatttttaactagttgataaatataactcgtttttttatattatatttaagttattgtgtgttattatttgtgtttatttattttgttatataatcgattcttttcatatttatgacttaatctctattttttttagaaaaaaaaattataatcgattttatgaggtattatgtgttatgagatattttgttgtggaactagttttgtttttatgtttcaatgttttaggaact

SEQ ID NO: 100394 - DNA, 985 bp, Cannabis sativa
aatctcttaaccttccttctagtttaagtctccattaaagttctccaatttctaaaattttcaaaagagtcatccttggttttctgaatgaacaccccttgttttctggagtagtcatccacaaaggacatgaaataccttacaccagaatgagagcatgtcctaaggtccccacaaatcagcatggacataatcaacagttatctttgtccttttctatctagaactgaatttcatcttacaagacatgccataaatacaatgttcacaaaaaaatcatttctttccaaattatctttccctagaaattatttcttcagttctaacatgcccctctcacttacatgtcccaatatcttatgccaaatctcagtctttgacattttcttttctgtagaagtggctgcagatccaactatcacatgttcagccagggaataaagaccattttgtctgatccctctcatcacaaccatagaaccattcactacattcaagatttcattctctcctctaaacacataacctttcttatctaattctcccaatgagatcatatttctctacaagttaggtacatgtctgacatcctcaagtaacctctcaattccatcatggagtttgaatgtgatggctccaattcttgtgatcatgcatgactgattattaccaagaagcactgaaccactgtccagttcctaaaactcctcaaaatacattctgttgcgagtcatatggaaggaacaacccgattccattgtccatttatgatttgaacccttgctacacaccatcaaagcttctaatgactcataaccattatgtggaatagcaacattccctgattcaccttctttttcattcttgtactttcctttctacctatctagacaaaatctttttgtctgaccttccttttgacagtggtagcaccttatgcctggacatttccacctccatgcccattaccatttcttgattttga

SEQ ID NO: 100395 - DNA, 690 bp, Cannabis sativa
ggagattatgaatgtatcgtattcactggggagacctttgaaaatggcagaaatgtgatcacgatcattcaaagtttctccaacactggccagtagatccacagtttgttttaccttcaatagatattcattcaaggacatggaaccttttcgaaggttttgcagcttagtgcgaaactccaggattttggatgaaacacgaagagtgaaatatttttccaacgagctccagatctgtctagcagtattgcatcccaccatccttgttagtaagctttctgtcattgacgagagaagccaagaaacaaggagttggtcttgtacatcccattcgacaaaagcctggttgaaaatgccattgttgcgatctgcatcagtgagatattgtggtggaggaggattttgaatgaacttcagtagtcgatttccacgtatagcagctagaacctgttgtttccaaagaagaaagttgtgatcgttaagttttatggaaattgaatgattaaagtacactggagagttctcatctgtatctctggttcgatttcgatttccaatctgactaacaccattgttgttgttttctgctgttggagctcttgttgcagctgttccaggacctgttgttgccatgttcgccaccaatggaggccacgactttgataccatgttaggagtattgaacctcct

SEQ ID NO: 100396 - DNA, 1446 bp, Cannabis sativa
cgaccatacttcttaaactccgacaggtgattatgggttaaatcttggacaacatttaatctcgactgcttgttaccaaataatatactaagtttcaataacactaaagccaccaaagggttgtgatcatcaattcaaaagtctcacgagatagcctgtcaaagagaaataatagaatttcctgtattggtccatgtacacatcgacggagcactaaccacacccccaaccaatgccacatttgaatcaaaccaaagcaagaaaaaaaaaagcacgctaattaggagtttcaagttcttctccgcttcgtgaacaacaaagaagtacctaaaatttatgggagataagttgtgttgctactggtaatgccaaatagaacatacgccaaacaaaaacttttacctttgggggcatagcaagattccatattcctattccaccaaaaaaattagcgtggatgattttgggactccctcctcaacctagagcaaccatgtcaatgagtagccacttttaacattataaaccccatctcgatcatagtgccaacaccatccatcttctgtctctcaccttgctaatagaatagacagaattatgtgcacatctattggcaaaaaaatatgttgaaccttcacgacatccaaagcactaataggaatgataaattttcttacctgacaatcatcattaatcctcctagagattggttgaaaagatgttggacgtgggagccatgggtccttgaattcccaaacttgcattctatcatcaatggatctctaagattgtatttaagaaaatccattccccaaatcaaactcgaccaaagatgagatgaactatccttttcagtggcctctaagatagagcaaatttaaaaatatttatgtttcaaaatttgagcatgcaaggaatttaagtatagaaataatccccacacttgtttaaaaaatagagcttgattaaaaagtcgaaagtcttgaaatcctagcccacccatcacctaggttggcacaccttttcttatttcacccaaggaatcttcctttgatcaccatatgaaccccaccagaattttctgacaatagactttaatttttcataagttgtacccggagcttaaagacacagtcatataagttggaatagcatgaagaatagatttgataagtacctctcccccaccagctaaaaagaaactccatctccacccttgaacacgcttcctaaccttctcacaaatctcctcaaatgcccactttttatttttaccaatcaccgtaggcaagccaaagtacttatcatgagttgccactgatgtcaatcccaatactctcagaaccccatctcgatccacctgttgcccattctaactaaaagtgatagcaaacttctcaaagtttatcttctgaccagatgcagcttcataagttagaaggatat

SEQ ID NO: 100397 - DNA, 972 bp, Cannabis sativa
agccctaaaactagaaacaaagagtgaaaactaaccaaaaatatgacccgaaacttagactaattttagcctaacagtactttgtaattttatgtctcaatttgagttgctgattactttcaacagaagtacagaatcagattgagatatgtgacatggcctgctctacaagcaggaagtgaaaacaagcttatttacttacccatggaggttcccatcatagtttcaataatattttttttgttcttatgacagtaattattttcatcaattatattttccaaatgttgtgtatgttatataggtttgtaccgttgttgggttactcatttagttttccatctttgaaattactatcactaaaagataatttcacacaaatttttagaattgcaagactgtaaaccagatttttctacaatggtcaattgaggattggtctggtttgtcgtcttctcgaagttggaaataggattaaatgctaaagcctaatagttttttcttaacagtcttacagttttcgaagagggacatatccgtcaactatattttccttgtcatttggaccttccacagagcttccagatattcttgtggccacaggttcttcagggtcagttttatgctttctctcttgggttagccatatgccagagatgataacataatactcaatatttattgcatctaactgaatctatattgtgacacattgctatttcttgtttataacattttgaagattgttgattgctcaactttttataattatttagttgattttgtcctagaaattaataaatatcagttagccgtatttctgtaccattctatctttacagaagctaaagatcaagcattattttgggatcgataatgcccaactctttttctgatgcgttggatccagctgatcatggtgtacttcatagtgctgcaccagtaggggttaaaaggttaagatttcagatt

SEQ ID NO: 100398 - DNA, 697 bp, Cannabis sativa
atctcaaaattaattgacaatgagggaagtaactcatatatcttatggtttttaattttaatacattatcaatgtaaaactctctaatagttctaaagtaagaagattttaagcaaaacaaaactaaacatgtgcatggattatttgatcattttcttaaagtatgaccagttggactcaagttcactataattatacgacagagattttgtgtagcattagaaacctcaatagataaataaatgttgcaattgatcgtgagatcaaatttgtactttcttttaaagaacaaatttatacctttttgatctagctagatcatgatgttacatagtcgataacgcgtttcataaatatactaattcaaaacaattgtatatattattttggaaattgaagtttctaataattttttaaggatatatatttgcaccaaaaaagactagacaaatatatcattcatagatttgtgtgattactcaatactcattatataaattactgcataattaaaaaattcgctaggaaaacaaaatattagtagaataacaaaataaaccatctttgtcctaaatatattaattatttttatttcaatcacgaaccagatacattaatttttactataacttttgcctctcaccacataacctaattaataataacattaagtattattaattaaatataataattt

SEQ ID NO: 100399 - DNA, 1529 bp, Cannabis sativa
gaatttacttaatatttaaatcaaaatattttaaaatattttctaaacaattaattatcatatacaatatataagaaatagttaggttttaaaagtaatttttaattcactaactaatgacaatatttatgtgcatttaggttagtttaaaataatattttaatacaagtatgaaaacaacatagtaacctataacaattttttagaaaatagttaataaataatattataaaaaaaactatgatatttatccaaaataaaaaaccaatattggcagagctttgcctattttggatttgatctcccttcgtatgaaaataaaagggtatttatagactatgtggcgggtatggacatcgccatgacccaagtaggatttctagtaaaagcccagtaatggggtaaattacatgcaaaagagagctgactattgggtccgttgaaaacaattgtctcggtgcgtgttacagctggaaaattgtggaccatttgtacgttgtgcacacatgtcactcaatggtttaacctttaaaagtaaaggccacatgtcacccaaatcattcacctttaaaattagaggttgtaatatccgtctggaaaaaaggttgtggaggtgtgcgcactaccatgcctagacacaggggacaagatctgatcatgtgtcaaaaaaagtataactatcactaggcgaattgggttattccaaaggtagacgcccgcgacactcctggggggttgacatccgtaataggccctttgagtacttattcaagtattagctgggcagacatcaatatttagaccctttcgggactggttgaggtaacatgcccccgtctaggaagctaggatagggcaaagtggacttccatatatcttttggtcatgagttgttcctggatctgtgaagcttctccatcacaagattgtagtggaggattttaattagagaaattatgatgttaattccttcctttaaatgtcacatgttacattctcataaatactaataatatttacccaaaaactttcaggattctttgagatccgggagcttgtagtcttcctccacatcctggagatacgttcttgacatgtggtgattactcagatcatagatgtatcttgtgagctgtcatcaactaaagggccacaaattgaaggtaccacatacatggcatgcatgtggcgccactaatgcatttgttgacaacacacgtgtgctaggggtgcatttgttgggggaagttgcaatgatggaatgacaattaaaatgacctcttctttaatgtgtatggtattcaaggtgtgtatgatgaataacaaattccaagggcgagttttaaatacaatcttttcaacttcccatccatcgcaacaaagtgtgcttttcggaagtggaaatctggaccattcatttgaaatcgcgaggatctgtatcaaagtataaattgattttccaaacccatttgttatttttttcttcacttcagacactcaaaataccattttgaatttcaaactagaac

SEQ ID NO: 100400 - DNA, 1026 bp, Cannabis sativa
aaaaaaaaaaaaaaaattagataccacattgatagaagaagacaaaggtgattttctagctacctattagtgacacatattctagcttaggattaactgaaaaataaaaacaaaaataagttttccttaaatgtcaccaagactcttaaccaaaatatacaagatttaattcaagaaacgcaatctcacatagattatttgagaaaattggcactctcatgtattgggtttcaattaataaaaggtcgcacgtaatgtggaaaatttaccgctacgattggtggtattaatattcatgaagattttaatcatagaagaagaaatttctcagcttattattaaacaatatgtaagtaatatagttgatgatgaatagctaatatgtaaagattatgttttaattttcaccaagtgaaaaatctctaataaaccacaaaactaacatgttctcaagaacgaatgaacaacttaaaggacaatgaaaatgcactgccgaatatataaatatgacactctttcaaaagtatacactactcctcatggagctcgaaacatagctatcgtacatactcttgtcatatctatactttactctccttcactcagaattggaacgatgagtggtttcatctcctccttcactaagtcattgtttattctatgagtcgtctagagagcccctttgatccaaaaaagaagagaaatccaagtacttagtaaaatctagattgggaaaagaatgtgtgaagaaatgagaggacttgttgtgagttaaagtaacaaacaatgcaatagtaggcatctatctaatcaaggtttaccacttagatttggtctagatttgttatggaaggctaaaccccaatttaaaattttggtggcaatactcccaaactccacttctattttgccaatttaaggttcagttgaaaatcctctgtgttatttgccgagttagatcatctacgtgtgattttcgattagatttgcaaacggaaatatagtttgagaagtattgccactaaa

SEQ ID NO: 100401 - DNA, 1641 bp, Cannabis sativa
gaaattggacagtgaagatgaatgttttgaccatttatctcttgtaagcctaatgcatctatttattatctcatgttttcttattaagtggcgtttggttgggaggaataaaaatataggaataagaatgggaatggaaatagtaataggaatggaatggaataaaatttgaaatgcataaaaaaaaattaataaaaaaatcattaaattttttctcttgttacattgaaatgatttttcctttctttttatatatggaatagtcattccatcgaaatagtggaaatagcattcaattggaatgtcattccaatacgttaaaatgcaaccaaataaaggaatggaataaaaattgtttccttttcattccattccatttcattaccttcaaccaaacgtcaccttaatgtttacacagaaaagataatgttgattatttgaagagtatgtgtagtgaatcaatcactatcggaaaacacaactattataacccaacagttgagacaagatggcataaaaaaccagaaaagagaatatggaacattaattaattaattaagttatttttcttataaaaaataaaatctaaaatataaatttctaaaaatcaaaagatcctaaaagcatgatggagttagcgattcttctcaaggatgcattaacaattttggactgtaaagatgattatgagaatcacgagatttgagagaaaatgattgtgttcacgaaataacaagctcactgtcccaacaagcgtgtcggtgattttcatgaaaaattacaccaaaactacaacattccacatcttctcatgtgtgaatctttcaaggattacttgaaagatttacaagagttcatgacaatttagaccaaagaaactgaaaaggagagaggaaaggtgaaaagggtttgattgagtataagaacttaaaaaatcaagagctgtgaataaatgaaactctgctcaatgagcaataagttgtagggctccttttatatgaaagatgaattgggttacaggaggatctagaatcgtaaacctcaataagaaacttgtcaaagaattacaaaaaggggaatattcccaaaagggtaaaatgaaagaaatgttgcacgaattgctgatgtaggcactaacattgaggttgatacttgctgctgaggtggatgcagagttggaagacaaaagctgacttggacatggtcatttctaacacctctcaaacttagcaacgattgattcaccccaagtttttctatgagaaaataaaatatcgcattcgaaagactctttgtgagacaatcaacaactttgtcacttgatgacacatatcaaatttctaaggttttgttcagaaccttatcccaaacataatgaacatcaagttcaatgtgttttgttctagcatggtatactagatttgatgtaagagcactgtctcccatattatcacaccaagcgatatgtatctcaggcaaaggaaatttcaactcttgtaagagggattgaatccatgataggcagacatcgttaagggccttgtattcaaatcggtgttggagcaagaaataaaggcttgcttctttcattgataggaaagtttacatttgatatttttaagacttgattgaacacattaa

SEQ ID NO: 100402 - DNA, 617 bp, Cannabis sativa
aatatgagaaaataaatataaatatttataaacctaataacaaattaagaaaagagagagaattaaggagataacaaataatactatttagagtgattttagactgtcacgtcactctctcattcctctcgtttatatatatatatggattttacaaaatgaatttattaattatagttttgcaaatttaattttttaaaagtatgattttaacgttctaatattttaaaaaatagactttttcattagaaaaaaaatagttgaaaaacaacaaaaatataatataattaagagcactgcaatatgcaatcggaataaattttaaataaactacaaaacaatcaaaaaaaaaaaaaaacaattgagaagcagtagaaaaacaagacttatcaattccactacaatatgaaaattaacttaagctctattggggctaaaaaatggccaacacttatgttgatttcgcttctagccaacgacaatgagtctattttataagcgataaatgatatataataacagatatatgataaagcaataataagacacaaggattttatagaggttcagcccgattagttcagtaatagcctaatcctcgttacttgtattgactt

SEQ ID NO: 100403 - DNA, 1018 bp, Cannabis sativa
aatataagaaaataaattaatatttgcaaaatatataaactttgtagagctactgaagtaattcatttctaaaccacacaaataataataaaaatgtcaatattatactaatttttagtccaatagttgctctagtaattgtgtatgtcagaataatagtattgattagtattatatatatataaaattaattttttttttaaaaaaaaaactccagtaaatactttatttatattttttttacaagttttctctacatttatatactactatttatcttttaaatattttttaatataaactttctcaataatattttatatttaaaattgatgaaaaaagtttaaggaatataatattaaatgaatataaaaattagatttattattattatttaacaaaaaacaaaatattttttttaagtatattattattattacaagggtttttaagtatattttttagtttttagagaaattattattgtcaaacaacaattatttattgtctaaccaaaaaatatactaaactaatttattaggcataatgcagcttaaaatccaaacaagagagatactttcgaaaatttagaaaataaaaacttttcttccaatcaagtttaaaagaaataaaaattgaagctaaaacacaaacctccatgattcttgagtgtggattatgaaatttatcaagagacaaacccttttccatagaagagtatgagtcatctttatcatcaagtaataaagctctgtttggatcttgatcaaatagttcttcaaagtttcgaaatgtcaaatccacatctggaatattaaaatcatccttccaaacaagttcttcacatactccaaggtcttccatattttgagtccataacttcaaagaaaaaaataacatagacatagacgaattatgagaaaaaaaatagattaaaaaattttattagatgccgaaatagataaaaagtttactaaaattaatgacaaacgcattatataaagtcatctccaatgca

SEQ ID NO: 100404 - DNA, 800 bp, Cannabis sativa
ttaatcaacatacttgtcagtagatctaagtttctggtaaaataatttccaacataccaatcatcgaacatccctaagttggtaatgataaactagtagatcaagatttttaagaatttcatgtaaatgttgaacaacttgccgaactagttgctgtttcccaagagcatgctggtgaagtctttagaagatctattagacctatcaaaccaaaggtttataaagtctatgttgtgtacttactaaaaaatgatattgcagtcgaaaatgatccaaaaatgtttttacaagctataaacaacaaagaattaaaattgtggtacaatgccatagatgatgaaataggttctataaagtgtaacaaagtctgagaaattaaaagttttcttgatgggacgaggggcattggatgtaaatgagtctttaaaactaaaagggactcattaggaaacattgagatatacaaagcgagacttaatcaagaagaaggaattgattatgcgaagatcttttttctgtatcaaagaaagattatctcagagtcattttggcattagttgctcattttgatttagagctagagcagatggatgtgaaaatttccttcttggacggtcatctagaggaggaggtatacatgaaacaaccagaaggattctcctctagagaaggtgaacatttggtatgcaagcttaagaagtcaatctatggattaaaacaagaatcctgccaatagtatctaaaattttatgatgtcatttgttcttttggatttgaagagaatgtcatggatcaatgca

SEQ ID NO: 100405 - DNA, 1698 bp, Cannabis sativa
ctcaaaacacataaattcccacattaaacctcaaaattcagaagaaagaaagaaaaaaaaacttacctttatctctaaaatcttcgttttgatcaaattaaaagttaaaagactttatctttctgcccaaattcacaatctgggcaacaacatagtctcattcaaattcctaattagattctatcaaaaccaataatcccaacaataaagctcaaaattcaaaattcaagaagaaaaaaattacctaaaatttcgacatagctcaggaacactcatcttatgaagcaaattcgacctaggctgtttaagcctaatacaaaacacagtagcaggactaaccgaatcctcctccattggatcttccggcttctcaacagcttcttcttcaacaccaccaccaccaccagtaccagtaccagtaccaccggaatcagccttatcggaacaacttttggaaagctcgatggactgagtcgctgactcgtcctcagcttccttagagaccaccgcgacttgattcataccccaaaccaataaaaaaacaccttgaaatgtatatatacactcacacacacacacaccaagagaaaaatccaaagagagagagagaatgtgattgtgagtgtgggtgtgggtgggaaagtcgtaattgaaggcgacagatatcctgttttagagagagaaagtggggtaagagagagagtgagtgggtttgggtttggattttgtgatgaagtttttagagagagaaagttagggtttgtattttagagagagaaagagagaaagccattttcccagaaagtaaactaacaaccatgtctgcttctctctctctcttcgatttcaacagtgttttttttaaaaaacgatgtcgtttttagactactgcaactgtaaatgatgtcgtttttcagaaaaacgacatgtcgtttgtatgtcccattcaaataaaaagagtatgtctgcttctttctctctctatctctcttcgatttcaacagtgtttcttttaacgatgtcgttttagaatactgcaactgtaaatgatgtcgtttttcagaaaaacaaaacgacatgtcgtttgaaaattaaatgtgtccttttctaataaaaagagtatgtctgcttctttctttctctatctctcttcgatttcaacagtgtttctttagaacgatgtcgttttgagactaatgcaacctgtaaatgatgtcgttttcggaaaaaggacatgtcgtttgaaaatgtaatgagttttgtgtccttttcaaataaaaagagtatgtctgctctttctctctttataactctattcgatttcaacagtgattcttttaaacgacgtcgttggtatcaaaaagacacctcattttgaaatgtctgctctcaatatctctctggacgattttaattagggatgctcatcaaatagctcacactatataaattgtccgcaccgtatcaaaaaatatagttttaaatcttttatgatacagttgtaatttgtatttttatcaaaacgcgcggtgcggtgcgagttacagttttgaatttaataattgcggtttaaatcgcattgcactatatattataaaattattaatttttagagtactttacgatataaatacttaaatttaattcctagttgtaaataaatacttaattttaatttttgacagtaataatatctaa

SEQ ID NO: 100406 - DNA, 1051 bp, Cannabis sativa
tatcttgatgagatcttggcctcttacacatgttctctagttgaaccgccttatcagatcgctgacctatctatttcggcaatctaactcttcctagtgagatcgaaggatgtactcttggtcatccatgcatctcgagaattcgcatctctattgagcgagtatattacaatcagcagcgcgtggttcttcaaggagttcacgtctgtgttgagcgagtacatcgcaatcagcagcgcgtaactcttcaattaggccggcttggcagacaacctctcgaagtctggctaactcgagatctcacgtggggctcaccaattcatggtcttgtctctcctgcatagtactagggatgaaacccagttgttgttcctgagggtgctcctcaaggattcttccttcaattagaggcgcctgtggagggtcctccctaggaggcagggaccgactattcaggttcaccgagatgtttgcgccatcctggccaattgtagttgctagatttatggtgcctactatggtgataggattggccacatctattgtgttcatagggatggctggaacatgaacatcatgatctgtaatctgtgggtcttgagggagacccaaggatgcagatggtgcgattggtgttcttctcgtgttaaccatggtgtttgatcagatatgatatctatgctctcaatgaaagcaccaaactgttgacctcgaaaagtgatcaatcgacaacagtcgtatgaatctgatatttgccacgtgttacacaataagaacagtaaagtaaataagacaaggatttttatagaggttcagccccctaagttagtaggtaatgacctactcctcttttggttgtattgatacctagagataatactattcagattactataggtgggatctggtatagctctctataaggatacaaaacatggatcaagtaggcagatttgaagagagagatgaatagccttagaggcgtgtgagagaggaagagagagagagagcctttgggggtatgtagcaaagagatagagagagagagaga

SEQ ID NO: 100407 - DNA, 1235 bp, Cannabis sativa
ggggtcgagtatattgaaaatatattataactttacacattctattaatacaagttaataccaaacatagtattgtaataaacaataataatacaatacaatacgacgtaccaaacgagccctatatgtattaagttaactatttgcttaaatggctacacgattgaaactcaatccccgaagtgcgagcttagacaaaagaatatattatctacttatttatatgggtagtagagattctttcacgattaattaatgatgctattaatgcctgagccattaagggagttactcttagtagaggagggcctaggttatctcacatcttctttgttgatgatttaagaggaaattacattatgtactcactttattttacttgttttaatttttacctctatttttatatccttaaagatatacccacttttatagatgatgtcctcattagaccctttaggttaatgtaaattatatgctagacttaagtagaaagtgagggtatattgggcaacccactcaaaaaataggtatattttaataaaatataaaatgagagtatttttaattaatagatacaaaaagaagtatttttcaacttatcccatgatttaatcctagttaattgggctactgttgaagaggctaaaggttattgggtgtcttgataaattttgcagttggtcaaatcaacgagtaaacaaattaaaaactagtatttttttagtaacaatactagttctggtatgaagttgggaataagttggctgttgaaatcaatagtttagagggaaacatcaaatacttgggcctccctttgtttcggtccagacagaaacatgttgattttttcaattagcgttgaataatctcacttttaaactgcatgggtggaaagctaaaaatttgttcaaagttggtaggcctactctaattaaatcagtaggcctgtctctcctaatctatgttatgtagataactcaattcttgaaaagactggccgagaggattgatggataaattagagaattctggtggggttttgagaaaaataatagtggtctataccttagagcttgggacaagttgtgcctccctaaatcttgtggaggcttgggttttctaaaaactagtgaaatgaattaagcgttcctagctaagtgtggtgtgatgccccatggcacacccacaaggggccattttataacatgagcatgccttggtgcttgatcatt

SEQ ID NO: 100408 - DNA, 1226 bp, Cannabis sativa
ttttttaaaaaaaaaaaaatacacatatttttttactgattttaaaaatactgcatttctttctaaatatttgcctattttttttttttatggtccactaaatttcaaaataaactctggtcttaagctaagacaaactaagcctacgtctaaggtccacccaatcctggcatccaaatgaagaaaaatttattttaaaatatgttgttttaaaaatatcatttatttttataataagggtcgaaaaatatttattttttctaaaactcaatacaactcagggtcggccaaacccgcccaagcctgccctagctttagcagtcttcttcaatctcaatacaatttttaatatgttattgctatgagaagacataattgcatgtattaaaactcatgcagaaccttgtagaacaactccaacactaataccatttcatttaaagaatcaaaagtgtagtgtttcattattggtcttgattgaaagagtgaaccacttcttcaatggagacaactcttggaataataaagtgagagagagatttgtcaataatgtcaatggagaatgattccatatataacattgtccattagtagaacctgcataaataatggatgttgacaagtcatataactctaaattagtagctagttgttggaattcattagatgcatatatacaacataataatttaaaattttatttattgaccaaaaccatgggagaggatctatatatattactacaaaaaaaattatttttaattataataaaatttatgtctaaaagtaaaaaattataattaattataaattataattcatatgactaaaatatctgtaattaaagatatttattacaaaaattataatttatcgtaacaaaatgtgtttttaattataataaatgaaaaaatatatttagtcacaaaaaaattatgttgttactaaaagtaattttttcttacaatataaatatatatagaaatattgtgacataaattttgtaatttcatatgttaaaattaaatacttcactttaattttaacaacatagatatctactttttaatgttatagtcataattagttttaggtaattttatatatatcttttaaagagtaatttgcagtgaaactcctccaactattaatttacttgcaaaaaaccatccaacctcatattttggtaggaaaactctcctaagtactgttccgtttacattttt

SEQ ID NO: 100409 - DNA, 1348 bp, Cannabis sativa
  modified_base (1274)..(1276): a, c, t, g, unknown or other
ctctctctctctctctctcctattctcatctctcatacaaatgatgagaatggtggtatttataggtcaaggatatcttatccaaaagacggtggctgcaacgactaagtagttaattcggttatgacttaaccgacttaactagctccttacagaaagatctccaagtcatctctagcaatgagctctctgaatatgaaacatgcttcctacttcccaaacagatgtcacaagcttacgaagaaaattttagagggacatccaagataggcccaaagccaattggaacaagctatccagaaaccccttcttggaagggacaactagtcttctagaactcttttttggaggacgactagttttccgcacgacttgacttgagacattttcatttagaggaagtataccacaaattgtacctagttcctttaaattaaaaagccacagtgatgaagaaagaatgcaaccatcatggttggtgttctatgtatcttagtatgctaatttctgagattcatcaagtccaggcagtgcctaaacttgttgactgttaagaccttagtccaaacatcaacaagattatcttctgatctaacattgtctaatccaaccaatctttcttctatctttttttttatccaatagagccttatgtcgatatgcttgctcatttcatgataagtcgagtttttacaaagatagataaatgactagctatccaagtaaatagtaacttccccttttatttattttagttcatgcaaaattcctagaagccataatgcctcgttgaacgcttctgtggtagccataaactctatttctattgtggaaagggcaaccaaaatttgtaactgggcttttcagcaattacagttctagtttttcagaacatgtaggttgtggttgatcttttagtatctctgttgtggttaatcttttggtatcatgaaataaatcatgtgtattaggttttgttccctaaatgaaatccatttcaatataatcagatttactaattaataaaagatcagaaataatattatgttgaatggttcacatgatttattttatgattatatgtttaatgtataaattatattaaatccataacatatagttatttatgattatagtgttatcaacacagtggaatataattatgattatacgttttaaagttttatatcccattatttgttagtacagtagatttagactgacatgataatcaccgataagatcttagttacacattggataagtgttatgtnnnttccagggtattggcaaagtatgctaggatcagatgtatggagtatgtatcagactggaccgatattgaact

SEQ ID NO: 100410 - DNA, 1548 bp, Cannabis sativa
atatcttctccgggaggtatcttcctgctgatactcttgatccacaaagacttagtcaaattatctcaaaactatatttctcaagtccttgtgtcacggtcgcattggtccacatattttgcgcaaaattaagggaaacactcccatatactcgattactctattaaaataaattatatagcaaacataaatatataatcataattgtattcgcaatcatatgcatgaatatctctaataaaaaataattatataataaatataaaagactataaaatacctaacatacataaattggatgaaaaaaaaaacttacagttgagaattgagatggtgaattcaatcaaagcaagacttggttttaattaaatcgtagatttcttcttctgaaaagtggaagtaattatcaatggtttcaaacttacagaaaaaaaatagaattagggaatatgagatatttaaaaaggtataagagaataggaaaaagtataattttagtaaataatctagttcaaatttaacatagtatattttaatatttttttttaaatatgtagatattttatatataaatatattattttttttttacttttttattagtaaacctaaaaaataaatgtttgaacttgacaatgccttgatgtgcaattttaaaaagtaaataaggctttttttttcatttttacactttaaaataatttttttttgtatttttacgaaattctacatagaaatctatattgcaactagcgctgcaacctaaattgtaacaaaaaaatcgtatagaaacccctattgcaataagtgctgcaaccacaattaatagaaacccaaaccgtaaatttaaaagaaaaaaagttaaaaaaaaatagtatatggggtaattccccaagtaaatattatatatgtggtttaaaaaataagaaaatagatatagagaaatttaattttaatcaaataaaaaattaaaaataaacatgagagaagtagggaaaaaataaatagaagcaaattaagtaattttatcaaataaaaaaataaaaaaaaatgagaaaatgagaaaattaaaaagaaaatagataaaactaaataaaacaattttagactgctacattatttattcatatattttctttatatagatatatagatgctcatgaactatatataactagtttggtgaaatgctaaaaagcttgacttgtgttagcctaagaaattattaatttagtaagggaaatagagagaatattaaaccaaacaagatctaattttcttttgttgttgttgtgtttaattaattactcaggatttgagaatcatatagatctacaaatcttggaaaggatcataatatcattttattagattcttcttagcttttgcagcctcatctttttcactaaattctctaatctaccatatattattaatcataaggtacgtgaatcatgatgagaaagtgctttgctcttggtaacttacccgaaaaagagagagaaaaaaaaacatgccaaattttatgttagagaacttgtatatcga

SEQ ID NO: 100411 - DNA, 1593 bp, Cannabis sativa
aggtatctctctgtctaaattattataagacaggtcaagtacttcaagccaggttgcattacatatggatgttggcagaatacctgtaacattgttatttgaaatggagaaaaatatagtgaattcaattttgcttccaatgtctgcgggaattgaggaattaaagttgttgctagagaaatctatataggtacaagttggtggtagaagtggaatcttcccacggagattgttggaatgtaggtcaatgatggagagactggtagagggagtataaggttcttgcaggctcgtcagatgattgtgggaaagattcagttgggtaagactgccattgccgagcttccaaatccaattaggcatctccccatgaagttggttgtttgaaaggtccaaattgagtaattttgattgattcttcatatcaggaaatgtagtcagttcacaagaggcaagtttcaatgtggtaagttgcggaaagggaagcaaagtagaacctttaccatttgcactaactctgactgacaagttgttgtaagaaaggtcaagtgaagtaagatttctcagtttctgaatcagatcaaattgcatggtgccgttgaatttgttagaggacagtaatagaattttaagtcttctgagctcaaagatggacttcggaaggtacccttctagattattgctgctcaaatcaagagtatccaatactgatgaactaggaattggaaactcaggaacttgacctgtaaaattgttgaaggagagctgaatcttttgcactgatggaagtacaaacaaggcagcaggaatagtcccgccaagagcattatggctcaagtccacattaaccagctttagaaggccttcccagttggatgtaatttctccatttatcatattgtgggatagatctattcgtgtcaggtttttggccatattgaaaaatgggatttgaccggtgaatttattaatagataaatccaagtacaccagttgtcgtagttcacccaatgattttggaagtgccccgctaaaattgcatccgaaaaagtctaaccaggacaagttccaaaggttaccaatcgatgttggcaatcctcctgaaaagttacttgaactgagtaccagtctcttaagagaattattttggtgaaattctggcaaagaaccttgaagtttcgaattgcttgttacatcaatattctgcagtgttggtaactgaaaaatctccttaggaaaatttccatacaatccgcataagatgagagtcaaggaagtcaaatttgagaaatttgcaaaggatgctggaaccatagtagacaaattattattatcaaggctaatcattgacagagattgaagactcccaagagattcatcaagagggccagaaagatcacagttcatcatgctcaaaactcgcaattttggcacagaagatgacaaggccttgcaccactcactcccaggtgctgatatgttcacaccatcaagatatagttcttcaagcatggaaaggttctgaaccagcatccccaagtctgggttctcaagtttcagaaaagaattgcttaaaaatgatagagtcgagat

SEQ ID NO: 100412 - DNA, 677 bp, Cannabis sativa
atgaacagaatatattcgagagactgatatttatgtaaattctttgctaattttgtatactttaaaaagtttaaatgcaagtagtgtcatcaaacattacttttagtagactctacattgccataagatcacttttagtagactctacattacattgtcataacatcacttcttatagttgactctaatgcaatgagagactttaagaaatagtgagtgactacaaataactcttttaagctaataatgctctaaggcacttcttttaccttagaaccaaccctttgactggcccctcctttgcatgaaatcatattgctaataagtctacaagattcaaatttatatataatggttgtatctatcattttttttttctttttaatcttcttatttttcttctttgctttatttaacatgtgtcatattatatataactaagagcagtttttgttttttgttttttcttttttaaaaaattgtataatatagtacacaaaatatactaacaatatgctatacaaggaatacattcacaataagaaatatactagtatttatattaaagatattattggcaaaactacctgaactacatgattggtgacacttaacttcacaaatcgatttttagtggtaaaactcttcaaactactattcgttttgttatagataga

SEQ ID NO: 100413 - DNA, 696 bp, Cannabis sativa
tattttctgggatattacaatcattatcaaattttagaataattttatataatagtaaaaacataatataaaaaaattaaaataacatttataaaacatataaattattatagttaatcgattctattaactaatgaaataatatcaaattgttaatagaaacaattctaaaacatgccatgaaataaaaaattattatagttaaactaataaagcattatgctaaccagatgaatttcctgtttcctcaattgtagactatctgaaattgagttggtcctgaatagtttggatatgatataactgaaggacaaggattggtacaactgaaggacaaggatcagtacatttctttttctataatttaagttgctctataagtgaaacccaaggaactaactaaagcaaaaatgatcgtgaaaattgcactctaaaaccataccctctttcttgtaatttctattagtccatgcttcgacaattttgagaccttaaccattgagttgtctctttcaacaactttcttaacctcatcatagattaatattttatttgctgaaaagaagatagtaaagagagaagaagtaaatgaaaagagatggtggtatgaaagaaaaattaaatggataaagtcagttcagttgaacttaaatacaaaagcaactattagcagctgtgtaacaccctaactagcat

SEQ ID NO: 100414 - DNA, 778 bp, Cannabis sativa
gaaggagaacttttggcaattctgctgactctccaattggctcgtcagcttaatgtgcaaagaatcaaagtacactcggattctaaggttgctgtgatggccctcaaccttggttgtttgcctctcgcctggggcacttaccctgtgtttgaatcctgtcgatgtttgtgtaagtgttttgacaaggttgtgttttgcttttgtcctcgggctgagaatagtgtggctgatgccttagccggttgggctagagggtctaagtctagttctcaaggtgtgttaagggacattgccccctctgtggcattgaatctgctttagcttttcttcctttcaataaaatggtctcaattaacaaaaaaaaaaaaacttcataatagctagacatacttttgataaacattatcatgaatacaatgtaatgaaaataacaaaatcatcaagtacctagaaaaagaactcaaaagctaaattatacatagaaaatgtataaaagcttctcaccgccatggggaaacattgttgtacgaatctaatatatccaacagttatagaagactttttagtaagtggcaacctaccaaaactgcatcagaaacttccaaacttctatgtgctctttctacacttaaagcaaatactgacttttcatagttcttcatatgctgtaaatcgtatagctccatgagaaacctgctggaacaacacatagatctttaattagcatacccaaacaacaaatcattgctaaaacgttcttaaccccaccttagagtcc

SEQ ID NO: 100415 - DNA, 1037 bp, Cannabis sativa
tcacttgtggcggaggaaaactgtagttacaagtgccataccaaaaaaaaaaatttaaaaacaacagcaatcaaacaagacgtaaacatatcaggtactattaaacaacattacacaacgttctccaatctctactcaaatctaagaacgaaaactgctcaaaactcttggttttgtaaacccgagtagttgtccaaaatctaactttttcccataattcttaaactaagccttcattcccttcaaagattctgttatttctttcaagccaaatcacccaaatgattgctaaaacagcagtcctccataggtacgatttacgcttactaccccccaccttactcacaatcattagagggattgatccagggagtacccattgaatctcaaaaacattcaaaagcttactccataatctttggacaaggctgcaccccaaaaacaaatgtaccacttcttcactacttttcttacaacaaacacaccatcccggggacatacagaggaatggtcgccttttttgcgtcatcggatgcacattaatttttcctaaagctaccaaccactcaaagactttaactgatagtacccttaagccttaaggtaataacattgtcaaaaaataaatgatctaatttttttgtctttcctttattatatacaaatgcaatttcatactttgaaagatagaaagactattagtaaacaacagtgccagttcaaagagcatattcacaatcgaatattttttgaacaccagttgatctacgattatgatttcaccaactatgttctaagtttaaacagttacaagttaaataataagatttcaaaggtaacatgcacaagaacagacaaattaacacatccataacaatctcagaaaattgtatctcacgtattatgatcttaaacacaaagagtataactaaagatcacaacgttaatattttttctatctataacgacttaactcataccactacaaactaagtgtgcctcaaataataccctcaccaattgatctaacgattatg

SEQ ID NO: 100416 - DNA, 938 bp, Cannabis sativa
tagatcagattattattaagttttattgtgacaaaaaatcagttcagagtcatatttgcacaattttggaaatataggatctattttatcatttaacaaaacagaatattaaattagtaacttttacaaaacacaaaatccaaaataatatttatctaataaaatattaaataatcattaatataattaatttttaatggatccaatataacacaaactcactttttatgtacaaattttaaaattttcattggaaatgaatttggaaggtccgaagacacttttattttataaaactctcattttacaattaattaatataactgtgattttaaaattaatattaattaaattaaaaaaaaaaatattattgagtattttcctaattttattttcagcactatgcagttgtttaacatttattgagcattgttatttataatacctaacattttttataggtgatgccttaaaattagttaacgatattttttaaaatttattttcttaagttatatgatacttgatacttaattacaccaataacagtatgatataacaccaagaagagtggtaggcaccaatgtagtatttctcttaatttaagagaattgctaaaatacacaactggtacctagcaccctcctcggtgtcatagtgttattgatgtaattaaatatcaagtcacatataattttaaaaaaataacttttaaaaaatattgctaaccaatcataagacactatttataagtgtcgagtacaactaatctctaataacaatactattatatgtaacttgaaaaattagagtatatatttttctgaaaaattaattacatgttatgattagcatttactactatacattgatttgattactattaattaattacaataagagagaattatacataaatgtaataataattaattaat

SEQ ID NO: 100417 - DNA, 1682 bp, Cannabis sativa
gtgggttttgtgtttattgatttcattattttaggttttttattttagcttttgttttttttttttgttttaaggcttctgttttatttatttaatttatgtgttattttattgggtttttcattttttgttttttttagttataatttctgttacatattgtttttttttccatgtttttgttttccagatgtgttattgtttttcatttcagtttttttatttgatcagttttcattttttaattatttttttatagttttaacaccttgctatatgtgtttgtatcgaatttgttgttatctagttgttttctgtccatgtatgtatcatcaatgcgtaaaaattagaattatcatggatattgatgttgaatgagcttttcatgtttgtttgtttgtttgtttatagttgttttgtagttttattatagttttgcaacttgcatatgctaatcattatatttactttctttgtaaaatgcaagattgagttagcaaatttagtcccaatgattttttacagagtgaagtgtgtatgtacgagcaatttctctgttattgctaacattaagaatactttatctatgaatttgttaacaatgttctgagacacccagtttgggcattttttttgatatccctaactttgtttttcaccccaagtagttcacagccttcttttgagggaggtttaccagcccaatcccaaagaattttgggctaaggttgctggccgttgtatacggttcagcaacgaggaattttacttgatcactagttttgattgttttagggattacaataaactgttgtttcctcgggaatcaaaccagttaattgaagtttgtttcccaggcataaaagcgattgatcataaggctatagaggatgctttcttgggcagtaggtggggacaggatgaatccctaagtttgaaacactctgtgttgtattttatccaatgtttccttcttagcaatactccggatagggaagtttctaggtttgatttagatgtcatttacagcggccgataggatgagtattgttggggtagggagtcatttgagttgactattgattcttttaaaggcaaaatagagcatggtattgaaatgaaaaataaaaaagaggagaagggaggtcagtcctacgatggttggtacagagcgttgggctgtccttgggtatccatagtatggttttatgaatgttatcctgcaatggtaaacactttttgcaaaagagttgcatccaggatttcaagaattctgaattggaccaatgaggttgggaccaaaaatcaaacttttagagacttgaaaggaaagattttttatttttcgttgaacaaggtaatttttcagtttctttactgtttttatctttattttctgccagtttattaatctttgttttttttttaattttttttgtttcatattttattttttttgtttctgtttttcagttagtgattaagaacattcgtccatctgatgaggagaggcagaagttgcaataggaaggtttatttttagatgaatttattgatgatcgtggtactactaagcaaatattcaagagtggttcatcttcaaaaaaatcagattcagaggacatagaaatgttaaaatctaagttggaattggtcatttccaatcaagaatccttggccga

SEQ ID NO: 100418 - DNA, 1692 bp, Cannabis sativa
aaatttatctacttaaagggtatgacaaaaatttagagttcatcaagtggaaatacataataccaaaatctataaagaccaccccacatagtggtaatttcattctccactagctagctcttttttcctaaatgtcccaaagacgagaagattgtgaaatagttcatagacaaaccaaaattatgacactttccaaaaatctttctcatcaaaggaatatacatctaataataagacaactccctcaaaagaagaataaaactaatcaacttccattttggaaatcgtttcgtctaaaatcatctgcagctcctttactctttgtcttgtcaaagcaatgcaatcctgaaacaaacatcagattcttgttttatcaaaccgaaaacctcactctgtttatcgaacccgatgaattattattaaggcttagagactaacctgaacagccaatgtattggcgagagctgatccccccggcttgtaaagagacacgagttgatcagaagaatccaaaaccacagtcacaagagtatccatgatcgactcttcctcagcggtaggatcagccaatatgtatttcttgtgaagtaaacaagttaatgaaaatggaatcctgcttaatttgagttttcttctctctttattcactgcatctcttccttcatcttgttcttccgagacaacactaacttttccatcatcattcatggaaactacaggaatctgcactgcaaggcaacgaaataacaaagataaagggatagtttttcacatagcataaatccaattggacttgatgtaaagaaatatatatatgtatattatttagattagaaacagaggggcctccttcatgttttttgagaaacaatttccttaaagctataatattccctatacttgaaatattagccaacagtactttcacattataaaattgcgatctaattgatgcatactatccttctggctatctttaaacctggacatgaagaaacttcatataccaaacaaaataaacacataaagattgaatgtaactcaaattctagtgtagatcatcattccaagatagctacacacaactatgaatatattaaagatcttgtaaatcatcgactaatacccttccctgaaaaataaagctataactcaagcagaactctccaactgtctttttttttattttggttttaactgagagtggcttttgatcacacttccatgggcaggcagaatgtcctatctatacagctacaagacctaaagatacttggatagcaaacttttcaacatggtcccgaaaaatagaaccttacaagctttctactacctttacatagctctaaactttgaggtcaagccaaaagacatggtacccaagtctaacttgcattacactgaaatggtttgctgcctacggaagcatggtaaaacaccaaacgtgggttagaatagaactggcatttatagaagataagtggaatatcatggaggacatatggtgcttgctttcatgaacacgggtattttgtgttttcttctttactattagattgtgtaaggctggaattttgtatcgacttactactaacaagaaaaattgggtttaaaacaatatgtaaaaataattagtttataaaaacaattgtcagttatactatttaaggaagctgaataaatctagcctta

SEQ ID NO: 100419 - DNA, 774 bp, Cannabis sativa
aaaagaaaaacacatatctatgttgaagatgggtccaaaaaatgaaaacaaaagcccacctaataaaagctgcggacaaaatcaaaagcccacattgaaattatattatatatattagtgaaaaaggtatgcatcacatttattttattcttatttttttaaaaaaaaaaaaaaatcccacaaaaattcatgcttatctacaactctcttcttttttacttactcattcacaacacaatataaaactatgtataacaccacaagctccctcccaccaatgtgtgtaaggaaattaagaaaagtggagcccatacaaacaaaagcaaattcaaattctctatataataattttttttagaaagaaaaaattctttaatcattgatgaacatgcattcaaatatttattttcactccttaaaatatatatatttccacttgtactcggtttttttttttttatatataactatttattaaaatcattattttaggcaaattaaattataagaattttacaacattaataaaatacttactataactataatgtaggaaattatacaaaataataaaaataaataatattatttttctaaataatgaaaattaaatatctattcgattgagataaaaaaaaaaatgaaattcctactacatacatagatctataaataattatgatatgcaatgcaatctatcaaaacttggtccataatatatgagagccaaatattcagtagaggaataagaataagtttgatacgccacccaac

SEQ ID NO: 100420 - DNA, 995 bp, Cannabis sativa
tgtgtaacacttttgttggtaaccggtttatgagataagctgcagctctataagcctcatcccaaaatttgagaggaagacttgagtgagctaataaggttaaaccggtttcaaccaagtgtctatgctttctttcaactaccccattttgttcatgggaatgagggcaagtaaccctatgaattatgccactggtttcaagaagattggtaaaagatctgtattcccctccccagtcagattgtatctctttaattggtaagttaagttgtagttcaatttgtgttttgaactttgtgaatgtgggaagggcctcatccttagttctaaggagataaatccatgtgtacctagtgtatgcatcaacaaaacttatgtagtatctatagccattaaaggaatctataggagcaggcccccataaatcagtgtacaacacttggaggggagcagtatacactgttgtggaatttggatagggaagtttatgatgcttaccaagacaacaagcattacaaagatcaaaaggagttttattgctatgagagatattacaattgtctagaacagtcataacagtggtcttagatggatgaccaagtctgttatgccacaaagaaaagttggaactaggtacattagaacttgaatgaaaacaatgaagattgttgttataaggatgaggattgagagactgagatgaggatgcagctgagttctgacttgactgagaggaaagattgggttgttcgaacttgtataggccattttcaacattcccaaccaacaaaatcttcatattgacctgatcttttacaaaacagtggttagggtgaaattcaaagaaaacatggttatctttggcaaatttattaacactgagaaggtttttagtaatagcaggtacatgaagaagattatttaaataaagaggatgagaactgaaaggagaattaagagtagtggaaccagtgtgttgtatttgcaaacctgag

SEQ ID NO: 100421 - DNA, 1059 bp, Cannabis sativa
  modified_base (70)..(74): a, c, t, g, unknown or other
aaaactgtttttaaaaagcaaggctaaacaagccaaattatttttaaaaacaattttctgtttttaaaannnnnaaacagttttttagttatgatgtcaaacatgcactaatactttacaaaaatcattcttgtagtggacagatactatttattttaaaaaatacatattatattgaaacctcaaattgagaaattggactttaatcattacagtatacacaaatgaccacaataataatatagaacgtacatatagtttatttttccgaaaaatttaacaaattatcgacaaatcaatggaggaaggtcaggtggaccatcatacataatcatggaaccccagaagatccgacggtcgaaaaccagaaagccaagtgaatatccagcaatagcagcgattataatacctatattaaaggacatgactgaaagcattaccaaataagccaatccaactcgaaatccatacatgaaagtctgtaaaactccagctttgactacatgactgtcgtttatgattgacttgatcaaccttgcttgggaaatccactctatcaccatacacacaaaaaacacacaactcaactttaaaatatatgattcaatgctttggctttctgtgtttttcccccaaaagaatgttactttggcttccatatattatttattactattatttctgtatcggaattgtactttctcggaagaaagattttatgtgggctttcatttttctaggtacccatatatacattatcatatatcttctattttgatctcttcaagttgaagcaaaggaaaaacttaaaagttcgtactaattagatttgtgcacctgtactacaagcagtactactgccgtacttggaggctgtatttgtatatatgggtggaagtccaatttttctgatagtaccaatcgaatagactgataatcaacaatttttctacaaggaaactgaaaccatattactgactctcaccaataggaagccattttctttgttggatgagaatgtgaaacttgatgaatatctctgttctaatacttctatgt

SEQ ID NO: 100422 - DNA, 1118 bp, Cannabis sativa
ttttatttttaagtataatacatataaaaataggagaatagaattatccatgttacactctatgaatctaaagaagaaaagctttagaaatgaaattaaaatattcctcttttaataattggataaatatgcctttgaattattaaaagaaatcacacaaatattatttataataattaaatgccaaaaaatattaataaacttactaaaagtaattataattattatttaaaatagacaattattttttttctaaaaatgaaataattctattagttaaaaggcaaaatccaacgattactattagtatgataaattaaagtaaattaaacagaaaactaatcatagacatgagaattatctaaaaagagagctaatttaactaaaaaaaatgtgctaattaaagtattattaactggcttacaataaaatataaaaatactaaactttcacacataaaaaatgtcactaataacaataccataaaatactagagatagactttcacacatgaaaaatgtcaccaataacaatatcattcttatttattgcaaacttatattttactagaaattagatgcaccaaatccaaacaattagactaatgcaagaatagcccaactgcttacatagaagaagaccttatagtaaggcccaacctccgccacatgcggatcaatcaaaaaaatattattatattattttatgttattttctgaattttcataataaagaaccattaattttcagcagtgtatattttctttgaatagttttcagcagtactatagataaaagaagaatagtttgttgtgtttgtctccgattctatgctattttctgaatttcctatattaataacgtggtttgataatttagattgaaccaaccattattattatttataaataattccaaaggaaataatcttcttggatagcttcttgtttgtttgacaaacacaatatataagtcttactttgtaactaaataaataatattactcactacaagaaatatcacttttaagttcgctactgcgctggtaaaagtaacttttaccagcacatttcgcaaactgcgctggcaaagagatcaaagttttaccagcgtacatt

SEQ ID NO: 100423 - DNA, 858 bp, Cannabis sativa
cttttctctatgtcaaggcatcttgttgataatgtttttgaggagaaattgaaaaaacttgaagaagtaattactgttgtgtgcaagtatggtattagattcgagttgaagtgtttaagtgtttaaggaaactttcttcagagttgaagtgtttaaggaaagttttggaaactggggctcatgagttatggactagtaagatcctatgttagactagtgttgattagcagagttatttatgaaactttagtatgattttgagtttatctgatgtacttaattcttgttagttatgtttaattcaagaaagaatagtttattgtttgtttatttacaaaatgtaacaatcttggtatatatgtttgatgctcttgaattagtcaatatgagttgtaatggatcgaagtccttggtgaagtcagtgatgttgtaagtacttaacggaacaaacttgatcttattgaggagtactgtactggtaattttgcttttatatatcagtaaataaatcattcatttttgtaccaaaaggaaatgatcaataatcagtttataaatgaaaaaattaagacttagatggttgttctagtcaaatttgcatgttgaggaaatcttttcaagttgagaaatgatgtctgtatgcctctgtatgggatcattgtagtgatttgatatcactctcaacaacaaaaccaagtgaacatagcagcaatagaattgatcaggaagatgaaaataccattcaatagctaaaagactgcaaaatttagaattgaaatgcattgatgtatctctctctctctctctctccctctctcattcttctaatctctaattaaaatgaatgtgactaagtct

SEQ ID NO: 100424 - DNA, 1320 bp, Cannabis sativa
atgcaaaaaattaaacggacatcgcaccccctatcggactggccatcggcccaatcggacctatcaaaccaatacccaaataaacaaacattggacccctatcggactgtgcgtcagacccatcagacttggccttttcaaataaaaagaaggaccattggacccatatcggaccccattgggccttcttcttcttccttaaaatttttcaatttcatagattggactatatgtttaacaaaatttccctaaatctaacaaaatttaggtttcacaaactaaatcaatctttaacactttctcacaaacaaaaaagaaaaaaaaagggacacaccttagacattgtgtcgagagcacggggtgtcgtcaccgtgcgtttgagattgggtccaccgccgtcaccgtggattttagattgggtccaccgccgtcaccgtaggtttaatatttgatgggtttgggatgggttcactgtgggtttgggcgagaggaagagagaggaggcggtttgggtttggaatttcaaatgtgaggggtattatggggaatatggtaatgtggtcatatatggggaattttaatacatatgaatttagggaaaaagattttgggtattttatgcatatttattcaaatttcccttattatattaaaatctaaatgcacttaagtcaatatttttttttgtgagaaagttatttttttaggcactcaccagatttatccgatgaatattttcaccatactaattgaaaaagttattattatctattatattagcccatattattaagtgatgaatagttgaccttctctggttctgcaatctccacgctcaggggcatcaaaactatataaactctcagtttaatgctacaaaaggagaattttctctttccattaatttgtagttgcatagatctaagacaatggggcgtttccagatctgtgtaattgaagaatattctctaatgttttaatcagattcgatcttaaatggtctcaacgcgattgaattcatgaagatggtgttggtacaggaaccatggcattattataatcaacacattgttttgtattcactaggtgctcgaccaaattcccctatgaaatatttgattcaatttactctctggattcaaccacatttaccattaataaaattgtgcactccaccctcaggttgactaaaacttacatctaattaatgggaaatttctcttccaatagttggtgttctggcaataagatgaactttgcacggaatgtactttcaggtctttcccttgttagacttttatttgggcttacattaaattt

SEQ ID NO: 100425 - DNA, 555 bp, Cannabis sativa
aatttgtttattacccattaatgggtaatacccattaagaagtattctatatatgtttaaaattgcacttaaagctctattgcggtgttccctaaagtgaaaagacaaaataatcttatttttattaaaagagaattttattaatcaaaacagaacaattacaatacaaaccaacatccacaagacaacaactaaccgactcacttacatattacgaataaaattaaaaacttgttggtccctcttagagagtttcttcctatccacaagcaataacctagtttttaacactactctaatcaaattatccacataagagatcataaacaatttttactcaaaaatacaagtatatattctggttccaccatatgaagtatattgttgtcgcacaagcattcacagtatcactatgaagcaagctacgagctcgttttgtattcaaccacatcaaccaatatgggtaagactctggccaaatgacagtaccaagccaagactaaataacctgcaagagttgcttaaagaaacgacactaaacgaaaaaatgagtat

SEQ ID NO: 100426 - DNA, 1653 bp, Cannabis sativa
ttcgattggtctaagcttgttttttttgcttagagttggttgtaattgcttgtgattaatgaagtttgttccttcttgatccaaaaaaaaaaaccctaaaaaaaataaacatttgaattcccttcataataaaatattattttttattttctaaaaaaaattggcttcttaatgtataagcaaatcaattttcctctattttagtgttcacattttttttagtttcgacataattttttaagtgttatcaaatactttaaatacgaactaaattttttgacaggacatgagcctaggaggtaagatcacattatgacaagaaaaagtattagaatggacacaatatgacaggatgttgcaaattgatatgataaggtacataaaatatgtatttaagcatgacaattttaataaatctagagacacaatacgtaagcacaaataaactagcctgaaagcacgacatattaacaagcctcaataatcttataataataataataatttatttatcaattgaaataattgtatatattcacaatttaaaaattataattattttttatatgattgtgtataattattgttgaaaaattacataaaagtaattaaagttttttttttaaatacatatagttttatagttagcttaggcaataaaaatataaaaatgcagagtacgaatttgagtctgtataagaaaatgagcatgtatgtttaagaaaaatgatttggtccgagtaaaatacgacatgaatatgagataatacgaaatattaggtttacaggtcgtgttgggtctactttataaaattattgatacggtatgatactacccatattttttatagtgtaatataacataatccatattttcacaactttttacaatagtggccagtctggtacaatacacgtaattattagtagtgttatcattattctaaatgtaaagttaatgatttagagagcattgttattgggcactagtgctgtttagtaccttttatgcgctatacgattggctagtggtattctctaaaagtaattttattaagttatatggaacttaatacttaattacattaatagcgatataacaccgaagaaggtgttaagtaccactggtgccttttactatcatttttcaattgatttatttcacttttataagttcaaatcacgctattatattttatatttactaaaacttcaaaatatataaatgtatagttttactagtaaacaaaaacaaaataaaaatagtacaaatattgaattatagaaaaataaatggtagttgtgaagtgtgttaagtgtccttcgacaatgaaaaatgttttctttgtaagcttggtttgatcaaggcctacacaattgacccatctgacggcccaaaatatgagatgaattttgaatattgattataatctcgcatttttttaaactatattttaaacagtacttacaccacaactaaatatcacaaaaaattcatgcgccattgtttatggttttggtgcttttcaagattttcgcgcctaatttatagctgaccgctaattatttaagataatttggttaaaattacaagatatcattaattataaaaatattataaaatttaatagctaacaattatggtatgtaatt

SEQ ID NO: 100427 - DNA, 970 bp, Cannabis sativa
atggcccatgtaacacattttgcgtccatttgacaaccgacgagctcgtgtattggtacaacaaataggataaccttcatagccttttgtcctcaaccctgatagattactacatgcagggaaatcattcatagtgcagaacagcacaaccttgaaattgaaaacttctttcttaaaagtattgtatgcattgacaccatcttcgtacaactcttttaagttgtcaactaccagtgccaaataaacatcgatatcacgtctccactgtttaggccctataattattactgatagcatcgtaaatttccctttcatcaccaaccaaggtggaaggttgtacataacaaggaacacatgctatgaactacgttgactgctaagagatctatgtggatctactaaattgacagatagaccaaggcgtagatatcttggttcagctacgaatttcagattcaaaaaaatttactttttccaagcttgtcaatcagcaggatgtcggagtttaccatctttcactcacattttcttgtgccataatatgttttctgaagtttctacactttgatagaaccgcttgagtcacggaatcaaaggcaagtaccacaagaatttctttggcataagtttttggatctccttgctcttgttgggcttgtaccgtggcaaaccacattcttgacaactgtctatgtgggcatactctttacgatacaaattataatcatttgtacatgcatgaatcttcttatacttcaaccctatcgaacttaaggttttcttcacctcatatgttgactctggaaaaaacttttccatcgacagaatctctttaaaagcatatagaaattgactaaaatacttatcgcatactccattctctgcctttatgttataaaatttcaccatggttgatagtcattgtttttcacagccactaaataaggacctatctgcatctctaaccatg

SEQ ID NO: 100428 - DNA, 694 bp, Cannabis sativa
cctctttaccttcttcttcttcaccgttgatttatttttccccattgtctcatccttacgcgacctccctcgacccgcgatagccccagtcgtaagctaaaaggccgaaagcctagcaatgcatcaaaaagggggaaagtattatgttataagttttagtcactcttaaaataatcataattaaattaatgatatccttttttattttttttctcaaaaaaatataataatgaattatagtttgtgtgtttcttaaataaattaatattttaatttgattaatcatttgcagatggaattcctgggattttacgactgttggaacggtacgaattcaaaaaaaattatgtttaattaaaaataagaagaacatattgtattttttttttttttttatctttttctatataaggatttaaaaaatctcttatatatcatactaatttatgaatataattttttagtttattaatatacttatatgtatatatatctttttagaagaattattaatataattattaggtggagtatattgagttccctttacatatgctatgatttaaaaattaatgatattattgttacaaattacaaacagattatcaaaacaaagccacaacacaagcctttattatgagagacaaaggtgaagaccacgataccattatggtggcctttagaggaaccaaac

SEQ ID NO: 100429 - DNA, 1372 bp, Cannabis sativa
  modified_base (1147)..(1157): a, c, t, g, unknown or other
  modified_base (1212)..(1218): a, c, t, g, unknown or other
  modified_base (1343)..(1346): a, c, t, g, unknown or other
acattcttgttagtgttgaaagtgtattgctctaattaagctgatcattgtgagttagcacttagcagagtgaattttctcactcaaaactcaaaacctgtgtccaatcaagaaataagacatatatatatataagtaatgatttatacacactcaaaaccgagaaaattgagagaaaatatgtatatttgttatttacaacctacaaaataaatacaatgccctttactacaaaataaatacaataaatacaaacttgttgatgaatataaggtgatttgcagccaaactccatgaattagggagtttggcacgtttaaccctctttattgaaatcatggaagcagaacttcccaaattatagaatcattttgcttcttcttttaatttttagctattaagtatcaaataaacctagacattgtacacgtggcatgatttcattaatccacatagttttatttatttaaatattatatataaaaataataaaaaattaataaaattaaaataattatttttttacttttcttttttcttttttttttttctcttcttctttccagtgttcctcatcctacaacaccatcatcataactaactaacattatcttgaccaccactatcaccaccagcacccaccgaaaccaccactgtcgaccaacaccatcgtagcaacttagttttcaaacccaaatcacaaaaaatatatatatatatataataaataaaaatcaaataaacccaaattcaagaaataaacacgcttatatatatagatctgaaaactccaaattcaggtctgaaaaacttataaattgagcaataatggtggggcttcaagaagggtttcatgggtatcgagaagaagaagaggaggacgagagagtgagatcagagtggcaggcatgtataccgtgcttagaagctcagtcaatgccagagtcaaccctaacccaacgaggttccttccaggtctctgtcaacatcataccgcacccagctcacttgaagggtcgtagctctgaagcccaggtcttcgaatctctgcttgagttgaacccaggacccctagagttaagagacgcaacgaaccagcaaaaaaatcttagactccccttctgggctttcataactaataaagcgnnnnnnnnnnnagtctcggtattcgttctgacttccgctcgcaaaggaacaagatctggatttgannnnnnngagcgcagtttactatgcgagtggacttttccctaaaacctttattgaagaaagcgctcttgccttcaactcaaaacagaacgttccttccacaacgtgaggcctgttaggttttatgccctaannnnaactccatttcaatgtaatctatttt

SEQ ID NO: 100430 - DNA, 721 bp, Cannabis sativa
cactcttaattttgtatcacactttacaatagcatatatattatacatatgtgtccacaatataatttttattccaacacagtattcctccccctagaccagcacgtgggacttcaagtccagtattaaaatttaaagcttgacgtaaatgagaaacaacatcagaactaagtttagtttcaataataaatagtacatgaggagattgctctttaacaagcaaacgaaggtgttggaatgcgcttggattacccaagcctcgtgcattctaactaataatttttatggcgagttgcggggcttaaaaccagcctccgcatctttgtcaaaaaagccagaagaatccacttcaatattggaaacaaaatggttttgttcatcttcaatagacaaaagagaagagaacaaatgtggatgtagcgccctgcatcttttgagggtctttcttaaagacattccttcattgagctttttgttgtagcaattacgtgacttattctctttatcttcattcagacagtagcagtatgcaggtttgagtcagtgaaaataacaatgggttgatcggtaggcctattcacaaaactagtttccattgggtgaacatagggtggattgggtgggaatgttgtaatgatacttggcaaggaaccaagatctaatatgtaaatactggataaatcaaaaaaaatttgtttagtggttgtggtggttgatgagg

SEQ ID NO: 100431 - DNA, 542 bp, Cannabis sativa
ggcccatgaacaagatgatttatcatctcttttttgttttctttttctttttcaacatgtaattatttatagggtaactatagttgatgtgatattacttagccacattatagcaaataatatataggaaatgagaatggaaataataatggcccatcaatcgatctgtatctgtacctaatcatgtcattttttgattttattggatgaatggattgtttggtcaacaatgatcactactctgctgtaatccacatatcaaagcataccttatcatcgttggttgcaccttctttcacaaagtaaaatgttttatttttttattgtatttccaatgggaattgtcatatctaaaaagacagcctttaagtaatcttcttcttagtctccatgttagtttgcctagcttaccaagttcacgcatatatatacactttgtcacttctcaaaagctttttcaatagagaacctttgacatgaaatcacactttgtcactttgtcactttgtcatatatatgcactatcccatccaccaattttc

SEQ ID NO: 100432 - DNA, 719 bp, Cannabis sativa
ataatcaaagcagtaaatgccctcaagaaattatctattggcaaataaaaatcaaggtgaactttcaactataataacaataatgggtacacaatattatactctcaagttttgataaatacttgtggtatacaatcaaaaatctcacactcatgactagtgtggcaatttcaccatctctctacaaaatatttctcacaattttaaggaactctctttttctctctcggttagatttctctcactaagaggtattctctctattattctctcaagagtctcacacttcactcttggaatagcttgtgatgggataaaaaaatgcaaaggattgagctctttttataggcctccttggatgtatgagtaatatacaaaaaatcaaccttgcattaaatgtatggttcaaaatttatctataccttaagtacaaaaattacaatttgaagtttcccgtggttaaaaaataaccattacccatcaattctctcaccttttcaatctatgtggaagaattggtcgtgtcttcatcatcgagaaatcatccaaagacaagtcaagcttatgttgaggatttttttgcacttggaatagcttcttttcaagtgcatcataagtccaatgatatctgactcaatgtggttcgttctatagtggtaagtagcattcttgcttaggtcaattgcactctgactgtcgcaatgaatcacatacctttc

SEQ ID NO: 100433 - DNA, 1936 bp, Cannabis sativa
taataataattattgttattatttgtggaatagttctccaaattaaaaggtctcaaaaaattattatcttttctgaaaaactgttgacttgcggaagcatgtcctggaaggctttcatgtccttccgagaagggtcctcaagaaagctagcctttctccggaaaggagtttcagatggctagttgttttctcctagaaaagagttctagatagtcgactccaactagctctttcctattcggaaagctccttcaactagtgtcttggtttgtgattccaaaagccctcagatacgctcccagaagcactcatacttatactaacgtaaagatctcgctcaaaggagagttggttaaggtggttgttgcctaattaacttaacaacctcgcttcttgcagccaccgaatttaggatattgatcttaagcctataaataccaccaacacttatcattttagacacaacgatcaggttgagtttggagacagagaaaaaaaagattgagaggtagagagagaaatgtacagagaaaagagagagattggatttggattttgtatgaagaatcttatgtagatgaacattattcttgggtaagagtgtgaaaggtaaaatactttgagagaaatcatatgactgttctaattactgaatcaataaagagaatttggtggtgttccaaaactagagtatagtcatatagatcacattgatctattggacttgaaccagtatatatcttgttgttaattttattattttactactttaatcgttttttatttttaatgctttgttcatccttattttttctctgattattgattgtgatttgttactcttgacattactaattgtttgattatttatagtttagttgatttgattctgcatctttagttgtaatttttccacaaatcagagcttggaatcgatcaagaacgcagaataaggattcttttcgctaaaattcttgaagaaactttaatgtcatcaatggtgagattcaaatcggagaaattcaatggaataggagactttgcactatgaagaaaaagtttgaaaggaattctagtgcaccagaaggtatccaaaggttcttaaaaattgctcgctattactttggtgtgtctcgaaactatatgacagagataataaggcaaaaatgtgtattcctcaagaaggtactgaaaacattacagagtatatataagaacaataaagtaccacacaaaaaatggacagctgtccaaaagggtaaaaagggaaagaacaaaatataaaatcgattatattttaacatcccccctcaaactcatggggctagaagcactgtgagtttggtccgtaaatcttggaaccgagaggcaacaagcagttttgttagacaatcagtgagcttctcattggatggagtaaaaaccaaagtaaaggacttgttggtgacacgctctcggacaaaatggtaattgagttcaacatgctttgtacgagcgtgaagaactggatttgaggcaacatgtaaagtgctcatgttgtcacaatgcatgaagggtgcagaggagagtgttataccaagctcagagagaagagattcaatccaggatactgctgaagctccattggcaagagcatgatactcggattccgtgctagaatgagaaacaattttttatttagtggaagagcaagagatcaaattcattccaaggaagatacaatatgcgctggtgctaggtcgatcatcgggacaggaggcccagtcggcatctgtataacaatgaagattaaattgtggatcaggttgtaaaagaaggccaagatgagtagtgccgttaagataacgcagttgacgttaagccacctaaagatgtgtgtcggtgtgagcatgcataaattgacacagcttggtgacagagtaatcgatgtcgggac

SEQ ID NO: 100434 - DNA, 1159 bp, Cannabis sativa
ccaagttgagtgagttccacattagtaaatgcccgaaattgaggtggttgccagagaagatgacttccctctcggctttaaagcatttcaatatcacagattgtcctttgatagagcctttccctggaggtgaaggtggtcttcctgttagtttgtgtgagcttgatatatcatgtgatgtatttttgaggatgaaatggaataggcaaacatttccacatcttaccactcttcgtattgatggaagagaagaagacatggaatcctttccggaggaagggctactgcctaccactatttcccatctcgaaatatggagattttcaaaacttagaagcctagacaaaaatggacttacacaactcacctccttgcaaacacttgaaatccatgaatgccttgagttggagacattgtcagaagaaggaattccaacctccctcacctctttatggatagatgactgtcctctggtgaacaaaaagtacgacccgaaagagagtgggaatgaggagtactggaacaagattagtcacataccaaatgtcacaattgaataatgagcttgcatttaccatatctcaggtttgtttcattaacatattgctctgccttcttttcttttcctttcccttccaattaataatgagcattttcttgaaaaataaaacaaaaaatgttaatgctgagcttcaatcttaatgagtttttctctttttctttttctgaaaggatttttatgtgttttccatgtactaatgatgaagtagaaatataaattgttagttattggaaaaatttaataaatcaatcaaattaattatcaaacttttcattttcttggttgcagaatattacttgacctgaactgaactaccctgacagaccttcatatcaattcaaccacggttttcctcggccataagtgagggttatcataaacttgggaggaggtcaatctgtggaagattttatatatagaacaatgctaaatttatcagctcattggctgtaaaaaaatgctaaattagagagagacagagttttagaaatatgtaataacagttagagatcacaaaccaataaattagtttcatcccatattggacaagaaccaactctagtcctaatcaatcagaacacaactcaacccaacttc

SEQ ID NO: 100435 - DNA, 558 bp, Cannabis sativa
caatatggtatcagagcgggagagtagtcctctccctcgattctagccctttcttctcgctttgtcctctcgccgtgccttcttctccggcgacgttatccttgatcttgtctttcaagatcgatatcgaaggaacctttcatccttctgtttcttttctcctttttttttttcgattgctttgtttcgcaatcatccttttctttcatcatgtcgacggaagatcaatcctcaagaactggagacaatgttccaaccaattcctccatgaacgatcctccagatacccgaggtcagcacaatcaaggaatcaatatacgggctcgtaatcctcttgaagaccctgccgatccttattacttgcatcatggagacaacccagggaatgttttggtttctcaacctttaactggacaagacaactacatcgcatggagtcgcgctatgcaacttgccatttctgtcaaaaataaactcggtttcctcgacggttctatctctaaacctcctctttctgatcatattttgtataacgcttggattcgtaataacaatatt

SEQ ID NO: 100436 - DNA, 1260 bp, Cannabis sativa
ggagagggttagcttttatttgggtaatgttgtagacttagaaaaaacgaaaaaaaaaaacgaagaagaagatgaatagggaagaaagagctcaaatacaataaaaaaaataaacattgtgtgtgtgtttagtgatttgctcaaaattaaaaaaaatataaaaaatacaaataataatatatatcagaggtcaacatcaactttaataactattttaaaaaaatttgttaaaattttctttagaatggggatatcacatggtgggctatattgcccagatttaaaaaaaaaaatacaaataataatataaatgaaaggtcaacatcaattttgattatcattttttttaaaagaaaaaaactgccacagagacttgacataatatatcaacatttattaatttttttaatataaaaaaataaaatattggtaacaaaatgacataaaatggtaatatatataattttacactgaacacgatataaaatatataaaagttacagtaaaaaagtaaattctgtcgtacagcagtataaaagaaataaattgaaaaaaaatagtatgtagtgtaataatcttattctaatgtcacctatgatagtttttgtaacgccctaatctatagaggcgccatgtgtgtgatttttataaactaatttaagattgatagattaatcaattgttaaaaactgtgataatattaaaaattgaccaaaataaaatattaaaaacagacattataacaacgtaaaaagcatgttccgggaatccctgtaataaaaagttttgctaaaaaaatatatacgacaaccatttaaacacaaaattaaaatacacagcagatacaaccagcccaaaacaactcctgacaacccagtacgcatgccgacgaggttaatatatacattgctggagaagactgtcaatagtcttcttcttttctggtgttggtgctggttcttgttgatcattatctgcatcctctggcttgccttggcttggccatcatagttcttaccactcctcaaggtgattgccgtacaattctcttttcgattgacttcaatagtgttaggcaagttaccttgagccctgttagtattttgagaagccaactgccccatctgagtttccaagaccttaatggaagacttaatctcgatcatgaattgcagtaacatatctgtctgagaattagaccctccactagagccttactattgttgattctattggctttgctaagactgatttctttgt

SEQ ID NO: 100437 - DNA, 708 bp, Cannabis sativa
atagtttttttagggtttaaattattggtttagaaatcaaattttttgattttctaagtatagaaaatcaaatttccctaaataaaaaccttaggaaaaagaagataaaataattttctatcttaataatatttaactaaaaattattagtaaataagatttgtttccatttaactaaaattaaaaataaaaaaattatttaaataaatatttattagtaataataataatttttacaatataataaatatcataatcaaataaatatataattaaattaatttcaattatatattatttaaatatataaaataataaattaattgaattcaaatttttttatatatatgtctaataaccattaattaaaataatataaaaaataaatatacaacaaaatttaagtgtggatttagatttaaaatatttaaataagaataataaaaattataattaaaatgtattattattattataattattattattattatttttaagcaactataataactaaaatttaattatattatatatttttttagggaaacatatatattatgtttttgaataaaaatagtcttaaaatatttcaaattcaagatttatttgacaaaaatttatgataatttttcactaattaatgaaaaaattttggaattttttttttcaccaaacatcataataaagtttcctaacgtgagcaaa

SEQ ID NO: 100438 - DNA, 1353 bp, Cannabis sativa
acaatcacagattttttttttttttttgccaattcctaatatcctgttttccggtgcaaaacaagtttactatttaaactgaaagtaccttcccagtcaaccacatcaagtttgggcttctaaaggtttggctacatagacatggtaagctccatgcattataataagaaaagtgatgaggaaaaaaaaacatttttcacatgttcttgtcattttttttaataaaatacagttacaggatctgataaacgagatttacactcgtttattagggtagtttagaacatattttagtagttttttatgttttattgttcgagtttatgcttgttttcttcttagtccaggttttgatagtcaagtacatcatatgggttgaaatgagagaaaaacatgatcaaaatatgaatatggtggatttatcatggattttgggagttgcacaaaatattaagtggaaaattcaagttttagatgctcaactcgctttatttgtgttcaaaaatcaagtgtgaagctttaagccaatttttgattatgatccgttcacttttaggaaaaactttgtgaataaaagttctatatctttcttttagctttttgaaaaaatcttgaatcgtccaattccgagcaacattgagagagttatggccaaaatactatcagtcgtcgcagcaggaaatttttttttaaaaaaaaagataaaaagatggtcttctcaagtggggctgcggcctaaccacaatttttttatctttttaagtttaaattttaaatctttttagtatctaaaagattgatattcataatcattatttgcttactttaattttatagttaaattgtttttctaattttaataatatttcctcaaatttttgtttgtcaaatagaaagtagattaataattattggtacttggtaatagtttttgtgggatgatactcgtacttatgcgctattattacttcaaacaagacgcataattgcattataaattttccctattaggatctgaacccagtgttcatgctctagtctctaagactcactcacccaacaacttgagctagtctcatgaggcatccaaccaaaggagctagcctcaagtagcttcacatttctagtcatcagctagggagagacctcacttaacttgattatgccgttaattcaagtttcataccactctgacattattagatgcattttaataatgaaatggatcaaagtctgataaacctaagacttattttatatcagaaaatgattaaatgaaatgcttagtctcttatgtacacaagttgagttgtcttagtgttttaattctattggttcaattgtaatcctagg

SEQ ID NO: 100439 - DNA, 1382 bp, Cannabis sativa
tttggttttgtttcatccaaatccgatcattccttattcattaatcattctgaaacatcaacaacacttgtgcttgtgtatgttgatgatattcttattacaggaagtgatctcactgtggtagacaaccttgttactgctcttaacacgagattctctttaagagaccttggccctataaagtactttctgggaattgaagttgtctataatgaagaaggcattcacttgtgtcaacaaaaatatgctagagatctcctaatcaaagctcagatgcttggctcgaaaccctctcccacacccatgactagtggtcttcggctgtctgctgaacaagggaaaccacttgctgatgtacaaatgtacaggtctgttgtaggggccttacaatacatcaccataaccaggcccgagctttcctttagtgtgaataaggtttgtcagtttatgcaaaaacctttatccacacattggcacgctgttaagcgtattctgaggtatatcagtggcactatgaaccatggtctccggttcactaaaccaatgtcccatgatcttgttgcttattgtgatgccgactgggcatctaatcccgatgataggaagtccacatctggatatgcaatcttttttggctcaaacttgattgcatggaagagtaaaaagcaacagactatttctcgatcaagtacagaggcagaatatcgaagtgtagccaatgttactgctgaacttacttggcttcactacctattttcaaaacttcatatacgattacctcagcccccaaccatatggtgtgacaatctcagtacaatcatgctcactcaaaatccaattctacatgctagaacaaaacacattgaattggatttgtactttgtaagggagaaggttatgcagaagctaattcagatcaagcatgttgctgcttttgaccaaattgctgatggtttcaccaaagcaatttccagccaaagattctctgtttttcgggacaaactcacaatttgtgactccacaattatgagtttgaggggaggtgttaaggactctaatgacagttagtgacagttggtgccagctcattacagttgcatcagtttgttatagtctgttcattcggttattcctttctgttgcattctgttattctgtccagctgtcctagatattttccttatgaatctttgtgtataaatggctgtactgaagtttagatcaatgagatcattctttcttctcctacctttctctgttctttctctctttctctgcctttgttcattttcattgtttgatctttcttctggtttaatggtggtatggctcgaaggtttaacattgcatccttatttacttgttatttttctttaaaaaaa

SEQ ID NO: 100440 - DNA, 641 bp, Cannabis sativa
gttgctgtgagtactagtgaacaagcccttaggtatgttcacaaagtaaatttttctggttctcacccagagatggcattgttagagtctttctgccccttgcttgtctatgctggtacagaaggctcacagatttgctcattgcacgctaccaacaattggcggcactacaagactttcgaacaatgcaactaggagttaattaacaaaggcagcttcgaaagtcttgtgaagaggagctataacctcatgcagttggttagtttttatttctcttcttatcttttcatctttcctctttttatacttttccttacatctctttttggttttacttctcgcatgcatctctcttgtcttttgctgctcaacagagaggtcttcaaagggttgaaatgcttgacacagaacttcgctagtctagacaacatcgtgaggttttagctaagcaatggtctgactcgtagtctgaaatctctagagtcaagaaggatgccgaggagcagtagaaggttgtcaagactgaccttgagaatgcccaaaaaaagatccaagagctcaaagaagcaaacaaggctaccctgaccgaagctaatagaaagcttaaggaggcaaaggccgaggctaacaaaaagcttgag

SEQ ID NO: 100441 - DNA, 751 bp, Cannabis sativa
aaaaaatacgaagatctagccacttaaacaaggattggactgatataaataaaaatccaaacactaaaataaccgaaaggcataaacaaaaaccacaagaacaaacctgtttaaaacacaagaaagaagcagagaggatcggaagtccagtttttgccatccaatccaacatcaaggaagctgtctcataagtcataatcacttaaataaagcccaaagtttacccccaaaaaaatgattggaaaattccacattctcaagaaaatcgaaaaattaagagaaaaaaaaacgtcacaagtgcaaataatcttggagttttatgtgcttaaagattaaattttattgaaattgtaacaattcaatttcaattaatatatcattatttaacacccattgcgtcttagatttagagcttagaaagttagttaattttccttaacaaaacgcacttaaattaattgatattaggctaggtaatttaataatattttatgaggtataattattctcaaaggaagttaaataaataatccagagttatcttcgcaatttaaattttaatctaatttgactccactccaacaataaatagacaattgatatgttgggtaggggagacagttaggtacacattattttatccatggttattattttttcattatgtaaatgttgcatgcaacccacttcgagaataagaaaaaaatcttcaaaacacatccaattttaaaggatttattattattattat

SEQ ID NO: 100442 - DNA, 1005 bp, Cannabis sativa
tccaacccctccaaaatagatctgggatttgttggtgttaacaaaaagacctgttgtagcactgaattcatcaagaatctctttaagcacctgaacagactgcatgttgcctttactaaacaacatgagatcatcagcaaaataaagatttataatatttaatcctctgggcatcagatggtacctataagaagagttattggctgccaacaacagccttctgtgagatattccatgattaacacaaacaacaaggggataaagggtcaccttgcctgaggcctttttctcctttaaagcttccttgaagtttaccattcgtcacaatagagtaggtagtagctctaacacaagtcatcacccaagcaatgaatatagttggcaagttgtaagctgtgaggagagtttcaagaaattctcaatttaccgtgtcacacgctttacttatgtcaactttgaaagtacatctagaggaaatagtccttctattataattcttcagaagatcttgaagaatcataacattatgagcaatcgatctccccttgatgaatgctccttgattttgatggactaagtcaggaagcacctgagcaagcctcaatcaaagcactttggagatgcatttatacacagttgagcagcatgctattagtctatagtcaacagctttagcaggaaatctatttttggcactaaggatatcattgttgcatgaaactccttcgacatatatcatgtgttaaagaattctttaattcttgtcctaatttagggcatatttgcttaaaaaaacctgctccatatacccggagattttgagtctgggatgctaaagagagcctttttgatctccttgctcgagaaaggctttaacaagcttagttgctgatcaagattaagccaagtaccaagagccatgctatcatggtttatactttttgaaggcctgctccgagttcccatgtagcctttaaaacaagcaacaaaatgatctactacttt

SEQ ID NO: 100443 - DNA, 933 bp, Cannabis sativa
ggcccaacccaataactgactgaaccacaccacgtgcgactcacgtgaacgacggtccatccctccccaaatccatcgacgacttagcggaaggcggcaccgaagcgaaccggctggagaaatctcgacgcaagagatcttcatcatcgaaatgaccattctgcccccgaccatcgtcgaaattgagagcgtaatcaaactcgtcgtagttgaatttcgcgccatgcttgttgtggttgttatggcaaaacggacggttcttgttgaaccggcgaatgaaggtcttccatttcggacctgcaacgagttccgaccactcacgtaccttcttccagctacggctccaccatggatcttcgttctcaacgggccgaatccgctgccaccaaaccgatccggctgaatcggaggatgatcgatctctattcaagcaagggatccaaaaacaacaacctctcttcgagtacaacaattccgaaacgtcgtcgttcatgagatccatctctcgcggcgaaacgacgtcgacgggtagatccggcgtcatattgttgacccaatagaggaatttgcagaaaagagaagaatcagaattatggttcttctgttctcttctcttctccgcaatcctttggtttgggaggagaatgagaaattgaattggggggttagagattggagagaaaataggaagcgtttttctttggtttttgtaacggtaacatgggttgggttgggttgggtggaagtgttagcctgaaaattgttggttgccaggtgtcagtgacgtggacctgtaatgtgctttgctttgtaaggccagctcatatctctacaatattaactaatcaaagttccaaagatactacataaaaaacacagcattaatattgtacacaatacacaggtgcaaaattattaggtgaaattacatgg

SEQ ID NO: 100444 - DNA, 757 bp, Cannabis sativa
caaaaacagagttcaaacaatctatttcacaagtatataaactctttaaattatatttcaggtatgttaaatttttttaaattttttaaattttacaaaatgtattaaataattacaacaattatatataaaaaaaaaatagattaaaattatcttagatactaaaacaaatagaaaatacattcctcattatatattgagttaggtgacatgtgaacatatttttataattgacattttcttggtgtagtagtaaaagagaatgcttttttaggatttttttttaatgtgcatttctaggaattaataaactatattttcaagtgaagctttcatgttttttttttaaaaaaaaaaaataataagaaaaattaaattatcatgttggtacatacattgacatcataaataattactctttagtctttactttatctttttgaaagaaaattactccaatttctatttttatcttttggatggagaacaaggaccacatgtattttgtttcatttcatatgtcttgttatgtttcaactttcaactaaagtaccttaccataaaaaataacaactttcaactaaagtattaaaatgatactaagagtgattggcggcaaattaactcagttacctttataatttgttttctttcttttctttttttttttaaaaaaaaaagagaacaattttttttgaaagacggaattttattaatcaacttgaaaaactatcatcccttacaattgaaagcaaat

SEQ ID NO: 100445 - DNA, 866 bp, Cannabis sativa
gtcccacatgggatatgaacccttgtttacaagggtatataaggtgcaactttggcacttgggttagagccccaaggggtatccagttttgtgtgaatgggtaaggagacacacactagacccactacatacgcgcgcatgcaccgtttgaccgagttagtgtggtgtgacactttatttttgtagaaaatttatttaataaaataattattttttaccttattttatttatttgaaaatgtgtttaatataaaactgaatacttagtcgtatcagttatgagacacgtttagcaacaattcctccacgattcagaaaacgtttttctttctaaaaatctatctgcgatatcataatttttagggtgtattcgacggttctctacagtccagtgggatttcgatcgatacagtatgactaagttattttatccagggaacgactagcaaattctgactgcttgcacatttttgggcagtgccgaaaaacgtcttagagagagcgacttagtccgtgactcaacccaaaattttcattcggtaatatcattcttttatttttgttagtagtttattcaacattagctcttttcgttcttcgctctctcgacgcttctctatacatctattccatagttttggtcatcttctcatagttatgaaatagttttgaaaaaagtaatcacaaattatattttaagttgttcaatgttccatccactacatgtatataaaatcgtttggttatttttttttttcagttttgtacatatttaataggagttttttcatatttatgagaaaaagtagtatagtttacttttttatggtataaataaataatattatggggttatgagttttttt

SEQ ID NO: 100446 - DNA, 600 bp, Cannabis sativa
atggacatggatttgaacatgagaagtgctaccccatttgttgttcatcaccatgatgatgatcataagacatcatcagaagagtgtggagcaggtgtgaagaagagaatatttagcaatagaaatagtaatgataataatattaacaataaaagagaagaagcaacaaagggtaatattaatagtgatgaaataatgtcatctccattaaatttaaggaacctctcaaagttgatccttccccctttgggagtttctacttctaatcaaaatcagattcaatccaaaggctggatcatctcccctatggattccagatacaggtaataattatttctataataaaaatatattatgtatctatttatgtgtattgcatggtgtttttccatatacttatttgtagtactatgttcactatttattacaaattaaacatttatatttttattgtatatatatgatctaaaattgaatttctgtgtgaattggtatggcagattacatatattatacaaatatataattttatgtaagtttaaaatattgttgatatattaggcataagtaagctttcggtaagaatatattattatccca

SEQ ID NO: 100447 - DNA, 714 bp, Cannabis sativa
taatgccgcaatttaccctatatataattatatatatcatcaatgatttagcatttgaacaaagatgctctaaaattaattttctttaggaatcctcattaataagatagtatataaatttacaatgatgttgatcccacatctctactttactactaatttccaactttttcaagtacatttttcataattttcaaatgagcaatgttattaggagctaggaaacaatcgatggatggaggtggtatttgtgaatgattattaaaaaagtttcatatgtggtctaataattaattacagtttaacagtacgtactgtaatggtatatatggaacggatgccttttttaaccatttctcttttcaattaaattccttttattctgttgctttccatgcatctatatatttataaactatgcatgacccctaatttaatattaaagcgtttcctaatgccatttctctaatttaatttgctaaacaatactaatggtgtacataatatatctaaggtgtatcatattactacatattactatgatatatttaagaaaaatgataaggggcacttttacgccaaaatactataagaggtgcattttaatatttcaaatcataatgtaataaataatttgagaaattgctaatatagagtcactactacaaaatagaattttggtgtcggttcgatagacttttttttttttttttt

SEQ ID NO: 100448 - DNA, 587 bp, Cannabis sativa
aatattaaaaaaaattaaaaatatatttttttttaatcttccttttcttttctttcttttcttttttttcttcttctacagaccaatacgctccctaacataactcccagccctatccgaccccctttgccccttgtgcgatgtcgaccaaccacggcgaccacccccgaccatcccgacccccttgatcttttttttttttaacaaagattacatctttagaaaaatcaaaattaaaatctcgttcatggtggtgaatcttaagctgggtttattaattttcaaccaaacttcttcaagcatgtaatttcggtctcaatctcatctggatgttcttaaacagtgaatgctttattatttttgggtatgaatctaagtaacgtgaagggatcaatgtcgacttcaacttccggtgccggagtttccgaccagtttcccgtgggtttaagagttttggttgtagatgacaatcctacttgtcttatgatcttggagaagatgattcgaacatgtcttatgaaggttttaatttttttttttttttgtagtttataattctcttatgggtttgtgtttgggtaaagtct

SEQ ID NO: 100449 - DNA, 1963 bp, Cannabis sativa
atttgtgtttcttgaacattgttactgctgtaacaacttgttttgagggtgaagattcaccacatcctttttagctttgttcactgtccctaagtccattgtaattgtctggcacgaaattgttttcgttaatattttgatagcgtgacaaaaaaaaatctagaagagaaaaagtcaagttctttctagtgcgaattacatatcagaatagcaaagaaacaggtatcagatcattccagtttctacttgacttagtttccatcactaaaacaagcattgagactagattttcataaatatgaaccatgacaaatggttaaatggataggggcgaaaaaacacagaatatccaagtaaaatttctattgacagaaatcacctttaaagaatctcagggtaatatattctttttactagtattatatacaatgaaggaaacaaaaagaatcaaattatttgataatcgtaaacgggaaaaacaatcactcctaccatgttactaatggaaataatgtctacaaagacaaaactatttagaattaacttaagctaagatgattgtcaaaacaaataaaaaaactcaagttaaaatgatacaattcaggattcgtacatttcgtatatacgcacaaaccagagctgtgaaatttgccaaactaaccctttgaaatattaaaatttgtaaaataatctacgcgaccatcacatgatggttttgcgactataataattatttatggtcccgccctgtaattcatagttctttttacgaccataaaaaattaatttactaataaaaaatttcataaaagttatttttacaaaacactcaccggagttcatgacggaatgaaaaaaaggacaggaaataacaaataataaagagagaaaactaactgtaaataaaataatatatagaataagcagaaaaagaaccttgagatatatttttattgttgttggaaatgtttattactcagagcagaaaaagcttgaaatatttttattgttgttggaaatgtttattactcagagcagtaaaagcttgaagccgccactgtactgcagagtgaagacggtcatgaaagctaaaatgagttgcacaaccaacttcctaaattcaaaggcaactgagaaccttcttccaacaaaaacaagtatacttttctccttaagtcttcccaagtcaattgttcaaagtctacctccaactacaaataagctcaggtaaccacatgttaatatatatattattttatttttgccgcagtggactggacaatggacatgataatatatcattattaatatcttgtgcaaatacaggtaatacgcatgggttgaaaagttgattgtggaatttctaatccggtgagttgaacaacattttgggttttgaatggcgctagtaattacttgctattttcctctctttggaccgtagcgtttttcttttttgcccttcacttgggttgggctatttatggccataactttagttttggctggtcccgtggggcatgtgcagttgtgcactggtgtgactttaagacataaggacagactagggaaaacaacaggtaaaaaatcaacaactttactttgtttttggtatcaaacttttagcagataattctacacaattctttagagaaatgctaaaactagacatgtgacaagcatacaaaagtgagtcacttttcttgaacgcctccactactactactatttagtctaaatctattttcagtgaagttctagataaaaaagagttagttgaagtgttttgtgtttcatattttcatggaaagggttattgaagagtacctgttggataaactcaaaaggggcctcgatgggaaggagagtagtaacagttccaaaatcccgatgcacagcaaatttcgacacatacataattctcttgaaaaacttctcagcctcagctcaacccaacctgtga

SEQ ID NO: 100450 - DNA, 710 bp, Cannabis sativa
gataaaaacactcgttatttccatcgtatggcttctacgagacgcaacaccaataaaatcctttccctacaacgctcagatggctcttgggccaatgataccccatccatcctcacgaccattgaacaatacttcactcacttgtttcaaagtcaatcccctgacaatgaggtcattgaatctgttatatctggcatctctgaacgacttaccattgatgaaattgagcttacccaggctacattcacgcctactgaaattgagactgctactttccagctagctcatgacaaagctcctggtttagatggattcagtggcaatttctttcaaaagaattggcattttttgggccctgacattactaatgctgctctcagcttcctcaatggggatgcagatttatcggctatcaatcagacactcattgtcttgatacccaaacggccaaaccctgaacagatcacggaatatcgtcccatcagcctttgctccactttttacaaaatcatctctagggtccttgtcaatcgccttcaaccaattctgagtcgcataatctctcccactcaaagtgcttttcttccggaccgtttaatatccgataacattattattggacaagaggtcatgcactctctctcacaccgtaaaactggtaggttgggatggatggccttaaagcttgatatggccaaagcctttgatcg

SEQ ID NO: 100451 - DNA, 2427 bp, Cannabis sativa
acctccacatcatcatgtttgtgctttcctttatatatagatatagatagattggattcgacacactaaagttatattctcaaaagtgtgtggataacaatacaaaaagagatttctaggcgaaatcaatattgaagcttatgggtaaaatgctcatgggagacccaataccataaacctggtaataatgatggtggtattgttcttgggattttcaatctctcaaggatttcgtctctcgcttctctaaccctagcatatcattatctttatacaggcctatgaattgttagtgatcctccacatgtcaagatatttcactttcaaattacgtaagttattccaaataatgaataaaaaataagaataaataaatatctatgaaaatatcccacaaatattgggattgttgttaaagttggttattccccttgtcttaaatttgcttgtgtggcatggcgctttgaaaatgcaaacattagagaggagtgataagggatatcacctctcggctcgaaatacataaaattagagaggagtgacaaggaatgtcacctctcggctaagaattcataaaattggagataagtgttggagagaagtattttgggatgacacttctcggtcatgatacgacatcccaacatcctattttagctcacatttaataaaaccaatcaattcctgagtaaagtgtgtcagcctgtcttgtgagccaattttaagcctgataacttcagaattgaactatgaccgtaagacacacttagatccttcttgaaaaggtctttccaatgcaagttgaaccaagtcatttcgataaaaattgcgagagttatgtctgttttatcgaagaataatatgtaattttcagctccaaatctgaccactgccacgtcaaaaaggctgttctcccagaaatcttaggatgtgttttgatttttattttacggtgaatcatattttggaggtcttgggccctcaaaacctcatttcgacgtctgaaaccctaataagagaccacaagccctgacaaccactgccatcttttggcaccgactgatggtagtggtctcttattaggcagtggttggctatgggggttatacaccccttcgtgacttttcttacttgtatttgataccttgatgttggaaataaactttggccaaatagatttcccactatttgttgtggaccactgctgttctttgggccacaaagatggcaatggtcggccaagtaatttctataccacttggtggccttcttcacttggtttgatatgttgatgatgaaaatttacttttgccaaagaatctccttcccattgggtgtggctaacatgtgccacttatttgtgcataaagatggcaatggtctactagggtgattccttggtgagaaatagtttctttcacttgtgttgtactccttggtgttgagggaacacattttgacaagtctcctttggtattttgagagaagagagcattgccatcctcttatggcagtgctccaaaaaaaaaaaagaacactgccatcttcatgtggcagtggtcgaccatgcactgttgagtggcttccttgtgcgattttgactttatctttaagtttaagtctttttatgcctaaataattcaagtacttgttgatttccttgtcaattgaggtctctagggtgaaaacgctcgcgcgggcccataaaccttagtttgggcaaacctgagtgtgtgagtcccaacaccaaatggttggttaatgttttcatgagtcttctggagatcccatggggctctcaagtcagatgtcttaaattatttggcctttgtaagtcttggtcaaagtcgcaagattgacttgagtgttttcaaggtactcttggcatgtgagcacttgtgcaagagaggcaatttaattttattttttttgtgaaaattcggtgtacctaattcgttgacgtagtactaacatgatgttttcctggtctagttcaaaagtctaggcaaaaaatgtataaaataaacgtctgatgttaaagtatgtgttgacttcagatttggccaacccacagcggaatcgtatttaatgttgatgtttgccacgtgttatataataagaatagaaaagtaaataaacacgagattttataaatgttcgacctctttagttagcgggtaatgacctgctccctttttagttgtattgatactggagataatactacttagatcactagtattttagaatatgcagtagctctcttaagattacaatatgagaatgggattagcaatatctcaagtatgagagagatagcctatgcaagagtgtgtgtgtgtgtgtgagagagagagaaagatggaaatggaatgcgtagagtaaaatgaagaagagcatgggcttatatgcataccaacttacaat

SEQ ID NO: 100452 - DNA, 973 bp, Cannabis sativa
tttttttcaatgtgcatgacatcaagattatggcgcaacaataactttgaccagtatggtagctcaaacaatatacttttcttggaccaattcaattcatcaacaccacgcttacgctttctatcaggattattaggtgctttaccagtggttatcatagggaccttttctaattgtaacaaaatatcatcaccagaaaattgtcgaggtgcctgcctatattatgtttgtccatcatagtctgtactccttcgccatgtgtgtgttctatttaagtagcaacgatgacccatataacattgtttatctcaaattcttttaaatcgtgtatcttcaagacatattggacatgccaatttacccatagtgctccatcctgacaagtaagcatatgcaggaaagtcactaattgtccacattaccatagcacgaagagtgaaatttgatttggagtactcatcaaatgcttcgactccattattccataacatttttagctcatcaacaagtggctttaagaagacatcaaagtctttactaggagactttggacctggaattaacaaggtcagcaaataattactcttatgcattgaaagccaaggtggcatgttataaggcaacaaaatgactggccacatactatgtgttgtggacatatgactaaatgggttaaaaccatctgaggctaaccccattcgtacattccttgaatctgcagcaaactcaggatatagttcatcaaaatgtttccaagcctttccatcagctgggtgacgtaacaccccaaactcttcaagacgtttttctttatgccagcgcatttctttagctgtatgtcgggaactaaagaatctcttcaagcgaggagtgataggaaagtaccgcaaccgcttgtgcggaattttgttacgaacatatctattggacttgcaaatcggacaaacagtagcggtggcatgttcgccatgaa

SEQ ID NO: 100453 - DNA, 1146 bp, Cannabis sativa
atataaactattagtattgtttttagaattaaaggtgatgtacataatagggagtggtttgggaaaatctcttagtggctcttctattgttttgaagttttggtgtaactggttttctagtttagttatgaagattaaacttattcaccaagaaaatattaattcttggtaggttattagtatttagtatgagtatatatttgatgggtgttcagcatgtttagatatatagtttatttctcgaagcttttatatttgtgttccacttatggacgatcaagaacgacatttttattgtagggaattgggtgatgacataattatttgttaatgttgttcaattagttttgatccatttaatttttgtatgtaactttgcaaatgattggaaattgctatttttgtagaaattgtgttcttgttgatctatcaattttcaataaatttacaaaaaaaaaaaagtaatacaagctaattaattattgtgtggctggatgttaatattatatattattagagaatatgttttaaaattttttgtaaaagtattttgattttaaatataatttgaataatttaatatataatgttgaaatatttataaataatttatgtataaatattagaaatattttttcatatatgaggttctgactttgtatagtactgaaattatgatcaaaaataaaatagtcagcaatatatatgtttactgaaattttcaaaaactgaattaaataaatattaggctaaagaaagtttgataaagaaaatttgacactaatttttaagtgattggagcattaatgagtattagtacacgagtcactattattaaacacttagctatacggagattacaattatatttctagaattttaacattagaatttctaactctttgcataaaaagttaatgccatgtttatacgcaaattgctgatgggccaggcggacccaaaaccattcgagttctcttttgtataaaaaatgattactaatgaggtaaaagataatataatctaggttattgggtacgtcgggtaggtagggccccaattgaagatttttaatgtctgtatttggaggtactgttgatggtggcaggtgggcataacccatcgtgggggataaggaatgtcaaa

SEQ ID NO: 100454 - DNA, 567 bp, Cannabis sativa
gatggtgatgaggtggcacgttattaggagtgcattagtttaattaacgtgatttacgttaatagattgtatattacgtatagatatgaaaatttccctattttaaaacgttcgacgattaaatagacgcccccagaaatccactttcttggcctttcctgcatgtgcttttcaaaattaaaatagaaagtaatatatatcctcaagatctaataaacgaaattaaaaaacccaaattgagtgatattaaatcagagaactccattgacaaaaaaattaatagatttaaaaactgaagaagaagatgagatgcagatttgttgttgtatacaacaaacaaaccaccatctcactcaattgatcaatacacctatcatctcataaaaaaagagcatgtagcttcgcggaaggagatctacgatcgtatcttcgacatcctaatctagattgcaacatgaaacaaataatcatgaatcgtattctatatatacgattaggaataattatttcaaaatcattttccgatattgtaaaattcatatactaaaactcataatacaattcgaa

SEQ ID NO: 100455 - DNA, 648 bp, Cannabis sativa
gatatgatatgagaccctacaacagttttgaattttgatctctcattattcctcatacaagctttcatcactgaaaaaacagggattaattttagcaaaaatatatggtacacctccctaaaaaagctctttcagtacctcagccatctattttggtgcattattgtttttaggattatttgttacttaccacgtgtaaaaaaaataatcacaaatagaaattttattttcaacactatttgatatttactaaaagtttgttagatgcttctaaataacggcaactcaagggtgcggcagcaatgacccaggccaaagtctcctatccaataagccaaaaaaaatatttaacaaaaatacttaatttacttttttaaaatacctatttatttctaagatactacatttgatgttttattgaaaaaaatgttgaattatatttttaaaatactgtatcttcaaatttttaccattataatacaaaaaaaaataataatattttttttcattaacaaaaaaaagcccaattaaactttttgacccaagttggcttgagacacgcttgcctctaaataattacaacatacacgatcataaacaaaatagactaaaaaacttttctggatttaaaacaaataaggggtgtat

SEQ ID NO: 100456 - DNA, 706 bp, Cannabis sativa
aacactattattttttattacctattaattaaggtattatttggtaatatttttgtgttttaaatttttatttataagaataaagtttaaaaattttgttagtgaaaaacaaaaataattatagaattatttttgtttttcaattttaaaaataaaaaataaaagtgtgttttaggtctgggttgaatacaggttaggagccaagttcgatgtcaaggcgggagtctactcggagtccaaattattaattaagaaaaaaaaaatgatttaaaaaaatattaagagttatttttttatatttttaaaattttgatattgaattaaaaaattgaaaaacaaaaatagttttataaaacatgattttgaaaaatatttttactcttttaattttatatacagaaaaatgattaaaaaagtgttaccaaacgacacttaaataggactacaaaatagttttaattgataaatactctcttttataataaaagtatcaaatataattttatataacttatcaaaattagaatccctaccacacagagatatcacctataaaactgtgtataaattaaagagtaataaataaaagtaaatattaaatagaaaataaaaaatggtatacaatctaatttcctcaaaaatttataagtagtaaatatatctcatttcaattagagaataatttataattttataagatggaaat

SEQ ID NO: 100457 - DNA, 634 bp, Cannabis sativa
caagaacagagaagtcaaagtccaacaatttagataaagttgtataaatatagtcagagacaacctgatcgtactatctcttcccatactcctcgtcgttccgagtaaattcctcaactcacggctctgaaaggttagccttatcctctgcctgctttgccttctcctcctcttactctttggctttttggaggttctcgacatctttcaccctggaagtcgcatccagcttcaacttcctcacattctcctgaagaagagtgttatgcttcctcaagagatcgacctccttggtacctgcgacaaaagccttcgaaaacatggcaataaactatgaggccaattttgtggagcgcagcatcagtttctcaggaggagttcctttaaccttcgacatgaactcctcgcccacaagcttttcttggagagctaggatgtcgcgagctctgaaaacggggtcaatcatgaccttcttccccttgtcttgagcaggtcagacctgctttttacaggaattagctacacgagtcttgacagcctcactcttcctcttctgcgggatgatgggagatgtggttacagttctagccttacgctttcgattgagaagtggagcttgcttcaagaaagtcat

SEQ ID NO: 100458 - DNA, 703 bp, Cannabis sativa
atataaattattatattaaactatatgggacccgatacttaattgcaccaatagcgatattgacacgtaggaaggtgctaggcaccagtggtgccctttagcatttctcatatactaaaaacaacttttgtgattaccctagaaaaaaaaaacttttgtgatattaattaataacagctgttttttattattaaaaataaaaaagttaaggtatgatacagtgacgcgctatgtgagtcaggatatctttacccaatcgcgcatagagtgtcactataggccagcattttttaaataaaataataattaaatttttttgaattttactctttagtgacactctatatttttagtgacacactttacaagagactaacaaagaatgtttagagtctaattatgtgtgtcactaaaaaccacttctaactctatagtgacccacataaaagtgcatgtcactaaatagtgtcactaaaagttgaaattgtagtagtgatggctgcgtcattggtgccgcccaaccacttgtagccttgctggcaaaaataaaagtatctagtcatgttctagtgtggactgattttagtttaaagtaatatattacttcaaaaggtgaaggttgcgaccagcctagttcagcatacaagacaaagagtgtggaaaggtattttataccctttggtgtaatctgagttggacagag

SEQ ID NO: 100459 - DNA, 1257 bp, Cannabis sativa
tgataggcttctctataaagaggaagaatattggcaacagtgctctcgaatcacctgactcaaactcagtgacaaatatactcgttactttcatcaatttgctttctcccatcacgccaagaacacaattcactcactcacgcgcattgatggctcaattgtcaccgatactctgagcattttgacaactattgaacaatactttactcaactctttaccagtcaaaaacctactgttgagcaaatggattatgttctttctggaatcttcgacaaacttaccgatacggggaagcacctttcacgtctgatgaggtctagcaagcagtcttccagctagcaggcgataaattccccggacgagatggcctcaatggaacattcttccaaaaaactggcatttgcttggaactgatgtcgttcaagcagctcttagcttcttgaacaacaatgcagatttatcgcttattaataataccatcatcgttcttattcccaaaaagagtcaccctcactccatcactgattatcgatcaattagcctctgctctacaatgtataaaagtatttcacgtaccctagtcaatcgtcttaaaccaattatatgctgcattatttcaccagcccaaagcgctttcctgcccaatcgcttaatctccgataatatcatcatcgggtaagaagtcactcactctttaactcaccccaaacattgaaaagtgggttggatagctccaaaactcgacatggccaaggcctttgatcgtgttgaatggaacttcattaggaaggttatgacttgtattttcaccgcatccttcaccttttatatcaatcagcaacttcttggatctatcatccaatcccatggcattcgtcaaggcgatccactcttctcgtatcttttcatgttatgctctgaaggcttctcaacactcataacccaaaaagttaatcaacgccttccaagaaagcacactcttggcctaaagatttcctagactacaccaatcatatctcatctatttttcgctgatgacaacattctatttagtgtcgcctctcctattgcagacacacatatcaaggtaatccttcatgattacaacctagctttgggtcaacttgtcaaatacgataaatcatcgctgtatttctccccgaaccacaatgacttgattaagaattagatcacttctttgctcaatgtgcctattcgagaatctatcgacaaatatttaggtctccctcaatctt

SEQ ID NO: 100460 - DNA, 1287 bp, Cannabis sativa
aaaatatttttttttcacataactaataataaaataaaataaattattattgttttatatctctaaaaataaatattaactaaataaaactaaacataacaaatttaaagcaagaagaaaaatattgtatgtataaagatgtttaattttattttaaattatatttttcttataaataaaattgaattatacatttgacttttgaaatatatttatattatatgtattaaaattttaaattattattttttacattgaaattgaaatattaattgtatatataaattttaaaaaaaatatatatataaatatatatatatgaattggattatattaaatcggttatttttacatgtcaatcaacatttaatctgcacaagtacatatttttaattttccaattcaatccaatccgcacaagtgcggatatccgtactttgcagattagattggatcggatcgtgtggattggattggatttgttattttataaatacccctatttgagggtaaattaggtaaactagtattggtaaaagtggccatgtgtgtttgcttttccataaactctaaattatccctcatgtggctagcttagtggtgagagagggataggaaaaaggaagaggttatgggttcgaacctaaaacctttaagctaaagctattaattaattataaaataccattacattccactaaaaaaaaaaattatccctcacattttaaaatcatttctcccaaactctcttcgtttctccttctccccttttctctagttctcacaaaactccaccaaaactaccatcgaacttcagtgatcaccacccccaatcctccctctatctagttctctttgttgagtgaccgagactcacaaccctctctctctctagttctctttgttgcgtgattgagattcacgaccctccatttctctctagttctatctggtgtgtggtcagtaacccacgaccaccacgatagagtcttaaataaaacaataaatatacatttattattggggcattgatcatcgatgaactacttaaaatcattaactagttgtccaaaatcataacataagagagtgtaaaacaaaagaggatctaattagcaaaccatctctactcaaaccttaccacctcacaataaatcttatctcttatacacacccgaatttcttattatatgctttagatacggccttaaggcttaaggaataaaatagacatgttttgggcttataatactagtggcaggggcggacccacattgtagcgagggg

SEQ ID NO: 100461 - DNA, 993 bp, Cannabis sativa
  modified_base (77)..(78): a, c, t, g, unknown or other
atgaatttttcgaagaggacatggaaaatgaaataggaaattgtgaaagtttgaacaatattgattttgattcaganntagatgaagaacttggtgacgggctgttagaacagagtgttagttatatttctgtgtaacagaattctgttatttctgttttcaggttgttattgttgttagcaattttctcattgttagttggttgtaatctttgtatataaattcccctttgggttctgtaatgagatgagattctctttcttctccaactgaatatctttcctttcttctctctttactcctcttttctttcgtttgttctttgtgttcttcgatggcttacatgtttaacatggtatcagagcagttccctccgctcactgctaacatggctactctaggcaacaataactccattcgagtggctaacaacaacagaactcaagctcctggaactcaagctgaaaacagagcacgcccgaatcaagaaccagtattcttcaaccataacattccagttcgtcttaatgatcataacttcctcctttggaagcagcaggttctagcagcaatcagaggaaatagattgattagatttatcaaagagccaccacctgaggagtacctaaacgatgatgatcgacagcagaacagagttaatcccatctatggcgattgggaggttcaagatcagttgctggtttcttggcttctatcatcgatgactgaaagcctccttacgcgtatggtcggctgtaattcaggtcgacagatttgggaatccctggaaaaacacttcacgctgcaagtttcttccaagattcttgagtttcgaacaaagctacagaatttaaagaaaggaaatctcagtcttaatgactatctgttgaagttcaaacaggccgtcgatcatcttgcatctgtaggagaagtcataagcgatcgagatcatgtggctgcaatctttaaaggccttccgagtgaatatgatac

SEQ ID NO: 100462 - DNA, 1468 bp, Cannabis sativa
gcaaatttagctaacccatgagctgcttgattagcagatcttttaacatgggagactaaaacatcagggaaaaaggacaaaagacactgaacatcgaaaataatatccgaaaagcatgacaagtcaacaagagaagaattaagtgcagtagaaactctcaaagcatcagtttcaatatgtgtgataacaagttgtaattgtgtcgcccaattgagagcatggaaaagagctttagcttccatttcatccgagcggaaagttccttgcacattttttgaaagtgcggctataaccatgccattatgatcccgaagtatggcccctatgccaagaagtttctgatatgtgtttgtggctgcatcaatatttaatttaaacccattgaatctaggtgcagaccagggagcctgctcctgaggccgattgcgaggtggcaaaaaatcagtagaatctgaggtagcagtggtgtggacagagtgttttttttgttttgctgtaatcctggtggaaacctgttgcataagcaacaattaaggaactgagccgtgcctgaccaccatggaagatcttgttacgatcagtccaaacaccccacataatgcaaaccagcagttcaaaatcttccttgttataaacagaagataaatactgaagataatccccattctgcattgttttggccatattgaaatcgatgagaaacttagaatcccgccaaatgtttctagcatgcctacaatcaaagagtgcatgcccaactgattcccaactagaagtgcatagagaacaagctgctgaatcaattattttcctcttgtaaagtgcagtagcagtagggagtatattatgatgaactttccatgcaaatattcttatttttggaggtaagttcaagctccagaagaacttccaccaagcaacattcgaatcagaagcagaacatgtgttttgctcttccaaggatgaggctaaatggaaccccgatttgacattgtatgaaccagaagtagaatgatgccagataagtcgatcattagaagcaaaaaaactcaaaggaatggttaaaatcttctccacatcaattggttgaaagaaactatttaacaactcaagattccaaactctctgatccgtaataagacttgaaaccaacaggttgggtggaccatgatagctaattggcttataattcgtatggcctggaatccaaggatccgtaccacatgttatgtgatgaccattaccaaccttgaatctcatacccttcaccaagagttctcttccccaacaaatgctttgccatgtatacgatggagagtgtccaatatttgcatccaggaaggaagtggtagaaaaatatctatgctttaacaaacggctgagtaaggaatccggcatgttaaaaattctccaagcttgtttggccaaaagtgcttggttgaaatgaataaaagatatgaatcccaca

SEQ ID NO: 100463 - DNA, 925 bp, Cannabis sativa
  modified_base (892)..(899): a, c, t, g, unknown or other
ttaggaaaaattcaaaccgcgaccgcaaagaatttcaaaccgcattttttttgcggtgcggtggtacgggcggtttgaacattttgatgaacacccctagtccttgtcatatataattctattatataaagcaccttcacttagatgtttcactacatcggtaatcttaaccgatattacttgcaccgtagaaccggcatcagtgaaccgtactagcaaccattgaataaagatttcataattttaatatattattgattgttttattcatagctaagtggtattagctctctgtacagctacaagccacaaccttatatatgagtaatgaatttttcgatatttaatataaattattcaataataaatattaacaatttaacattcacaaacatatcaaatgtttaactctttatttaataatcagaaatatctttacatacttttcatggcataaaccctaacacacgtgtgggtcatattcctcaggtttcttctagatcttctcaagcgaggcatttcggctttcaacataaatctcctcaagttggatcaactgaatatcaacttaattcaactcaaaataactcttttcagttttgtttagacaaaatgcacattggagatgaaatttggacttgaaatagttagaattgcgatacgagtgtgagacatgacttaaaaaagcttggaaagagctttaaaactcaatagttgaatcacatcaattagattaatattgagggatttatagccatttcactgaaggatgttcaacagctaacgcccaggttgacacctagcccccaaattgacattcagcgcccaaattgacgtcaccaaagttacttttcgagtaaacatgacgtgctaactgttgggttttatgccnnnnnnnnaactccatttcaatgtaatctatttt

SEQ ID NO: 100464 - DNA, 1226 bp, Cannabis sativa
  modified_base (1165)..(1173): a, c, t, g, unknown or other
atgatagaaattcaaatttctcttttttaaattggcatgaagtgggcttgtttgtaacctacaatagcatcatacatatatgctttatatatataaaaaagatattatataaatattatatatagaatcaaattaatcaagaacaaaaattccaaaaacaattggaatcttaccatattaatattgtgtttgtgttcgaataaagtaatgattgataataataagactatttagttaataaaatataataaatatgtctcactttattttatgcatgaatgaacgtacgtacccaatattatacaattttttttatataaagatatatgtatgctaaattaatcaattttaaaggtattatatgcatattctaaaataaaagaaatatataaaatgcatggttttcatgtaaagtaatttgatctcccccacccactcaaaagccatatctttatttattttattttattttatttttacttttatataaaaaaaaaatcaattttagtaatttttttatttgtattgcaaattaattaattattaaccacacacatcaaatcccatatgaatgaattgcaaaaaaaaaaaaaaaaacaaaagatacatcatggatggcaaaagtcaagctttcacattatacacgctatgttagtctttagaggcagttttttcacccccatttataaaaaggaaagctaaaagatgtaaaaatacccgctatatttgaaattgacatttagaggcgggtttttgataaaaaccgtaggtataaaattatattataccatttaggcagttagaaattaaatattaattttttttttctggttgaccctatggtgtcgattccttcataggaaccgacgacatagggtacacggtttgctgaaaaaactgaaattcgcgaccttttggcgtcagttgctacgccacttatggcgtcggttattggctaggaactgacgccataggggtccatatggcgtcggttcatataaaccttttagcgtcaccctgatcagtatcggtagcgaattttacgaaaatcgatgctgaaagggcttaaaaaccgcctctaaagggggtttttgtagtagtgattattatttttatataataactaaaaaatgtgtatgtatttttagtcacaatacttgttgtnnnnnnnnntaaattagtgacaatttgtatccaaataatatattttagttacaaataatttt

SEQ ID NO: 100465 - DNA, 1524 bp, Cannabis sativa
  modified_base (26)..(40): a, c, t, g, unknown or other
agggtccaatctgtaacttttgcaannnnnnnnnnnnnnnatagtatttaccctaaaaataattaatatatattacacttattagtagatattaagctataaccccgtaatagagttttagtaataagataaatgttatgtttgatgtgattatatcaaaaaaataaaaatgtgtaattactaaatatgtaattattagggtggtaattacacagtctaatcattacattatattttaaaatacaatgtatgcttacatatgagttggtaattacatgtgaattttaatatcttgtttgataaaatagttagtaattacatcaaaaaataatatttttagtggcttatatttaaaatagaaagtttttagtaattacactcaattttcatgtgggccatgaaaattagagagtgtaattagaatccctcatattacctcaaattataccgttacagtataatttgatggttcgttaaatatgccaaattatcaattaccttcaattacacagtgactttccaaacccaccctaggtcatgatatttggttcaacgtaattataatagtaatggtaataataatggtagtgaatatgtccattacattatctgtttcccttttaatttttgttatccattacaatataatgattattctattgagtattgtaacaaaacgaggaattaacattgcgagctcaagatgaagaaatgaattttaatgtatttgctccaattgacatttctacatgtcgtaaggttgaattagtgaataattattaagaagtaactatcaagaagaagaaaggggagcacaaagaacgattttgaactattcgatgttgtataaaaagattgatgtgtacaagttgtgaatgtgaatcaagtcttatggataacttcgacattagcaacattagagggtattttttttttttttttcatttggtacaagagccttattggatgcaagaggtggacttgatccaaattgaagttttccaaaaaaaaaatcgacgttcggctatatgatgttaacgaaagcgctattaggagacaatctaagtttttaatctttgttttattattttattgagacacatatttgttggtgtaaacctccacttacactgatacttaaaaattaatacaaggacagaaaagtaattacaagtaaaaaccctaatttggccttcagcctctagaatccctaacagaaattagttagaatggatttggctaatccacacctaactaatttctgtaactaccctaactaacaagtacagaagcaaaagcataagccctagatctatatatacctgcatcaaagcccagatcgagatgttttttgagaacattcttcaagattcaaatctgataagcttgaagaaggagaaggaaaaactcgtacatgcaaaaaaaaaaaaaaacaaaaaaaacaaacagagagttagatattgagagagagagagggattaaacacaaaatacttgtatgaaataagagattaccagtctgaaa

SEQ ID NO: 100466 - DNA, 581 bp, Cannabis sativa
ccaaattcctggtcaaatattccataactaacacgaaaagtaaaagagatatcggatcccactgtcgaaggcctttttcccctttaaaagacccttggattcttccattcatgagcaggttgtacctggtacctcttaagcagactaaaatccagttcataaatcgggaaggaaagcaaagccccttcaacagctcctcaatgaaatgtcaatcaacattgtcatacgctttgctaaggtattttcatgatccagcaagctgaaatgttcttcctagtgtagcccttcaacaaatcttgaaagatgagtaagttatgggctaacaatctgctcttaatgaaagccccttgattgtcattgaccaagcatgacaaaacctctgaatgtcctgcacataacatcttggaaatgcacttatagagagtgtgttgcaacaagcaataggtctgtagtcttttacatcattaggattttcaaccttcgggataagagaaataactatttcatttaaatttggaggtaacttaccactctggaagaaatctaaaacaacagtagaaatttcctcaccaatttctccc

SEQ ID NO: 100467 - DNA, 704 bp, Cannabis sativa
atagttcacttttctttattaaaaagatatcatcctacgtagtgggaaaaattatcctgtgatcaaggacggacctacaaaatatttatttattgtatataacttttttaatatcttcctgaaatttcaatttcttatgtatgtcgttcttaatttttttatatgttttttcaccctataactacggtctcttgtatttctaaatactgggctatgttctttgtgcataaagttttcttcttttaactctttttaatatcacattattctttgcatggcaggggttgctggcggagcagcttctggtaagactacagtttgtgatatgattatacagcagcttcatgaccagcgtgttgttcttgttaaccaggtaatctcatgatgaaatttttcatgattttttgttctcagccttctcatttttttactcgaattgaattgaaatatacttattaaattatttgcttgtaaggaatttaattatatatttttcagctgaacatggtaaaactcatagcattgagggtaataaatttctgctgtttgtttgtttcacaaattttcttatcttcacttcattttatgcttgaggtgaaattgagtaggtttttatttgtacaaatatcactgtgtaagtgtgtttcacgtcattcttataatacttttatttatgttttctcaggattctttttaccataatt

SEQ ID NO: 100468 - DNA, 1124 bp, Cannabis sativa
tttttttttttttttgataaagagctagtttcatccatttcatcagatagtagttttcaaggattatatccttagaaaaaaaaaatataaaaatccaacgacttacttgagatataattacattatttcaaatgatttcaaattattatgatcattgaaatatagtaaagaaaagaacgaagatagcctaacttgttacactatcgtgtatgaattgatttcaaatttggtataaagattaaataattttccatatgattaaaatattgcgaattatttaattttttgacttgtttgaaattaagttttgtaaaaagaaaaagaaaacaataataaaaagataatggtaaaagaatttattgtaagcctaaaataccaaagaaatttcaacacaattgaaagagcaagccaccaattttaccattagttctttaaaagcagtggcactttttttaattttagccataaaaaagaagaagatatcaaaatttattttctgatatacgtcaaaaaaaaaaatgaaacggcctcgcttattttaatattataaatataaagcaaagcaaaaataatttgtcacctggcttgtgtttttatttagaaaaaacaaaataattaggaaacaatgaagtaaaagtctatataaaacaaaaaataaataaataaaagttagtaatataataagtttctttttatggatattataataagttaagtaatttgcatggctacgagtgcaattagcattccatgcattgaccaagattcgcaaataataataaattatcttgtatatgtaaaaaaagcaataattaatcaatatagcaaataataaggtcaagcaaataataatgtatctatatatatatatatataaatatatattatacaagcctttttgcgtgtaaagcatgtcaaacatattattggttgcaccatacctaaatgctagctgctctgcaacaaaagacaatcgtcttcacttgcttagagtctttgactttgtgtggtgaagatagcaaaaattccaacaaatataaattatatttatatctaactgtttttttttttttcagtttaattaaccatataactcaattaaccacttataaataatctccttt

SEQ ID NO: 100469 - DNA, 639 bp, Cannabis sativa
aaatagatgttccaatcccttgctgctgactttgcagcaaacgcaccaaccaggagagatgtgaagaaaaggctaacttttcctaagtgtttttgtccagaacaaatgaacaaattaccattgagcgattccgaaataaaccagcggagagctgactaagaacaaaaaatccctgaggtatcaggcttccgaatttgactatcttcggcaatattaagcactcttacatgttccaatttttgcatcagtagtgtaatatttggaacttctcaatccaacaaatttcttctaaaatacaggtcccaacttctacccaaccacctggtaaaccttcatcgactatgtgatcctttatgcttccattccttaacttagatattaatcctaagtcggggaattcgctacttaatgaagaatcgcctaaccatatgtcctcccaaaaccgaatcttgtcacccctaccaactttgaattgtaccaaacccagatactcctcgtacaaactggagatatctctccacatacttttatgagagaaacgggagttaattttcgtatcccaaaaattatcggctttataataatggcttgttaccttgtgccacaaagcttttggctccaaaggatatctccacaacc

SEQ ID NO: 100470 - DNA, 1547 bp, Cannabis sativa
atagcattatcttgaataattcgaccaccaatgaacgcactttggttgtcggatatggcggaattcatgctaagtttcattcgattagcaaggcactttgaaacaaccttataaaccacattacaaagactaataggtcggaaatccgacatctttgctggctgttttatctttagaatgaggcatataagggtttcatttatagccttgcagtccgcattttgatttaaaatgtccaggcaggcagcagtaaaatcatctttaattaagtcccaattgttgtgaaaaaacatacccggtaatccatcattcccaggtgcctttaaggggtgaacttggaacaaagaagcttgaatttcttcactggtgaaaggttcccggagtgctctattatcggcttcactaatgcgacaaggaattttcccacgaagaccttctttaacatcaattcctccagttgaagaagaaaacaatttttggaaataattgattgctacctctgtgatttcattctcagcagtacaccacttcccattgtcattgaacagcccctcaattgtattttttttcctcctagccgaagctttgaagtgaaaaaattttgtatttcaatccccatgttttaaccaaagcgcccgactccgttgtctccaatacatctcccttttttcttccaccccattaagatccttttccaatttttgacgggctatccaatcactcatacttgaagatttagacaaccaatcaatttttccttttaactctttggaactagaaaaagtggcattcttttgagtaatattccactcatgtaatctctttccacaattagagattaaatgcgtaagagtatcaataggcttcccattcgctttgactctccaaacttcattaataatcttgtgacattcttcattatccgcccaagcatgttcataatgaaatcgagtcccccatttccttctaaacaaactccctttggcaccttgaaaagcttccaatagaatcggtctatgatccgagttccaccatttaaggagagtggtcttgttagttttgaagtgattcatccaatccgagttacatagcacatggtcaagcttctcaaaaattaagttggatgtcctcccattacaccaagtgaaggcagttcctttaggatcaatttctttcaaatgataatccgacattgcttgtctaaaatttttcataagataatcgggtttcggaccccctccctttttctcctttgaactagctatctcattgaaatcacctccacaaatccaagcatagttaaacatattctttaggcgaaataacaacttccaactctccacgcgccctcccggatctgggctaccgtagaatcccgtaaaacgccacataaaccccaaatcgttttcaaccaaagcatctatatgagagaccgtaaaggatttgatttgaactacgaaatcactagtccaaagaagcgccaagcccccacttttaccacgagcatctaccgtaaagcacctggtgtaacccaattgaactcgaac

SEQ ID NO: 100471 - DNA, 885 bp, Cannabis sativa
ctcaaagagatctgcttcatactaacatcccaaacaccccctcaccagttgcttacacgtgggctcccgtaaccacgagttttcaaatttaaattacttaacacactgagtaataacccgaatacatggttccaagaaaatcggataatgatttgaggtagacaactcaagattaaccagacgagctttctctaaaatatcaagccaagattgcgtaataatatgcatgccaagtcatttacaataaaaagaaagaaaatcctaacaacaaccttaacgaaagatccattaagccactagtgatcaagcataaaaaagaagtgtgaagtaagctaggtttccaactcaaataaacatatgacaacatccacctatcaatgattattagccaataatcttccactaaaaattgagacataagtaccccattattcacacgtgaaataagagaaataatcaaacgaacaactatgacgaagcacccaaaaataagagaacatgctaccacaaaaatatagggccaatagacatatctggccgagaaagagatatatattactcctactaaagcaaattgatccatacaatgaaacatcgacgcaccaattaagaacatgacctgctccaactgccataacaataaaaaattctacttatccagtagatcgctgacaaatcaccatcattatagaaataaaattaacataaaatagtataaaaattaaaacaaatgaaactaggcacaaaatgaggcaaaccaagaatgaatcagacccaaaacaatcaccaatctctaccaaactcctaaactgagaagatgatgatgaacttttgccacaaattcgtgcccaaagcctaacaccacacccgacatccccagacccc

SEQ ID NO: 100472 - DNA, 573 bp, Cannabis sativa
aagccgaaaatgtatggcgccgaaggagaccaagccgtgatcgaggaaaacaaggttaagctggctatggttctcgatgtgtacgagaaaaggctttccgagtctaaatacttaggcggcgatcggtttagcttggccgatcttcatcatttgcctacggcggagtatttgctgctcacgagcgttaaagagctgtttgatgctaggccacgtgtcactgcttggttggctgatattacttcaaggccggcttggacgaaggtcatcgagttgagaaaccaagccttgaacccacctaaataaattcttaccaaatttaatcgactctatctgaaaaaaaagagtatatactaattttggcttttgccttggtgtttttataataatttctaatttcagtgtatctttattagcacaataaagggaaaaaaaaaagtgttgagtgtattatttttattttatatggtttttttatgctttcctttaataaataaagttgttgtgatgtgattttggttgagaaatttgattttctatacttaaaaaatcttaaaattattttcctaaatttaa

SEQ ID NO: 100473 - DNA, 1207 bp, Cannabis sativa
ttttaaaacctttctcaattccaaattttaattaaaagaccttggacatctgagattcttccttggacttgagattgccagatcaaaagcatgcatttttgtctcacaaagacccttcacaatacaattacttactgaaacagaccttcttggatccaaagtgtttccacacctatggatgtcaacatctctcacagtaaagatgttggaccccctgtaaatgatgtcacttcttatcaaagcctcattggaaagcttctcttcctcaccatcacttggcttgacatagcatttgctgtcatttgagtaagtcggtatatcagtgaccctagaaaacctcacctcaagactgcttatcgaattgtctagtacctcaaaagcactgttggacaagggattatctttcattccaacaactcatctcaactctctacagatcgattattccacctccaagcattcgttgatgcagattggggtacatgtccagaaacaagacgctccatcacaggtttttgcatcttccttggccagtccctcatcttttgaaaaataaagaaacagtccactatttcaaaatcttctgcagaagttgaatatcgatcccttgctaacaccacttgtgaaaatactatggctccacaacattctatctgattttggcatctcacaaattcaattaacaatcatctattgtgacaatcaatctgcaatacacatatctgaaaatgctgtcttccacaagcgtgccaaatacgttgacatcgactgtcatattgtctgagaacaagtcaacaaaaatcgcatcaaactctcctacgttttcccttaacacaacactgtagatatcacgaccaatgctctttttcctacttagtttcacacattgttgtccaaaatgagtgctaccaatctttacacatcatcttgagggaaagtcttagatatagctttgtattgttaagttattttgtcacatgtcaagttagttataattagttattttaactaattctgctattcatattatggagtcaatgttatatacacggttgtgtatatatatataccactattgatcatcaataaaatcttacaacattgtttactaatatttttagatagatttactgtatttcatacagggccagccagccctgaaatttagtaggccatagggaaaaaaaatatttttgggccctcattt

SEQ ID NO: 100474 - DNA, 810 bp, Cannabis sativa
agcaatggtcaaaaagctattttaggatcaatcgattctggcactctaacattgaagtttaagagctcattcttggcctaaccatgggggcatgacctagtttggttcaagtgggttttgtctgaggcttcggtctccaaatctccagagatagatatagagcttctctgtttattaaaaaaaaatatttttaaagtttcaaattattttttatttttatatatttatttacgtggatcaattaaattaaattgtactatgtgtatattgtgtctatgtggataatacaatatatacacatggcagttgacagtaaaaattgatgaaaatattatattgctacgagttttggggctttttgctatcaaaatttaaatttttaaaattttactgacaaaatttaattttgagagttaattgttagtaaagtgatagtattgggcgttcattgctagcaaagtaatagtattgagagttatgccacaatttattcaacaacaaaaaatctctatacaaaaacatattaagaagttgatattattttgttcattgcaattaggtcaatattttgttagttttatattgctttgtagttatgtttttattgttttatagttatttttatgttgtttgttaagttattaaagtgttattttttagttatttttttcttttactaaaacactgtatttttgtaattttaaaactttaaatacagatataataaaaatagtgattctacaatatacccccttaaaaaggatgtattgatgcagcctctacttatttcggcacccagaaaaaaaattt

SEQ ID NO: 100475 - DNA, 1198 bp, Cannabis sativa
gagagagagagtttgaagagagagatgctatcttttttcaaaatttctatttttttttaataaatgaaataaaagattggttttactaaatcagcctcagccaaaacaatattaaaaacctgattatactcatctaattaaaactacaaaaagacaaaagtttcccatactaaaagtcataaaatggcactaaggggtattttgggaaactctaacatcccgattattcccgacattcccaatgtctaaactattgtcccgctataccaaaaaaaaatactaagatgtgattcaaaagccacacaccgcgttccaatattgccgggcacaaaatatgcaaaattgtgaaatttctatatgtgacataaaaatgcattctgaattcaaataaatcatcataaactattaattcataattaaacatagatttcataattaaaccctatttatctactaatttccaaaatttaaactaagcggtctttacacaatagctataatttatatatagaactagaaatctttatttgaattcctcttagaatttgtgccccttagtgttgaatcattgcttactcataataaagaaatacttagcataatgtggaagattgtgtagtcttccacatctagaaagagaatccaaattcagttcttgatcacactttgtgacagaaaggatcaagggtgagagaagtgaatggaaggagtcaataatttttgttgcaacccaatgtaagatttgttaatctcttatgtatttacttttactgttttaggaatccatattaggacgttatattagtttaatctaacatacttgaatagaaaataagatcttggttatacaagctttccaaaaataggcctcagagccatggtatcatttattattcatcaaatatgaattgaaaacaattttttatgtgttttatgtaagatttggatgtttcatgttagtgatatatgccttgatgaaagcaaggtgacggttattacaattatgaaagtgagaaagcgatcatggccgctatgaaagaaaagtcatgactattaactggaaccattgttaggttctctgcttgcgagttaattccatagatgacggtagtgacgtgaatactaggggtggtatttgggttgctacatgacgaacataagccagatgaaggaacgggaagacctaggatgtagaaga

SEQ ID NO: 100476 - DNA, 951 bp, Cannabis sativa
atgttgcaaagcttcagtgttaacggctgttgcagagaataaagtaccaaaataggaagtaatgacatcagtcattccttttttgaatgaacaatggtaccattattatctgtcaatgatttaatggtattgtgctgtctccttgaggatgcaaaagcatgaaaaaatttagtgttttgatctccattttgcatccaatcaactcgcgatcgctgctgccaatatgtctcttcttgggccaacaactcatctagaaccgattcttgatgtttcaaatcattcattgcagcagtgcttcgaacagatgtgttattcagatcagctactttcttttgcacttttgaaatcttctttttaaagttttcaaatttttgtttatgccaatgttggagagaatcagcacacgaagaaatgttttgtagaaaagttgcagcagcatttcctgcagaaaccggcttccaatgttgctgaatgagatctgtagcttcttcctcgtgcaaccacaatttctcaaacctgaatcttgtttgtcgacgaggttgctggtgtgttgaagagttttccagcacttggacagagatcactctatggtcagaaccatagtaatctaaatgcttagttgtgagttgttgaaagaagtcaccccaaatagcattcacaaagcaccagtccaatcgctccttaattgtgtcagccttaagtcgtcctttgatccaagtgaatggatcaccttcgaagggctgttcatataggtgacaatgatcaagaacatgtctaaagttgtccatttgtgactcattacgcaagctcccacctgatttatttttgttcgacaagatttcattgaagtcaccaacaaccatccaaggtagcgttggtgcaacatcctttaatctttctaaaagtgtccaagtaagatgccgattttgaacagctggtgcaccataaaaa

SEQ ID NO: 100477 - DNA, 646 bp, Cannabis sativa
  modified_base (507)..(541): a, c, t, g, unknown or other
ctattttggttcggatcatagagttctttgtgcggatgttacattctctcaaccacaaaattctattgttcggaagaaatctcgttttagatttgagaaaatttggcttaatgatgaagagtgcactgatattatttctaattgctggtttaaaacgaatcatagtgatccagctgctggtttgacttcatgtttacaacagtgtgctttgcatttgcaagattggcactatatgaaatttggcaaaatgaaaaggacatttctaaagctcaacaaaaggtgaatcggctgaactctgctgcaactacatcaatgaatcattctcgggaggttcaatcggctgagaaaattttagaggagttgttagccaatgaagaacaatactggcaacaaaggtcacgggttgagtggttgcaatcgggagatagaaatgtcacaacttcaaaggagggtatttctcaaattgttgctgattattttacaagatgttatagtgagatttctctnnnnnnnnnnnnnnnnnnnnnnnnnnnnnnnnnnnacacgtatattcagatttccaatgaaagttgaaatgttcatgagagacttctcgaagtttagacctcgcccaggttaaaacaagcgagatactgcgagtacgacc

SEQ ID NO: 100478 - DNA, 624 bp, Cannabis sativa
gtgtcctggttttccacaatgaaaacacccttgtgtgtcacttgaatatcttgattgttgttgctttgtttcttcctttctgtcagggctttctctgagatgcccttcctctactgaggtttaactctccatgagacttttccaatttctcattcttcatctctaaatctttggacttgagagcagatattacctcttcaagagtaatagagattcttccataattgatggcatcttcactttcctatacaactctggtcatgagtttaagattataattgcttgatttttatcacttagtgcctcatcctttcttgaattttcaagttcaatatgcatccttaggaattcatccaggttatgttctattgtattggtatgagacatcttgaatccaaatattctttctttcaagaacattttgttagtgaaggacttttgctgaaatcgctcctccaatttcttccacatcttggcaggagtatcttcattatctaccaatctaataatagagtctgttggattgaagatggccaaaccagtggcagtttcaagaagttttcccttctgtgctttagatgtgtcagcaggccattctataggatcctcaagaacctttaatag

SEQ ID NO: 100479 - DNA, 626 bp, Cannabis sativa
tccagtatttacttttaattgtcaaaattataaattacattatttagatatacataataataatttcacctaataagtaataatattttttttctgtaattgttaattatattttttaaataaagtaaaaaatacttaacataaaattagtatacgtgcctcgcacgtaacttttttactagtaataagataaatgttaaaagatatattattgttgatagaattaattattgaataacatataatttaatataataatttttaaaaaatatcgctaaacaattatagaacgtcacttttagagagtgttgaacactattaaatgtccaataacaatgctaataataataatggtcataaaattaagtgcaaaagttgaattaatccatatgactgcgcatgcaaatttccaatcactaattcactattaaatgggaataaagttccactatcgtgcacgacttgtgaacccaaatgtgcctaagaaagaaagaaagaaagaaaagtggtctattttattattctttagtcactacaaacttcttttcaaaaactcactgattcatataaacacacatttacaagttagaagagcaagaaaaaaaaaatcaaacttcctatggttt

SEQ ID NO: 100480 - DNA, 649 bp, Cannabis sativa
tatatatatatatatgatattaaaaagaatatgcacatttattatcttgtaatttgtggacaaaatttgaatcaagatactaaatcaaacattaatgaaatgaaaatataagtaacaaaataaatatgaatatattaattaattgtcatgatataaatatatatgttgcaatatgatttgtatttgtatatagctttattataagaaattgtaacttgaatccatatatgatgtcttatgtacatgtactatttcaaggtctaatattaaccattttagaaatttaattagttgtttcacatgcataacttacatatttatatatatataatattatgtgtaatatacatatattagtgatattataaatttttattttggtgatttatatttttagttatataattaatttttttatgttatttaaataaataacattattttatttaaaaaaatattaaatttaaatgctattttttttgaataaaaatcataagatttattaattaataaattcgttcaaaacaatacttcagaagaacagtcattcaactgaagcacacaacctgtgaaacaagagtctcttgccaagcaatgaatcaacttatttgcagatcgttttacaaaacacaaatcaacaaaagataaa

SEQ ID NO: 100481 - DNA, 1073 bp, Cannabis sativa
gaattacttgcacaactgctttcaagaggatttctttcccagcagccgagaagagcttttcttgccaagaattaagtagcttcctgattttatttgtgatgttttggaataatatatgcttatctttacttgaataagaaggtaaacccaaatatttctcatgtagaggttgaatttgcatttgaaaaatctgttgaaagcttgattgatcttcgctgctggtatttggagagaaggataggcttgattttgcttgattgagtagctttctagaagctttgcaataggagtccaaggagcattttagtgcggttccaaaggggctagtagccttacaaagaatgaagctgtcatccgcaaagaaaaggtgtgtaatggatggagcatttttagtgattcaatggccttaaaaattaccacgcatttcttcatgttataatacccgggataaggcttccgaacaaataatcaaaagataaggcaataacggatcaccttgtcgaatccctctccctggaacaagatttccttgaatttcgccattaaccaagaaagagtatgatacagaattaatgcaccttatgatcagattcacaatgatgggagagaaacccatatcaaacatcatctttttaaggaaaaaccattcaacacgatcaaatgccttggtcacgtcaagtttcatagttgcatatcccactcggccacgacgcctattttttaaagagtgtaaaagctcaaaagcaaccaatacattatcagttattattcggtgaggaagaaaagcactctgtgtatttgatataacacgagaaaggattggtttcagtctaagagcaattgtctttgaaatcggtttgtaaagtactatgcagagactcattggtctatattgtgacatcatagtctgctttttgatttttggaatgagtgttatcaatgttttgttgagcaaagttggatcagctccatggttcagtgcattgagaacttagttggtgaccgtttcccaaacaatgtgccaatattgacaataaaacattacaaaaaaaccatcaattcctaggctacta

SEQ ID NO: 100482 - DNA, 1111 bp, Cannabis sativa
agttgatgactatttattcgtgggccatcgccgcaggcttcaaagaccttgatcttttgaaaaaacaaaacatcactctttaagaaggcttgaagaaaattaaattggaggcagccaccaaagacaaagagatcgaggatctaggcaaagctaagaaccaggcagaagagaaggtcaagaaattggaggagcaaatcttcaaccttacttgcgacctcaaaaatgagcgagaggagaaggaaaaaacttatgactaggctgtcactgactacatctacactaaccttgaccaaactgccagattttgattttgctattttcggtccagaagtggtcgagatggccaatgctttccgcactatgtctcctaccgagactcaaggtctaggcgagaatctttttcttgaggaacctaagactgcgattggtgttgaatttgtagatgggactaagaaggtcacgaagaatcttaatgcctctgctccttaacttagtttctttatttgagctattttttagcggtacatgggtacttgctccttgtacttggtttttaagatagttgtacttcacacttttaatatttgcttgtttgaacaatatatccttcgaggataacttttgaaattttttaagtattttcatgctcaatttatgctttttatgtgtttatttcttttggttttatttaatagtctagtaaattctagctaaatgttagatttattagttaggtttatttggttaactaataattaatagttagataattaataatcaaaataaaaaacccaagaaaatcatacatctctctctctctctctctctatctgtatatatatcgaagttaggttatttatgcaactaaaacattggagttggattaacatgttaataggacattgtcagtgaaagaaaactcaatttcatcactaaattctggctggtgtattaggagatttgagttttgactaatggaaatgatgatctttatataattcattgtatgtgctgtgttgtgttgcatcatttattttggtttctaagttatttcttttttcccgttgtgcttacggtttggtttcactcaggctatttatttcgtatttag

SEQ ID NO: 100483 - DNA, 749 bp, Cannabis sativa
tcatatcatatgtgattaaatgtgattattccttactgctaatagtatattcaattaaagtggaatatatagtactgtgtggtgggatttattgatggttattaaataaaattaattaattttaaaatcattaaataattaaattttaatttataaattgttatgcttaatttagttaatttattaaaaaatatatcaaaaaatatctctttttatactattcatacaaaaatatttatgttaaaattaatttttttattattttttttttgttgaaaaacttttttttagttagtgaaataacgtgactcgtatataatataaaaataacagatttttctaattagataagaaaaattaaatataatttttttaaattttactaattcataactaatactcattaaaagtgcacattaaaatatatgtataagtcacaagaaacaataattaagccccaacttcattaagatgaccaaatgaaagaaaatgatatttatacaaacataaatatatataaatataaatatactttctttttgatttgggtcgtaaacaaatatattattaaagtgcctaaaaatatcaacccttggcttagattgaacttcatcagtttgtattgtagggacaagcttcgaagtcgacttgtttaagaacttaaataattaaataataaacagttttctaataataataataatataatgaactatataattcagagaaaaacaacagccacatactat

SEQ ID NO: 100484 - DNA, 1726 bp, Cannabis sativa
ttatatgatatttgatataatactctaatttttttaatgttcaaataattatagcaaatttaaagacatattttttttttaaaaaaaaaaaaaagaagctcgctttttaaaccgaccgttgctcacgcataccatcaccaccgaaccttctttcctccaccacgaacctcctcatctacccaaaactcaaccacacatcccccaaacctcacctacccaaatatttctctcttcctcctcctcagcttctctcaaccaccatcgccaccgtcgccacctaaccctcgcacaaccagaagctcattaaatgacgccaccacaccacgaaccgagatcgagacaaaccaccacgaactgcctctaccatactcattgggaggatctgctgaagactggtttaaaaaaatgaaactagactccgtgagttgttggaacaagttagagacgaacttctggaaatagtttgttgaatctaggaaaattaacctccaagtcagtgccctaactaatatcatataattgcacacggaaaccttgaaaatgttcactaagaaattcaaaggtaaggcttcaaaaatgaaaaaggtagacaatgggcaacaatttgccctactacaaactgacattcagacaggcaccctgttttggaacgagcttcaacatgagggtgcgagtagtttaaaagatttcaaaaaacaaacccaaaagtacattaactttgaagaagttcaaatcactgtttttttaggataaccaggtaggaggcccaaactatgctcatgggacacagtattcggaaggaagtcaccaggcagtaacccagccatcgggaggggtaccccctcctagcgtgcaatttcaagctccaatggcatattcgctaagtcccactatggcgacaacctacttgagtatgatattcccacaactagtagtgctgctcctgacacatttgtccaataatcagctccagtagcatctccagccgctagtgcagcttccacgcagttagtggtggctattcgtattcgtgttgtgtaaagaccatctataacaagtacatgctcgacccgaacatgacccatttaataatcgtgtcaaaaaataaaacccaaacacaacccgtttgtaagcatattttgtttaacatgtcaactaataacatgttatgaagtattcgacacgtttataactcatttatgacatgttaaagtactaaaataactttaaataggtcattaacaaataggtcattaacgggtggtcattaacgggtcaatttattaacgggtcaattttgtggtcaattttgtgttagcccaattttgtgttagccgtatcaacccgaacacgatcattttattaaacgggttaaacaagtctcatatagtttaatataataacttttagaaagtatcgttagccaatcgtaaggtgacatgcctaaaaggtgttagacaccactggtgcccaataacaataatcgttgtagaattatcccaaaaccaaacacaaaaacgacaccgtttaactcccaacaattgtataaaactaacaattcgtaaatttaaaagaaataaataaataaataaataaaaatgttaaatctaacgttaaatattgaatcatttgccttttcttcaactaaaataaaaggtaaataccacttgaatcttgtattttggaaaagttattaattagcatttctgttttattaaataatatt

SEQ ID NO: 100485 - DNA, 858 bp, Cannabis sativa
tcctagtcacaatttcgaggattcataaaaaaaggattaatccctaaatccacttctgcatcattataaaattggcattcatatctagataaacatatagagctcagaacgagctttccaacgatatgtgaccctcccaaaatagagtccgaatcgaaaagttacgaatattcaaataacacgttcgaatctgcccaaaaataatgtgcgggccgcggcactccccacacgggggccgcgacacctgagttgaaaacccaagatttccacatgggcagactgcggtgcccaatgagtggggccgcaacgcaagaaaccccaaattttcagctcgaacccaaggccaaaacacacctaaaacatcccaaacatacatataactcaaaatcatattccagagattattggataacatgacagggcgttaaaacacataatttcaaacttaattctcatctaaacatgtatcctaaactcagatttaatactaatcaaaataagctcaacacttgggtaaaaatcaacatatcctcacacaaagctgttgcacattaaggtcataaaacaatttcaaaactcggcatgcttttctaaccaacacaacacaactttagcaaccaagaatcccaatttcacaatctaaaacatacacaaagcaatatctattaactataaacacaaccatgactacaacatcaaaatcaactcaattctcacaagcatgcaactcaagaacacaattcatggcttcacatatatttccacttcacaattacaacaactaaattcaagataaaagtggtagaaacactacctcaagttcttccataatccaagcaccaacaattcaaaaatctc

SEQ ID NO: 100486 - DNA, 577 bp, Cannabis sativa
acatgaattttatgggtcatcttcatcttcaccttcaacctccacaaacttcactctccccaaactcaatcccagtccctaatgtcttcaggccaagaccccttcttcaatctgggttcgaccccaaacccattcttctccccagttttctctctttggccctcactgtaaccttaagctccccattctctgctttggcaatcccttctcttaattctccctcttttccatctcctactaccccattttctcaatccaagactttgaaggttggaatcgaaaatgggtatgtcctcaattagcttatacatgtttttttggtataaaattagaaatctattgatttatattcccctttttatgggttttttttttaattggcagaaaaatcagaccttgcccatctataaatcctggctgtatatcttcaaatccgaaatcatcatcatttgcattcccatggaggattccagagaatttttcagacaatgccattcaggtttgtaatagatatgccttaatgccatttatctttacctgatctttaaactatattattttgttaaaagcagaaatt

SEQ ID NO: 100487 - DNA, 948 bp, Cannabis sativa
tatatacaactgacatttgcaaaaacacggtttttcaatatcattggtcaagttatgttgaaagtggactctttattttttaagagaaatgctaaaatttactcatgtttatctttgcgatgtgtaataatgttattggtataattcaataacgtgccatctcatcatcatactaggtattttggccgaaaattactaaaaggtactactaatgcctaataacccttttggtgtcatgccactattggtgtaattatataccgagtctcatataattaaaaaaaatagcttttaaaaaatatcgctaactaatcgttggacatcacttaagaaaagtattaatgcccaataacaatgcttttttgtgccctatggcaatgctcttgtttaatgaagttggaaagaattgatgcattaacatttaacactcatggtcttggttgtcacacttggcagttcacactacatatgtcttctcactttaattactaaagaagaagaagcttcaattgacggctaccaaagtcaacctagtctagaattttgcaactttttatctttcagaataattttgagattatctccaaggtttcgatgcatgattgttgtgtatttattactatctaataaaacaacctcatttttttgttaacctataattatcacttcaaagagaaaaagagaacacgcatacgtgtcaaacaaaaaagaaccattttataattcaaaatcattggctactggagtgttcatcaaaccgctcagaccgtccgtaccacgaaaaaaatgtggttcaaaattctttacggtgcggtcacggtttgaatttttcctaaaccgcacgatgcggtgcagttttaaattgttaatatgcagttcaaatcgcaccgcaccgcacattataaaaataccaatttttatatttatttagatccaatatatgaatgt

SEQ ID NO: 100488 - DNA, 755 bp, Cannabis sativa
atcattttattaaaatactttttgggaacaatactttttaatatgacaaaataaattacaatttttatttatcattgttactttgagatggcttacaatattattacttgtaattctaaattatagaacatatgtgttgtaataatgcgtcatgatttagagaaataaaaaaaaatactaaaatacaccaatgatatttagtaccatctaaaatgttatattattattattgtaattaagtatcaaatctcacacaatttaatataataacttttataaaatatctttaactattcgtaaagcgtcaccttatagtagtattcaccactattattgtagcaaacaagattctaataagtggcttgtggacctaactgctctagctacgtaaaaatttcggtcataagcttctttaaatcactctttacatatattattatttatgtgtataaagtttaagaattagtttattttgtattgagtacttaatttaaagtaataaaagccactaaggctagtttagtagtgagggagggatgggaaaaaggaagaggtcatgagttcgaacctagaatcttgaagctattaagctattaattgattgtaaaataccattatgctacaaaataaaaataattaaagtaataatataataagaacttaaaatatttaattattattattttttttttgaacaaagttgtttgaattatatgctatcccctatatgtagttcatgtctattgacatggttt

SEQ ID NO: 100489 - DNA, 1062 bp, Cannabis sativa
aaaaaaaaaaaaaacattaatttcaaatctaaaataaaaagtcaatctaaaaccaaacaagtttcatcaaaattcatgtccataaccaaatcgaaccataatgtccaaagtaaaaactgaaaagtttgaaaataaaatatgaatagaaatctaaagtctatagtcgagaatactactctatatccataaccataatatccaaactaaaaaattactaatttaatgtccatacaacaaacaatatataaaataaaaattatataatggcttgacttctcaaagttgaaacttttcatcaagctcaaatgagaaagagaagggtgtgactgtgtggtggatgaagagaaagagaagggttgagaaggagtgtgtgcgtgcggctgggaagaaggagaagaaaagaaagaggtatagggttttttaatttttaatgtattattatattatatgtaataaaaataaaaaataaaaatatgaccgagtttgcgggcggcgggtccaacccaaaactcggtgaccattaaaccaacccgaaaatttgcccgaatagaatgaattttttttaatgttcgggttgaccgggttgggtccagatgcgttggctgggtccggatcaaacccggtcaaaatgttcaatcttaactgctacatccacaataaattaaaagatgatatactgttatagattttggttcttaaacaatttaatttaacaaataatataataaatcactagctaattacctcactatattaatcgacaccttaatgttaaaaacaataatcttgaaaattctatacatatatatcttccaaacaaaattatataaatatatgcacatatctaaacatccttccaccttgcaaaaaaaaaaaatccttctatatatgatcacatttaaacatttaaagatgttatataatttatacctttaactaatatggtatgttttaattattatttttttttttttttgataaaattatggtatttgctagctaataatcaaataaaaatccatgcattaaacttcctttctcaaaaaaaatccactaaacatt

SEQ ID NO: 100490 - DNA, 1825 bp, Cannabis sativa
gatgcatcctgaaaaatctccagggcgtgatggtatgactctggctatttatcacttattggtccgttgtgagtaaggatgttattttattggttaggaatttttttgcctcttgtgtgatgccaaatgggttgaattatacaaacttggtctttattctgaaaaaagaagaatccgactgttatgggggatctttgtcctattgctctttgtaatgttctttgtaaggtcatcatgaaatttttgactaatcgtcttaagggattcctttccaaggttatctaatgcgtaaagtgattttattcttgttagattaatttcagacaacatttaatctcgtttaaggtccttcattacttaaaacggaagaaacaagaccgagatgggtatacgactttgaagcttgatatgagcaaagcctatgatcgtatcaaatgggagttttttcaagtaattttgaccaagtgggtttttatcggcattgggtgaagttgattatgggatgtgtttcaactgttcgttggccatggtggtcaaagtattggtcctattatccctacacatggtattcaataaggagatcatttctctctgcaactttttatattgtgtgctgaagatttttttgggcttatcaggaagtatgaaacaaataagtggcttcatgggtgtaagatggcttggggagctcctgttgtttctcatatgttgtttgtgggtgacagttatctttattattgagccaatggaagagaagcgaccaagattatgaagctcctgacaaagtttgaacaagctttgggacaacatgtgaatatcgctaaatcttctatatttttttagcactaatacctcggagataaaccgttctcaagtttaggaaattttagagatgcaggttgcaggtgaacaaagtttgtatttggatcttcctaatactacgagtatgaataagaatgttactttgggtttcctcaaagataaaatgcacaagcaagtggaaagttgggacagaatgtggctctctaagtcgagaaaggaagtccttttgaaatctatcgctaaatttctccctagttatgctatgagtgtatttctgcttccgcctaagctttattttgaaatggaaaaaatcatgtgtaagtattggtggcgggcaagaagtaatggccaaggtattcattggttgtcgtggaagaagctggcggttcataacgataatggcaagatggggttttagaagttacatgattttattctagctatgttagggaggcaagggtggctgcttttaactcattttggttcacttattggtcgtatatttcaagcgcagtattatcctcgttgatctttttgtttgtggagttggggtcaaatcctagttatgtttggagaagtatttttgcttctcaagagttatttaaagatggttccaggcggcgtgttgttgatggttcttctattaacattctggggcggccgtggcttctttgtgaggatcagtccgagattacttctttgcatcctagtttggagggggtgaaggttaatcagattatggtgggaggggcccagatgtgggatgatgaaattcttgatgatttgttcaatgcttttaaccaacagttaattaagagtattgtgttgaatgataatcttgggtcggatcattgatattggtttaaagagacttcaagggtttattcgtgaagagtgcttacaagctttttgtaatatctaggttaaaatagtatttaatttttttgggatattaatggtgtgaggataattatctcatttatttgtattgttagtgagtaga

SEQ ID NO: 100491 - DNA, 1047 bp, Cannabis sativa
  modified_base (931)..(961): a, c, t, g, unknown or other
  modified_base (1010)..(1022): a, c, t, g, unknown or other
gaaaccaaccagttaaataaactacatacactatttattggacaatatactttatacaacaactgaacataattaaaataaaaaatcagttaccataactaaaataataacactacaacaaacgaaacttatttttttttaataaagatgcatacaaaacaggtttttttttaaaaaaaaaaacaaaaacaaacaaatgatatgttgttatttattcaggaatggaaacaatatgtgtagtgttattcaatgtggaggatattagacagatggaaataactaccaggactacacaatgactggactgctaataccaacaaattgttctttgaaaaaattagttgaattggtaaaaaaatgagatcaactgtgacacaccaattgaaatacactaccagctaaccccaagttcatcaccaatgaagataataagtgacacctgacaattgttttacattgaacttagaaagaagcagcttggagtgagtgactctccactttgcatcacaacaattcaacaacatgcaatgcaactaaatccactacaattcgctgacattggagcagtaacacaaaacacagatgttcaaatactggttttacaaattataaaccaaccatcgtatcaagatatagaatatgaagatgaagcttcagaaacaaataaccactatcaatgtcaaacatatttcaagtagctgacaatgttgctcattttataattgagaaaacataagaacacaagaagaaaagggatgaagaagagaaagagacaataacagatcatagggtttttaaaattgaagaagggcaaatttacaaagataaaaagatgttaaaatctgcactatgcttttatgctatattgcacaactttcaattcaaaacaaaaagataggaactaagggagtatctgttgggttttatgccnnnnnnnnnnnnnnnnnnnnnnnnnnnnnnnttacttattaataaagatcagaagtaacatttaatgttgcatggttcannnnnnnnnnnnnatgattatatatacataatgtatga

SEQ ID NO: 100492 - DNA, 853 bp, Cannabis sativa
aagtccttgtacagacgtctgtactgatcaggattttctagcttcaatttggactgatggagccttaaccggacaggttttataataaattcaatcttgaaatattttcttttgtttggctattcacaatccccaacagaaaactggtaatattctgcatgtttatttttgtaggcttcatggttttttactgcatgttagatgagagaaaggcccaccagaaactatataagcttacttggtacaactcattctcattccacacttcacattctctctcttcaaaaaaggaaacaaaggaaaagctcttcacttctccttgaggccgacgcacccaagccctccaaagcctgggaatctcactttgttttgatgatccaagctttccaccgtcttccttaaaggttttcactagtgggtaagctttcaaatcccatcatttacttattttcttagattttgtcattattgtgttcaagattttccatgctttaaacattctttgattctcacgttagattgtagtctctttggtattttgatccgcataatagttttagaatgcataatgtgtgatttcttgacaagaaatattcaaatttggccttcgttgtgatttttgactctttgagtcacgaagaacacgttcgagctttaaaaaacactcattttgatccaaaacttaccctggccagccctaagagtctagtttaagacctggctggccctagggttttttcatgggggctagccggttctaggattacaccttaggaagttggtcggttcatgcctgggtcttgtgatcctggccggttattgcatggatcatgggaccctggtcggccctctc

SEQ ID NO: 100493 - DNA, 819 bp, Cannabis sativa
ataaataaatatatccaaccaatgattgatgggtatatttgagaaagtgatctccccagatactaggatgaaaattggccgatcgacgaatagtatcggaaccagtactcccatttttctgggatgatgaattagcatgaatgttcgatgaaaccaaagcagccattttgaaatcacgatttggtgatatatatgtatataaacgatcactatataattatataaattacgagatggagttagctttaattgatggaaaactcgtttcatgtgctcagctatttatagtgtattttgatttgaaaatttcaaattaatcaacagtacttaataagagttagtcaagagtaagaagctttatcatttacttttcttctgttctaattgtaatagttcatccatgtgcatatatttatgactgtacgtacgtatattgcaatgtagcagccaatatagaattatgcttaattttcttttcttattttttgaacaattttttttctatgctttgaaattgtatgattatagaattgtattttcaagctaatccttttttcaagctaatctgaaaaattaacaaattgaaaactcctctttaattacttcatcaaataataaaaaataataaaaaaaaaaacttgttatagaatattatgtataatagggataattgcggtaaaagtccccaaaaattaagggttgatggagattattcccaaacctcaaaaattggcggtaatagtccccaaggtcacattttctgtgagtccgttggtccctaagataactgtccgtttattaatttttaaaatgccacgt

SEQ ID NO: 100494 - DNA, 1668 bp, Cannabis sativa
  modified_base (646)..(648): a, c, t, g, unknown or other
  modified_base (1609)..(1637): a, c, t, g, unknown or other
caacaatagcaacatagaagtcaaccgggtgctcagcgcccaagttgacaaccctactagggttttggtttctaggcccgtcttagtataaatgagtcaaactttgtactgggacatgaattaaacctgtcacgaacatatttattacaataaaattggaatcaaagcactttaagttttaagaacccagaggaccagttgcactaggcacccagtgcctatattgacatatatattatcaaccaggggcacttccaactacaatactgaagaactatcctgagcattttctttgtcttcatccaaaatgagaaaataagtacttttgagggagaaacgaatcgacttagaggccaaaacagggacccaacgcctaggttgacactttgtcaacctaagtcacttctgtcagcagtttagatgaagtcttccgagaacattctccatttttgtcaaagattaagatttgagtgcttttgagaaacaaacggagcctcctagggccaaaactggtacccagtgcctaggttaacactgttaagatttatgccatagaaagcctgtaaaaatatttctgattacaaataagagttgaacattttaatatatatatatatgaatcttaaattattaatatttaatattnnntaatttatatataaatatcgtagattttcttattcatacatgaggttgtgacttatattgtacggagaattaagataacttagccatgaataaaattgtcaccaacatactaaagtttaggaatctttaatcaacgtttgctagtgcggttcactgatgcctgttatttcttaattagggctttcgaagcgagcttctttccagtatttaggggactcgcatatctaattttctttcattctttgatgtggggactaattgcttaaaatttctctttttacccagatgtgtgacgcgcttcagtaagtccatgcacacaaatcttatgctttcgacaaagtgatctttatcattttactttgaagaacaggggatgggatgccttggtagcaagaagagtacccaaaaggcgaatgaggttctaaaacctcccatagtctcattggtggaagtgattggttgtcttatgcccattcaaaactatgtccataaagccaccaactgggaagcaaacgaactatattagtccttgaagtgtttgtacatcatctttctaagatcgcaaagagtagtagcataattcttcgcgggggaggaagggtccttcatcgtctagatagggacgaggagacccccaatcacatttatggaaattttagggcctgaagctagacccacataatgcctggagccactctgcccctctagaactattttgtcaattttttagtttttgtggggcttgcccctttcttagttgattcttcaggcctaccatttgatggtcagactatttattttttactcactcaagggatgggatattccaacccatgcagaaattttatacttttatgaactcgtttcactttccaaaaacggggatgaagcttgagatggattttactctcttcaagctcattcaaaaaataagggtctagttgttggaaattattttacnnnnnnnnnnnnnnnnnnnnnnnnnnnnnttattaacatcctaaataagaactttctaaa

SEQ ID NO: 100495 - DNA, 560 bp, Cannabis sativa
gtcctgagaccatctcgtggtggtcgactggcactggtcaatgtcgtgaagggaggaggaggatccgaacttaagtccgatttatgagcatcaaccacgaaagggacccgttggtttcgtggctacctgaagcacgattgatcgaccccactgagccttgggtcgatgacaatgattgtgtggggaagaccatggtggtcttgggttgttggtctccatctctggagacatcgggtcttacgacccgctttgcttaaaaaatagagcctgactctgtatcatctccaccaccgtcgctcatagcacctgtgacctcctcctccgtccctcctggtcaacgaccacccagtcaccatgccaccaccatcacagcctcaatggccggtaccaccctaaaccatatatatatatgtatacgtatatatattatcattatattttatttacttaataatttgattatttaatttaaaaaataaaataagataaaaatatgagatatttttggtatgtgcattatcattttaattttaatcagttaaaataatttttttttaaaa

SEQ ID NO: 100496 - DNA, 1390 bp, Cannabis sativa
taaacaatagtctctaatcactattagtagaaataaatgaatatttattctcacacaaattgtataacaaataaaatttaaaatatatgtatattttttaccgggtattacagcaccataattccatatttattaacaatgtgacccagaaaagacacttgtgattaccaaaactcgcacttttttaacttagcataaagcttatgctcccttagtcactacaaaatcaagtgtttctcatgctctacttctgactgagaatatacaagaatatcatcgataaatactataacacaaatattgagaaaatcctaaaatacatgattcatgagatccatgaaagctccaagagagttggttagtcaaagggacataacaaagaattcacggtggccatatctggtgcgaaatgtagttttcgggatgtcttcctctcagattctcaactgataatagcccgagcatagatcaatcttaaaaaagtttttttccttgaagcttattaagcaagtcatcgattcaaggcatggtatacttgttcttgattgtcaactttttcaattccaagtaatctatacacatacgaagtgttccatctttcttcttcactaaaagtattgaagctccccagggtgatacactaggctgggtaaacccaaggtcaagcatctcctaaagttgtaacttcaactccttaagttctagtggagagatctggaagggtgccttagaaactggctccactcttggtgccaaattaataacaaaatctatttctcgatgtggtgataaaccatgtaattcttcaaaaatacatcagggaactctttcactactttgatgtcttcaggctcagatgttttgggtcagctagtgtctattaaaactgctagaaatcctatgcatccatctttcaataggtctttaactttcaatactcagaagattgggattcgggaaccttgcactgatcccacaaagataaattgttctttaccctcaggctgaaaggttaccgttttcctttttaaaatcaatattggtcgcatatttagataagaaatccatcccaagaattatatctgatgtgaaaattaatatacgcaagtatacgcagtcacacaagtaataaagtggtaaataagatcgtctccacaagaattgcaaacaaaataatgatgtaaaaccaactaattacaacttagagtaaaaggaaaaatatgagattggttgagcaatgattcaaaattaaaatgactgtaattaaacctgcctaaaataaagctattgttgctagaaacttgcttgcaagaaatgtactgtattaaaaagtggctcgaataactaatctcacctagttaggattttcccaaatgcttcacagttgcta

SEQ ID NO: 100497 - DNA, 1398 bp, Cannabis sativa
aatgatggtttaacaacatcctcctattctagtgatcataagttttatcctagtttaaactttattcttcatttgttttatttaagaaataaaatatacatacacgtagaaaaaaggagcaaggaaattcaaaacatggtctcccatgtaactttaaaacatcttaaccaatttttctatttaactactatctatatatgaaagtaacaattctatattaaaatattttcaaatttcagggtgggctttagccctccctcaacacttctaattccgcctatgtttagaggttaggaatacaaactttagcgtttggacaaaaaatagtttgaccaaattagtaattctacaaggtctagctatattatcatttaataaaacaaatgagtcattcaataatttttataaaatacagaattcaaagtaatatttaaaaaaattaatttataaacatagaatttgtatacaagtttgttaaattttaccatctatcttttttttaaagatattacaatcaagcaataataatacttaataccgaattatcaataaggttctattaagtattaagtgcatttgtttgttatttgttaaaaccactcatttgtacttaatatgactgatagctagaataagacctctcctaggcactaaatacttttaagacaattgatatctctttatgctactaaactctctactactacttcattgtagctccataatgaaatagccatgaaagatttgatcgagagacaccattcaacacatgagggggcatcaacaatgcctttaacatgaaaaagcaaccttagatcatggttttatgagggagaggagaatagttgcaagtgagaatctctttgtttttaacaaaaatactttcatcgtgtcatttttaccctgtaagagcttaaccatggtagaaagtttgatgaagaagaagatagaaatgcagagcataagaacagataaaatgccaaagaaaagcttaacccaatagattagctcgagacctttatttatagctcaaagttttgtacaaatagatacaatacaactctaacctactagaaaactaaccaactgatatctaacaaaaaatttatcaactaactaactgtataaccaatatattattggtttacatctccctcaaataaaatggagaagaagccatgtgaagtttgctttttggataattgaatctgtctatagtgagttgtttggttagaatatcagcagcttggtccaaagaaagaacaaatcgaactgagagcagttgtgctaggatttggtctcaaacgaaatgaagatcaatttcaatatgcttgcacctggcatagaacacatgattagcagcaagttcagtgacactttgattgtcaacccaaagca

SEQ ID NO: 100498 - DNA, 1445 bp, Cannabis sativa
tttaccttattttaaggcacgctgcttacctaatattggatgactttttaggtaaacatcatttcttaaaaaaggtaaacaacatgccttaatttaggtaaacaacgtgactaaataaggcatgtcgtttaccgtattttaggcacgttgtttatctaataaggcgtgtcgtttaccatagacatgccttatttagtcccattgtttacctaaattaaggcatgtcattgaccttattttaaagtagtaatcattgtttaccttatttaagacatgttgtttaccttattttaagcatgttgtttacctaaattaacacaaattgtttaccatcccatttatgctcatataactgaatgcatttctattcccatgaatatatacaaatttaataatacaataataattattaaacaattttaattactatttttcttttttttctttgaaaagattttattactattttgaacggtcataagtaatcatgatatcaattaccaccaattttgatatgtatatatagacatatatggggtagatactaaggattatttagggataatggattgtagattcttcaaataaaaaaaaactgtgatgttgcatttttttttcttttatatatatattttttattaaattatgaaattattgtaagagtgttattatccaaaataaatgaatttaatgttgatgatgatccaacaaaataattatcaattaatattatttatgttgaattttattgtgtgcagcaattgagttcagtgagaggttgagttgctttgggatagcaacaagcttaatcatatacttaacaaaagtaatgcataaatatctaaagacagaacctatggtcagagaggaatctgatatgattggggaagtgggtttttggaatgaagttgaagctagacatttgttggttaaattgatcaaagacatggctcaagagatataggtggagagaccactagtagggcaatgccttcctctttggaatgaacttagagcaaaagtgaaagactggtgctccaagtttcacattagtgaaaggccagtggagaggattattgaaaaaatgttcaagaagaattatcatttaccttgggctgtagcatacatactcgatctcctttacttgatcagagacactagtggtaaataccttcctccattcaagtgtttgactactaatcaggagaaagaagtgaacaagctcataacaaggcttgtatcaagggaggaggctcgtatcgctttgatggagctcatgaaatggagaacaaaagggctcgatcctgtgtatgcttgggcggtacaaatgaaagagagagacccggtaaccggcaagatgagggctgctaatccactgagtagtaggcttgtgtgggaaacttatctcactgaattctacacactaggaaaagttgcagttaggc

SEQ ID NO: 100499 - DNA, 772 bp, Cannabis sativa
aggtttatcacctttttgtggtgattaattcctgggaagaactatcttaattttggttaaactttattcaatcttcaacaatagaagaatacataagagaatacagatcgagttaatctagcaagggggtcttgcacctcgacaatattactgtcttgtgttagagaatttggaattcactactgaggtggtagagcagagcaggattgagtgagagaatctccctaagtaactaagttgattgcctaatcatttgtcctaacaactttatgttattcctgattgtattcagggcaatattcctttcctatgtgtaatctctttattcgtactatgtacccttctctgcaagtgttgtttggctatatatatatatatataactgatagattattttttcaggtcatttttaaagttatttttcttctttgttgttacttttaggatgattttacgcttgttaatttttcttgatttcaggttttcggagttttaaagtttaggattccgtagttttgaagtgtaaaatctgtccaatatcgaagaggcaagacgagttggaaatagaaaaaaaaatcttagttgaaattcctgaagctcgcaatcagggtcggtctggtcggtcttaggctaaggcgggctaggcccgcgcctagggcccactcattttagtagctcaaataaaaaaaatacttataaaaatatagagattttttttaaaaaaaaaataaataaacatgccatttatatttatagtaagagtccaattttt

SEQ ID NO: 100500 - DNA, 950 bp, Cannabis sativa
aataaataaacatttcatggttttgaaaaaatgattttatttacatcgagatgaattatgatatttaatttggaagttagcaatttttatttttctgtcaaaaaatttgagaaaattggtcatttattgtacctgttttgtttcattttgaaagaaaaacaaatcatatgttaaagaaaaaataattaagtacaacaaaactactatgtaatgatgctttataaatgattaacattttttttataatttttattaaagtaaaaaataaatgaaattcgatattaaattataccaataataatattacacctcataatgatactcggtaacatgtcttttaagtgtgattttactgcaataaagactattatagattggagagattgtggttttgctattgtaatggaagtcatttttaaggctattttgactgctttcaatgagcattggctaatggtttattctcataattctttaaaggccagctttgttatggaaaaatcaaggcttttgtggagagtgcctttaaagatgggaatgatgaaatgttatatggtttcttatatagtttttcaatgatgggaatgatgcaatgttggaatgaaggaagaaaactctaaattctaaattggttgttgctgttgacctttttataatgtgcattctaactattctgttttcaactgtattttcatatggattctagttttcaatgatgctgcccacactattggaagtcaaaaagagtggctgtagaggtattgatggactattgcaaacttattgaccattgccagcactactatgaggtgggttttatattggttagcgattttttataatttttattaaaataaaatatatgaaatttgatattgaattgcaccaattgtaatacagtagaacatttatctaagaatacacttggactaagaaaattatattataat

SEQ ID NO: 100501 - DNA, 2166 bp, Cannabis sativa
  modified_base (654)..(677): a, c, t, g, unknown or other
  modified_base (1873)..(1873): a, c, t, g, unknown or other
attaaaaaaaatttaatttaagtgttatttataaaaaaaatataataatattcaaaatttattattaattagaattttaatttaaccgtaatatttctcattttttttaagaaatatcatacactttaatattttattgtttttaaaaaaacaataatagaaatattttttttagatatgtggattgggtataaaaaatgataatagaaaaatattttttaaatatgtgtaatgagtttaaatttgaattgcaatgttaattttttttttttttatattatatagctacatctaatataagataaaagataaaagagatatatatatagtgagtttaaatttaaattataatattttttagccacatttaatataacttaaatatatttgataccataaatttaaatttgatcaataaaattatattaatttaaccaaactatcctcaattatatttaattaagtaattatatttaaattcgaaattcatgtaattaaaattagtttgatcatattaataaaatttaatttacaagatttgagttcaaaatactaaatatatacaatttcaaataaccaaatgagtaagcttttggcaattataaaaaatatccaatttatgaaattaagagattaataataataataataatnnnnnnnnnnnnnnnnnnnnnnnnaataataataataataattacaattttaattcatgctcaaatatgagtgtggctagttttggttttgtaaagccagtatggctagttttggttctgtaagactagtatggctagtttttagttttgtaaggccagtatgactagttttttttttttttgaatgaaaatcattattttattaaccaataacttcagctaccacaaaaggtagcaaatcaactgggacagaccccatattgaaattgcaatcaagatagaataaagaagctctagcaaaattatgagccaccttattagctgatcgtctaataaaaaagatagaaacatttttaagttcttttagtaaagccttacaatctttaaccacttgaccaaacatggaaatcatttcaattgaactacgcaaggcttggataaaaactaagcagtcggtctcaagaatagcttgacatggttgatttcttttaatccaactcaaagcttcctttacacccaatgctttcacaaattctggtgtggccgagccattaaaaagcttggtaactcgttaaatgaaaattccttgtgcattacgaatcacaaaaccaatttcaaattgagttgtgttggaaaataaagcagcatcgacattaaccttaatgttatctccatgtggtggctgccactgttcagctccgtcacctggaataagaccaggactcgtgaaaataacattagaactatgagcagttagccattgattaaggtaagattgagccgaaaatactatactttccacacttgacgttttgttgttccaaaccttgtcattccgtgcattccagattgaccaacaaagagcaaccagaagctttttctgatctgcatcacaaaccagaaattttgaagcacaccagtcaaaaaaactgttatgttgtggtgctgctgtgccgatcccaaccctgttccaacaaagtgcagcaactggacagccaacaagagcatggaagatcgactcttcctgactgttgcaaacaggacaaaccatagacacctccacacgcttagtcctcaactgaatcatggttggaagacatccttgacaagctagttttaattgtaaggttagtatgactagttttagttttgtaaagctaacattactagttttggtttgtaaagttattatatggctagttttaattttgtaaggtcanttggtctaataataacacatcaaatgtagtgtagtaaccgccagcaatggagatgaaaaatagataagtatctacatcagagaattctatgcgactatttttataaattttcatattttattttttattttatttgtaagggaaatttcatttttttattaaatatttattatgtattaatttttttcctttttattttgcatgtgttctactagtggatcgaaagtgacaattttcaattttgaggttatggaagaaaattctcgttgcgtaactttattacctttgttatt

SEQ ID NO: 100502 - DNA, 591 bp, Cannabis sativa
catcttgtattagagtggtcatttattctatttcaaaaaagaatagtcattttactgaaatagtgaaaaaatcatttcaatacatttcaatactaatgaaataaaaattgttttctttctatccattctatttcattacctccaaccaaacaccacctaagtacaacaaatcaaaatatttatggtgcaaatttttcttttctatattagtattttatttagttgcaatttaaagtattgaaataagaaaaaattttgaatcttctattttgtaaaagttacctatcggactttttgttttgcaaaaaagaacacaccctaagcctgattttggtcgaactattatttatcttaactttaaaaatccgtcttcttaacctaaaacttcttattttcaaactctaacaatcatagttcaagatatattgaactcctacacccgaaaaaagtttgactaaaatcgagttcagggtatcattatgtttctttttgtaaaacacagtcaaaactgtgatttaacaaaatacaataactaatcagttacaaaatacttggtctaaaataatatctatcctcacaatacaaatatac

SEQ ID NO: 100503 - DNA, 708 bp, Cannabis sativa
aaaatgtgtaaatttgatattgaaatgtggatttggcaccttaagatgtatcttcaatgagaatgctttgaaaaatacttgatgacatggatgtatttttaatataatttgatgaatgtttactattggagtgaaaaaaaaaattatcaagaaagaatgtcattgtactgtatcctttacatcttctctttatttttttattataattttgtcttaaagtaaaaaaaaaattatttaatatatattatataataatattattattttaataatttttagatgtaaatattttagaacaaagagttatcaaaaaataatgtgaaagtctattttttccttctgtgtgcagaaggattctcggctttgataagagactgaatggttggggaagattcgggggtgcaaggttgctcgaggggctcctgtgttatctcacatgttctttgttgatgactgttatctgtactgtaaaacctctgaggatagtgctattaacatgatagaaatgttaaatatctttcaaaaggcctcaggacaacaagtcaatctacagaagtcctctatatttttcagcgctaatattgtcaataaggtgaggcaacatctgtggtctatgttgggagtgaatgaggcaggtgatgatagcacatatttgggtttgccaattattatgggtcgtaataaaacggccttacttgggttcttgaa

SEQ ID NO: 100504 - DNA, 652 bp, Cannabis sativa
  modified_base (150)..(150): a, c, t, g, unknown or other
agtggaggagattggggttgggccttgttcctgggtgagtgacctttttattggggaaagagaactgttaaagaaaccgtgtcctagctcttctctagggtggaaggtgagtacacttaatctgtagacttttgaggaaaattctaatgnacagctcgagtcgtcggagaagttgtcagagaacactacaaaacctattgacgatgaatctaaggattttattagggtcgaggaggcgggccaatacatgctcccaaaatccccatgttagttctttcttggaactactaggggttggggaagccctaggcagttgaggcgctctggaaaattatggttaggaagcggcctgatgttatatttttgatggagactaaaaaattagatttgtaaatggaggttattcgaatgaggttaggatttgctaatagtgtggctcattcttcgaatcaggctaaagagatattgtattgttttggcaaagagtttaggatgtagagacgtggacattcttacctgtgattttgatatggtaaagggttaagtttagtttacaaaataatctgaaagcctaggtggggcactttttctatgggcctttgagacggtaagaccaccaagaactctagaataatatgacacaaaaggttgg

SEQ ID NO: 100505 - DNA, 1117 bp, Cannabis sativa
ttaattaaaaatgaaaaagataaataaatcttttaaaagtctataaacaaaaaaaaaatgatctgataatgacaattttttcaattaaattatcacgattacttttcctaattatataaataaaataatatgattctagttttctttctgaataatttaatatgtaaatagtataataaaatattgtttcaagttattttttttatttaaatctatcaattccactgattattcagattccagttacaatttaataaaagcgcaaatgcttatgtatatgtatacgatatacattaatgtatttttattatttttcaagagtattaatctcgctaaaatattagttttaattttctttaatttctttcgcacggttttatatattatatttatgtgatttttttatttaatttaattaattttgtattcatgaagttgaggtttgaaattaatattttgtaattttatatgaattttttctgtacttatatagtagtgctatgttcattccggtcattaattatttcatattttaggttgagtaataaaaatgactatttttcaataagagtttaggtatattacttttgttacactaatgtaagtgggggtatatttttattatttttgtcattaggaaaatttattatttgctcacatttttttatttgttattaaaattatatataaattgagatatttatttcttaatttgaaaagtgtatccattaatagaacttttgtgttataatatggctgtcattataattggccatatattctaatgtcactcccttttgttgaacttatagaaaatgatactaatttttgtcaataatcaattaatatacaaatttatccatatatataatacgtgtatatatatatatcaatgaacataaaaaaatgatagttagctaacaaataaaaaaagtactattgaaaaaaaatatgatcacaagagaacaagatcatgaacaaagatattaattaaatggaaaagaacaaattaaatagtaataggaaattttacataaatgaaagagaaatttggtcatactttcttatattttcatttgtatatatagcacccttaagttcttattttttttttttt

SEQ ID NO: 100506 - DNA, 857 bp, Cannabis sativa
ttaaaagtccttttgaaagaagttgatatttgtagcttctcctaaaataatttttgagaagatacttttaaaattaaaataatatacataattcttaatttactcatgttaattccgaaaattggcacttgtaatttcctaagttagttgaccaagacatgagagatgacatgacggaagtcatccgacccaataatgactcaaggtcactctcccttgagagtgacaatgtcattcggccaagagggacaatgtcactcggccatgttgcatacgaagtcactcgaccatgagagtgacaatgtcactcgggcatgttgcatagtcactccgccatgacattgcaaatgttactgaccttgaccttgcaaaacttggtagaattttccctagcaagaggagagtggagcgacaaggatatgatcacaaggataaggtaggcacgcgaggagagtgcgaccacgccctctgcaagctctaaaagcaatacctggaatgtctgaagactcgaccaagagtacgttgaagccactacccttgcaactcgagaccacctaatgccaaacaaggatacggggtgcaagaccacttcttgcacctgcaatttacagcatgaaagcgacaccttgtctctttgagactaccttgtatctcaggccattagagcctataaataaccctttctcagatgtgagagggggttggaaaataattcttgttaccaccatattcagagtaatagaaagtcttgattttctctactttgagatagcaatttgaatttatattccatctttttcttcatcttagttcttagtttgaggtagagtttgatttttttggcaaacaagttagtt

SEQ ID NO: 100507 - DNA, 1050 bp, Cannabis sativa
ttttctccttacttttatttgtatgaggagaaagtaaaaggagtcgaaggaggtatgaggaggttgggcgcgtgggagctgggcacgcgcaaggagagaggttgggggtgtgcaaggagagaggatgggcgcgtgcagggaggggaggctgggtgcgtacgcagggagaggagattgggcacgtgtgtggggagaggatgctgggcgcgtgcgcgaggagaggaggctgggcgcgcggggcttcagagggggagaagaggctgggtgcgtggactgatatcatagggagatgtgatgagggggacaagaaaaaaaaagtggggggcatcctttgtcccttttatttgttttgagaatcttacattattcatcccctgtatttgttgtccaaaagaacattcatttattgaatttttgtagttaacacttgcccccagttaaaaagagcacttttaagtgatctttttgacttcagttgagccatcctttaggccctttgtggcgcatctcgtctggtagagtatccgacatgacttaccgaaatattgatgagatcattcaatgaggtaagtgggtcacatgttgcttctcatgtgtgcatgtaactaacctcatccattgatcttattttgatccaatggttagttttcacttcttcaccttataaataggcttccactttcacctatccctttctcattcttacttcccatcactttctatctttctttactttctatttcttccaatctcttcctacattccaagccctttaacgtttgttctttctttgagttccgacgtagcgagtctcttcttactcaagtcaatcttgtcaggtaccttctttccccatttatattacttttcttttatatttatacacccaccatactagtgaacacaattcagctacactgattttttcggccccggtaacaacttcggtgacttttctaacactgacagctactccgacaacttttccagtaccggcaacaaactccagcgacttttcggcccctgtgacaactccgccgatcactatag

SEQ ID NO: 100508 - DNA, 1208 bp, Cannabis sativa
ccacttaaaggcaattgtgtcaacttatcacctagccatgaagttcccgactcccgggggagtcgctaccacaaggggggagcagaaagaggcaagagagtgctacaacacttcccttagcatggccaaaaaaccccaggactccatggcaatggttgtttgcgacaaggaggcatgccagcaaagaaccggggtagatttgaacccaaggctgagggaggaggaggttcatgttgagcccaacaaagaaactgaagaagtggggatatctgagcatctattgaaagtgcttaagattgggaaagggctttacgaggacctcaaacgtgagctaaagcaataccttgtgaggatggtagatgtctttgcctggggacatgaagctatagtagggataagttccacagtgatatctcaccacctaaacatagacccgctggcctgaccgataagtcagaagaggcgggcccttaactcagtgcgatatgcggcgttaaaagaggaagtggacaaactcgacatgcactgcttcatatgggaagccttccactcggtgtgcgtgtcgaaccctgtcccggtccccaagccaaacgggaagtggagggtttgtgtggacttcactaacttgaataaagcatgcccaaaagatagcttcccactcctccacatagatcagacagtggacacaacaactgagaacaaagtgctatgcttcatagatgcatactcaggctataatcagatccccatgaacccagcggacgagaaacacacatccatcataacggataggggactctattgctatcgagtcatgccttttggtctcaagaatgtcggggacaaatataagagatttgtcaacaaaatctttaccaaccagttcaggcgcaatatggaagtatacatgaacgatgtgttggtgaagtcaaaaaaggcaagggacttgattaaagacctggatgaaacgttcaccaccttgatgaagtatcaaatgaagctcaatcccgccaagtgtatctttgggaacttgtcgggaaagttcttaggcttcattgttaatgaaaggggaatagaggccaacctagaaaagatacaggccctaatagacatggaatcacctaagaaccgtaaggaagtgcaatgtctgacagggagggtagcagcactcaatcgatttatcttaaggtcagccgacaagtgttttc

SEQ ID NO: 100509 - DNA, 988 bp, Cannabis sativa
aaaaagaagaaaaaagaaggaaaaaagtgtatataggcatgcaaaataatgatatttcctgttgttttgtttttttagtgaagtttgtttctcaaacacggaaacgataaaccagcatccaatacatggtgtaagatcttggctaaatttggctagaaaatgataagtcatgttacatatatttgtctcaaatttttaatgatatttcaatgcattaaatttaaaattctcttaaaaattcatcaaaagttttgaattttttttaaaaaatatataaataaaatataaaaagttatcctacatcctcaaaaaagtaaaccaaacatgtgagaatatctattgtgttataactttagtctgtggtatggtataatttttaggttatgtcaaatttgatacaacttttaattggtggcaaatttgacttatatactaaaattggagttcaatttttaaagctaagctaaaaatgcatatacacatacctttatggtaccacttcattgagtgctataatcctactttttatatcactatttcaacacaaccacatcagtaacattatatatttgtgaaatgtagttattatattatatactataattttggtatataattttggcacaccttgggaatggactatttttgacagctttctgtccatattttcgccaacggtagccatcttcaagatggtcaacttcgcttttagtcataaacgcaaaccggggctgacgcattcgcttctgccctttctttttcactttgttgttactgcacatacatatttaaaatcactttgttgttactgcacataaaaattttattatatatatacaaatatatctaatttaaaatcacttaattagtgtaattgagaactagctatagatatatttcttagtcaaaagtattacatatctaattaaacatgatcgatcagtacaaattaaaactaattatttgaacaaaatatataaaatgcaag

SEQ ID NO: 100510 - DNA, 1024 bp, Cannabis sativa
aatttcttgcgcattggtccatgaaaacacatcgacagagtactgaccacacccccaaccgatgccttactggaatcaaacccgaacaggaaaaaagagcatgctcgggagtttcagtttcttctccgcattgttaacagcaaagaggtacctgaactttccaggagataagttgtgttgctactgataacaccaaatagaacatacgccaaacaaaatttttcacctttggtgtcatagcaagattccctactccattccaccaacgaattagcatggttaaattggcaactccctcctcaacctagagcgaccacgccaatgagtagtcactcttaacattacaaaccccgtctcgatcatagtgctagtaccatccatcttttacctctcgcctcgctaatggaatagacagaattatgtccacatccattgacaaaaaaacctgttgaagcttcaccacatcccaagcaccagagggaaggataaattcactcacgtgacaagcatcattaatcctcctcgttattagctgaaaagacatctgatgcgggagccatgggtccttgaatgcccaaacttgtgttccatcaccaatggatctttgaagaccgtatttaggcaaatccattccccagatcaagcttgaccaaagatgagacgaaccattctttccagtggcctctaggatagagcaatttggaaaatatttatgtttaaaaatttgagcaggcaaggaatctgggtatagaaataatctccacacttgtttagccaacagagattgattaaaaagttgaaaatcccaaaatcctagcacgcccatcgcgttaggctgacatacctctttccatttcatctaagaaatctttctttgatccccatatgaaccccaccagaattgtctaataatagactttaatttttcacaagttgtcgtcgggagcttaaagacactcatcatataagttggaatagcttgttgataactctatggtacagagttattttttatgcttttaaa

SEQ ID NO: 100511 - DNA, 1003 bp, Cannabis sativa
gttgataaaaagtgactgtgcttgtatagttgaacggtcaagatcatggccatgattgtgaatttgtgatgatgatgaactatgatgatgatcatgttgatgatgatattggtgatcatcttcattctcactaagaagacttataatattgtaattgctcttcacatgattattattgttccttattgtctcttgacattcactactccaagaaaagtactgcaaaaatattaattaaacaaaaacattaattatatattagattaagaactttctaatattagatttcatcatgttaaaggaagtaatacaaggatgaattaattaatatatgatattcatcagttgattaattaaaattagttaagaataataattaccaggaggacaagaaggagacaccaaaaactcaatcccatagtataaatatcttttatcacttcttcttctgctctttagatcattcaacatatataaaattattatataggaagaagaaagatatggttgacattaatatggaatggcatggtatgatgtcacaacccacatttatttattttttatttctacttaatttgtgttattgaaatgagatccgtcagttttgtccatctctttttttaaataaaaatatgatatatattaaaattaattttataacactcacaataagagaggtatatattaaaattaacatattttggtctatatatatttttgaacacgaaaattgactaaaaaattgtaataggaagttgacacacgactcttaatttttatattcataggtatgtttatatgtatatatatatgtttgttttgaaataggaagatgagaaaaagagtgattgtggatgtgtttactttggaattagatacacactgaactgatgaagcatcattactaaaaaaaagttacttttagtgataattttttagttataacataattttttgtgattaaatgtgatttttagtcataacaaaaagttacttgtga

SEQ ID NO: 100512 - DNA, 1001 bp, Cannabis sativa
gctcctttgaccacgggaccatggtggtctggtcgactgtcttggacggagcactgagactctaaagtcgccatggtggctgtaaaacagcctaagcccaatcgtgtctcacggttttggtcctactggttgcacgatgtgcatgcatggcccatgaaaggtcatgcacacgtccatctcgtgtgttgtcgattcttatggcttgaagccacaacctttggaattgtgactcgttgtgaatgtcttgaatcataatcttgatgaggttaaggtttactccttaaactcgagttcactcatcaatgtaggttttgtgtatttaagaattttttacattgtacatacaataatttccaataaaaaattcaaaattacaatgaaaaaacctatacaatatcaaaataattgtctacatatttttttctaacaaataaataaaataaaatttctaaccaaaaattaccatataattaatgatttgcatatttgcatacattcaactatccattataatatatatatatatatatagatcataatacataatcataatacatatatataattacataatacccaacacaatatttggattatgcaaattgttgagtatggatcaagtactatttgttagttttaaaattcatatttgagtcgcagtaaaagagttaatttcgatttggtttaaaaaaaatttattgaatctgatataaactataaacctcagatttcaacacaataatacataatataaacttaactaattagtatatagattttttttatcaggattttctcactactttttgtataaacaaaatgaacatctaatctagtataaaaactcgttgaagacttcaaatcaatgtcttctagatcagtctcaacacttaggaaaaagtaagcttttaaattaaatgagataaaaataatttttttatcacattgtattctcaattcacgagacactctgattgacaattgggaaagcacacacccac

SEQ ID NO: 100513 - DNA, 1205 bp, Cannabis sativa
ttggatgtatagagtttacatcgagaccgatattgacaaatagaatagttatcataatttactgttatagctattctaaggtaatatcacctagtttgtcataactcaattagatctaattagatctgaatcttgacatgattaagctttaagctacttgttaatataattagttctttaatttattcgttacaagcttactcgttagtttagccaatacttgtattttgggaactcaatagtataattgagtgggagtggcatattagataattgtatgaatgatatgaagcatatatgatcatgtatgaaatgcagaataaattgagcatatatgcattatgaacaaatgatcaaaattcctccagccattaattccttaagtttcagtcccacgcgatatttggatctgcaaaagaaaaggaaattttagtgcgggtaattgggcttacaagctctctctactctttttaaatggatttactgtgtttcacaaactaagtagtaagcttggggactggtaccctatatttatataggtgagacattccatcaaagtctttgtcataattaaatgtcagaatattttgaaaattaattctggaaattaaatcgggtaactgaaatatttagtagttgaatttgaccataattagaatattttgattaatttttaaataattaattatattatttaaataaatcaaataaaaatatttgatttgttaccacgtaaaaattattcaacattcttccacttggtaagcctttaaattaatttaccacttaaatccaacgattatccttgttaaataacaaatatatgaatcatggcgataagtcctcattatttggtgtattatctttcatgtattctgataataataatgtacttaatatatatgacaatgtacttaagtgaataaatcttaaatcttatgtttattctagtcctctgaagatatttttctcagattaaattatggtgcacatgaatatgagaaaatatcgaaattagagtttcattaaataattttagttgtacaactaaaaacagcataaggggtaactaaatcccatatttactttacgatctttaaatttgtgttgtgacatgcctttatgcaatcacctaattcagtattgtgtgcttaatgaccacttatcacacatctttatggctaaatatttaatgtcaatatgct

SEQ ID NO: 100514 - DNA, 1103 bp, Cannabis sativa
tctctctctctctctcaatttggtgatttcaaaatccatttgtggaagaaaaagtttgaatttggtgtggaaattgtgtgggttctcttgcttggaacttggagagcattaggtactattttgatctttttttcttgcttgaattttctagattttgagcttgttaatggtgttttaggtgctcttgaatttgtggttgcatgttgttgtaatttaggtaaattgtgatggttttggtaatgttatcctattgtgttcttggttgaatcatctagattgttttgggaggctttggagtgaattattgatgttgattttttgggtaccaaagtttgaagattattgttctatgttgattcctttataacatgctttgtgtatttgtaaatttgttgttttgagcttttgtggagctcaattgatcacccatgataggttggttttgtgaagagcaaattttggattaagtttggtttttggttgaattttggtatgaatttaaggtaaaatcgaaggtttgaaaagttagggatttttgggactatcgcagcggccacagcagggctcgccgcgacgagggcctgaggttgccgctacaagggtccctgttttcccgatttttgcattttttttttctatttttgccataattttttattccaaactccgttttggacgttcttgatatcgttggaaaattcattttgggctctatgtgttaatctatatttggagttaaaattatgttcatgtgtgaaaataaaattgggatcaaccctatttgtgaaatcccaggaatgtgtgactaggattaccgacgcttgcttaggaacacccggagatttggaatctccacatacttagattaccagataagacagtaaactagcacgtggatattaatgcattggcgctcatgtatattattttgtatatgctatgcgggaaatcgagtttagggttattacctaaattttaacgactatgtgatctaggattatactctagaatttaagtgaatatgactgcagttatgtgttgtatatgctgatattaagaattatgtgcttaaggcataattaggttagactcggtgatcaaaa

SEQ ID NO: 100515 - DNA, 596 bp, Cannabis sativa
tcttttcgattcgagactcggagggaagaagtagagcctcaatttcagcaactgaatattcttcaatcctggtatttgttgatatgatgaaggtatcgtattcagacgggagtcctttaaagatagcagctatgtgatctctcgagcttagaacctctccaaccgaagcgagaagatccacatgctgtttgaccttcaataagtaatcattgagagacaatgatccttttcttaatttctgcagttttgttctaaactccagaatctttgaggagacttgtaaagtgaagtgtttctcaagcgcactccaaatttgtctcgctgtgttgcatccgaccatgcgtgtgagaagactctctgtcatcgaagagagtaaccaggaaacaagtagctgatcttgaacctcccattcaagaaaagctggattgtaggtgtttgaggcttgatctgcatcattcaagaattgaggaggaggagcacggtcttggatgaacttgatcagtcgatttccacgaattgcagcaaggacctgctgtttccacaacaagaaattgtgatcgttcaatctaattgacatattgtgattaaagtatacc

SEQ ID NO: 100516 - DNA, 1415 bp, Cannabis sativa
aagtaactataacaaaatgctcttgcaatacaaagatgaaccttatcaacggaccgatttacaccaatgtcaaaaaaacatgaggcaacaaaaaaataagcaataaatacacactctaaaaaaattgtacatttgtgattaaaagtgaaaaaaattgtaattaaacaaaagccatcattctaatattattactaattctaatattattactaaactctttgtggctaaatatattaaaaaaaaatagtaatttattgtcattaaagccataactaaaatcaaactagtaataatttgtatttaaatactattttttaataacaaataatattatgttaggactaaaagtgatatttaatcacaaaaacaattatgttgcgaataaaaaattatcctaactttttcgatggtgcaatatcaatattttattaatcatctcatctaagtttcatataaattcaaattcaaaattcagaaactaatgtggaatcaaaatataggaatatgaatgaaaatgaaaataagaataggaatggaatacaatttaaaatgcataaaaaattgataaaaaaattattatattttttctcttattttaaaatagttattctaccaaaatggtagaaataacatttcattagaatgcacttcaatactttaaaatgcaaccaaaataaaggaatagaatgaaaattatttcttttccattttattaactccaactaaatgccacttaaattcaaaaagatatatttgaattcattcacaccgaaataactaagtttcaaattaggagattcacatttaaacctaatcttaaagtttagttttcaaatcaaagacaaattttcaaatccccatgcttaaacagaatttgagatcttaccattgccaatcaacctccatgtgcaactccaatgcccccgatctccaatgcccggcgcagccccaaagccaaacaatgtcttccttgtcaaacaacccaatagtaacaagaaagaagagaaggtaggagagaagaatattaagtaaactaaatataaatataaatttatgaattaaagtaattttgtttacacatctttttagtgtaattaatttattaattaaaaatatttttttgttcaaaaaatacttttattatgagttgagctaatgacgatgtgacattatgtgtggatccgatcaaaatttaaccgaattaatggataagttgtcttaaattattttatttatttatatttaaaaaaattaatatttggatatccaaatactatatatattttttatatataaatttcactttttttttttaaccagaaatttattttattggtgtaattaagtatcacatctcatatttagcacaaaaaataattttgtggtaaatttacaccaaattttagctttgtgct

SEQ ID NO: 100517 - DNA, 1208 bp, Cannabis sativa
gattagatattggatgtattggatttttagacaccccatccaacatctgatccgatctaattggatatttgaaagtaacatccaatcttatccgatcacaatttattatccaatgtttagcggtcggttgtcattgaatcagtcagttctcattggattgaatcgattcatgcacacccctacacgtaatggttttagatgagaggttaatcaagtcttttatgaccttgttttagatgagaggttttaggcgactcggtgctagggttttttcagttaagaagaagaagaaaagaaaaaggaaaagtgttaaaaacggaatgggagtttatgtagttttgcctccaaaaaatcaatttttatggttaagtgttaagaaatttaaatttcgagtggtttagctgccaagactccaaatagaaaatatttttaaaattattttttttctgattttttaatttttaaatgtttataattatttttcaaaattaatattgcacgggccacaaaaattttccacgtgtacaagtgtgtacacatgggcagtccactgtgacacttaactatgatttttgaacggaagggtacagagtaaaacagaatgaaagtttaagtagttttgccccaaaaaatcaattttcgtagataagtgttaaaaaatttaaaatgtttagcggccaatatccctattataataatatacaaaacattttattatttgacaaaaaagcacaaatcattttttgtcgtattgcttttcatttcccatgcataactttgactcgttcaaattcaatagtgaaaatattattatattcttaattattgtactataaatctacctagcttaataaaatcgatctcactttcaattatttatattcactttatttgaaactaattaaacatgtggaagatgaatatgatgatagttgcactgcttgtgttaataatggtgggtcagtgcatagacaaagaaaaacaagctctcctcaattttttttttgaaggcaaaacattttattcaaccaacaaaagaattacataaggtcatgcttctctgcatttaaaatagcagcagcataagagggtaaaatctctgaccataaagaattatatctttgctttaaagcccacttagctaaagaatgagcaaccttattacagtccctattgacaaaccgaattcccatacacccattgagaag

SEQ ID NO: 100518 - DNA, 951 bp, Cannabis sativa
atagcaatgctctaatttctcaggttaaaacagtttgttttaagttctatagaataattattttttgttttattttttaaattttcaaaaaaatataaataaaataaaggtacttaatttttcttatattttattattttgaaaaattatgatatagacaaatggttattcgacacgtggcatttttgtttttctaggaattaacaaattggtattagtattagtgtcacaatttcttaaaattaggtatttattaaaaacaaaaaacataaaataagcatttgtgttgcaaattttcctccttaattttatcattgtggccaatatgaaatacaaatgttctagattatgggttgattatcattacacaaaatcaaggaaataaaggagtaaaatgtgtctttttctcttttttccttgtcttaagaaaaggtttgaaaccgtgttttaatttgttttgtctttatttaaagtctaggcaagccaaatcaaagcataataaatcatgattaatataatctcccaaaaaagtaagcttacattaattatttggttttggagttaattaattaatattaggattattagtttttgttgactataataatgaaaatattacccaatatataaccttacaaattttaagatccaagaaaatattgctccaaaagcaataatgctatatataattaaccctaataatgaataattatagttaatacgagcttttccatgagattatctcgtttaccatggatgttaattagaaaacaatataattattatttattataattataattgaactaggatagaacagatttttattttgagaaaaacaattgatgggttaaaaataattattaataaggcaaacttttttttttttctttctatcaaatgataacaagtatccctatacctaccacacatgccaatatcaatcataac

SEQ ID NO: 100519 - DNA, 802 bp, Cannabis sativa
aaaaaaaaaaaaaattgttttgaagtgtaaatgaaaaagttttttttttttctttgtataggtggaccgttcaacctacctaccaattaatgatcctaaattttaacacaattataaatagttctttttacaatttaattagaagataaagctttctagaagagaagttggttaatcacattttagtctcgtcttattaattactcttgcctttggcaaaatttcaaggtggcacccaggtttggacttctttgaaaggagagtagttgaaattgggtactacttaattcattataataataattaaaaaaaatatattaaaaagaatggtcataataaattaataataatccctcaatattttattctaattgtagtcctacagttctggggtcatcatcatcacttcacttctaaaatacaatggttataaataaaaaaagaaattaaaaagaaaaaaggagattaattaatgatcagagtccaaatggtcaattaagagtttgaagggaactcttgccagttgcctctgccaaagggtcatctcatcttcatataaatttctggtttttctttggtttttgggtaattttgttgttatgtgactttgagtttttgtgacagaatttggtccaagatgacttcatcagattctaagaagcttacctttgaggaggtggcccagcataaccataagaaagattgttggattataatttctggaaaggtcagatcacaatttgtttctttaatttcttatgaattgatattgtttctgggcacaattgatcgattgctttct

SEQ ID NO: 100520 - DNA, 924 bp, Cannabis sativa
ggataatgatcattaagtcaaggactcgaaatttgaagaaatcgtcctcaaattggtcaatgtactcatgaataacatttgttcatataccattcctcaaccagccatccttcagtttagtagtttattagtgtaagaagatacttggttgttagtgtgaagagtggtgacttttaccaaatctctctatactctacaaaattaccacacagttcttgattggtggcttgtttttaagaactcaattcagatccgtattcaataaaatacataggaagatcagcatggcatttggattgcctagtgttgttaagggcaagaaggctctccgaagatcctttcaaaaggcaacattgcagtgtatatatgttagaaaggagcaaaagaagtgatatgtagtacctctttcatacctaaatgagcctgcatttcaagaattgttaagcatggccgatgagaggactcacaattccttgcagagtagacatctttattgcatgaattgattgtaaattacagaagaactaacataatcagcaatatacagtatcttgtattcttgttatacttagacaatggaagaaacatacactcaatttcttattacttaaagttttactttcctagtgtataatacattgcttacatattccatgtcaagaattttatttgcactgcaatattttgtttttaaaaataccaacaaaaatgaagaccaagggtgtacaaggattctatatcagaatcttaagaaaaaaaaaaggttccaatcacataaaattcataaaagaaaatttcttaatattcacttgtatcattcttggagacaacttttatttgttaaatcccaaggaaaaaaatatttacaagaattgtaggcattgtctgcctaaaaaaatgtaacattaaatttggttagctgtt

SEQ ID NO: 100521 - DNA, 716 bp, Cannabis sativa
gcagaaaaccacaagatgattttgaaagtgccatggttctttgttcaagaccctgaattgatcaccaacacagccgaaagtaatcttaaaataatcatccctgtactcagtgattgtaactggaaatcggcccctccagtgatcggacatttggttgataaaagtaggtttatggacaaagttttgggtaataactctagcaaggagagtaggagttggggtggcagtgtgggaatgagtcacatcatcatttaggaggaaaaccgatcgttcttcatcagtaagtttcagagttgaatccatggagtgtaagagagggtcaatgtcggaggacatagctacggtggctgttgtaaaacaggggaagaaggacggtagaggatgcggttctgatgagaaaactgctaggaaaacacaggagggaaaaacgatttgaaaaaagtagttaaaatcctaaaaaaactgttaaaaagcacaaactgctacagacccaaacagggcacagttatattgtagttataaaatatttatgtttaattatattaatttttttaaatcttttctttcaatttatacctattctatataaaactagtaaacattctgcgcttcgcgacgaatatatgaagtattttaaattatatataaaaaataaattgtgtattttgattaataataattacttagttgttataaatattaataattatgtggat

SEQ ID NO: 100522 - DNA, 680 bp, Cannabis sativa
  modified_base (147)..(161): a, c, t, g, unknown or other
aacatttgatatttccattaatatatagggatacaatataatagctcaagttttatatgtaatgatttttgcaatataaattaattaataattctcaaccactctaccttatcaacccaaccctaccataataataataataataannnnnnnnnnnnnnntaataataataataatataattctcaaccaccctagtgtagtaaacacgtgcatgttgtgttagcttgactcgtatttttttttttgtgcttttcaaactataaaaaacgtcgtgccataaaaaactaccaagatttttgaagggtaggcttagtaccctttttgtttttcttctcggcctattttttttaaataagcgaatttgttttcatatttaaacttgaatttatgctttaatttttttttcatttttttttaaattattgatacgattattaaactatatgtttttttttagtttaattatttttacataatttttcaacaataataaactaacaatcatatatgataatcattataattattgaaatttaagtaattattttaagccttaatctataaataaattaatatatagttttaattttatattttctaaaatataaaactacaatattgtgttatatgtaagttttaacattgttttttaacgtgtcttttggacttatcgtgttt

SEQ ID NO: 100523 - DNA, 1182 bp, Cannabis sativa
caaaatttgggtgaaaatatgtttaaaattcacatgcaatttttaatcatttaattttttttacgggatataatatttacaccacacaaatttataagctttaaattgagttgttgttgttgctggtacaataatatatttatagaacatgtaatagggatatttttttatgtcaaatataccaataattttttttttgttataaatctaatggaataagtaaatgtttaaactcaaatatattttaaattcattatgaaaaaagcttaaattttaatttaaataaatatatattatataaatattcaggatataagtattttttttaaggagttttttcataaatatatataaaaaatatagtataatttatttttttatggcataaataaataatagtattatatcatgaagttatatattttttatttttttttatatttatatgtattttttatgctatatttttgtaaaaaaaagtgaaaatagtatatttataaacaataataagtttcgccgaaaaagtcaccggcgccggtatcaagaaagtcgtcggaaaaattatttttaccgaaaaaatgtcgaaaaaagtcatagtcgccgaaaaatcacaattgccggaaaaataactggaaaagtcatcagaaatagatatctcagatataactaaaaataaaactgattctataacatgaataaaaataaataactcaaactagttataattgaaatataactaattttttaatataataaataaaaataaataacacaaaataactcaaatcaattatagttaaaatagaatgaataaaaataaataatatcaaataaaaaaaagtttataagtaaataagaacatgttatataaattttagttttattacaagaaaatggagtgtatagcaacatatgcaatctcaaccggagagaagaaaggatgtggcttcccacaagaattgcagtgactctgactcttccttcttcttcttctttggtcaacgctagacttttgccttccttctctcccattaccagaggtgctttttaatcacaatcactgttagtctctctctaactctaactctaactctctgttttctgctatggtagcttcaaatgaaacttaactgtgtaactcttttaggataggcttccccatttctgggttcctctcatttt

SEQ ID NO: 100524 - DNA, 1171 bp, Cannabis sativa
tttttaattaatatctttttaatataatggagcgtgagtggtttaggaatattaatgattctagtttggctttaactgtccataaagttataagagtaatctagcttcataattgtacaagataaagttaattcagcaaacataatatttgttcattgtttgggtccgtttgacacttagactcgcttagaccggataattttagtaaaaattggtaactaatccagttaatactatctgtgttagattatttatttcatttagctgtgttggattatggataagaaaaagagcattgttatagggtaccaagatgcttagtacttttataacataacgtcgtataattagttagtgattgtttataatttttattaaattgaaataagtgagaccagatattgaattgtaccaacaacgacaataatcctcataagggtgctacacaccatgagtactctttataatctatgttgacaatttttattttatttttaattttgtaaatatatttatttttaaaaggaatttaaatggaagaatgaaaatattatttatagatttattattaaaatttcatttattaaaatttatgaaaatgtaatatttagttataagctattaaagttttaaaatgatactatttaaaaataaatacttttattctaataaatataatatagtatcatagtatatttctttaaatcgttacaaatattttatcaaaatattaataaaataatatttgtattaaattaataagatattaaagttaaactattaattgacataaatatttgtttattttttattatgttaaaacagcatacattatttatttaattgttatatatgttttatatattatatatgatatattcatatttttttacaaaaaaattattgctatcactatcaattgagagaagaaattcctccagatatgtgttatgttcaatagtgagtactctcctagtaacatcctccctatctgcctcgtcaataagccaaagtatggaaggatccgccttccataagttgtgaaggaccacgacataggacatctccaaggagcgaatgcgatatttttctaccttagttattgccttagttgctgccgtaaccgcgtctggaatgagctgggggtagtctccctcattctacgcatggc

SEQ ID NO: 100525 - DNA, 655 bp, Cannabis sativa
tacttcctttttcgagaaaatacgctatatatatctggatggcttctatttttcgtattatatatttttttttacttaacttgaaaaaaaatcaattttaaaaattataaacgtacatagcttggtttgaattaacgtaagcttagtatagaattactaatagatgtgtaactatgctatatagctaggccctttcttaattcccaatcctgtaactcatcacaaaaattatatatatattatatttgcattattcaaccaaaaatacaccagtatatatttcagtatatttaaatttattaattagggttgtaaagtatagtttgtaccctaacttttgtgttttttttttcattacagaaaattaagttatatataaattaattattagtagttttattgtactaatcattttcatgcatatattttctgtctctttttttcttggtatattatctcctgaattatggtcaataatgatgaccatggcattattatgtgtgcgtacccaaataattatttactataatatactataattaaaatcgatcgatatatatatagggccggccctaggcataggcgggctaggcccgtgcctaggacccacacttttcgggggcccaaaatgaaaaaataaaaaaatttattaggc

SEQ ID NO: 100526 - DNA, 827 bp, Cannabis sativa
gtcatactgagagttgtgagcatcagtgactttggaagttaccgaaagctcctcgttagcaatacttgtggtatgggctgattgatctttgtctgaatcaacaccacctgatacaagatcttcagtttccttttctggtgaagctgggtcatcctcagtttctgttattgatggctttgtatttaccagctttatgtcaatatcatctgataaaagttggaaacccaactcttttgcaagtgaacttaacttaccttcctttttttgctgaagaatgtgtgtcaagatctcccgcaaggaacttccctggagatctgaattcacattatccaaagcgacaggctttccttcatttacaaccatgatagtggacattttctccctgaacttcatcagctgagctgttcgggataattttaatctaggaggtccaaatgtactccgagatgcctgataatcttgggctaaagtctcaatattttcaccgttttgtccacttaactggtatgattcatgaatttgaaaagccagatctcgaaaagcctcaagagcatccttacttttgctcctagtttccaatgatttacatgaacgatctacaaataagagtatagatggtccattagcaggcaaaacaggctccaatgcgcggccatcaccttccagctatataacaagaagacaaatataaatgggttaaaaattacttaaactaacaccaagataataccaagataatgtgaaatggaggagaaaaatagacctattaacattaagacggtagcatcacccatgatagaaattttttcacagctgttgaataattt

SEQ ID NO: 100527 - DNA, 930 bp, Cannabis sativa
tagagaattgatattcaaactgaaaaatgaaacacagttctttcaaacgaagaaaattaaccattaggaaaatggtagtcatatatgataattaatagaaaatatgagaactgagtttaaggacaataagacgtgtgattaacgaaatgcacaatcagcttttctcatgttaaaaggaatgaaaccaagattatatgagaaagacaaaattagtgaccaaaactttacctaacatcaacagaaaaggctagatctctaagtcgagggatcaagtaaacagcttctctttctgcgatcgtgctgttataaatcacacaaacttttagcaaaatcaagagaataaataaaatgtagagttttgaaaatttaatctgaaggaacacaacatactataaattttttcaaacacatactttagagaaatagaagacggtccaagactctggtgcaatctatcatgatcgtgcatataagcaaggcctttcatagctccttgaaacagcttgattacaaaattccttctgcgtttgattttttcctcttcttcgaaacgattccaagatgttgattccaaagcagctttgcttaacactctttcacttgcatatttggtatagtctgctggcactatatttcccatcattacgaaaagcaagccactgcagagatgaaatacttaattctctcaacaaaaatacagctcacacatagatatgctcaaatactttatttcatccaacaaacctgctctccagttgttgtctcaaaaccacctaagagtatcaaaatattctgacataattccttgggactactctgcaaaagttgtgtatgaaaattttttcatcaacaagaattactaagcaatggtggtgagagtatatacaaaaagcaaatccaataatcagacggtaatataataatctcact

SEQ ID NO: 100528 - DNA, 716 bp, Cannabis sativa
aacaatgaagacaaagaagaagaagaaaaagagaatggccggattaatattgggattaacgggattgatattgggattaacgagattgatattggcattgtggtggaaggattaaatcatgagaatagtgctactgtaattgataataataatgatgataaggctgcctgtttgaattacaatagtagtagtagtagtagtagcagtcgtagcgtaaaagggtcatcattatgttcttgtatcctagcaatgacagtgcctgcaattaaaacccttcatagttagacaatactatgattgaagattattaggagtctctttcatatgagttgagagttttgatattacattttttgttttattattattattattattttagagttatttgcggcataacctcttaaagtgggcaagttttttacaactaattctaaattctaaaattttagtggtaaaacctcctaaactcaagttctgttagcacttagcctcttccgtctatttttggttgttaactgccatggtggaatgtccacgtgtacacagtgtacacgtgacacaattttattggtccaatacaacctagtactctttggttgtctgtggaccttctgctcccgagcacgctcctacggaaacccattttgtttgggtatggagtggcacaaactggatgtagtattactcctggacagacgaagcaacaaacaaaa

SEQ ID NO: 100529 - DNA, 511 bp, Cannabis sativa
catgtagggcaagccttgtaaccttgaccactccacccagataagctgctgcaagcaggaaaatcattcacagtccacaacaaagtcgcacgcatcttaaacattgaattggtagtagcatcccttgtatcgacactattcacccacaattccttcaatttgtccaccaaaggcttgagaaatacatccatgtcctttcctggtaatctcgcaccaggataagggtagtcatcatgaaattgttgtccttcataaacaaccacgatgggagattgtagattgccaacactacgggccacatgctgtacgcttgactcatgtttccaaatggataaatccatcagcagctaaccctaagcgaacaattctaggatctctagcaaaattaggatgcaagttgtcaaagtttttccacgctttcgcatctacaagatgacgcatgacaccatcttctctaactctcccagtatgatgccataccatctcctttgtagtatgtcttgaactatac

SEQ ID NO: 100530 - DNA, 1114 bp, Cannabis sativa
ccttattcatcctcaagtactctgcactctagctcagtaaattatgttccacaataaaatacacacactgttccacctatcaatgttgaatactctctttggcataatatgcttggacatcctactactaggattattcatcgtgccttgtcttcttgtaatatcaaaattagcaataaaacaagtgctggtttttcaaatttatgtcatgcttgttgtttgggtaaacatcacaaactccccttccccacatcaacaaccaattacactcaaccattataactcttacactctgatttgtggggtcctgcccctatcaattcatctagtggttacaaatactacattagttttgttgatgcctattctagacatacttggatttacatgcttagaactaaatgtgaagccttaaccacattcactagctttaaagctcaagctgagcttcaactgggtcacaaaataaaaagcattcaatcggattgaggggtgaatatcaagcttttaccaacttattacaaaaacatggcattacacacaaggtctcttgtccacacactcatgaacaaaatggtgttgctgaatgcacagtacagtaccgtactctgcttgaaaatgccgaaatgcaaggtactctatgtgattaccttctcaaaatcaaaagattagtcgatcttttagcatttattggccacattatctctccttttgaacacattgagccgatctttaacaatgtcaccagtgactacaatgcgttcattacatcagtcaacacaagaacggacaactatagtgttactgaaattgaagccttactcatggcacaagaggtttgcctggaaaaatcaactgaagaactggatatctccaagcctaaagcaaatattgctcataccaaaccattcactggtggtagaggtacctttttttcaccttatctttctaattcgactaatcctggcttcaattctatgtctcaaggaaacaagatgcagaatagcagtatgcactactctgctcatcatcctccccctagatttggtcaataagcaccttctcctacaacttgaggaggtcaatcttgggcactcaaccatccaatagagga

SEQ ID NO: 100531 - DNA, 712 bp, Cannabis sativa
  modified_base (27)..(28): a, c, t, g, unknown or other
actaatcagattgtaaagagttttatnnagggcataaaacccaacatatgcgcccaattctgatgagattatatattctatattctctgtatttttttctgaattcctttcttcttacattccctttgtatttataggttgataaatgagatattttttgaatgatgagtacatcttccctttacctttaggctttacacgacctttgaaataggtgtaggaaatgatgttgatgcatgtgcataggctaagctctgaagtaggagtttggtgagacatgacttgtcttttatgtggctgatgggacaacacaaggattagctgtcaattagcatttatagggaaaaggtaatgtcagaacagtatggattaaatctgaatgatatcttcattttgagggcaagtttaccttactacctacgctgaagtggtcatctacaatgttttgccttaggaatcgtgttaaacactcaagcagttctcagacgctgtttgatttgggatgtcttcctagaggatagagtttgactttgacttcaatgttcttttaggaactagtcgtacactctcagatgtccctcatgccttgaggaaaatactaaacactttttatgttaatattgaacatccacgtgcttatgttaatcctgtggacaaatgacctattcttcacttgctacgtattttggtaaaaaaaaaaaatatatatata

SEQ ID NO: 100532 - DNA, 583 bp, Cannabis sativa
aacacaggtcataagaccagacttaaaatttcttattttttatgaagtccatacatgggcaatttggaaaaatttatttagggaaaatttaaatttgaagctctttccaattctctatatcccttcctccctatttaggagagaggatcgtcttatttggtgcatctaaaatagaggtatgcttacaatgaggagtggttactggacgaatattcgccataaagacttaagacaagctatctcttcttcaggtccatcaaaatggtggcaaactttatggtccttaaaacatgcctcccgatgttcaaatttttttatggaaagcttcttcgaataagattcggccgttccggtggtcaatcttgcaagccacggatctcccaatggcaagacttgtccaatttgtgaaactaagaatgaaacaattttttgttaaatagttatttagagttattttagtcttttatgttagttgtttatataaaaaaatttcttattagtggtattctttcactttttgattttataattgaatgaaaccttaatttttttgcatctcttttctttatttattatttttttt

SEQ ID NO: 100533 - DNA, 1647 bp, Cannabis sativa
aaaaatatgtattgaagtcacctactagtgattaatgatagtttcatttggaactactagtttgatttggttttatacagatttggacgaaacccattatcaaacaaatacaacatttatgaaatgatatatgtactcataaattatataaatttgatatacatctatgtaacaagttaaagttaactgagacttattttaaataaaaaataagtgattaaaattacttgtctttcaggtaagtatattaaatttatgtgtaaattatgcgtatacatatcacgaaattcatataaagctaatacaatatttatgactgagtaatgatatatgtactcctaaattatataaatttaatgtacatccatgtgacaagttatttttaatatgtaacttatcttaaattaaattgattatctaaaattacttgtcacataagtatgttaaatttatgtgtaaattatatgtaaatatcattattctttacaaagatattcgcaaattcaaaaatcaattttcttcaacttgctcaaaattcatatataaattatttagcatcaaaatcacaaataaatttaaacataaatgtgcattttaaactcaaatttaaaggtgtcgtctgggctggactagtattgagcattctcttgctctttaaatttgaagccccttttgaatttagcttcaatcccaccaaaatataaacaaataggcctgtgatcagagttactagtctaaaagagcgaaggaccgctttcaggaataacaagttcaaacacttattaataagccccctatcgagtgctgactttacatgtgcattgccagacttgtgattatcacacgttaacttgtctccttggattggcaaattaagtagatctcgagaattcaccaagctcgaaatgatagggttgaaaattggaaatggtcctttcctttagaaccttctctccctgactcattaaacacaaaattagtgtcggccaaaattaaccaagggccaccaaatatatccccaaccttcattatctcagtccaaaatttctttttagcatggaaataaggaggactataaacacatgtgaggagccacgagtgagaaggggtccaaataaaccaagcccgaaatttgatttcgagagcaaatagtactttcaaatacaaagccagttttccaagctaaaataataccacatgcatgaccaataataggaacacaagtattaaagtaaaagtgaagtctattaagaatatgtactagtggagtagcattgatctttagttcagtcggaaaaatgaaatcaagtaagcacaactgaaccaaggacttcagctcgcgaactatagaggtctaccctaaccctctataattccaagctactcctctcatgacttttgtggagaaggtgagacatcctcctccacatgagtatatgtgtgggaaaataaacaagaaccagcattatctactagggccgaaccaatcacctgtgtattcaacccatatagtcggaccctaagctcttcctctggggtgtggttaaattgacaaacagaactcaaatcattctccgagtactcttcaatagtcaaagaattaggataatcaccatcgcaggcgtcaccggccacgatcgcaggcgg

SEQ ID NO: 100534 - DNA, 1069 bp, Cannabis sativa
agtgctctgttctttgttcaactttataggatgattttatagtgcaccccttgcatctatttcgatattaaaaaaattttttagtttaatttttttatagtcatatgtaattatttaagacaacttgcaaaattttgaaatttttgaaataatttacaatataaaaagccgttttcaaactatggctattcataaagtatccgatccgatccaatctgcactattgcagattggatttaattagatttaaactgttacgcggactggattggatccaaaatatgaaattcgtacttagtgcgaattgaatgttgtttgaccaaaaaagtgcagattaaatctgataaacaaccatagttcaattcaaattgtgaatttcacatgcataattgcaaataaaataaaagagtcatgcgtacaatatactatttgaatcatattttcataatgttaatttttttcgaatttcttaaaattttataacatgtcttaaataactacaatatgcaccaccactaacaaaaaatttaaactaaaaaaatttcttccatgctgaaaagataggagtgcatacatgctctattaagggtctattgtaaaaaatttcaatatgatatacactaacgttattataatattgtcccattacatttaaagtcgatttggcggaccttgcgagtgttaaagtcatcctattaaatagtttaatatataatttaatttaattaatctcaagtactattaatatctaattatatttacaatttttttaataatgaaactattattaaatcacaatagttattttattgtatttaatctcagtttcatgttagttttgtaaaaaatttcacatttatataagccaaactctaacccttatgatagggggctcccattcatttcttttaaattagtttaccttttaacttttctaagacttcccaataaataattgttataatgaaggttaattattaatttttccccctaaactttgacatgtactaaattgtgccccctgaatttttttgaccgttaaaaatttcccccgaactattgagattgt

SEQ ID NO: 100535 - DNA, 965 bp, Cannabis sativa
cgttgccacgtcatcaactgtcttgtgtggataatctcgacacgtgtcctattgggacccacctcactactttaactaattattttacttgtatctttattataatagctttagcattacttcatattattattagtgtatagtatttttttgggtgttatattattattagtgtaattaaatattaagttacatgtaatttaagaaaataatttttaaaaaatatcactaattaatcacaggatgccacttaagactgaccgtaagattgaatgagccttcgaataaataaaattattagatcctttatttaaaaaaatatatggtattttcagagaatactaaaactatatacatgtttttgaggaaaaataattttttggtcccttgactaattaagtgggttctaggcacaagtctagtctgctttagcataggctcgatcttaacgccacatatagaaggtgctagacagtactagtgctcaataacaatgttcattgagtattagtggtgcatatcaatgatcctaggtgacgtcctgtgattgattaacaatattttttaaaaattattatcttaaattataaggatccgatgctcaattatactaatagctatatgacctcgaggaatgtgtaaaacaccacttgtacttttaaattttaatagcattattattgggtaccttctatagataacactccatgattgtttagtgatattttctaaaaattattgcttaaattttatactaatagcattataacaccgataaaaatataagacaccaataatattatcaaaacaaaactcattggacaatataattttataataattaattaaatcttaatttttcattaattacaaccataatccaattccaatttcgatgatgtaaccatgattaattcttgtttaattctatcatttgattattattattattattattattatta

SEQ ID NO: 100536 - DNA, 955 bp, Cannabis sativa
tttttttttgtaagaaaatgatataagtgggtgagtttataattgtgattataactaatttagtattgagaaaaagagagaaaagaagacgtgttattggcatttggggctagactttcctctccatctggtcgagttagtactgatcgaaattacaaaaagaaaagtatcggttgatcttgaacccttgcactgcgacaaaaagtgtgccatttcatttataggttaacactttgaatttaaaacatgtagctttaaagctaagcaaagtgcaccacttaattattaccaattaatcactatatataagtagctacatatataataaaatatgtcactgtcttttttgtggaaattaaatacttacttatatatatatgttcttcactcgtgacttgagtagtctttatttatgatgaggaggacaattcttgttgccttatatagagatgaaaggaaaaagtatttgatggtatggtggtcaaattaataattttcagctcacattagtacaatttaatttgcatactcctttctttcatgattataataataattaattaataaaaatctaagatatgcactttgctacgtacgttgataaagtacgatccctgttaaaaagttattaaactaatttaagtttgatatgttaattagtttttcatttattaaaaaattaactatattttttttttctttatgcttaaattaattgttgtgtcataatgagattggtttaatacactatgaaacacaatcttttaactgaagatcttaattccataaacttcatgcaattaataggagaattgttactagccattggtactaacaaccctctttaaaaattattactatatgataattgaaatttaattaagttgcagaaatgataatcaaagtaaataacaacgagtattattttgtgaatatatatatttaaaaaaaaaaa

SEQ ID NO: 100537 - DNA, 652 bp, Cannabis sativa
atatccttgtatggagaatgtgtggctcattaaatgtgatccagtgcttcactttgtctccgaatttctcaaagcatgtctcagcaaaattcacagagtctttgctgtcatcaccacattatttatttcaaaatattcaacatcaaagtctttttcttttaacaaaaaaatatatagtgtgtatcttatgccccctaagctaaacctacttctagaaccattggaatctacaagagccattttggtaaatttgaaaacaatcttttggtctttatttatattattaagctaagaagtaaaaaacccttcatcacttaacaaagtgccctgaaaaaagtcgtagtactcttaagccaagtgaaagtaaagcccaaatcagtattccaatattattatttcctttccatcaattcctaaatgggattgataaaatataaaaggagaaattaaaaaaggaccatcataagttccacaatcactgatctagagataaggaaatatgggaagcacgatgtgaaagttaaagaagggaaaaaaatacaacataaataaataagtaaataaataaatgataatttcacttatggccctaccaagcatatcatatttggagcttaataatcacaagaataatagctaatagttggtactt

SEQ ID NO: 100538 - DNA, 630 bp, Cannabis sativa
tacatgtcaaaatttaggggacaaaaatcctaattagcttatataaaatactatatatgtagggaacttaatatatagtattatattcattttttcagaatactatacaaaagtaaagtttaaataatttattatacattgtaaaataaaataagtatgtatgcgtatatataattaaatattttttttataaggtaaccaataaaaagtaagataacaaaaataactatgtatgttgcgcaaaagatggaagaatctcttctatctaataaaatttagagttgcggctaaactttctaaattactgaattagtagcaaatttaaaatgtcattctgttaactgttactatatatggactgcttatgtattttgtatatatgacaggtttatattggtacacctgatattattatttcaaaattcattttaaaattaaattcaattattaaaaataaaaataaatatttaaaaaaatattataaattttgaaataatttttatatttaaatcttttgttttaaaaaaataataatattaggtgtgccaatataaatttgacacatgtacaaaagtgtacatatatgttggtaattaactgtaaaaaatagatgacaccttaaatttacaa

SEQ ID NO: 100539 - DNA, 1273 bp, Cannabis sativa
tacaaataggactcagagctcaattttcgataatttttttaatataactaacttcaaataattcctaagactatctctaatggatgatgtatattttgagttaaattaagcccaaaacataccatatagctatacttggcctaatttttgtatttgtgctccaatgcacaaagtgcaaattagttataaagccaatattaccattaatgttcatttaaaaatataccaaacaaagtcaataaatattattaattagtggtaaagaagtaattagaaaatgtaatatttattgtggactaaaatttgactcatggtattgtttgtactaaatttagcattatttttagcttgagctaaatttggcacacattttacatcaccattggagttaaattttagtaaaatgttctaaaaaaaaatggataagttgaaaaatatcccttttttatgtccattaatcaaaaatatccttatattatatttcattgaaatatacccacttttgtaagtgagttgccaaatatacccccaccttccacttaagtctaacatataatttacattaacttaaggagtataatatgaacatcatctataaaagtggatatatcttaaagaaaatgaaaatggaggtaaaaatcaaaacaaataaagtaggtatacaatgtaatttcctcctaaaaaatagcaatacaccacatttatagcactttattggagatgtaaaaaatataccaaattttgttatgacacttttagatcgtgttattattaaattttattttgacaaaaaaattagttcaggatactatttgatactattttaaaaaatacgtcagtaacttttgcaaaatataaagtctaaaatagtatttacccaaaaataaaaggccaattttttgtcgaaaataaaaaaaatgaaaatagttgaattatgtattctttttagttaatttcatgttatgtttcttcatggaaatgtacacaaatttagtaaattcaaacttaaaattatattaatatgtaaaaaaaaagccacaaaaataaaaaattaaaccaaactcatgaatccattttttttctctaaattgttaaacaattaacacaattaatatacaattttacaatcaaatctatcaataataatattcataaccaacaaacttttttttttccaaatcaaagaattaataagaacaaaaaatcaaaatcaatagtacttttttggacaatttttttccctatgattaaactacaatttcttttggtatgt

SEQ ID NO: 100540 - DNA, 586 bp, Cannabis sativa
ataaaaaaaaaaaaagtggagtgaacacaaggaagtgagaaaaaactataagacaaaaagtaatgtaaaaacaaaattatgaaagaaagtgataaaataaattaattttatttttcttttcaaaaaacacgtaaatgtttttttacataaaacatttttagatgaaaatcacatttgagaacaatatgctctaaagaaagaggttggggaaaataaatttatttttgggttactttaaaatatggaaaaacttattaaggttataataaatatgtcataaaaagtaatatcactaaatatagtattatcttgccaatcaaattaaaaatatggttttttttttaaagaaaaaaccatataaaatattaaaagaaaatctgaatttaaaatttgtaaaaaataaaaaataaaaacttaattgaaattgaattaccataaaaaatattaaaattcttttcatatttatttttttaaaaaaataaaacaaatgatactatagtgaccgccagagttgtcattcgtgctggaaaagtcaccggagtttattgtcggcacaggaaaaattgtcagagtagctgccggtgcc

SEQ ID NO: 100541 - DNA, 1351 bp, Cannabis sativa
aagtgttaccaaacaccacctatgtttttagtcacaagtaacattctgttgtgactaaaaatcatatttagtcacaaaaaatttatgttgtgattaaaaaattgtcactgaaagtagttgtttttcatagtgtctctaattaacatttctctatgatttttgaaaagcaagatgagtgagccaatgacagacggtggagctcgcagctgagggagttgacggtaagggcaaaggtcactgctaaacagagcttttggacgagtcgacaatggggacaaagcttcacacatttttctgagtttcatacatgctcaccatcagacaagtaaaggacagaggcctatgaggctttagagagcctccacttctatgacagtgataatgccaaatcatactccctcactttctatcaattacctatctagaatttcataatcacttatgaaccaagtgatttagttcatgggtatgagacatttaaaattttgttttgttttgaatatttacacttgggatttgaacctctacgtataagactttatttagtagagctttactaataatgccaaacaatttatggttgtttgtatcatggagcctgtgaatcgcttcccctccttaatagcagaacaatacgagagtttgaatatagaagacgaagaagaaacgggaattctgtatgaaggtggagatgaggaactgtcagatattgatgatagatgggtactagttggtcgctttcttacgaaaagatccatcgattttcaagcaatgcaaaacaagatggcggtcttatggcaaccgggtcgaggtatgtatgtcaaggaattggaacataatctctatttgtttcaattttatcatgaagtggatatcgagagagtaatggagggaagcccgtggacctttgatcctgtcccattgatatttgaacgccttaagcaaggtgaaaacccacggacagtcatgctcaataaactggaattctggattcaaattcacaatttgactacgggattcatgtccgatcgagtgattcgcgacttaggcaattatttgggtagctttgttaaatcagacccgaacaactttattggtgtttggagagattttttcagagttagagtaaagattaacattgacaaacctctcaaaaggaagaagaagcttgaaagaataggtgggattgtttgctatgctcaattcaaatatgaagacctatctaccttttgtttcatctgtggtattctaggccactctgaaagattttgtgaaaaactatttgacacccccctggatgaaatagaaaaaccttataatttggaattgaaagcggcaccaagaaggaaaa

SEQ ID NO: 100542 - DNA, 832 bp, Cannabis sativa
ctctctctctctctctctcgggttatttattttcttcttttcagttaccaattgctaaccagactgccgtaggttattgaaaacacgattcttaactttcttttcagtgaaccaagattgtgaattcttcctgaacaagaatacgaattgaaaatttatatactttcaactttagtgacactggaagtttgaagtgtggaaatatttttaactagtcatctgcaggttgttcccaatgaattgaatatggagtttggcctagaatagttttaagaattcatatcccaagcgtccgatataataattaactgacatgtgatcaaagagtgtcctatattagtcaattaagatgcaattcaaccaatcaatgtcaagtctttcttatttattttctgcataaaaagcttgcatctgcttgaccaagtggttcaattatcattgaccaatgttataatattgcaatttgactaaagagagactgttatatgagacagagagaaagagagatgctgctccaagctcaagctggctatcaagtgttaactggtcaattgggacttgcggaaaaatttaatggcatccaaaactaagcaccgccttcatatgctcttacttgcattattgtatataatggtttctttcttctctttggtagaaataactgatgcatgaaaaagtttcgttgctatatcagccatccaaaaccacgattccctttatatatcaattctttccttgctacgtaaagaaataaacagaaaatgcatcattggaaaatgacaagggatttgtggacccagtcaatagcgcaaacttcttctgcttctttttt

SEQ ID NO: 100543 - DNA, 1995 bp, Cannabis sativa
gggtcctggtttgggtctcaagtcgaggtttgggtcttgggtcctgagtcatgggtctcggtccccaattcaggtcagggtcctaggtcccagtttcggttagggtccctgtctgagtgcaggtcctagtctgtgttcagtacttgtacttgtctcgggtcttggcctggtctgggtctaggtcacagttcagttctcaggtcctaggtttgagtatcgggtcccgggtccctatctaagtccaggttctagtcccagtctaggttcaggtctcagtcctattcttggtataggtccgagtcttaatctcactacgggttagagtccttgttctagtacgagtcagagtctgggtcttgctctgggtctcagtccgtgtttgggttcaggtcttagttagggtttgggttttggtacgggtttgggttctggtccaagtcttaggtcatgggtcctgggttccaggttttaggtcacaggtcttggcgcaactcttggcccgagttcgggtctggttttgggtatcaatcccagtctaggtctagatttgtgtatagttctgcgtctagatttggttttgtgtcagggtccaattccttttcaaagatcccgatttcggttcttgttctgattttttgtctcggggccgagtctaggtttgggtcctagtctggaaatggttccaagatctagacactgactacgggttgattccaagccccgggtcgttggtcaagattcggatcccaatcttgggtcccggtctcgttccaattcagatcctgggtcccggtatgtgtctgtatttgggttcgggtctgggactaagatcggggtcgggtcttgtgtcccagtccaagtccttggtctccattctagttctaattttgactttggtccctaatctaagtctaggtcctgggtccaggtcaaagtctctaatcccggtctgggttcttggtccgggtccttggtctgggtctgggtccaagtccatgtctgggttttggttcgagttcgtgttccgagtctcgattcaagtttttatacgggtctgcgtcccggtctgggtctgggtctgggtcctagttagattccagtacccgaactcaaacccagttttgaactcgaacccaactcaagagtacaggtctgggtctaggttagggtctgggtgcgagtctaggtctggttttgagtccggtaatgggtcctaaatctaaacacttactacatgtctggtccaagcctcaggtctaaatcagggtcacggtctcagatcctagtctagttccactacgggtcccaggtcccgatctgggtccaaggtgagggtttgggtcttggtcgggtcttgggtctcggtcctagtttcgatgctcgtgtctctagtctaggtcccccatctaggtacgagtcctaggacccgatccgagtccaggacccagtcgtggttcaagtcttgagtcgagtcggggttcgggttctgatcttggtctaggtccaaatgtgggttcgagtttaggtctaggtttgggtttgagtaccgagttttgatctaggtctgggttctgtggcctaggacctggtcccccatccaggtctgggtccatgttcgggtttgggtcctagtcccagtttttattttgattcagtgtctgggttcaagtttgggtccgggtttgggtcgtgttcagagtcttggtctgagtcaaggtccgggtctggatctaggtccagatcccgatttgggtctaggttcgggtctgtatcctgggcctatatatactaccaacatttttcatttctaagacgctaaattgaatagtttcaagaggagactttgagtttgagagagaaagagattgagatgtaaagagaaaaatgagagattgggttttgttttgtatgaagaatcttttgtagatgaagaagattgagagttgaaacactttgagagatccaacacaaaatccttcacaactgtattatgca

SEQ ID NO: 100544 - DNA, 937 bp, Cannabis sativa
agatgccccctcaagatttgctgggcttggaacgaatgccctgacaaattgagctggggtggtggtagagaataggctttgttgactgttgctagttcattggatgctcctccaactcctgaaccaaatgcatgagaagtaccacactcgtttctctattgagatctaatttcttggaagatttcattcatctgttcttgttgctgtctattctgttcctcgtattcataaagtcacgtctcgagcgcaactatgtgattattgtctttactcatattcttttttctaaggcgtggggtctcagaaaattaggtttagctgacgccacgcaccatccctctgacacgtccagcttgctcatttgtccccaaggctaacattagtatgcccttctttccttccagcaccaatctgccctcctcaacttgcttgcaataatcaacatacatacatataatttaaattgattattaagaattaatatagcacaacactttaaaatgaattgataaatgaaacttacaattcaatcagttttctccttagtagggcttcgatctcactcttcttgttggtatgcattctcatccatattccccctctatcaaactcagtgagttggtggcccaactctttctacattttctacctttgcctttttcacagtatcacatcctgttctatggttgtaaatatttttagccctgatggcttgtgtttttgctctcttcttttcccacttaggagttaatctggatgcaacaaaactcttacattgtttctcatcgtagcaactgagataatgctttggagaatgttcaagatgttcaggggcttcatctttatatttgtagataagttggctggtcaattttgttctccaactcttgagtaactctctagctgtttttagaagccttagttcccccccccccca

SEQ ID NO: 100545 - DNA, 1719 bp, Cannabis sativa
tgcgatgcacccatttgtttgttaccacaatcatttctagtaaataaggtacaagaactcaagttttgttcttgacaaaagcacaaatttcagtttgcatagcagcaaaccacaaaggatcttttaaagtagccttgaggaatgtaggtttaagaaaggtcttggagatggcagtaagggcttttggtttgataatgccatattttgaccttgttgtcatcggatgtgtgttgttggaggctgttgtgggagggtgaatttgcaaactcgaaattagaactggggtgataaggggtggtggttcatgatcaatttctttgtgagcaacttgggtgctggtatcagctgcagatgctggtgctagttgacttgtggagggttcaacgtacaggctcatgtgtgggtaatgaggatgggggaatggatgagggaattgtttgagcgacaagagcagatgttatgattggaagtatttgagtgacaataggttctggttgattgattggagtaggtagtgtatatacaggttgagtgtttagggtactgttgtaactggtggttgggggttcaaagagagagttgtaggggaatttttgttcatcaaacttagctgttctagcaatatacacacaaccagaaggatgcatacacctgtagcctttgtgtgttgtgttataccctaaaaagatacattgagcagttctaaaagaaagtttatgactttgatatgttcttagaaggggatagcaagcacaaccaaacacttttaaaaaagagtaatttggtttttgattgaaaagtacctcattatgtgtgttatgttgcaagatgggtgttggtagcctgttgatgacataggtggctgagataacggcctcccaccaaaaactcaaaggcatttcagcttgtgcaagtaaggtaaggccaacatcgacaacatgtctgtgttttctttctgcacgaccctgttgttggtgtgtgtgatgacaagcgtgcctgaacttaactccaagatcctataacaatggttttaagggcctatattcaccccaagttagtttgaagagattttattttggtttgaaaaaaatctttcaacataggccttaaactgtctaaaaatggtagtgacttgattttttgttgtcatgggaaaaattcaagtatattttttgttgccaatttgacaggcttcacaaaaaaaaatgtaagcataatttaatttgaggactaagcctatttacaatagtttttaggattctagatgaggggtgactaagtctccaatgccaaagctgagagttgttggtagcagtttgtgtgttcttggtgaaattggaagctactcgtgtgccaagaatatgagagtttgcagcagtagtgggattaggcaagactttagagaaatgcaggttatacaaccctcctttaagagtaccccgaagaagtacttggcccgtagtcttgtccgataagacatgaatcagagtcaaaaagcaagattatgttattatctattgtaattttggaaatgcttaatttatttttggtaatagcaggagcataaagaatgtcttttaagattaaagaatcattaaaaacatttgttggaattgaagtgaaaccaattttagagatatgaatagtggatctattaccaactgtgattttggctttgcctttgtaatctgtagttgttaaaagctgctgcatgtccga

SEQ ID NO: 100546 - DNA, 1185 bp, Cannabis sativa
  modified_base (27)..(28): a, c, t, g, unknown or other
aagaaaagaaagaaaagaaaagaaaannaaaaaagaaaaaaaataaattttatttaatatttttaattatttttatttttttataatatttgaattattaatatatgtggaccactaaaaacgtgtcatgtgtacacttatgtacacgtgggcagtccatcatggcagttaacagagaattttggatggaaagggtaaatagctaacagaaagggggtttgggtagttatgccgccaaaattttagtttttgtagttaactattacaaactgtaaagttcaggtggttttgccgccaatatccctatattataattattaaatgattttgctaaaatatttaataaaataaattaattactaaataaaaaaagctatattataaaatgataaaaagttaaaaaatataagaataattatataaaacactaattttataaaaaaatttatatttatacatttaattttttttttatatttttacggtattctataaaaatacaagaaaataacaaaaaaaaatcacatgaaagtaatgcgaaaataacatcaaaacaacatacaaattaatatacaaataacaaaaaatcaacaataaaataacaggagtacaacataaaaatatataaaaagactgtattttatgtaaataaaatctaaaaactgtaaaaatatttaaaattccgtacataacatatttttgtaatttttttattgtctttgtatttttttgaaattattctaaaaatacatagccaaatgtaaaattatttatagttaaaattacatgaaatatagaatttataaaaaaaagttacaaaaatatggtatttataggtttgtcactcttctatggtattttttcacatttaagattttttatggtatttgatatgacagatttttgtaaacctaatatccaaactcgtatttcatgtttttgtttctagcttaattagttttatttttttctttagtttattttatatttacattgtaggatttctttctatttgtgacatttataccaaatactaactttttttcaaacattacatttataatttgacaaggaaatttttacatttataattacaatacttattttgatttttgtgtttttttgagcacctctattttactgtttcatttttttttcttattgttgtgttttgtcttttttttt

SEQ ID NO: 100547 - DNA, 1143 bp, Cannabis sativa
cactccgaatctgagctccttccgaccaatgtaaaaccgcatcttcaactcctcctgagcatcaaccttcatcttgtgcaacatcagttggtgaaataacacggaggagaatgtcagtggtactacattccaaaagttgccgaaacggctttcttttgccgtgttattcaaattgtactccttaaaccgagacttgatttttgcagaagttctagtgcctttatatgtcacgcggccagtaaaatgctcggatgctggaattatgagtatgtgagccatctgaaaaataaataacaaagcaatattactgtcaaaaaaattaaaaaagtggtcgacataacgtcgacatcatgtcgatattctgtcgacattatcaaacagcgagcaaccacataatttggtcgacaaaatatcaacattctgtcgacatgctgtcgacattatcaaacagcaatacaattgcgttattatgtcaacataatatcgatattttgtcgacattcagttgatattatcaaacatgaggcaagaacatggcattatcgacaacatatcgacatactatcaacatgatgtcgacaatccaagagaaatgatcaccctaactggtaaatcaaaattatcgacatcatgacaactggtcgacatgatcaaagttagctatcacattcagggacttaatcaaatattgacattctatcgacacacatacgatatcctatcgacatacaaaaacaacacagactaatggtcaaacagacatccaaataaatcgacatcctatcgataacactgtaaaaaacacagagaccattaaaacatatccaacatctacaacctatcacaagaaagagcacaaaatctaaaaaaaattctcctaatctcaacaacatgcgataattggcatccaaatctatgaaaaatttattttttttttcaaaaaaaaaacctttcctttgactgagcttggtggtggtggcagcggttcgtggtcgtggtggcgacggcctctgttcagtttcgacgaacacgggtcgtggtggcggcgacggttcgtggtggtttcgacggatctggttgggttccaatgtggtcatggtggtcgtggtggtttgggtcgaattcgagagagagagagagaga

SEQ ID NO: 100548 - DNA, 905 bp, Cannabis sativa
  modified_base (822)..(864): a, c, t, g, unknown or other
ctctctctctctctctcttagcctcacacgtgcacacatattcaagtgtgtgtgagattaaacaatcttgactcaattacaacgtctcatgagttgagtaccctgtaataactaaatttattcgtttaaataaggtctgatagccgactctattcctaaatgttgagattagcttggaagatcaaggtgtggattcttcaacagaaattcttagattggatgatcgttaattgtactaaaagatggcaaagaaataatgataggcttcaagaggtatcgtctttctatcattattctaggttaatttatatatattatgttgagatccttgggctcatggttcatatgggagaagaaatatttttttatcaaattttcttttgcttttataactctgatatgaatcataaaaacaaacaattgatatcagaactatcttcaaaattatatatatattaaataatgtgttggataattatgtatgtagtcatatattattttttgatgaatcaggaatttcattgcacaataaccttttatgttacaccctatggctcttcaaagagcaaacaactatacatcttactgtaaaaaaaaaacaagcaaactcttataaatcttgaaaccattgtaattctttttgatctatacattttggcattacacaagtaattctattttttatcaaccattttgtttcctgcaagagtgtttgcggttgtgtagtctcctgggactataacatttgattcctagcttgccaaatcttgtaaaccaagacagcaatgcatgctgtgtaaaaactgttggaattattttacnnnnnnnnnnnnnnnnnnnnnnnnnnnnnnnnnnnnnnnnnnnatatgaattctaaaacaatgaaactaaacacatataaagtt

SEQ ID NO: 100549 - DNA, 574 bp, Cannabis sativa
gtttaaacacacataaagtcataccatcattcaaactactatttaaaaattgagatcagaactcttgaatgtgattagagtatctatctttgatatatgataaaaatacagttaagaaaaatgaaatgtcttattaaacatcaacacaagtaattgtactagtattaattgtatcattctcaaggaaaaatatttacttgccatataatgagaaattgtaataatgagatttaagttagcaaatggtcatctataagtgactcctctcaagtaagaaagtaaatcgaagaagacattctccttgcaaggaattgtgagacctcccattgggtgatcaaatccgaattcatcttcttcttgacaaagcaactcttataatgaaggcttgtttaagaacgacacagtgattagtatatgttctatgatgatctaatcacatagctcaacagtgatggtattttcatgtatcattgtttttttaatagagaattgatacttttgtacacacacaaacaattatgagtacgtaaagagcgaaatttgttgcattaccggccatagggactcaaacata

SEQ ID NO: 100550 - DNA, 1045 bp, Cannabis sativa
aaatattaaatgggtccccgctggagcggggagaatcatccccgcccctaatcgcgagataaatccccatagagaaaatgtccgtccctagttgtatttgttcctgaaactatcttcacaccagagatttaaaaaacgaacattcggataatatgtatttccaaaattgtgggagcctttttcatttgatagtggcttataggacttgatatcactattaagatttcatttcaaaaaattgtaacaattaagataagttaaggaatagcttttttttgtatccattattcaaaaatacccccatattatatttcattaaaatatacccacttttgtgagtgagttacccaatatacccaaaccctctacttaaatttagcacataattaatttacgttaacataagaggtataatgggaacaccatctataaaagtaggtatatcttaaagaatataaaaataaaagtaaaaaattaaaagagataaaataaaatatatatacaatacaatttcctctttctaaatcatcactccaccaccctttgaaactaatttttatatgaattgcttactaaacatttgaggaacaatgtaatctgaatcacattataatttctcaagggttattgtgatttaagcattgttttaggtccgtcttagtacaaatagttcaaactctctacttaaacataaataagacttttcccaaatatgttagagccattaaaattggaatctgaacacttatcgtttggagcacccagacacccccgagccaactggtgatgcacctagcgctcattgtcaacctggggtacttccatccacaatattgaagaagtaacatgagcattttctttgagtccctccaaaacgaggaatcaagtattttaaccaaagaaacagatcaacctaaaggccaaaactgagatccggtgtctaggttaatgttgacggtgagaactcgtgaactaacatatggccaaaaaactaacttgagcttcaagttcagaaatggaatggagaagaagatgaaacacaaac

SEQ ID NO: 100551 - DNA, 679 bp, Cannabis sativa
  modified_base (65)..(81): a, c, t, g, unknown or other
cacattaaataagtgatgaaaatagttatgtctctttattgatatttaaatgatagagattacannnnnnnnnnnnnnnnnttagggcataaagcccaacataactgacgtctccccattgtaaggatatcaattgctccttattcttccaacctttttcttctttaaatgacctaggagattcttttcaataggtactccaaatattatgttcttgactttttctgtcactaccaatcatccttcaccaactggtcccctcatatgtactcttccagcattcttttatataatagtgagagcacagtgagtagatgctaatatttcactgttgtgttgatgcacaacatgaggacagagaatcttaaaagaatagaacatgtcgcaagtgcatgtgcacttttgcaagttcacttcactacccatctcaattgttcctcttgggtaaacattgaatgtatatggactagatgcatcgacatttaagaacatatatttcttaaaatgtaatgtaaagtcatcctccataagtggtgataaatatttcacacacttctctgcggtatccttccatatagaaaaccaagaatgaattgtgtacttgatgaattctacacaaatagtgattggtaggcctcttgctttcctagtcatgttgttgaagctctcagcaaggttt

SEQ ID NO: 100552 - DNA, 767 bp, Cannabis sativa
caccacctgcaaaccccagaagtgaatttaatatctctactcacagttgctatatattcacatttttttggtctgtatttgttctctccttacaagttacaagaacaatcagactaaacattgaataatccataatgaatggcatctatgacatgttttaaaattggatatttcgatagaggaaaatatgtaaacttacctctgcgagcagcgagtaaagcagcttcgttgacaatatttgcaagatcggcacctacaaaacctggggtaagggaagcaaccaagtcacatattagattcatatcttcttctagaggaacatatctcaaatggacagccaagatctttctccttccttcttcatccggttctcctacatatacttttctcgaaaatcggcctggcctgcaaagggctggatccaatgcttctggcctattagtcgctgcgataacaactaccttcatgtctgactcaaatccatccatttctgtcagcaactgcacaggcagcaaagttttagaattatggactagcagactagctatttataagattataatgtcaaagtagaaaccttagtaaacaagaaaaaggttcaaaattaatatgaggttagttatggttgataaactaaaaaaatcccagatgatgattaatggtttaaaggtcaaattactaacagttctgagaatgcatcaaactatgaatagcaatatgcataattagaaaacttaagagattgaaaagttaggctacctgattca

SEQ ID NO: 100553 - DNA, 1820 bp, Cannabis sativa
  modified_base (1700)..(1701): a, c, t, g, unknown or other
aatgtcaactaaatacttttttttatcccaatatatataaaccaatgaatagaataaaacctaagttattaaaaaaataataacaataataataaaaaaaaataagtaagtggttgccatttgccccattattataatagttgttatgatctcatgttgcatcacaacaacacgatttttcttcaacccataaaagattcaaccaatatatatttagatgttacataaatattaattattagaatattagtttaattctaatttctttatagtcaatattaattaattaagtagatatttaagggaattactgcatattgttaattttttttttaatttacgattttaattgcgatttaagttgtttggttggttgatcaatatataaattttaataaaaacattaaaaaagaaagtaattactctatatactatttttttaacttttttttctttcaaatttacgtttgggttttcaaaatggttgcagcgctagttgcaaaaaagattttcatacgattttttgttgcgatttagattgcaatgctagttacaataggagtttctatgtaaaattctataaaaatgtaaaaaaaaactgttttgaagtaaaaatgaaaaagacccttaaaaattaattatggttaatattattttagttatcaatttaaatttttattagtttaattaattgattgtaaaatattataataattaattatcatataaactttaataaaatatctcatatataaatatagagtatgaattcccaaattatttatatttattatttcataaacataataaaaagaaccagtgaaaagtgaaaacttagaaagttttccacatttccactaatcctttctcttttatttttgtagatatgaagatcaatatgttattggagatttgcatatgcacaattaatgttgttctattcatattatttggcatacgtgttaggattgttatgcatttaaatttattgattagtttaacacttgtatatatgacacactattaattagaaattatcacttcttctaaactcctaaaaatttctaattacataatagtcagttcgtttttagcacatttgggccaaagtcaatataattgccaaaggttagttgtaattactaaaagttagtaaattagaaagaaaaaaaaaagttaacaatatgcattaatcttaataaaattgtactcttgaaatttttattcttttcacttttttaaataaaattaaataaaattttttaaatttaattattttaatagttcgagaaaattttttaaccacttaaaaagttacggagacataatttagtatatgtcaaagttcagaaggtacaaatttaaaatagtctttttaatattgtaaattattcaaaaaattacaaaaaaaattgtaaaaaattctaaataactacattgctcattgtcatatatttttacttagattatttatattttagatgcagtaatattaacaagaataataataaagagatcgacattaggtttctatgtaatagtcctcgtagtcattactacattaaagaaaacaaatgagaaaacaagagttaattataataagagaatactataaaaagtattattagtgcttaatatctttttcagtatcatactgctatcagtataattaagtatcgagttttatataatttaagaanntaatttttaaaaaatatcgctaattaattgtaagacactacttataaaaaatattaaatactaccgatatctaataccaatctttttttataataaagtagtgcattttggcagtgatt

SEQ ID NO: 100554 - DNA, 666 bp, Cannabis sativa
tataaaatctaagtggaaatgtttcgacaatagtacatgcccaaacactattgttttacttatagtctgggactcaaataatttagcccagaaagcttgctttctatattgaatggaagatgtaaaatgtaacacaatttttttacttttattgagactaaaagtaaaaaaaatttatagtgagatttaattaaagtctacaactttaatgttgatgctcatagattgactaagcataccaattaagataaacaatgaacttctttagatgaaaaaacacctctcacctcttgtgtaacttttgttaccaatgtgattttaacatttatcggttaacctaaaaaaattccaactatatttattttggtttactagtttgcaagtttgaattgccaagatgaatatgaaaagctcaatttcgctccactaccaaataagttaggatgagaactacattggtgaggtaaacaaaattaacaagctaatttatcattgaattgttaatctttaaacaataataataaaatatgattcatattccatcattcttttttattccatcaatacttattaataataacatatagtccatgtattccagagataatatattatataatataaatggttcaattaattaagtaagatatccttggtccttaagtg

SEQ ID NO: 100555 - DNA, 888 bp, Cannabis sativa
tcaggaaaagatgactcttttgttggaggctctctttgacggtgttgaaaaaggtttttcaaaggtagtggccaaaaataaaaagtacattgctgtggctgctgctcaggaggagggatgtcagatgctactacttaaagctatagaagcatttttcaaaaggttgacatccagtttgatgaaagaagttgcactggttctaaaagaattgtacgatgctgacatcctcgaggaagagttcataattctgtggtttgaagaaggatctgaaggagccagcaaagactctcagatttggaaccttgctgaacccttcattaattggcttcggagtgctgagtcggaaactgaggatgaatgattgttttacttttctttgtgtctgagacttgaatttgtttagttttttctttgctgggcgccgagtcggaaactggatgaatggttgtgttttattttttcttttctgagacttgaattatttcgtgtgctgtgatgaaaccttaaatatctctgcttgttggggtacttgcaggcgcctctcatactattattaatgttgccgttgttttttttgttttttcttcttgttatgtctcgttgtgttcagagtttcttaggacacgtttggtgatcaaaatttgaatttaaagattgacaaaacaaatttttaagggctcgtttgttaaactaggcaatatagtcgctcttcgcgcagttaatttatttatttttttagtattataataaattaagaaacaaacttgcttcggttgtattttgtttagtgagatatcaaattttaatttttttttgatatattttttaataatatgagtaattattttttttatttttattcggaaagtaaatttaaatatatagtaa

SEQ ID NO: 100556 - DNA, 739 bp, Cannabis sativa
tggtaatatgggcaggtcaagtgatgtccaaactcagcaacacacagatgcaactatttctgaatcgacagctgatcctgtcaacacttcagctgctgatcatgacaccaaagctgttgtttcaatgcaccctatgattacaagagctaaggccggcatcttcaagccgaaaacttacctagctcagaccaagaaaatcagcaacaacagtgaacctcagtcgattgaggaagccttacaacacaaaggatggaataatgcgatgagttctgaagtctatgctttgatcaaaaatggtacctggaagttagtacctcggctgcctcatatgcacatcattgataataaatgggtttacaaggaaaaaaggaatgctgatggctcatttcagcgtcttaaagctcggttggtcgccaagggcttcactcaacgacctggggtagacttcagtgagacattcagccctgtcatcaaagctgccactgtccgaattgttttatccattgcagtagccaaagaatgggaggtgagacaacttgacatcaataacgccttcctaaatggccacattactgaagatatttacatgaagcaaccccgtggttttgaagacaaaagcaaaccgaatcatgtgtgcaaactaatcaaattgatctatggattgagacaagctccaagagcatggttcgacaaattgaaagccactctagtcagttggaaattcaaaaactccaagtca

SEQ ID NO: 100557 - DNA, 1236 bp, Cannabis sativa
  modified_base (612)..(615): a, c, t, g, unknown or other
  modified_base (822)..(835): a, c, t, g, unknown or other
accatgaaatgttgcgtttcatttaagtggggacttttgccagcgcaattaactacgccggcaaaagtttcctacaaaattttcccacacgttttcatttaggcgggaagttgaccgccaaaaaatttcaagacttttgccagcgcataaatgtgccgacaaaagtcaacacctgatgcaacgtgtcttttggtcaaatggtcactacttttgccggtgcaattacatgcaccggcaaaagtccccaccttcttttacgcgcacgtttttttactgagagggaaattgaccgcctttttttcacagtttttccggtgtattttagcgtcgaaaaaagtaaaaaaatattaaaaaaaaaaaagtaaataacttttgccagcgaacttgtagtacttcgctggcaatattcactattgccggcaaaatatggcggtaaacaaacttggttgacttcttttgccggcgcatttgttgactttcaccggcattgggtgacatttgccagcgcgattgagcaattgtgccgacaaaagtggacattcttgtagtgtaatatacacccctatcatctaacatataggttactttcataaatctttcttgattgtctcnnnntgttccttgtttgattacatcttagatggctcctactcaatagtaggagtctggttaaatttgtacacaagagtacatttaacctcttactattggttctcagggacatcttgttgtgacatattgtcttagtcttgaaactataagtttcttctagactaagtcatcaacatagaaatctagtattaacattaatgtaaaatactnnnnnnnnnnnnnntaatcattagagataccataaaatatttcatgaagattaagtatttttcccaagtcattcgaatagattttgcaaaattctcctattttatcctcaaaattttgataagttatttctatccatatgaatggttagatttactttctcagttgaattctaaagttcctatcatgatcataacataataatctttcactagtgtcatccaaataaagatgggcttagaattttaaaattctcccactcaaataaggtattgtgatactatgtccaagaactttattggtatcaatttctattactacagtaacatataaatgggaacaattacaagatcaagaataagttctaatagtttgctaatttgttcattatactatatccatgtctaatcaaaatat

SEQ ID NO: 100558 - DNA, 604 bp, Cannabis sativa
gacggcgtcgttttagcagtggcgcttgttttggagatttttcttgaggggaaaggaggagggtttctggttgtggtgagcttgtggcgcgtggtgagagtggtggagagcgcgtttgagttgagtgatgacgccattgaagcgcagatcaaaagcatcgttgcccagtttgagtcgttgagagaagagaatatgaggcttttggaggtgaatgaggaaaaggataagatgattgagaagcttgttcaagatttggaacggtgtcgaaaaccgctagagatggatcatatatcagctataacttttattgataactgaattcatagaaatcaaatgttcagatgatttggtacataagataagacaaattataagtatataagaaaaaataaaatgaaaaaaaaaaacttgatcgagtgttgcggtgtgaaatcaaatacatgttatacatgtaatttttctttgaaaagctgcacacaatttataaccataagttattttttttttgtgttgacaacaaaaggcagtcggtccctagttggaattgcttcattcaagattctccaaaagaaaatcgatatcctataaaataaaaaaaaaaaaa

SEQ ID NO: 100559 - DNA, 1000 bp, Cannabis sativa
agtaactatttttttcagctttggtcaattcttcttcaaagtgttccaaaccactcccacttaattttaaaccatttatacaccttataaataattaaattaattctccaacaactatatttttagtgactatcattcattcacatcgaaatccaattagtaatatctttgactaatttaagagtgataaatgtgaaaacgataattacacaatttatgatcatcatttctcaaaaatttgcaactcctttgtttatgattgtattaatataatgtaaatcctattgtttattactatttgataaattaataatttatcacacttaattatttgtaacttgattatttaatttaaatattatattatataaaataatataacactacgagtcaatatcaatattggtgcatttaagtattggatcccatataaataatgtaataacttttagggagtatcactaaccaattgcaaaatgacacatctaaaatgtggtagatactacttgtgcccaatagcaatgcagttttattaaaacataaaagtaattaagttctgatttttacggtgccactcatattttgttagctcaagtttgaggtggcgtttggttggaggtaatgaaatggaatggaaaagaaaaaaaattaggattttttttcagttttaaccaaaaaaaagtaataatattattacaaaaatacttccagctggccaaataaacaaatataaagcccaaataaaaataattacacaaatatcacttacacacaccttcaacctaggatctatacttcttgggaactatcgtgcaatcacgtagcaatccaacgcaaccgaaacaaaaattcaaccagattgagaaccactattaatttcggcgacttcacctaaagacgactagaatcaatcaaaacatggactgttttgaattcataaaaaaagtgtagaaaaactactacgaaacttaaattgaaccaaaaattcagtttaattggc

SEQ ID NO: 100560 - DNA, 520 bp, Cannabis sativa
ccgtttgggtccccaaggtcgtggctggcgtgaaagagaaggcgggttcaagtgagtgtgcttcatttgttgtcgttaatggtaatgaggttggtgtgaatttgaatcataggggaaagaagtcagagtctcttccctgcttgaagtcctcaaaattattaattaatcctgaagagccgttggtcaaaggtgggttgtgtactgatgatggaattttggaagttgggctgagtaaagacaagagtggtatgggccttggggtttttgggccgggtagtgatgttcctttgagtaataggcctaaaatgatatgtaatgtggattctgaaagtgagggtgttatggttggtgggccaggccgtgggaaagagttggaaaataaatgggctactgggtccattgatttagtgaggccgattgttattaaggaattaattggtaaggagaattttgagggtaatgatgggccacgtgggaatgggtgtgaattggtggatttggtgaataaaaataatacaca

SEQ ID NO: 100561 - DNA, 1285 bp, Cannabis sativa
ttaaacgtaaaaaaacgtaaaatgtattaaaatgtattttttttttttacaaaaaaatagtgcttaatgtaattatctctttaaaaaatgcctcatattttgaaaacaaaataccaaaaatacagaattccaaaaaaaaaaaaaaaatacaatacagagggttataaattttaggggtttttacatcacatactgaatttttttacttttttcttttttaacgtgggtcgatttttttctttcaaaaatactatatttttttatcaataatactatgtattttgtatagtactgtgtactgtgttaagtttttttttttttacttttttttgaatgggaatggatgatattattaattcaaatccgcaatcacaatcgatttgagagtactaggaagagtactctccgaaaaactacaatcataccaataacaagagccatgagccagagccaaacaatgggcagccttgttagcagatcgcttaacatgagaaacagttacattaaataaagaggacaataaaactttacaatcttttacaacgattccaaacattgaaggcatatcaatttgactttgcaaagcttgaacagcagtaaggcagtccgtctcgatcacaacatttgtcaagtttgagtcctttatccaactcaaggcttcttttatgctaattatttcagcgaaaggagcatttgagaagccattcgagtaggtagaaaaagccaaaatgacagccccattagagtcacgagcaatgaaacctgttccaaaagaattggtagcgtcaaatgtagctccatcgacattaattttggtcattccttcggctggtttggtccaggagtcgcagctgctgttgcaattggagttcaaatgtataggttcaaaccgcagactttgtgcagaaagccattgtccgagagtttggtgagctgtagaaactacatcagctgcagaactagcacgattattccaaatgagattgttgcgagctttccatatagaccaactgaccattaggatttctgctatataatctccaccatgccgagaccagtttgcaacaaaccagtcgaaaaaactggtgcaatttgaaggggagagagacacggctgatctgttccagcatgaaaccgagaatggacattcaataaacaggtggtaggtggtttcagggacatcattgcagaatacacaggtagcttctacaggtacatgtttaatccgaagttgaactcgagtggctagacaatcggttaaagctctccaagcaaaatgaagaac

SEQ ID NO: 100562 - DNA, 846 bp, Cannabis sativa
ctaagagtaattgattctttgaaaattataataataattattttttatttatttgaagagtaattggtttatattgtatgctttaacttcaagaatgttaatccaacaatatcttccaataaaaaaggtgcattatgtcctatatattgatagggagttcaatgtcttgaaattgaatatgagacaccgcattaaagctatttgcatttggggacgaaattaaaagataatatttttttttgaataataatacagtttcattaattcaaattatctaaaactaaagatacaattacagtagataaagtcccactaaaagtacaattagcctcaccaagaaaagattatgcaaaagcatgcgcaaccttattagcagatcgttaacaaaattaaaagaaatagcatcaaaatcatcaaccaaatccttacaatcagagagaatatagccataaagagaagctatatatttagacctttgtaaatcactaatgtcttgtaagcaattcgactttacaacaatacttatccacccattagctttaatccaacttaaagcttctttgattctaatagctttaactacatacgattgcaaagctcctaccttgtaatttaaagttttagcttgcgacaccaaactagctgctgtctgaaccaccaacccaactccaaaccgcctcttattagagaaaagtgcatcattaacattaactttgattgtaggaaattttgggggatccaatgctctaaatctgtcacattcgaaccattatcactagcaataacaatgttatttttttgagcatcacaccaatcattaacattagagaaaagtgcatcattaac

SEQ ID NO: 100563 - DNA, 1258 bp, Cannabis sativa
  modified_base (654)..(659): a, c, t, g, unknown or other
gtaaaataatttccaataattttttgatttaattaaacaccatgactatttttttaacatgatttatctaattttctaatactaattcactagtgatgtaccctttctgccacgcaccctaaaattaaaatagtaattaaatataaatattaaaaagtctattggtagacgtggatttaagcaatatcagttagcactgaacattttgagcgggttcgacccggacccgggcaacccgcccgaacccgaccaggtcaacctgcaaattttttttaaaaaaaagtattcgagcaggtcgggttcaacccggtaccgtttgggtgggttcgcgggttaagtttttaggaccaccgggtttcgggttgaacctgaacctgcccgccaacccgcatatttcatattatatatatatatattattacatattatatattaattaaaaaataaaaactaaaaactaaaaaactctaaacttctctttaccttttactatggatatggatgtattttgaaatattttaattttcacttttatcataattcataattatgaacatgaagatgaagttttgatttgataaacaagttttttgttggttggattgataatgcttcttttcttcaatagttgatttgatgaacaagttgttatannnnnnatgtttaatttaataaataaaaaataataaaagaaataattatttgaataaatattaattttttcaaagagctggccgagtttaccgagttgatcgggtcaacctgttgacccgatcaattcggccaactaaaacccgccaacccgacccttatttgggtctaggttcaatttcattttttcaaacccaaaactcgtaaacccaaaactcggtaaacccgcccaatgtttagccctaatagtagtgatataaataagtgttttccttacattcatgtagttcatatttaacaaaattaatatgggactcacttaatcataatataatttttatatttatgctacaataatattttgcaactgatctatactttttatatgaggatataatataattctatgaaatcattcacaaatttttagtaaaaattcatgataatttaatatgctaaaattattattaaataatttattacatgcaaatgtatacaataatgagctatgtgaatatatatatgggtattacccatgtatgggtattttattcttgaccattggatcaaatatctaatagttgatatttataatcattaattaaat

SEQ ID NO: 100564 - DNA, 1468 bp, Cannabis sativa
  modified_base (1272)..(1276): a, c, t, g, unknown or other
gttgggaaaaaatgtcactaccgtcttcatcaaaacctctttactagctctagataaaaaattaccatctcacccttggatctgtttcctcatcttaaaaaaagcccaacacgactaacttgttgcggctcatagtgcttttgccattcctagatggagcacacatgtgccttcataatattcttgttaaaaaaacagaagacttcgctatttgtcttcagatacgaagctaattcaaaactacgaagcaacgccatcatcttattagccttatcctccaacacagataactatcgtcaacaaagaatatactctaagtaactttaaagtatatctttacaattttttttatagttaagctaataataataatataaatatttataccttatgcacgtattaatattgtgttcaagcattatataatgaaattaattatgagaaaaacatcatatttttaatttcaaccccaaagatcaatattcaaaagtactacacaccttcctcctaacgtagtatcaatcaaacacactgatatttatatatatatagctaggtggctttatttattagaattatatattaattattagcttttaatttgtagcactttgaactttaacaaaacaacaacatcatcctagttttcattatatataattccattccattctttgtttttgttttatttttatgtataaaaataaatattttaatttgtaaaaaggaaaaagtataataaactttttattttgttctatcttattatatccgtggcacaaaattgaaagcaaacctacggccatgaagagctttcaaagaggagaacgcacgtggatgcatgcaatatatatggaattgaatccaataatataattaaatatatttttatttatttataataagataaaataaatatatataagaagatgctatccaataaaagagaaaaagaataaagctgcctgttggatatatgccctattccccaatcaattttttagaaatattaaattattaaaaatatatatattctacgtactatatacaattaatatttttatatactattattagattctaaaattggaaagatcaaattttctatctttccataattggtaagttcctaacgaaagtaatatttcttattttaattattttctaaacatttatgtggtgtttgattgaaagaaataaaaacataaaaataataatgagaatggtaataggagtaccaataataaaaatgaaatagaataaaatttaaannnnntaaaaaaaaattaataaaaaaaatcaataaattttttcaaatctttctattttaaattatattagaatgacattggaattgaaaggctgctgataaagttggtggtgatattcagatgtgggtcaagaagaaggatatatcaaatcctctattggtttggatcgaattcttgattgagtgtttaatcgtggg

SEQ ID NO: 100565 - DNA, 1079 bp, Cannabis sativa
aaaaattcatggtctattttgtcatttaacaaaacagaaggtctaatctgtaatttttgcaaacacagggtccaaaatagtatttacccttaatataatcaaattagcttttataatatatattgaccgagatttttaaaactgaaaaaataaaataaataaatttaagaaataagtaaattaaagaagaagagaccaagaattttacatggttcgagtgttaatgaactttagtctacaagtcaatattattatcgagctaaaaaagttttaaaatatttcttattggtatttttgtcttagttgaagaatcttaattcttaattattctcctaagaatttaatatccaaccatttgtatgaaggggtaatgttctatgtatataggagaaccatgtatgggcacaccatgggtcttaaaagtgtcaaataggtctttaatggggtaaaatataatatttattgactttcggctaattgagttaggcccaattcacgaggtgaagattgtccgtacaaggagggaccatttgaggatgtcaagtgtcatgtgcagttatgtctgcaccaacaatgtcagacaatatggcgttggaacaaaagggttacattctaattttaacagcttgcgcacccacgagttcgaagtaggggacaagctctgtcatgtgggacttggtgtctggagagttccgcatagggtgatgtctagaagccttctgagtgcctctccgattgcccatatccgaatagcaccatgagggtattcggattggtcctagtgaactctttgtcttttgagctaacacgacatctttcggactaaaagtagtccgaccttgtcatgttggtgagctggactcaagttcggatctggatactatagcatcactttaccaatgggctagatgattaacctgattgggcccaagtttaggcctatatttgaccaatattaggctttggaattatacacatcatcattctcaaaatacaaaaaacaatattaataaaaaaatcttttataatatttattagttagtttgtttactattacatagtttttgtacaattttgtt

SEQ ID NO: 100566 - DNA, 809 bp, Cannabis sativa
tattttgattattgtaatttttattagtttttaatgaatattttaaatataaatataaattaatttttaattacaatttttttaaaaaataaataccaatgggtgcgttccttgtggtgcccactgctatagctaacaactttcaacatttcaagtaggcactacatctgtcgtgcatttgttttggctgttggtacgataccatatgtggtgtcggttgtaaaatattagcacgaacctattggcccgaccaaaagggcacgacacgtcgtgccaatctaaagataggcactaaataatgagtttgttggcactaatttagttgtgccaatacccatttattcttgtagtgatatgtcttatctaaaaattctattgaagattttaatacatgttttaagttatataaatttaaaattatgcatattatatgaaaaatatttttgtatgaaataaaaataggtaagtaaattattatttgaaaattaaaaaaacttgctttgttataattaacttaatcctataagacacgtgtacacatatgtgatttataaccatgtaagcacactccatgttgttcaatttgatcctatatgagaaatggcataatatataatagaagtgtagtaatgagtagctaaaaatactagagatatatatagattgcctaacccattacaataatatctactatacattgactattgagggggtgtgtactaggggtgttcataaaatagccgatccaatccaatccgtacgattcaattcaatccaatccaatctgtaaagtgcggatatccgcactt

SEQ ID NO: 100567 - DNA, 610 bp, Cannabis sativa
agccaagtccagtgccttgaaaacaataaccaccaccaacaatctacagaatcaggtggatacagccaaaaagaaggctgaagtcacgagggcggagctgggcgaggtgaacaagaaacttttggccgccaacaagacagttgaggacgtcaaacttggaagacaaacttggtggaccaggttttggacacttcttcgcacgttaacctaagagaagacaaacatggaagaggacgtcaaatccaggcaaaacaaggaggaagttcttcggaatgaggtcgaaattttggagacaaccaccctggaggttttccatgacttttggaaggcaaacctagaggggaactttgattaccttggttcaaccaaggaggcatatcttagttattgtgtggcccaataaggaaaatcttgaggtagccaaccccacagctccaactgaccaaaacactgagcccctaaccaccaatgaccaagttaatctgtataaacaaccagggacttcgaccgtgtgaaactttcttttatttttttaatcggcccatgggcctttttttaatacaatatggtcgaccaaacaaccttaaaacgtggtaatacttcattttat

SEQ ID NO: 100568 - DNA, 654 bp, Cannabis sativa
atgttgtttgaccaaaaaaatgcagattggatcgatgaacaaccctaatctcaaaggcatcgtcaagattttcgattatttttattttttacattattaaaataataatttttgaacacatatatgcaatatactatacataaataaaatattattaaaataaatttagagaatgcattgttcattctttacatgtagagcaagttacattagtttgagtgcattttctattgtacatatatgattttaaagaagctcgtgaaagcctttttataacatttagttacaaatttcgagaataaactattgtgagtgctctgatctcgtgtcaaaattctaaaagcctcaattgttgtatactcactaaatagtatttggtagactaaacctcgttaatatcccaaccacgtaaaattattgtctctaaatactttaatcttttcttcattgttattatataaatttattggcaaacaggataaatttataggtgaaatcaaataactacaccattataaaactaattagacaaaagaaaattcagaatgtcgaaagtcgtagttgtgttgggttcgcgtgtgatcaatttttaattttaatttttttatttcttcttttgatgtttgtatgaaagagtgtttttttttttttttt

SEQ ID NO: 100569 - DNA, 1273 bp, Cannabis sativa
tacaaatattcaaactatgctaatattttacaaaatttattttttatacaaaaaatagttaattttctattaattattttcagtaattttaaatactttaggtaaaaaaaattatataattaactacataataattaatgtatattctaattaagatgtaagttttttcaaacacaaattttattttacaccgtataataaataatgtaaattaatgaactaattaattaaaattattcttttgtttaattttggtggagaacatgtttgaacgatggtagtggaagattaggagatgaataatgagaataaaaacaaaaatcatacaattattgttattattattattaattaaataattaatttgtttgtatacagtcaaagtcaacggtctcatctggaaaaagggtcatggtctttacattccagtcatcaaaaaggaccatatgatataaaggaatctaccaattttaaattaaaaaataaataaaaagttggcataaattgcatgcttatatagttaattaatgaattaaaattatgttctaaaaaagagtgcagggattaattcatttgttaataagattaatgtattaattaattagacaattatgtatcattaatttatggattacttaattaaacaaaaagattattgataaattaattctacaaattaaaaattaaaaaaaaaatactaggaaaatatataccaacatgcaacatagaacacactcaaaaattaacacataaacaattcaaaaaataataagattattttttaacaaagaaaaatgatatgtatatatatatatataatttggcagttacctcataaaaaaaatcttacctttaagccaatttgcttgatcagaatagctatcggtttttttttttttaattaagtttgagatttcttaagaaatcatgtatattattggactaaattaattagtgaccacagtattaatcaaattaggcatctttcaaaaactaattaacatgataatatatattaatggagaaataaataaccaattaattaattgaaaattttacatatagtagaccaaaaatttttttaaaaaaattatagatcagaaaaaataaaaaattatattttagttgttttatagtttatttataattgtcatggggttattttttattgttttatagttgtcctgagaggttgattaattttttcatttttttagttgtttttttttatttttttctgattaaagtgtatttttataattttaaatatttt

SEQ ID NO: 100570 - DNA, 714 bp, Cannabis sativa
tttttttttttttttttgtgtttcgtatctagtaatgaaaaacagattatatatattgactctgcaaattttgaacaagatacgaattgtaaaatttaacatattttatagtagttcgacctttgtaatttgattatagagaaatttgtgttttgaaaggaatttgagcaatataaaaaattgcaaataattacttagtaagtattcaaagaatataatataaaattatatgcgagtattataaataaaataaaattgacacaaaaaatataatggttcaacaaaggctcaacttgcccagtaagagtaattcccttgttctggatttttatccaaatcagtccccttcaaaaggaggtcgattcacctacttataggataataggtgacgattacaacaatgtggtcaaaatgagactattacaactataattggcatatttatttacaccagttttaaagaaaatgtaacgtctatggtgcttggtgcttcaatgtggtcatgttttttgtttggtgtgttcgcatattttctattgataccgcagttttttgaaatatgtgaggtcccttatttagtaccacaagatctctactcatggggaaggaaaaattgttgggttttgtaccctaaataaaaccctttagaatctgattagtaatcaatataagaaatttaaagtgatttatgtttgcatgaattttacatgttaa

SEQ ID NO: 100571 - DNA, 698 bp, Cannabis sativa
tttatacatttagttaaaaaaaattattaaatttttacggcttataactcaaaatgctattaatcttaattattatttttaattccaatattacctcaaatttgagcaactttattaatttttcatagttgggtttacccaatctaaagtaaatattttcactaaggttattctactgcaccaaatctgaaacagaaacgttgaaacactatttgcttcagcttcttcttaccattttcaatttttggtttttatatattttttcttttttagggttaaaaaaaaccactaatagaaatgtaataaactttgaagacataagaggcacaaattagaacctttgacatgattaatctttcccttaattataaccatcaatatataagtcctctcttgttaccactggtctcagattagggtggacatggccggctctaacatcctcacttaagaccggaggcttgggcagaagagagtcaagagacaatacttggcctggtgacattgccaactgagatgatactattggggtatttgaaattgaaatcaagtctagacatggttcctctgttgattatacaaactaaaagcccaaaataaaaacaacagaaaataaggtctgatgataacaacagtcactaaaacttcaaacagaaggaacgacactagtatcactgatggattcacgccaagcatac

SEQ ID NO: 100572 - DNA, 1490 bp, Cannabis sativa
atccaattacatttatatatattaaaaattatttatataataaaaaatattcaaaaatataataaatatttaatatatttttattagattttttttttatgtttaatttgtaacaattgattgtttagtgtatttattttcatgatattttgttctattttattacttagaaatgttattgttttaattattaaaaacttttagttacaatacacttgtaagaatagtatatttatgaagtattaaatttaaataaaaagtgatacttaatttttttaacatatttttctttatatttttaagctaatattgaaatttaggtgtataattggatatccaattaaaaaaccaatccaatccattggattagattggattttgatgtctaattggattggatcggatgatgattttccaaatccaattactaattggattggatcagatgaagaaaaaaaggttggattggatcggatcggatcgaatgcccacccctagacttttctactattttggtctataattatcaaattaaaaattttcaaattgaatttttaaaaaagcaatatttttattagtgggactatagcctccacattagaattaatgggtctgtccctaggatatcagtttatattaatagtacatattaaaaatgaataaaatatattaaaaaaatagagtttggtaatgtattttaaaaaagttaatgtatggtgtaatgtaaaaatatgttgtaaaataaaaaaaaataaaaaaataaaaaaaaagtagaattttggtgatatattttaagaaacagagtaaaaaagttgttgggagtattaaaagcttgagaggattaatttttgaaatttggttttcaatttttatcacttatgtgacttagaacttttgaacgttgaactattttctagtgattgggtcgcaactatttatcccgatttaaaattttctattctactagcatgtattctaatttttattttagtaaaaataggataaaatacccttaaaattagaataaaaaactcaaattatataattactttttttgataaaaaaataaaaggtaaaacttcattacataatcaagtcattcatcattacaaaaatgaactcgaaaggagcattgcccacgagcaaatacgatcagaaataaaaaaatatagttctccctcgaatcagtagtgagccatattgcttttatggtacatgaacttcaaataacttggacgacaaaaaataatctgactctacctcaattttgcacaacctgcgatgaagaatagtgcgttacataagattattttctatgtgatttgggataatacattgaatatacttaggtgatgtttggttagagacaatgaaatgaaatgaaatggaattaatgaaaataaaataattttcattccattcatttttgtttagttgcattttagtggaatgactgtttcattttaaaatgaaaagaatgactattccaa

SEQ ID NO: 100573 - DNA, 1208 bp, Cannabis sativa
ttaatagaatcatgatttttcacctcctcacttaatctggatttttttttttttttttgaaccgaattagtattacaattttcttgaaaattcaaaaccaagccagataattaaatgctaacttcaaaaccatggtgtattttacaattgttatgtgtttttttaagtattgttcctttttggtttaaggtaggtttctaacctttgcaaagttcacaaacaatactaaatggatatcaatattctacctagcacaataacaaacatgtaactattagtaagaattcaaaaattacgattgaaacagaaagttataaacgaatcgaattaactagattattgacaccaaattcatttgttcccgcggtctcaaagggtttggactagatttgagatttgaagccacaattccggatttaactctatgaaaaaccaataaaaggagagcaactttccttgtaagtgtactcacactcatgagctaaaagctaatatatatgtaaatgtaaaatatgaagaaaatttgttataaagaaaaattaattggcaccatcaaatgagctaaaatcacaaaatttaaaagatatgaattttcattcttcaaatcatctcaataattactcttttgtactttttataatttgaagccttttatttatagatttaaaatgtaatatttaaacaataatatataaaaaaaaaataatgtatggcataatattatagtttgatgaggtaataaaatagcaactaaagctagtttagtgatgagggagggatggaaaaaaaagaacgaagtcattggttcgaatctaggatcttgaagctattaaatattaactcattgtaaaatactattacgttatactaaaaaaaataatgtaataaaataaaagtacaatgacacacaaatatgatacacatatgtgataagttattttaattaattatttttatgatgtatcttgcttatcaatttatgtgtgtccatatcgttactcataaataaagataaatacaattttgataaggtaatatctgagtgctctaataaaggttagaactcagcaaagttcatgttattcaaacatgttaggttctcaaacacaccattatttctttctttgttaattggtaatttttttcaaagaatgttatgttccacaataatagtaaaaaaatgtaccaaaaccaaactataacaactc

SEQ ID NO: 100574 - DNA, 525 bp, Cannabis sativa
ttctgccaaagtgtaggatactccttcttggtttttaaacttcttcattattttgctttcatattttccatgcttttttctagccatgttactttcatttcgtgcaaacatgtctcagaaaatgcttgaggctttgaagaagagagtgggaggaagctcgggcttatctcctccggctataccacgtccagagagaagacaccagcaaaggtgatcattgacctctccgaagagcaaacccttatggaccttcctatctcaaaagtgactaagtcaaaggattctcgaggaggtagctcagacaggccagagtagtcgaaaggcgggtccaaactgatcaaggcccctgcgtcacctctggtactgcacctacagaccaaaagaggcaaagaaatgctcacccactacgtgactaggttggtgcctgaggtgaacgagcagctggctggggcagacaatgacctttctctggagctggtgatgggaggagtcctaaaggattttacaagggtaagtctttcctga

SEQ ID NO: 100575 - DNA, 1114 bp, Cannabis sativa
gctagtttcttcaatctggccgatagaggcctctgaagcgctatcttaggtggccttgctacaaacaactccttgtctcgagcaatcaggtcctcgctaagagcagtatccatatacgtgaagttgcccttgggattttttatgtagcactcataaaatgtctcgatggacaggtttgcatattgatccttaagagtctcctaagcctatagggaagcatcaagctcttcttacttttccttttaagtcttctccgcaagatctaactccttcttcaacttggcatttcttgccgtcaaattagtcacctcttgattgtggtggctaagcagctcgcccacaccttctagtggtccttcacctccctcaaccttttctcttccaactccagatcgaccttcaccttttcaagctcaatgccctccgtcttaaggttgacaccttgctccctaagttgggtatccttcttggcaagctcagcgtcttttttctcaatgtccttcctaaaggctactgcagagcccttgaccctagcattggtatggccaagcttcaaaaaagcttgatatacaaaagaaacaaaataaataaggttgcacagtgcatgaagtaaagaaccaggtaagtattaaaaaaaacttatagatgccacatctttcatggtgctggtcgtcagatagtgaaaggagacaacatatctagcccatggagctacttatcagcatctgaaagacacttgcccgtgtatttttaggaaacctctttggccttgtcagccttgctagaagaggttgcctagctatgcctttggctgccctaacccggtgccttgggaggaagaggtgttgcctcaggtgaaggatcccaaatcatggactggttgatcggaagtggaggaaaagtggtctaagtcacatctgaggtagcccctactcagaaaaccttgggttgtgaccgaccagctcaagggctgcttgattttccctttagaaggtattgaatcctggaagccatgtctgcaaaagaaaagcaataaagtcagtatacacgttataaacaccaaaagcaagtaatggtagaagaattactcccaatagtttcctcaagataatct

SEQ ID NO: 100576 - DNA, 772 bp, Cannabis sativa
gtaataatgatatctttacctagcaatacaattctcgtcactgtagtataattttacaaattttcccactattcttctatattgtaggctttgccacttttactgtgtttatttgtctctgaaaatgctcttaccaacaccttcatgaaaaagttttagcggttgtctcttctgaaatacctttcccatttcttgaggtggctgtgattttcaaattcatgtttccttttgaatttgttataatttttcagtaatatttttgttcaacaattcttctgcatataacttgaacttgttttctgtgtaatttttgacatgttatggacaaggtaaatgaaaaaaaaaaagagtcccaatacaaatctctttacaagaagatgatcaatacaggcatgtctaaactttacaagaagctccaatagaaaattatttaactcttctgctaaaattctaattaaattctaactataattaagtagcctcctaatagagtaattcataagagcttcattttttactgagcaaggactttgacagcaaaacgtcataacaaatgacccttaaacaggtaaggatcaaacccaatagaaatcaccacatcgatgaaccaaaaaattagatccaaacctttgacaaagcaaactaaacaaaaaggcaaaacacaacaaaagcaaagaactattacagcaacagaaaataagtacttacaatctttgataaaagccccacacagaaaatatgtgcataaaagtatcattttgaaaaaatatta

SEQ ID NO: 100577 - DNA, 660 bp, Cannabis sativa
ctcaacaatggtgaaattttcatgttgaggttattttttttttttgttgcttggaaatggtttattgtggtatgtttaggtgatctggagcttagtttgaagtttagggtcgttttgagtcaatgttgaaactctttgtttttttggcgaggattttctatgtagaaacagtctaccattttaatggcagagacccagaaaaatgacttgttgtttttactaaaatggcatgccgttttttaggcaattttcctgtaatgtcatttttttgtcttttcttgatatatagggcattgccatgctatttatcgataggcaaaattctagttttttagtttaggtcctcaaaaaggtttagtaagttctttacttgatttatgagattgtgacataaggccttcgttcagcgcatgaatttttattcaggttgacccgtgcacttgaatcaggaaacggggtgagataagtataaaacgtgtatatgtatatgtgtatatatgtaattgcatgatatgttatgtgattcatatactaccaacactagtacggtaacagtattaactgtattggtacattatatgatgttcaaagtgtacgattcggtgttaccaacactagtatagggataagtacatagtgcatgtggtacaacattcagta

SEQ ID NO: 100578 - DNA, 1271 bp, Cannabis sativa
tactggctggtttcaccatgaagatatcccttaggtgctgggaataaacccaaaccgggagcgagaagatatcatcggttggagcttcactccaaatggtcaatatacagtggccagcggctacaagcttcggtttagtgatcctcaggtggctgaatgttcggacaagtctatccttaagaagtggtggaatttcatttggagttctaagttaactctaaaaatgaagaacattatttggagtcttttccaccactggattcctgtcaaaaccgagctaacgaagagaggtatggccttaaatctttactgtgatcagtgtaatgtttatgttgaagacatttgtcatgctctctggtattgtcctaagactcaagatctttggaagcacttcggttttctccatcttttcctgcctaacattggtaaagcccctgatttcctatttatcatgaaggatcggtgttctaaggagacgtttatcctttttcttggtgttacttggttaatatggcaccgtagaaataaatgcatctttcaacagaaaaactttgataacaaagtttggatagaatgggcctcgaacttgattgatttccagcttcaaaccgattctactcctcctcttcctcctctgaaaaagtctccggttagctggtctcctcctccctcgggcaccttcatgatcaacgcagatgtttctctaattgtgggacaaccaggttgtggtttaggggtggttattcgagatcatttgggagctgttgtggtggctgaaactatttttatcccaagttgtctctcgttcaatatggcggagtctcttgctattcgatcgggtttgaaacttgcggatcgttggtctctttctactatctgcatctcgtcggattgccagtctgttattcatgctttaaatggggataatcattccattacagattggggtctcgtggtgaaggattgtattaaggccaaggaaaattttaattttgtttcttttttattctcccctagacagtggaataaagtggctaattgtttagctacttgggctcgattgttcaagacctctaaggtttggacttcgtcgatgccgttgtgtgcagctgctgttttagaagcagatttgccttgttgtgttgggctgtaactctgattttgttttcaaaaaaaaaaaaaaatagattgtgatcttaaaaccaaataacaagttataaaagtatggcattttatatatattttttttatgagactttacttctaatgca

SEQ ID NO: 100579 - DNA, 716 bp, Cannabis sativa
  modified_base (35)..(57): a, c, t, g, unknown or other
accatgcaatataaaatgttatttttgatctttannnnnnnnnnnnnnnnnnnnnnntgaaatgggttttatttaaggcacaaaacccaacaaacccgtgctcagatgttgcaggtgatgttgttgtaccttgatatgtactcatccgcgtgcttgccttgcccttttgattctttttctaacaacttactaagtgttgctcatttcattgtgggacgttacgagttattgcaataatcaagtgtagggcatgcatgccaacttgcaagcaagttgagtggtcgtcatagcatccatgtcgagttccgaccttgtggttgagttcccttgtgggcgagtggttgtggccaagttgttatgggcaagtggcccttgttgaatggatgccaagtcaccattggcgcaagcatattgaatggatcttgtcgcatggatgtcaagtgactcttggtgcatgcatgtcgagtgactcttgttgcatgcatgtcgagtgaccctcattgcatgcctgccgagtttcccttagtgtaagcatgtccaatgggtctggttgtatgcatgtcgagtgactcttatcgcttgcatgtcgagtgactctcgttgcatggttctggtatttatggtccatatcaaagttataaaagtggaagcagaatttgataaaaatagtttttatctaatatgaaccataagcttaaggatctcaacataatgta

SEQ ID NO: 100580 - DNA, 1234 bp, Cannabis sativa
ggatcttaccgcgggcattacaccaaaaacttgtccttcccagtgaggaagaaaccgaccatgatcaaatacgatatggtaagtttctgttgaggcattttcgccagtaatcttcttaaccgagagaatggttgctgtatgaggtgcagaacttgtgtatagattcgtgggaggcctcaaggcatgttcgagcgataaaggagccacaggaaacttctcgccgcctacaacttttcgaggagtattgacaactcttgttggattccttagtccattaatataataattagtctccaagatgttgaaaggcagagatgatgcctttgagcttacataactagtttgcaacaaaataaataatactacaaccttgaagaaaaaacatgttttgagcttagcctgcatatgaatgaaatttatgagagagagatcatgagattttaatttggttaaacaaatttatgaaaagaatagaaagtaactaattatgaagaagaccaacttgagagtagtatgtggaagccatggctgagagatttgaatggagagaactaataatttgagtgagttaaaatgtgatcactataatacatatttaaagacaacggctaaaagcactagtagtgtctaaaattatcatatattgttattcactataaaaaaaattattttagtgataactttttagtcataatataattttcttttactaaatgtaactcacttgtaactaaaatatagtatttagacacaatatgttactaatttagttttaattgcaacaaatattgtaattaaaaatacatttagtcacaacaagtaatatttgttgctaatatatttatatagctacgggccttgatttaaaattagttacaaatttggttgtgactaaaagtaagaatttttttagtattaagtatcaaatcatcccatttattttaatttaaatatatatatatatatatttatataaaatagttatgcatgatgatcataaggctgttatctcataattcactaaaaaaaaattatttttaatcacaacaaaacttgtgactgaaagtaaaataattatgactaattataaaattagcattctttgtaattaaaaggtttgtaactaaatgtatcaatcacaacattgtggctaaaatattattagtaaagattactattttttgtaatgatgattaatgcctatagtaataaaggtacattgaataatgtaata

SEQ ID NO: 100581 - DNA, 667 bp, Cannabis sativa
tggtgcaaacaactctaacaaaggaggacaaggtggtgctgctgctttcattgcaactcctgaaatggttgatgacacagcttggtatgccgatagtggtgctaataatcacatcacagccgatgctaatcaaatgacccaaaagaatgagtacaatggtaaggagacattgacagtgggtaatggttctaaactcagcataaatcatgttggttctctttatttaccctcttgtacttcaaataccttgctacttaaagatgttctgcatgtacccgagattacgaaaaatttaattagtatatcaaagctaacccacgataataatgtctcggttgaatttttctctgatttctttgttttgaaggacatggtaacaaggaaggtgctcctccaagggaagcttaaggaagggctgtatcagtttgaggagttgctgtcaaagaaatcaaaacttccagccaccagtgcctcttcatcaaagaaaaagtcccatgtttcaaagtctgctttaatttctactgttaaatctgtgtcaatcaaggataagtggcacaagagacttggccacccatccaatagagtcctaaatgttgtcttgagtcatgttaatgttaaatctaatttcaatgaaaagcatagcttctgtgaagcatgccaatttggc

SEQ ID NO: 100582 - DNA, 862 bp, Cannabis sativa
gcctgcgttgtaaattcacgagtgattctaatcacttcgtcaaaaaaatatatataaaatttggaaaaaatattagtatttggtgtaaattttcttattattaaaccatcatataataaatttactccatatactattttttttttaaatttataatttgggttgctctagtaatttttacgtgggttgctatatatgtggttgttctatgtaaaattccgtaaaaataaaaataaaataaaaaagctgcatataaattcaatattttaacaattatatattttttttttttgaaaggttaacaattatatattcaattatacgatatttatcatcacttcttttatatgttatttttattcaaacccttcaaccaatttccataaatataggtttacgtaattaatatatatatatatatttatacaattaaatagttcacaaaaccgtttctgcattaattcagcactccgaccaaactatacacataaaatatatacacaattcaatatttttttctcgaaaaataaaaataaataataaaaaaatcatgaatcattttaagaatatataaattcagaagagattgtagggtttatgtatacctgaaaatgttaatgagtgctaatcggcaatggttggagacaaagccacaaattttcaatattattagcgatgaattattattagaggtattacttcgtcttccagattttaagtctataatagattgtgcttgtgtatgcaaacattggttctcagttttatattgttctagagtatatttcagtcgcaaattcaatcactatcaccgtcaaaaaagacttaataattctttcgactcacctcttccatttgccct

SEQ ID NO: 100583 - DNA, 995 bp, Cannabis sativa
acatgggctactccactcatagccaattactccactcatagccaattggttttgtccactcatagccaattggttttgactcatagccaattggttttgagatggaaccccatgattctcaacagttaatgaaatttgggggagaagattttggaggaatagataaagaaggtaacaacatatgctctgttcatgattttaactttcaagaatgaagctcatcttgtcgtgtgttgcccctaatgctctgtttcaagaatgaagctcatctaacgaaaactattgaaaattagatgtcaatattgataattaactactacatgataaactttataaaagagtaatttgagtttagagctacaaatttaaaataagatcatagttattagtcttaaaaactaaaatagtttcgtaaagcagtaccaaacaacacaaagattaaattgtttagaaattagaagtgataaaagttcatgagaaatactattgaatgcaaaagaatgtgaccctcaccaactagtaagtcagaattaacaatatgcatattctggacagaatcttgatagctcccaacaccatgcttagtttcgtggtttacctacacaaacagagtaactaatgaactacaaaagcccactaaataagctaaaactaacccaacttacttatcataacaataagtatcaaacatattatataaataataacatcaaggagcctttatgacagtcaggtttgagtgctacaacctctagggtaattctaaaactattataaatcttaatgacgatgtcctagggccaccagcaaccactcccgtggccaagagcaccacccaccccgaccaaaactccattgatgttagcggtgtgctactgatatgtcaagcaaagactttcatctaaaacttttttcagatgctgattgggcctcttgcagtgacactagaaggtctgtttctggctactgtgtttttcttggcagatctctcatct

SEQ ID NO: 100584 - DNA, 934 bp, Cannabis sativa
ggggtattttcgcaaaaatatagtttttctttttatatgtttggtatccatgaaatttttttaaggaaaatttttcaagttttcggcatctgaaaacaatatgatattaaaaggaaaaaaaaatacatgtgtatgaataaaatatattatttttactttgagtactgaaaaagatcttggtaagtacatatatatatatgtaatgtttcaaaaagaaaagtacatatatgtaaataatatattattaaggggtattttggcaaaaaatacagccctttcatttttttaaggaaaatagccttttcttgtcatatatattttgcatattatataatattagaaaattttatggtgtatggatacttcattatctgttttggcatttaattttttttaaagggcaggttcaaacaatttgctatataatcttttttttttaaaaaaaaatacatatgtattgataatatataaaacttttactttgataatctttatgaaaagtgttctgaaaattttcgatcctaaaaattattagaaaaaaaaagtcattttgcaaatattataataaaatatagtgtctattttcatgtcatgatcatttattttgataaattatataaattttaaactttacatatacttattatgtgacaattattttcaattaattaatttatctttatgtatacatcaaagtttgtgtacataaattgtttatacaaaaacactttaagatacacaacatatataatttaaattattagtaattaatatataaaacattattaaagttataccatagttacttacttaactataataataatttactagacacacattaatatgttaaaattatgtataatgtaattattatgttgtttttatttgacaataatatagttatatatttatatttgatgtggttgtgatg

SEQ ID NO: 100585 - DNA, 1490 bp, Cannabis sativa
aattcctaaaatttctatcaatttgttgcattcacgtatcggttgtgtctttggtggtagtggcaacagcgattgaatttttaatcgatggaagctactcattgctgaaaggaattggccctgcattaggaatactttcaggtataattgtttaccatctttggaactggcttgttaagatggcaggggggctgaaaaatgcaaccgtttgggtttttcacatgttgaagaatgctactttttgggttttgaacgcagtaagagcccaagcaagttatgaacgattgcaatgaagagaaatcagaaatgaggaggccatgagaattatcgacatattatatatatatagttagacttgtaatgaaacaggtagttttgacaatgatagattgacatatttgaaaatcaaagtttcagattaatagaagcatttactacttttttctgtaggtaacaaaattggcaagatgccttgtatcatcttgaattatcgacatattatatatatatatatatagttagacttgtaatgaaacaggtagttttgacaatgatagattgacatatttgaaaatcaaagtttcagatttttcttttccctctttttttaagtgaatgaatgaatttattagaatagaagcatttactacttttttctttaggtaacaaaattggtaagatgccttgtatcatcttcagagagagttttcaaaatctgatcttctatctctaataatgtagtagtcattccttctaggccttaaagaacaaattaaagtataggagtaagatataaactttttcctatacttaatttttctctccttcctaataaaatggtagcaacaaaacaagactttgtttttcaataaagtaaacatacctggcaacaaattcatcttgaaaagacaagacttcactttgaaccgagttactaatcttccaaagccaaaaacaaaaagatgataagtaagagaatgaaactgcttccatctttgtttgaaaatgaaaaacgtcaaacattgtaataacaaaaattaaggctaaccattttcgcatggcttcagtcgtccacccaacaggaagtttgcaaaatgtgtttcctatttgcagcaaaagaatgtgtggatgattgtgttcctgaacctgcaaggtattactattaatttcttacaaaatgaaggggttacaaagtaataattattctaactactcataatataatatttattgaaatgacacaatttaaagctacccaattgatgaataactctctctaagaaccagaaatcaactctttcaatgaagtgaaaggtgagctatatccatgaactacagtgtctctccatagagccattcctgttaataaaataaaaagcaaaatcagaatatcactttaacataaatcatcttacatgttctttcgggttttgcatcggttacaagagacaaacctatccacagttcgaaaccagcggttgctgccaaga

SEQ ID NO: 100586 - DNA, 914 bp, Cannabis sativa
aaattacattttagattctgaaaacgaatttactccaactacatattctctctgattacatgaaatgtttgcttggcgttcacgaacgcatgtgtggcctatcggtcatctgtatccaatgtccattttatttgcctctattttctttttaattttctttgagtctcgttctcaatgttttctgttttaatattattattttatcagatgtgagtgaaaatgaaggttggggagtaaaaagtcctgaatctatacaaatatatatcgaatttttatttaaaaatattttattcaaaaataagttttaactaagggcaattataaataagaataattttattatcagttatacatttttttaaatagcgtatttagaaagtattatcactataaaagattaactaatcaatgtagtagttaatttaattatttttagtattataataaaaaataaatatttatttatataataaataattacttaaaaattgttataaaaattaataaataggatggtgtaagaaaaaattagggttattatttttgtatcttgatcatttaaaattgttattattgtatgtatttgttttttaattatttttttttttgaaatttcactgactgttattaaaattgataatcgtttacagtaacagagaaaataagatttgagatttcacccatccaacagacagtcatcttcatccaactcaagagcgtacttagctaaaccatgagcagtttggttagcatttctcttaacatgaaaaacagttgctcttgagaagaaggataaaagacaactaacatccacaattaaatcattaaaactagaaagattcttagatggagagttaatagtcgaggatactcgcaatgcgtcagtgttgatatgtgtaatttgtaattgcaat

SEQ ID NO: 100587 - DNA, 677 bp, Cannabis sativa
cacaagaaacttatcattccttcttacagcggaaaagcaatctaaattggttgaaagagggagacattaattctggttttttccatgcttattttcgggctagaaggactcagaactgagtgctttccatcacaaatttagaaggagtaagagtggaacaacctgatcaggtgattgatgcattcatggttttttaccaacagcttctaggcagcagaatgagagacaggaggccggtgtaggacagtataattaagcagggtccggttgtgactaaagaacaggcagacatgctcattgctaaatacactatggatgaagtgaagaaagtcgtctttgagatcccgggaaataaagctccaggtccagatggttatgggagttttttcttccaggataattgggagatcataggcaaagatacagcagaggccattatgtctttcttacattcagggcagattctaaaagagctaaattccacggttcttaccttggtgccgaaatgcaagtgtccgagcatggtgggggattatagaccaattttgtgttgtaatgttctctataaggctgccacaaagctaatatgcactcgtcttaaaaggatattacctgaattagtggctcaaaatcaagggggatttatacatggtagatttattggccacaacatcatg

SEQ ID NO: 100588 - DNA, 665 bp, Cannabis sativa
ttgtcactagtgctgaagttaaaccaactcatccaatgatcacaaggcctaaggctgggatttttaagcctaaaacttacattggatagtcaaaatggacttgttttactaaagaaccaaattcagtggatgaggcattggctattcgtgaatggagagatgctaaggacacagaaaataaggccttaatcaaaacaaaacatggatattggcccgaagaacacctggtatgtacattcttggggaacaaacgggtctacaaaattaaaaggaatggagatgagagttttcaacgatgcaaaacatggctagtagcttaagggtttaaacaaaaggctagactcaattttgtggagactttcagtccgattatcaaagcctcaacagtcaaaatagtccttacaatcgttatttcacattcatgggaagtaaggaaacttgacataaacattgccttccttaatggatcactaatttaggatatttatatggagcaaccacaagaatttgaagacaaaaataaacatgatcatgtgtgaaaattgatcaagtcaatttatggtctaagacaagcgccaagggtatggtttgataagcttagagcaacactactcggctgacacttcaaaaactccagcgctgactcctctctattttattataag

SEQ ID NO: 100589 - DNA, 1087 bp, Cannabis sativa
ttttatggataattttaaaatttttctaaattataaatactagataagagttttcatgaattccttttaaccctatacaatccaatttcaatattcattggatgttgaatttttacaataaacacaatctaattaatttgacttaactgatccaatccagtccattagaatttcaaagctttaataaagtgagttgaaaaatttgttactagcaatgaataatatccaatcaaattcaattaaattgaaccggtcaaatttaatctaattataaaaaaaatgaatatcgaattacaattgaattggattagatgttaaaggttggattcaaattagattggatcagtcattagatgtcaatctcaaaatttatttgaaaaccgatacaatctaattacatttatataagttaaaaaaataaaaataaatattaattatatttttatcaaaattgattttattgtgtattaaatttattgtgatgtgtattcatttttataatattttgattcatttattacttttttttttttttttttttttttttgaatgttattcatttattacttgttagtgttattattttaattatattaaatttttaattacattaaatttgtaaggatgaaatttatttaaattaatattaaaaattaaatatgtaattagatatctaattaaaaaaattaaattttaaactctggataggattaagagaaaaaaagttagaattggatggatgcgagtaaaattttctttttttgggctgtgaaaaatgcgagtaaagttgaaagaaggaaaaagcagaaaaaaagaagactaaacgacgtcgttgatagtatttccgacccgtataataaaaagtaaataaaagatagagagagggtgagactgaaagagggagagaaagaatttgaaattcaaaagggcggtcaagtcaactcgtttgaggcagtaagtaatactaatagtgtgtgaggtgatctaaagacatgtttatactattaactctatatttgtacactcttccatttctatggtggatttagtttagtttattaagtaacacatttctcataataaataa

SEQ ID NO: 100590 - DNA, 1150 bp, Cannabis sativa
aatcccacttattacctgattaattcataatatcaatataaaccctaattatttaccatttaacttatcgggatattacaagaaggttttccaccattgtaaagaaaggtttgtactagcagtaggttgttgttcctcaagcctggttgcaagtgaataaccagttttgaccaaatacatcccattcgtttcaaagtgccatatcaggtggtcatgttggtcacacagtgtaagtggaatactctgaatctttgcaacatcaaactccagaaaacattgttgaagaagtgagtgattccattgtctttgactggtgattaaatctgaatcgttcataaaaatgttttgacttttaaaaattaaaggcttaaaggaggtaacaccaggtagccatggatccgaagcacataagatatgatttccattacccactttctaacgcaatcctttgttaagaagttcttttccccaaacaatacttctccatgtgagtgacggataagatcccacttcgacttctaaaaaagaattatacttgaaatattgagctttgaggatcttgtgaaggagtgatgaaggattggccaaaattaactaagcttgtttgactaataaagcttgattgtaatgaacaaagctcttaaaacccatacctctttcaactttcgctttacaaagagcattccaagttttgcaattaatcccagatgatgaggagttggacccccaccaaaatttatcatcatgacctcaatttggtggattagagacttgaataagccaaaacaactcattactttttagaaatcaaaatatgcatacatttacatctcaagagagttttcttttataattattattaacaatcaatcaatattttcatacacataacaataaacaaaactttaatgattaaaataataaaatcttacatacattaaataattaaacatataattttttatgcgtatatttataaatgttcttcattgatgaaacttcaattatttttttctattaatatgaatttttcttaaaacttgaaaaaggtgatacttaattttaattttataagaaaatggggtgtaattattaaaataaaagttaaaataggctcatcatttaaaattgtatattttggtaattttgt

SEQ ID NO: 100591 - DNA, 970 bp, Cannabis sativa
aaactggaatcccttctcgaactctctctcttcctctctcactgtcaaactagatcgaacgaatttccttgcttggaaatcgcaggtcgtccctactgtcatcggacacgacctagatgacattctcttcactggtgttcctcctccctaacatctcatcaatggtgaaccaaatgttcagcaccaacaatggaagaagcgtgatcagctgcttctttcttggctccgctcatccatgaccgaaggggttctgtcctctgtttctaattacacaagttcttactctgtttggaaagcattggaacaaagattcacaagtcagtctcgtgcgcagcttcttcaactcaaaggacaattttctcacatcaagaaaggctctttgtcaatctctgactatgtggaaaagattcaaacactttctgatgcaatcaccattgctggtactgcagtaggcattcaagatcttattttgcaactgttaaatgggttaggtcctgattatgatcctgtagtttcaggaatcacctcccgaagtgatgaacttactcttgaagaagtccaagccttactcatggcacacgagagccgccttgatcatcataattctgcctcagaactcacactgaaaatgcaagccaatcttgccttgagaaattcaagaaatgaccatttcaggccttttcaagctcacggcaaagatacacctactgacaatcaatccaagaatcaaactcgaggtgatggtcgtggcttctactctaattctagattgatttgtgaagtttgcatgaaatccagctgtgtgccactacagatttgacaaaaattgggtaacacccaaaccgaatgtgcctgccccccgtgcctatcttactgagtgtgatgttcatgattctcatcaacttactgtattgcctgattttggtgatgacctcttttggtttgatgatactggggccactaatcacat

SEQ ID NO: 100592 - DNA, 573 bp, Cannabis sativa
tgctagcgtattataatatagtatatgtataccctggtcatgaaattgctacatcttttctctgatcgattcatcgtatcattagacctatatatacacataggcgtcataatagtggcagctctttatgatgaattcattcctctgatatatcattttgtaattgggtaaggataatctttaaaattattgtattaagttatgtgtaatttgacacttaattaaactaatagcaattgatacataagaatgtgctaaacactactgatgccttagtaccttttagcatttctcactaataatttatatataatatatctaattaagagctcaacttgaaactgaattaatttaatcgaattggccgaagttattgatatatttttcttgaataatttgatttgcatatgataacccaaatgagtactttgtccctccatttcaaaatgatgacttttatggttgaggaactactaattaataataataataataataataggcttacttacactacttggccacttattcggtgattatctattaatgagtggttcaattagtgacaattag

SEQ ID NO: 100593 - DNA, 1220 bp, Cannabis sativa
gcctccaaggccagccatcaggtctcggacatgacttatattagcacgttaaatacgacatggaggaagcgcttgcgaatggatttgaaaatacatgtaagaggcattgaattcattcttcggcaattacactctaatctatgagctttatgatgactgcataatgaactatcacatcaatcaaggaaggcaaagagcttatcttacctaacatcttgataaaacctatgcaacctactatatagacatacataccattttattcaagcataggaacttgtgcaagtaatggttcaatgatacaatagtgaccttaattttgctctctttatgaagctataaataccccaaatcatagtctgggaaaggggtcaaaaaaaatagtgtaagcatcctctgtatggaaaaccattacagtagcagtgacttgtggactaagactcatttatgccccaaccatgtaaaaactattcgcgttaaattttttctaatcatttaaacagctctcattagttagttgtcaaaattctgttcaatactttagtgcttttattgagagcagtggaaggttttacgtaagaagaatatcaaaaataaattctcgatacaatggtggagactaaaaaccaagcacgtaaaccacattcagctcaaggcccaagggtgctacacaaagaagaagtggcttcgtgagtcgatgtagaagcagaagaagatgaaaccaatgatatagaatacaataaaaatcaagaggagtacgaggcgtatgatgatagtagctacaccgaacatatggtgttaagatagaaaggcgttgatcataaagccgagttggcagagtaaaaggagtagaataggataatgaaagaaataatgatcgccatgcataaggcaatggaaactacaagcatccatgtgcatccaaatctcaaaccaattaggcaagaaaaaataagaggagtcactactgccagataatttgaggcacaaaaattgagagccaagtcctatttggtacccttccgaaggctccccaaagataaacccaacaaccattcttgaaaagaacaaaaaggctatgtggacagtttgcttcctaaaggaaaaggtccacataggggcaggtttccaaagggaaatgatggccctcaagatcgagtagaccggaaaagtgtattcgtgcacaaggagccagggaagagaaaggggaaaaaccacaa

SEQ ID NO: 100594 - DNA, 1525 bp, Cannabis sativa
  modified_base (1063)..(1074): a, c, t, g, unknown or other
tatttaaatttgtttgtaactggaaaattgacagcacaacaaaaacaagtctacaacaaaatgttggattggggctgaagctgacattattcatgtttaaaatgtgccctagatttacaaaatgcaaactttataatattcttatttttgttttgtaaatctaaagtacattttcatataataaaggttaaatattcttatttatattttaatagcatctatgatatttttttcaatacatattacaatcttaacagtaaattgtgatttatattgttatctttatttttaagtaggttttgttgggtttttatgctctaactaaaactctatttcaatgtaattttgaatattcaatcatcaataaagaaacaaaattattttatctcttgtttcaattgcttggttcacatgtttgcttcatgatcatttgttttatttataaattcatttaaattcttatcacattattattcatgattactgtgttatctacacaatgaaaagtaatcaagattatgtgattaaagtttagtcccacgatttatcagtatacaagatctccactgatatataataatcaataatgtggtttacttatacttggatagtggtatgtcttttctgaggcattattgtaaagtaagcatgtattaaatgtattgttatacatggaattggactgatattcacatataaaagatatcataaacttttcgtaatatctttctaaatgaatatcacttagttgatcttagatcaatgatctcaatcctaagatggttaggttctggtttaattgtagtatttgtgttctttgacttgtttgttaaagttgaccaattagatcttcctaatacttttatcttggtagcatggtagtacaattgagtgggagtgctaatcatagatatataatattctatagcttctataaatgcatataagtgaaacgatgatttccttcgagcatggctaaacaagattaaatggtggagtactcatttcagtaattatcatagctagtttaccgaaatattatttacaagtagctaagtatttnnnnnnnnnnnnacattgaagggtaaaacggtaaatttgtccatattcgatgtagatcatctatagaggatcattgattatttggatagaaaaaatagataattaataccgtatctatatttggaacatatagagcattcactactaaaaaaatagttttttctgacatttttaaatagtcgtttaaagtattcctgtcggtttctataactgtcgcctatatgaccgtcgcaaaacgggcaaaataggcaacggttaaaaaccgtcgctaatgtagacttcctgacgttttaaatcgtgccttataggctcgttacgttttttaatttttttcaacgacggttttttttagtcgttacattggaaaaataggaaaagaaaaacaaatttctaaaattttttctctgcattaattttaaatttttccacaattatgtatagtcacaataattaaactaacgct

SEQ ID NO: 100595 - DNA, 733 bp, Cannabis sativa
tcacctgcgtgagtttactacttgattacgtgcacttgcgtattgttctattaaatttcgtaacagatcactggcttatgttcaagagttagtgtgcctatgtttgagcaggagcattgggaagcaccaggggtccttgatcataacactgttatgcatctaaaagataattacgatggaatagctcgactcactagtttaggcttcgaggagcaaccagctgagttttttcctttaccaccaactacacagccatcatcctcttcacaacctccaccatcatgacctcactctaggccatcctcatcttgagctactgagagctcgagcaaccagtttggtgactttgagcagcgattttcatcctatgaatggaatcagcaagtgatgatgtgaaacatcaaggagttgcaacatcgtcagttcacgatgcacaattttcaggctgagttttatgctacgtttgcacgtcactcagggtatcatgattatcctcagttccctgatgagcttcgatgaccatatcagccaccagggggtcatgatgacattccacctgctactgatggcagtgatacaactatggacctgtagtcctagctgctctagtttattttctctcctttacactatgtttggtaggagggagaagtggagggatggagaggagaggagggagagaggtgggaggagataacaaatccctttatttggcaagagggattgaaggaga

SEQ ID NO: 100596 - DNA, 898 bp, Cannabis sativa
aaaatattttgtcaactaacttgccaaaaaagaactttacaaattatatgagtttgacgatcgatccatcttattatttgaaatcacatataaattatataatattcttttctcttcaaaaaaataaaatattcacgttgtaaatacaattattataatatattaaatgggatattgatgatccatcttattaattagtacatttctttaaaaaggaaatattatttagatatatatttaggatatatataattaagcttacaaataattaataatttttaaaagagtaattacatcatgatatataacactttatatgttgcgtgggtatatgtatatatatagactatatgctaaaatatacattgcaaactatgttcgagttaaatattgatcgagaagtgaataagagtcgaacatatctggaactgaatttaatgataatacatcaaatttgctccaacaattttagctgtcattgattttgttttgaggaacaacttaagaaagtcagctaacagcagcttatatatatgtcaagggtccatgactagaaaagtgttattaaaggtatttatattatatatgatctggcaagccatatattttataaaaattatgtatttttttttctcatcacgtacgtaggcaattaatagttgtcttctttgttgagaatctctaatttaattaaatgggaagatattatagtgcatgcatgctatatgggaatgagtacttaaagaattaagactagaaaagtttggttgaactttttttgctactgtatattccctagctaatatatattagttagtctataaattaattagtattgctctcaagtatgttgcctaagagagcttggttctagttttcattgttggttagacttagg

SEQ ID NO: 100597 - DNA, 827 bp, Cannabis sativa
aaaaaaaaagaattttttttttattttttatttaaacttttacgattttaaatttttatttacaaatatttgattttaaatttttatttacaaatatttgattttaaattttagaattacaaaaataacaagatatcagctttccaactattataaattaattataaataaattataaaataataaaaaaaaatatcgaataatttacttaagtctatatctttataaataaaaaaagtttaaatcacaaaaataatttttttattaacctatttttgtaatttttttttatatagtagcgcagtttattaataaatttatagcaaatttttgataaattttattcttataaaatatgtatagaagcttcaaagtcaaaccgttccatatcaatctttaagtataaaagtaaatagtcatataaagtaatatagtgtcaacatttatgatttagaggtttatttaaaacatttatatgatttagagttaatcactaaagaaactagctagcaacatcaaaaacattaatcacaaattaaaaaacctacaaatcaaataatactcaatattttaattcgaaaagaaaaaaaagaaacatgtgtatataaaccctgatgttgataaaataatttaaagtatatcattttgaactacaaatgttccatattatttatttatttaatatcacataggcttgatccttatttcattttttaatttttctttgatagatcatttttaaatttaatcaatgaattaataataaatatgacaaatatcccattaattctaagatagaaaatacaagcatataataaatatatatt

SEQ ID NO: 100598 - DNA, 1151 bp, Cannabis sativa
caggtaagtaactgtctaaatattattttcagcattttaactatccaaattttttttaaaatctacaattagtcttaagtaattacaacgtatacgatcataaaaaaaattaaattaaaataattttttagataccaaaataaatagaaaatcttccactaccctttaggagatctactataaaaaatttcatatatttatatagaacaattatggtagagtacgaggcgcgttaaacatatatcttcttataacaaatctcttttttagcttaacactcttataccaatattcattatactcataatatgttctttacaaattttcaaaaaatcctaaatttatccatcaaaagaggtatattctttaatgttagaattcatttttatataacataatgaatcagtgtaaatagtaaattaattttatccaaagaccttgtactattagagtggggaaaaataggtggaggaaattacactatttttcattttttattttttttattactatttaatttaaaccaaattttattggttatatctccattatggactctattatatttagtgtattaattataaaagaaattatttatcaattaaaattattttataaatatatttaatttatataataaaaaatagttatcaactactaaactacttttttatcattttgtgaatgttcttttgtatagagtgtaattccctccaaaacaaaagaaagaatacaaaaggtcatatttatataagcccaagcccaagcccaagcccaattatgatgggaaagcagacccaaaaccaaaagtaaatacatatataaggatttcatccaaaatcaatctttgttcggttctattgtcagaaaaaaaaaaaaatctttgttcggttctgtcaagaagccatttttcaaattcaaacctaagcacagatctgattcgttcgatcggagaggaggagccattccgtttcgctcattggctaactgataaccaattacattcactcacaactcaactcgcgacaggtactgtactgtccttagggttttgagttttgagttttgaggttgaaacaaactttgtctggttctatagagttgttctacagggatatgagaacaaaatgtgttctttttttctttttggt

SEQ ID NO: 100599 - DNA, 769 bp, Cannabis sativa
tattctttcttacgacagagtggtcaaaaatgattcctaaaataggtgaatatataagattaaatgtttaattaattattgtgataaagtaatgtagtgatgttgttagtttagttgatgagaatcgcttaaattttatgtgataatttgtagtattttgcttttggatgttttaacacattttgaaaatccttgataagtatttataatatttataattgctagccttcacgcttttatggttcaaagtgtacggtctagatccttctaaatataagattagatctgaagtatgaaatccgtacttaatgcagattagataacactatgagtaaaatagtgggaatcgaataggataaataccctgtagtttttttgtttttgaatgtggaaaagttgcgttccgtctaagatcaaggtgtttggacggctatttgcactacagaaagtgaatgtgcacgaagtgatgcaaaagataagggataaggtcatttcacttgctttcttcgggttggtgtgtgttgtaaaagcaacgtggaaaaaaagaacctttgaagataaagaaagggagaagatctgtgggagaagatcaaattctggattgcaacatgggtgttgagaactaaagagtttgtttactttatcattccgagatcttcttagagattggagttgtactctttcctaggcgcgcgcccacagcaatcttttgatgtatggctcaatatgttcttttttagctttactttttattatttctacagttttc

SEQ ID NO: 100600 - DNA, 1312 bp, Cannabis sativa
ttaatctatagcttattatagatttagatctaactgttagcactctcagaattaacactataagggaactaatatttgatccgttaagaaagcttggattctactataagaaagcttggattccactattgtataaaatgttctcagccactcatgttattaagctcccaaaatagaagttgtaagaattatcttctctgagaaactttaacaagtgaatcaaagaactcaatcaacacaaatacgagttcatgtatactcaggattcaggctgatctagtaatgattatcattgtgatatgaataactctttcatggtaaaccacatgttaatgaaagatgattattacatattggcctagtcgtgcataatcaattaaattatacacagtatctttactacgtgtctatctacatatgtgattcgaaatcaaaatcacacatacttgaagtatagtgtatatataataaaccatacttagcagttccatattaaagattctcattacgttaatgcactatcgacttgctttattcttatcgtataatcttaattctcttctatatctttacaaggttataccttctccacataaataaaaatattttaaatatttaataatcatactattataataatgtatcatttatcttataattgtattttatgtattttctaatacattatctattagttacttaattttaaagtataaatcccaacactttattcactccatggataattttgtaattatggaggatcgccataagccaataaactaattaaaactcttttattcaaaatatttttcttcaagcccatcaaaaaattaaaataattttaattagcttattcttatataaaattttttttatttgagacactttattactattattttacttttaattatctttaatcaaataataaaactgttttattatctaattaaacttaagacaacaattgttaaaatttcaaattcaaaaccaaaatatcacacatcagtgaaccgcactagcaaccgttgcttaaaaattttcataactttaatatgttgcttactgtgttattcaaggctaagtgatcataatacaagtcacaatctcatatataaaaggggaatctgaaaaaatatacataaaatatattaggatattttttgccctaaaaactaatacatttcaaaattgaaaatatatgaccactttattaaaaacccaagaataccgctctcataacaataccccaactctctctcggttctctctcaaccgaacccttcaacaaatcaaaaccccctcacca

SEQ ID NO: 100601 - DNA, 534 bp, Cannabis sativa
tattatttgctaaaataatataataaatattgaataactataaatagagatagatataataattagagaatacatctaaatatatattgtaacaaaaagaccatgtccattcttacaccatttcaagatggagtactaaaaatggagttatagtaataattacacttagccatctaatcataaaatttgagggaatagtaatcttaaattttttgttattgttgcaattgacccatttccactgttaagtgccactcaagaatataaagtgacaatataatgccaacatattatgtctattctcatttattttgaagtaataatagcattggttttattggaggaataaaataaaataatatagtgtaatattccttctttttccctgaattatgtaaagcataagcttattagtttttttttcctccatttcataaagaaaggagagagccttggaaaaattacatttgatattgtttttaaagaaaaaaaagtttgttttatagaatgtagtacttaggtggcgtttggttg

SEQ ID NO: 100602 - DNA, 946 bp, Cannabis sativa
  modified_base (467)..(475): a, c, t, g, unknown or other
ggtgtaaggacccaatggaggcttgaagcggggatgttacaaaaattattctaaataccgaaacaaatagagagtgcatcgcttgaatccttttaaggggtatattgtaaaatttctctattattatttcatatatattaaataattaaatttatttaatatatattgcataattatattttctttcacaaaataataagaagggtgtatacacatttggtatcctatgtttaatttaaatacaagtttgataccctgtatttttaataatagttatttaatatcctatattttaaaaacatacacatttagtaccttaaactcaaaattttttgataaaattttatcaatacaattaaactgtcttcaattttacaaattttcgattcaaatttaattatttaattacatataactgagaaccgtttggtcaaagtaataaaattatattgattaaattttacttnnnnnnnnnaaatatgtattattttaaaatataaggtacaaaataagtattattgataacatgaggtaccaaatgtgttttaagaaaaaaaataaagtactaaatgagtatatttcctaataagaaagagaaaatataaaagatatcatataaagatattcttttttggtattctttttcactctaattgtaagtaattattaaaaaatgctaaaagtatatctatcatcaaacattctttaaagcatctctattagagatgaatagagatgctcttacagtaatacttaaaattagagaaatttacgtgggggaacgaaattttaaaatcaatctcataaataccactaccttttttatttaaactataatgccgttgtattttaattttttttaaaacgcgtgtatacgtgccaaagtaagcagcgcatcaatgcaaaatgggctgattgtttggtctttcttttcttttcttttttt

SEQ ID NO: 100603 - DNA, 1547 bp, Cannabis sativa
  modified_base (1488)..(1503): a, c, t, g, unknown or other
gcggtcacgccacttgagaggactgggcccattgccaagacttaagacgggggccaaaagagcaactcccaggccaggtgcatccgggcggcccagtgtcactcaagaggaatatgaggcattgaagcaaagggtggaagaataagaggcatagaacgagtggcaacaaccgatgatgatgactcagattcagatcatgagtgcgttccaacaacaaatgatccaattggccgacgctgttccaggatttaatatgctggatctgcctctgattccaccgattccaccatttcagtcttctggccatgcacctggttcctcctcacagactgcccctcctggtgatgacgacgatgatgctgttgatttgtaaattttttagtttacagtgtagataatattactgtttatgaattcagaatacttttacttagtttatgacgtttaatataattttgtaataacattataaatgtcggttttataatatatttgatattatatttagtattattttgatttttaatttaaatttaatttcaaaattaatttataaatttatttctttttctaaaaaaacttttgtcggcgcgtaacatgcgccggcaaaaatattattttatgaattaattaatttcaataaactcttttgtcggtgcataagtcgtcggcataggcaaatttttttatttttttaatttggttttgccgttgactaaactcgctggcaaaaataaggtgccaaattggcatttggcgcctaatccccgccaaaagtcttgccggcgacgtaactcgccggcaaaacgtcgtcagggacacatcagccggcgaaggtattgccggcgaatcccttataccggcaaataaatgcgctggtgtaagtacttttgccggcgcaattcaccatgtcgccggcaaaaggtcatacgccgacgaactattgccaacagcttttgccggcaaaaattggcgccggcaaagctttgccggagagttgcacgtacttttgccggcaaggttaaacggcggcaaaagtaccttttcttgtagtgaatgtaaaagtctagagaaatttttagcaaatattatattttaaggggtatgttcaattagttttgaaagttcagaggcaaaattactaattattttattataaatgagtattgttattcgatattttaagatgttgatgtgacttcctataattaattaacaattcttcataatagtaatacaaaaattctgttagttgttgtacatatagaaagatagaatatacataattataacattataaacgggcattgttatttgatactttaaggtgtccaacataaacccatgtgacactttataattggatcaccattgttgtgaaaattaatgtgcaagtgtacacaatcttttcaagtaataaagtgataagtatacactacaaaaatttgctacttatagtgataactttttaattacaacataattttnnnnnnnnnnnnnnnnacttttagtcacaacaaaattttacttgtgactaaaatatagta

SEQ ID NO: 100604 - DNA, 850 bp, Cannabis sativa
aaaaaaaaatgatgatgatcaaaactcctatttgtttcttcttcattattctcacaattattcctcataataaagcaagtaatgatcatcatcaatattattcttcaaccaattcattattaataaaccaaacatgtaagaaatgcgcagagaaatcagaggtattcagctacaatttctgcagagcttcactccaaaatgttccaatcaccgacgccatcacaaatctccaaggcctagctctggttgccatggagctcgctctagacaacgcctcctctacgattctcaccatcaagaacattctcgaagataataataataatataattgtagctactactaaaaatgatttggatccatttttggagattcgcctaaaggattgcttggatttgtattctgatgcggtgaccactcttgtggaggcgattgaagcttttatgaatcagaattatgagacggctagggtttggttgagcgcggttatggaggcctcgagtacttgtgaagaagggtttaaagaaagatcatcaggtgatgacgtggcagagtctcctttggtaaaggaaaattatgatctctttcagttatctgatattgctctttgtattgctactttacttactttctcttaaagatatatatacttagtaagaacaatactctcttcctaatattagtagcaaaaaaaaaaaaaaacaaaaagagtagagagagacacacaaaaccaagtttgaaaataaccatgagaagagaacccaaaatctttactataaagtcattgtaattataatttaagaagttcattttgaaatacttaattccaaaatactatttttaagtgacc

SEQ ID NO: 100605 - DNA, 820 bp, Cannabis sativa
caatgtaccatatgtgtataaattttacacaaatctccattccacgagtcgatatataaaatagatcaaattcgattctcataatgtaattcaaagttcagaaatctataaaactatatatactcctgttaagaatgttttctgaaaaaaattacgaatatgttacaaaggatacagagaattatgaagcatatttgattgagttttttcatcaattaataaaattgaagtacatcaagaacaaattgcaaagcaaaatttatgcaaatattttatatatataatcgaatgatcgtatatagcatcggcttccacatggagcagatttttagcatttcgaaaccttaaaaatgaaaatagtatacatattaattgttgaaaagaagccatatgcaagttagggaaaaagacaaattaattaaattggcatgatgagccgaaagctcacatatttatatattttttaatttgattaataatctacatatttatggataaatatggttacctaccaaacatatatttttttttgactaatctaccaaacatatttagttatattaaatttacacaaacctaatatatacattacatcgattgtgatttttctttaattattataaattaatttgaatattctataagatagaaaaaaaaaggagaattatccatatattatttttttcaaatttacagtttgggttttcaaagtggttatagcgctagttgcaaaaagggtttttctacgattttttgttagtgctagttgcaataggggtttctacgtagaatttcataaaaatgcaaagaaaattgtttt

SEQ ID NO: 100606 - DNA, 1474 bp, Cannabis sativa
tatataaaatgagttttatttagggcataaaacccaacactttttatctgggctgctgatatcctctcgagtattcttaataacgccttggaaatttgatccattagaggtattaagttgagctagaatggatcccgactatctcatctcttctttgttgatgatctaatccttgtaggtagggccacgatggaggaagctaagggtgtttgacagtatttggagaaattttgtgattggtctggccaatgaataaataaacttaaaacctctattttcttcagcaataatactattgagggtatgaaacgaggtataaagtaggagcttggcctcgacaacgccattggtaacattaattacctaggctactgttgtttaggactcacaataaggatgtagattttaacttcattctggataacctagtcttgtagcttcacatgtggaagttgaaatctttgtacaaagttaaccgtgctactttgatcgaattggttggccttctttaccagtttacactatgcaaaccacaaagctgtctaagaaactcgccttggtatggttaaggacttttggtggagttgtgagcaaggcaattatggtatctatttagaggcttgggatcatttgtgccttcctaaattccaaggtgagcttggattttcgaagactttaaaaatcaattaggcgttgcgggctaagtggggctgggctctccttaatgaggatcattcactgtgttgtaaggtgttaagtgccaagtatctaagaggtagtcctttcttgaattgtttctttaataactctgatttaggattctagaagaatgttatgaaaactaaagaaattcttaagcaaggtgcatgcaagcttatttcggatgggcaaaagacgaatatctggaatgacccgtgggttatacatgaccaagatttctatcctcaacctaataatctttggtctgagggttcgaagaaagttatgaatttacttttagacaatgggaattgggacatctctaaactccacactctttttgatacggaaacaaccaataacaacattaaaagtggtagaccctgtggtcaaggtagagataagtggatatggattaaagagccaaatggtttgttctctactaaatctgcctaccttgttcaagctttggatcgtgctccattgtgtaatgttgctcccgctttgtggaacaaactttagaattctaaaattttgaagcgtcacaaggtcctttggttgagcattctctcaaattctctgcctatccgttcctttctcactagaagaatgcatattgaggaggtttcctgtcctctttgtggggagagagaagaaacgataaagtatcttttcctctattgtaactttacttttcacctttggaggtcatccccctggagagttatacagtgatggattctagttcgtgtttgagattgggttaaatttcttt

SEQ ID NO: 100607 - DNA, 741 bp, Cannabis sativa
gatttgagcggactacggtcccgtggttttttcccgcattgagtttccacgtaaaaatcttggtgtctcacttttatgcttgatttgtgtatttaatattgtttgtggtgctttgggtaatatttgatattgcttattgtggtgtttgataagtatctcatttttgacatacaaagagggaaaaaattgtagttaattgcaataggttttcccaacaccatttaccccttaggtattcaactgctaggtcacactaactgccaatgtggcaaaataattatacaagtgtcatataaaaaggtttctttttctaattgaaataaaaaccaataaaacattaaagagatgaacaattaaattagaccaaaataaaatcataatttttttttaagaaaaccaagaccagatatttggtccattccttcagcttccattgacatcgacaacatagttgtgttgtggagattattgagaggtggccatttctttagcttccgctgtcttcgacgacgtagttgtgcggtgtgggtcgacataaaaggttttcacttgtttcttattgtcgcaaatgccaggagctttgggttttctcaattcgggctaggttattgttgattcaaccaagggttgggtatcatcgatttgggtttattgttcgtcgaatttccaagggttgggttatcattaattgggttcggtgttcgtcgacgatagtagaagctgaagaggaggcactttcat

SEQ ID NO: 100608 - DNA, 544 bp, Cannabis sativa
  modified_base (331)..(334): a, c, t, g, unknown or other
gagccaagaattggcgaacaaactattggcgatctacacgtggacctgggagatgatattgagatggtcaggtcactcagacaaaagaaccacacgttgttggttgcgattcttttgcccaatagagacgtaaattcataaggtggatggacgacgaagaggccatccttcaagaccattaggcagagatgaactgccgtaatagggaagccagtgacctaataaggcagttcaatgagagaacagctagaagcggccaagatgtgataagagatcatttgcaaggaaggctcattgacaggtcgagtagggtctacaggcaggtagacannnnacaaacagtccaaccaggtccctcgtgcatgaggacagaccttcccctacccgaagatagacaaagctttccaaacagaccatatggcaagaacaaccagtttttagcaccaggaggttttgaaggacgacaagataattcaggagaggggacattacaaactgactagaccctagccagccagcacaataatgccctcccccaaaatat

SEQ ID NO: 100609 - DNA, 906 bp, Cannabis sativa
ttaaacctttaaaggggttatgtaagagaataggtggttgtatgagatgtccatctagtttgataattgggtgccaagaggggagaaatgtcctaagcctttatgtgttgtcgctcaaggtgtctcttttagctctttcatctacaatggttattggaaccatgatacgatgaaccagtggtttgaccctcaagaggcatttagagttgctaatattcctctcactagacttgattattgtgattcttggtttttggagccaaactaaaaggtttctttacaataagatcatttatgaagctcttaaagccaataaatgctcatacaggaattgatagtgatacattgcttctaatctagaaaattaaaattcaagagagattcaaagttctatggtggcaaattatttctgatatgcttccaacaagagcaagattggcttggattctcccaatccatgagagaaattttttgttgtgtaaattcgtggaggagaacacaactcatttgttttaggaatgtaactacaccgtggtagtttggatggcagtggatattagttttcatgcatcttcattccctttggttgattggagctcattagttttttctattgtcaatggcgtaatgtaggaacattttccaatggaaactttaatgagtttcttcaaaactattttatcatctttgactcaattttgatggaaagaaataaggcccttaaacaaaattcatgtagaagtcctttggagttggaaaaatcaatgaaggcttgtcaagctgaggtcccagaggctctggagtcccctttgctgtactcatggcatcatcctcctccaggttgggtacttctcaattctaatattgagtaggtacttctcactcttctttggctattattgcttg

SEQ ID NO: 100610 - DNA, 1073 bp, Cannabis sativa
attgtttttgttgccgaatcttcagaatgagatgagcattaatatatggcacttgtgtttgctcaacaacaccttatcattttttttatataataaaaaggggatcacatggtgcagttctgaaaattacgtgctagctataggagtcttatacttcatcttaccttaattgaatcatcggtaccaccacttatgaaggttcccatcccatgatgacccaccacagcaaactataggccttcaaaaggccaaacataattcctcacaacgagggcagtagttagattcgaaccatttactcaagtaaggaaggttgctggtaaaaacttccttaacactaccaccccaagctataggccttcaaaattcctcacaacgagagttgtagttagattcgaacccttgacccaagcaaggaaggttgcaaaacaagtttctctactactacactgcacaacacgaacactaccttatcttgatactaaactatactcatatgtttgtaagtttattattcgagtaatgatatgtacatccaaatatcaacatggtaaaatgaaacaaagataaatatgattaatgtaatatttccatacgtagtatcattaatttcattatttttcgttagagtgatacaataggacacatatagtcaagtgataagaaactctgagtagtcatgggagaggcttaatctagaattttatttcaaaacagttgaccattaagatgaaaaaacttctttcttttttctttctgcaggggccttggaaggaaacataacacaaagtactcgaaaatgaacatatgcattgccccttttccagtaaaaacatgttagtgatccatgtctgatcatatccctattggaatgcagaaatgtacctggttttagttaccagaaaactcggtagaagcaatatgaaggaaactcgattctctgattccgtgttctatatatgcaaaaacacttaagataaaaatgcttctgtacataacaataatgtcttgccaaccaaagtagcaggattaatgtagaatcataattgttcttttcaaggccaaagaggact

SEQ ID NO: 100611 - DNA, 1142 bp, Cannabis sativa
aattcaaaattccttgtctcactagagtacaatgaagaacataaacaattacctgggattgccaaaattgatgcccacctggtagcttcgagagaaacatgcttagttcacgtcattaagttaacctcacgcaagtgtaaagttgacttgggggactaatatttacctaaaaactgaccttggtgatgtcaacattaatgtttaacatgtggcaagaaagaaaacattctagagttgagtaattccgagtcatggcagtcgacctgggaggggtccctagtcttgcccccaggttaactccagaaactccaaaatgggtgtttagatcccactaagttgtttccaactcaccatcttttaatattttttacaatgaagacaagaagaatccaagtccaagacatggaagttgaaaatacatgaaacagcaccccaaaagtcaacttggatgcctagtgcctaaggtgacttcccaactagggctttggttttcgggtctaccttagtgaaaatggctcaaaatttgtactgggagatgaactagacattttatgaacatatttaaggcaacaaaatcagaatcaaagcactttcagttttgagcaccctaggcaccagacacctagcacccaggttgacatattattaacctggagcacttccaaccacaatattaaagaagtatctcaagtactttattcgtcttcatccaaaacgaggacacaagtgctattggagaaaagtgaatcgacctagaagccaaaatgaggacccacgcccaggttaacctaggcattgggcccagtgccgaggttgacactttgtcaacctgggccacgtccatcaacaattcagatgaagtctttcgggcatattctttgttttcatcaacgactaagtcttttgcaatctcaaatgccatagaggtatcaaaacgagccctgggaaggcatttaggaagcacccaacgcccaagttgacacctatcctagtgcattgagttttgcttgtcaaaatttgattccgttttgagcattcaactattttttcgtagtaaacgagagctacaacttgtgacaggtcaaatttacacattgatatttcactctttcaacaaggtggaatatcagaaaaatcggtga

SEQ ID NO: 100612 - DNA, 685 bp, Cannabis sativa
aaatagaaaatcatttccttaattagaaaataatttccataaataaaatattctaatacatgacaccaagaaagagccaaatggagggcttgtgcttccattaataaaggggttgttatgccacttttaggtgatgccaaattctaaagaacatctcctgttttggaatggatagtcatgccataccccattttgagaagctctaaatcttgggcagcatcaacataaagccgaaagttgaaggttggagcagctgtgcggcaagcagtgggtaacggttgatcttcatggacttgtggagagatgatggtcttctgattgcagcccgagtattggtgaaggtagtttgtggcatcacaaaggacctgttctgggggtttgtcatttattattaaggttatattggacaatttaataattttataatataaacgttgttttttattgtgaaacatagttttgtccatttcttataccctgatatcatgcaatacacaataaccatcttaaaacacacaatacttcttaaaatattcacattactttgttgttttttttttaaaaatattttttcttaaaaaatcgagtttcttaagtgttttttcacttttatctttttctttttttaaggcaaattttatttacaccccaaaattttttaaagacaccttattttaataatttt

SEQ ID NO: 100613 - DNA, 1040 bp, Cannabis sativa
gagccatgctagttattatgccttggccgtcttggttaacaccgacagaagtgaagttcgataagtctcctttttgtgttagaattagtggcattccacctttctatggaaataaaactaatctcgaagaacttgctagaaaagtctctccaaattacaaacttcctagatatattgacttcgagcgaggctccttcggcatggggacggttagatttcgtgccaccattgacattgataaacctttgttttcgggcttcctcatgaaacgggaagccataaaagacctctggctgcaatttaaatatgagaagctcttttaaactgtgccttaaatgtggaatcatatcccacgctcaaaagttttgtttcaaaccgcctacggttatcaaggatccccatggagcattttttcctatgtttggcgcctggatgaaacacgaggagccggcgagatcaccattttcttcccacttccttattggtttgaagaatggatcatccaaaaacgtttgactgttgaccagaagttcaaacaacagtggaagatgtgtaactcattaaagattgttgatgcttgggacgcaagggagacaaggcgtcaacttcctgggaagagaagattggtcgaacaagtcatggaggagctgccggcgacgaatgaaataagggtaagtcattttccgatggtcactcttccgggtgttggagaaagtttgccctcttgaggacactgccaccctagtggttcgcaaggaccctgagaacttacttgttttggatccacaaagtgacaaacatgatggagactctaccatagccccccagtcatcgggcatcgtgaatggtggtatcactacatgcgctcaaactgatccaacctctgaggagcctcctcaaccctgcatacttcagacgcaggtaaccagtgattcaaatgccgagtttacctctcaagctcaacaccctctgaagctttgactactgggtctgatatttgccttctaacccaaacagattcttctccccttggaccaact

SEQ ID NO: 100614 - DNA, 523 bp, Cannabis sativa
ggtcaactttgttcggaagaattttaacacaggtcttaacattaattttcatcttctaccatcgtaattattaatagaacatacacttatattcaaagaaacttttacttattcttccgatgtggcacttggattgatactccaacaattaaacaatacaaaaagtggtatattgctattgatgcattttaatattaaatctcacaaattttgatttaatttgcaatactggaaactactgaccaattataggaagtcatgttttaaggtgtcaaatatcaattatcaaagtattaacatttgttttcgtgcatgtgtccttgtgggagatgtgtaagtgtgtcttttttttttttttctgagtatagcgtaataatattacaatcaactaataaattaggagttttgggttcgaacccataccttctcccttattctcatctctccctcaccactaaggtagccttagtggcttgtaagtgtgtctaattaacttttcacatctcttacatggagcaaatct

SEQ ID NO: 100615 - DNA, 1173 bp, Cannabis sativa
attttcatgtatacttcttcatggagatctccatgaagaaaagcattattgatgtctaattggtggacattccaattgttcatggctgcaagtgctaaaagattttgagagtgttgaatttagctacgggagcataggtttgggaatagtcaattccatgtctttgagtgtagcttttggccactagacgagctttaaatctttcaacagccccactttcgttatatttaactttatatacccatttgcaatcaacggctttatgtccgggtggtagcttggtaatgacccaagtgttgtttttttcaagggcggttgtttctttatccatggcaagaagccaatgtctaaattgagttacttccacatagcttttaggttcaatttcagagtaggctgcaagtacagttgctcaaaattgaggatgtaacttgatatatgagaggaaaggctcaattggatgtgatgtagatgaagcatgacaaacatagtcattgagatgtttaggtttatgcaaaattctgccggttttggtagttgttggaggtgttggagctactgtgatggcagtttgtttgtgagaaccagtagttctggtttcggatgtggaagctggagtgctatcagtttgtgggggatgtttgggaatggcttcagcaggaatgataggtactggtgctttgatgctaccagtagctgaaatgttcccttggtgattttctggtgtgaaaaccagattgtcagagccacattggagtggttgagattgtagcttgtgatcaatgtgatctagtgtgacaccagatgagttggagcactcggttactggtttaaagccagatgaggttgagcactcggtaactggtgtgaaaccagatggataagatgactcttgtgtaggtttagttgtaggtgcctgttgttggataggtgtaaatgctggaagcacaatatcagcaaacaattggtgtatttcagatggagatgttgatgaaaccaagggaaaaatggtttcatggaagacaacatctcgtgaaatataaattgtttggtttcaatatcgagtagagtataggctttcatgccatgagggtaaccaatgaagatagaggccctactcctaggtgtgaatttgtgtcttttggaagaaagggtggagccataggctaggca

SEQ ID NO: 100616 - DNA, 902 bp, Cannabis sativa
  modified_base (804)..(805): a, c, t, g, unknown or other
atcagatcaaccttgtgccagcaacttaaagcaagcgggcagttgaggagaatatgagaagatgtttcgacatgttgaagacaaacatgacatgttaccaatgaccaatagatagtttacgcatattaattgataaagtcgaaaaaatagttgattcctaattcaacgtcgatcatcacccatccactcattaaaaaatatttgtagattagagcattgctattagcgttaggcattagtggtgcctaacaccttctcgacatgtcacgttgcgattggctagcgatacttcataaaagctattatattaaactatgtgggactcgatacttggttggaccaatagcgatactgacacataggaaggtattagacaccactagtgccctttaacatttctcattctcaactccttccgacaatcgttgaaatgatatccaaccatgtcattgcacacaatatgaaataattcaaaatacactaggaaagtttttattagcacgatcatgatgaactatagattaataaaaataaaggctttaagaaataaagattaaaatgaaatataatgtagaactatatatggtgaagagaaagagcaaagatgttgcatctaggcttgactgttcctgccgtcgaagaggccttgaaagccacgaaaagcttgccaatattattgttagacctttacagccccattgaaacttgccgtcaacagaccgactactattcttgtttatactgcgaatataaaaaattttatttttataactaattataaaaaaaatataactaattataaannatcattcttatattgtgattaaaatgtccgtagttaaatgtattagtcaaaaaaatgtatttttagtcacaagatttattgtaactaaaattaaatt

SEQ ID NO: 100617 - DNA, 786 bp, Cannabis sativa
ccaaacactttaaggaatttgtagtcaggagcttttgaaaagaggacttcaaaaggtgactttcctttgagtatcggagtaggaaaacgattgataaggtatacggctgtttggaaggcatcagaccaatattttagtggcatattggcctgagcgaggagagtaagaccggtttccactatatgtctgtgtttgcgctctgccctaccattttgttcagaggtatgagggcatgagtgatgaaataatataccatgttcattaaccagccgagtgaatgactgaaattcaccaccccagtcggttcgcagctgcttaattttcctctcaaactggttttcgaccagatttttaaactgaataaatgcagcaagtgcatctgatttctgtttgagtggaaacagccaggtataccgactgaaatcatccaaaaaatggatgtagtacctgtagttagtgtgtgatgcaacaggtgcagcaccccacaagtcagtgtggattaagtctaagaaattagatgcacgactagttgatcttgtgaatggcagtaagtgtgctttactgaatttgcaagcatcacaaaaactgtgattttcattaacattaacaggtacattagttgtctttaagacttgatttaacacactagaggagggatgacctaggcgtctatgccatgtatcctttagggaaacaacactagataaactagactgattacatgacatagaagataaaccagtaaatggttttgaggagtgtttgagatcatgatgctttgttgaa

SEQ ID NO: 100618 - DNA, 748 bp, Cannabis sativa
atattattctccatctaagaaattaagatgctctcaactaatcatttctaacaagttttgatccatcttatcgtttgctgatactgtcgtttcttatgtaagttataacatggtgctgtctttcaattctcattagtggggtatcagaattgtcattttatcagtgtttatatttgttctttgcgaaaaattatggaatttagaatcgttatattgtaatattttgtggctaatcctaatgaatgtacactttgggtgtaaattttgaatcttagatggtatttgtagtaaactttgatattgttggaatggttgctcttccactaaaaattaaaaatatatcttactaaaaggtataatggtcaagttagggcctaatgtggcttgaaaactataattcaatgcaaagtggtattaatatctgtttttatctgtttatgctaaaacaatatttttcataataaattatgattttctttacaactttggctcatgaatatataaatatctaattatgtacctgtaacctattcaagtagaaagtttgttgaccaaagtagtataacaactgtgaaataaatctccttctcctgaacatttatttgcaatcaaactattttctttttagttaaaattcgataaatgatcaaacaacaaccatagctgatcacctcaatttttgacactccaacttgacccagctgctagatgtgctattatcgtatatataaaatttggatgaatggta

SEQ ID NO: 100619 - DNA, 533 bp, Cannabis sativa
ggaagtgatgatgctgctgttactgatctcatttccacactcaactcttagtttgctctcaaagacatgggtcccatgcattatttcttgggcattgaagttcaatgtacggaccaaggacttcatctatgtcaagcaaaatatgctcgagatcatctgctcaaagctcaaatggtggatgcaaagccctctccaacaccaatggtcagtacaatccgtttatcagcctatgagggggaacctatggcagatgtccaacactatcgttaaatagtgggggctctacagtacctcaccattacaaggcctgaactctcatttagtgtcaatcgtgtctgccaattcatgcaaaagccattaaccacaaattggttggctgttaaacggattcttaggtacatcagcggcaccacaaactttggtcttcacctaaaaagacccaagtccttctatcttgtggccttctgtgatgccgattgggcatccgaccctgatgaccgacgttcaattactggctttgccattttctttgg

SEQ ID NO: 100620 - DNA, 842 bp, Cannabis sativa
aatggttccaatggatggaaaagaatgggttatttgtggattgggactccttcctcactgccttacaatcacgatttggggcttccgtctatgatgatccactatggagaatctctaagttgactcaaacaggtcgagtcgctcaatttcgtgcagaatttgaagatctgatgacacgaataacaggtgtgcctgaccatttattcttgaatttcttcatttggggacttaagttggaaattagaagggaactgttgtctaaaccaattgatttagctgatgctattgctaaagcgcagctgtttgaggatagaaacgatgatatcttgggtcgctttaagggcgatggtatccgttccggatggtcttcccgctctgttacttactctcaatctccaatctcgaattctacgaattcgtcgtcctatggctcaacctccacgaatgtgcaaagcccgaagtccttcaaaacaggttcctctccattacctgttaagaagctcactccagctgagattcgagagaaacgggagcatggcttgtgttttacttgtgatgagaagtatagtttcggtcacaaatgcaagaatcgggtactaattttgtgtggcagggatgaggatgaagaggacgagaccactccgatggcagaatctgacaagggagagttggatgacgcgaatgtggatgaagtaagtttgaatgctctgtccaattcagttaatcccagaattttcagattaaaagccactcatggcaaggaaaccgtggaagttctcattgataccggcagcaacaacaacttcattcaagaatctttagccactcggttgaatcttgtt

SEQ ID NO: 100621 - DNA, 733 bp, Cannabis sativa
  modified_base (28)..(36): a, c, t, g, unknown or other
ttatatatgtttattttcattgttttannnnnnnnnttagggtgttaatcaaacatacttcttagtaaatctagatcctggtaaaataatttccaacaacaagctctttttcattttcacttaatggagaagtggtaggccatgttcaaccttaccgtagcttacgtcaaggagatcccctatctccatacttgttccttatttgctctgaaggtctttcaaggcttttgcaatatgaagaagctggaggaaatttggaaggattacgtttaactcgaaactctccagctatttcacatctcctcttcactgatgatagtttgttgttttgtcgggctactgaccgatcggttgttgcactcaaaagaacacttgacacataccataaggcctcgggtcaggtactaaacaataacaaatcggtgatgtctttctctccaaacacatcggttgctgcccaaaatttttttgctcagacatcacatatgcctatcactgaatgtcatgaacggttctttggactcccgtcttactcgggtagagataaacaggagctttttagccatattaaagaaaaagtttggaaacttctccatgcttggaatgaacaaattttttcggctgggggaaaagaagtattgctaaaagcggtggttcaatcgattccaacctaggttatgagctgttttaaacttacaaagaaatttcgcaatcaattggagagtatgatggc

SEQ ID NO: 100622 - DNA, 757 bp, Cannabis sativa
acaagatttttctaaagcagggccttggccatttatcactagactggctcgcaatactatttcccctattatcaaccaccctaaaccattccctgctcttccatcactggtcacttcgcgtgagaaagggaaacaagtgatctaggataatagcagcccctctgcatcaacaaagcctattaattttcagtcctttctagcagagagtagttccaaggctggtacatcttcgatcattaatttggacaagcattgtgatgataagccgatcatttatctcttcctccttcaaccacggttaaaacagtcaaaaatgtatatcaaggcaatatcaataagtcggcttctgtttccgcaacaacatctattatgctttcagttgcaactcctccagcatatgttcatgtttctcctcagaatagcagtcgccccttttcccaagattccactccagtaacaacaaattccacattggttacatctattcctctggatttctcggctgctaccatttcgactgctaccactacttcaccaattttcactcatactgagaatagaatgccatctattttcactaaaaggcagcatgtttccactggaggtaatgtgcgcactgtgctgaagagatgtcgaacaagaatgactcctcttgaagattccaccaacctttcatcacactaacatcctgaagcttcttatgaaaatgctgatgtttcactacaagcagatggtgatggtgctctcttggcgaagg

SEQ ID NO: 100623 - DNA, 1035 bp, Cannabis sativa
gacaatttgaaaatcctcaccatgataaataactctgtggaataatttattggtactcaattagcaaagtatgatgcgacaaaagaaatctgggaccatcttgcaagattgtatacacggtctaattttgcaaagcagtttcagttagaaactgatattagagctattgaacagaaagatatgagcattcaagaattctattttgtaatgacagatctttgggatcgattggcactcgccgaatcagcagagcaacgtgcttttgcactatatattgctcgtagagaggaacaatgattggtttaaaatttaatagcccttcgtagtgattttgagggactttgtggttctatattgcatcattctccgcttccttcaaatgattcagttgtcagtgaattgttagtagatgaaattcgtcttaagtctcaatcacagaaaggcattctctcaacacccaattcttctattttggtagaccctcctactacattgtttcctccataagagaacaaacttcacacaaagattggtattgatgagtgtagcttttacaaacataaagatcattggaaagctcaatatcctaagcttgcgaatcgtgcttcacatcaccaaagatatcagcccaaacctcctcatatgggtaaccagctaaagtttaacaaccaatttcgacctccacaatttagtattgttgtagttgttcctccatctgccgcttacgattttgttgctttgtcaaaatagtttgaaaatctctttgctactcaatctaatgtcatgtctatactttggtaggtcaaccacctactagcacgtcaagtatgtcaccctctacgtgcattttggactctggtgcttcacaccatatgtcttagcattaggcatcttttatttctttaagtcctacattatttgtgtctgtcctactgatggtactctcatgccattagctggtattggtcctattgtcagttcaaattttttacttcgtaatgtttatcatattcttaatctttcattgaattttgt

SEQ ID NO: 100624 - DNA, 715 bp, Cannabis sativa
tcaccataaataggcatgttgataggccccctagaattcaccaaattagagataaactggatgaaacggtccctgaccttagagcccactcttcctgaatcacttagcacaaaatttgtatcacccaagataagccacgacccaccaaacctgtcccctatattcatgaacttctcccagaaagccttctcagcattataatagggtggaccatacacacatgataataaccaagggtgtgtcggggaatccgagtaaacgagccctgaaatatggtttttggaacaagcaacacattgaaagacaaattcgatcttccaagccaaaataattccccctgcattcccaacagccgacacatggacattaaagtaaaactgcaaggaattaagagtacgtaccaaagaagtagcattaactttgagctcggtcatgaaaataaagtccggggagcgcgaccgaatcaggaacttcaactcacgaactgtagaggtttgccctaaccctctatagttccaagcaaggcctctcatgtctcctgtggaggagatatgacattctcatccacatgggtatgagagtgagccgacctaagagagcgagaggcaccaaacaaaaaggtgcttaccaaaggacgttccaataaattatttcttcctttgaaactcccttcaagcagctcatccgatcagtagatagagatcgatttatcatt

SEQ ID NO: 100625 - DNA, 1289 bp, Cannabis sativa
attgtgacaagttaaatttacacactgagatatcaacaaactagtcacaaattaggtagtttcaaatctctcaattttgcaaaacaacatctttgaaaattgatgaaattactttaccataactaagaaattgatttagtgacgtcaaaaagtcaattaggtatcaacaatataagtctatactcatataacgtcccgattgacgtaatgacattaacctgggtgcaggatgtcattctaaaggctggttgttaatgtaagcgctattattaaacagtctttaattaaagagtcataactcacttaatcttgacacgactaataattataccgttcttatatttaccataaacgtcttgacatgatagtacaaattgtgtatcataggatgtatataaaatgactttttttatttatttgcttttttcgatttattttagcatataataatataagatcgtatgcatttaccaccaaactgaaagctttgccaatttaattgttaggaactagttataacttagttaaaatttgtgattatcactctaaaatagaaaatactaattaagtgaaatagtattatattattttccttcataaaatatttttatagaattaatctgatatatttttaagtttataatattttgtttgattcaatgtattttttttaaaaaataattatagtatatattttgtattttaaaaaactttgaaaaagtagtaaacattactaaaataatcactaaacttttaactaatcactaaacaatagtatactttaagcagtaaaaaatgtgttaatattagtactttataaaatttgtttataaaaatattctaatatttagttaattttgtaaaaaaatatagcattttatgacacatttaaaaaaaagttaaaaataaataaaagttgatacttttataatcaacaaaggcataaaaataacagtccacaaatatctcatccaactaaaacgtggcaatctacaagctcctcacctaatacagatccccacccgcaagtgaatgacacgacccatatttagcatagtgtgcatctcacctcccacccaaacgtttgtccgtacatagtcccaccctttccattgccttgcaatcagctacgacaaaacttttgtacattttttttattcaacttgtaattggttcattaaatttctctatatataccacaaaaaattataacaatactaaattaatactcaaaaaatatatatatcatgctaacaaaattatatatactaccattaaaatatgaatac

SEQ ID NO: 100626 - DNA, 924 bp, Cannabis sativa
tcgcttatcatatcaaaaagactagactcgactcattgtagttggctaaaagcaaagtcaacacaatggatgagctcttggacgctcttgccctgacctacagtcctgaccccgctctgcctcaagcacaagacctggtggtgactcccgggagttcttcctccagtcttcccttagaccaagttgttttaatcgacgaggatgaggaggaagcagaagaagaaggcgagattctccctctattagaccggaagcgaaaaggaaagatggtggaggctcaggttgctaagaagcccaagagggtagacactccggctcctagctctaattcagggatctcgtccgaggtggacgagtatactatccctccgggcatcatcttcacccctattcctgctgacgaggagataacccaactccggatcgccaagcataactatgccacaacaaagtacacaaaggggaataccgatgtggaggccttgaaaaagattatgagggaggccttggacagttttactcgcagtgagtacgccaggaatgtctgtgatttaaatctggatcctttgacagactggttcaactgcttcattggacctactctagccccgtttacctcggaattaatgagccattttgctgcaggcctagtttaactccccatgaagagatacgcagcctgtgcgtctaccaacccggtctaccagatccaggacgtgagcgcagccatgaccgcggtaagttcctatctgttagaggtattttcaggcttcttgtctttttggtgcctgacatcatgtattccttatacaaatatattttttgtttgtcagattgttgcggagattggtcatctttcgaagactcttatcgaccatgggtacaccatgtccgagtttgggggcatggaggaggccatgaaga

SEQ ID NO: 100627 - DNA, 1094 bp, Cannabis sativa
cagaataaacgttaggaaacccactaaaattttcgagaaggaattcaggcgagtttttcgtcttggaaaattaggcttaaaacacatctcattttggggatcacactaatttttaatcttgagaaggaattcaagcatatctttcccttgggaaatttggctgaaaatacatctcatttttgggttaaacccaagttacactaaaaaatttacatgtatcaataaagtaaataatcatagcacactattcatttttcgggggcatacacaactacgtatagtatccccacgtgagctgggaagtttggatgtctccaacttcttggtcacttgtttaaaacatagcttgtggcttaaaaacaaaaaatgtaaaatttaagtataaacttcttctatttttatttcattgtacctgagggattacataaattagagaattgtagaaaaatttacataaaacttaagaggtatatcaaggctttgtcacctcagcctattggtagtactgacacaagtggtctgcattccaggtgtgagggaccctcaatccatccatcctcttaaaaggttccttgacccaccttttggagtatttcatattggccttccaaatttaggccaagtacccccactcttaattcttacaaagttaggaatactctcctcaagacaaggtcttcaacatcaaatgtatgattcttgactttggagttaaagtgccagacgatcttgccttggtacattttgaattgaacctgtgatttttctaagatttccttgattaggtccaatgattcctggagcatggaatggttccagaaagggtcataggtatctcgttgatgagagggtgtcatgacctcaacttggattactgcttcacacccataaaccatcacatatggcatgtgtcctgttgaagttctttccgtggtcttataggcccaaagaactcacgaaagttcttttggctaataagctttgcatgcttgcaatttcttcttcaatgttgttttcaagattttgtttatgtcttacactagtctattggcttgtggttgggctacagttgagaaacttttcacgattccatg

SEQ ID NO: 100628 - DNA, 1036 bp, Cannabis sativa
attagattttgatccaatgacaaataataaaagagaaatttgaatttttatgtttaatttagctacttaaacataaatatcattaaaaattaaatatcatatgaaattaaaaataaatatcattaaaatttatatttaactgataatgactcgaaccacacataaatttttattttctcataaaaaactatataatcacaacaagttttatatttatttgagttgaaaagagttagaagcctcatgcataaatgatcaatctccttttccagttttccaattcaaacaaaagtaaaattaaaagatttaatttatactttttttgaaaatgatttaatttatacttaaaatagtattttcaagaccgtgagctaagctacgcttttgtcaagaagtggaaattcatgtgtgcatccaccatctgttctagttcaatcagaggcaaaacatcatcaataataataataataatgtaacccaataatttgacatcaattttttttttttttttaaaaaaattattattgttgaaattgggcgatgacaacaaaatgtttgattggtatgagacgtgatgatgaagttgtggaccttatgtggtaccccaccttacagtgatttatgtaaatgaaattatcatcatcaattaatccaattttttttaaagattataatatatactattattgtaagaacaaataaaatataagtcttgatatttatattgattaactttgagattctaattggtatcaataatggcataatggcatctgagtatgccaatatcattctcattgcttgcttccttgtcatcaacaactcatgaattatcaaagaataaaaaaattatttcacaaatacatataaataaagaaaaaattacaaaaaatataagaaaattttacatcaaaaatacaaaatgttaactttatcaccaaaataccaccacacggttacccaaacatttatacccttttcctttaattttttacatttgtaccacatgcacacacaataaatgctttgttgacac

SEQ ID NO: 100629 - DNA, 1277 bp, Cannabis sativa
cccgagttgttagtggaattctttgtaatggtcgaactacataaaagaattgagaattctttggccgagttggaaagagggaaagagaaatgcgagtctcctgtgccccggtcgcgttcccaaagcccgaaaggaaaaaattccaaaggttgaagccccagaagacgtagtccattgaggctacgaagtccaaagctcgccaaatctccctctaagaaagagacatcccaaaaaggaaagggggcccacgttttttcaattataccgagttgtctgttcctcgcgaccatacctatgtgatagaggaacataatggcgttttcagaaagccaccaccaatcaagggtaatcgcgacgaaagggacccaagaagttttttaagtatcacaaagatattggccatacaactctagagtgttggtttcttcaagaaaaaattgaagagttaatcagacaagggaaattcagccagtataagaagaacggagaaaatcatccccgagtggatgatagcaacaatacgaatgatgcaagtggtactcgagccctagtaatattctgactatcatatgaggaccacatgttggtggagaatccagaaaggcgaaggagcgctatgcaaaggaagcaaaagaaaaaccccttaccaatgtaaacaatttgagtgaacaactagagaagttgttcaaaaaagaatgagatgacgtcaccttcatggagagtgatgccagatgggtaaatcatcctcatgtcgatgatctagtaatagttgcaaatatcacaggggatgatgtacatcgtgtcttggttgacaatagaagcttcgccaacctcttgaatttacaggcctttaaacaaatggggttgcatgaaaaggacttgcgaccagtaacttcgagtatttatggtttcactggagatacaatcgcattgaagggaatgatcaacttacccataactctaggaactgcatctgtcaccgccaagttaatggctgatttcgcagtaattgatcaacattctgcctataatacggtgatagatcaccccattctaaaagaaatgaagatagtcacattaatttattatctcacaatgaaattccccaccctacgggtgtaaggtcagtgcgaggagtccaggcaaactcgagagaatgctataatacacgttcaagatcgcagaaaagaagaaatcgatcaatgtcatctatttgctcgaggctcctcctcctcagcatgaattttagaatcgaggaaatactgcatgttgaaaaa

SEQ ID NO: 100630 - DNA, 1033 bp, Cannabis sativa
aaggcatggattattcttggtgattttaatgcggtgttcaatcatgatgacagacaaggggggaatgcggttagtgcttcggagctagtggattctaataactggattgtcaactcttctgttgggccaatgaaacgtacgggattgaatttcacatggactaataaacagaatagtaggatctttcccgcatagaccatgttttccataatgaggaatgggttgacgatttcccgaatacttcagctcacttctcttgggagatttgctcggatcattgcctttgtgaggttcattctaatgctattgagtttattggtagcaagccatttcgattctttaacttctggaccaaacacccatattataaaaggactgttatggatagttgggggaagtctttgagatgtagtggtttgaaggggatttatctcaaaactatgcgcctcaagcacaaactgaaagtcttgaacataaatgggatagggaacattggagaggtgtatgagaaggccgaagattcttacattgaggctcagtttcactgccaagctaatcctaatgaaaattatttccttggtttggagcttgaggtggctaaccagtttcacattcaggtaaaaatgtatcagagcttcctgtatcaaagaagcaaagtcaactggattcaaaaaggggatagcaatactgcttattttcatgctttattgaaaaaaaggaaggaagaaaataggattgtttcgtttgtgactgagcaaggggacttaaatgatcattttcctgatgttgtgcaacactttcttagccactttcagagcattatggggaaagcaaagcctactagtatggagattcaacctgattgcatagctttggggcctaagcttaaccttgatcaataggtttatcttctaaaaccattctctctcaaagaagtcagagctgtgatgtttagtatccctattactaaatctcctggccctgatggttttggttcggaattctttcagtctgtttggcctgaggtggggaa

SEQ ID NO: 100631 - DNA, 747 bp, Cannabis sativa
ttattaaatctatcacttgggaaaaggaaccgcgtacttatttgaggataaatatgtgtatcagtgtatgtatatatattggaaatttttaatatataagcttgtaaaaaaaatctatatataggagtgtcattcaatgaataaaagagtgtcatgtacgtgggtgttgttttttgttttgagaaatatcatgtaattattttatactttatcatttttctctctttgtctctttaattccctttttcttcttctttgtgtttgttttcttattgtaaatttgtaaatctgaatggtatttatatattccatccacccaatccttaaaaggcagacgaaactcaactaatttacattcatatattcaatttaattgaggatttgagaattttatttcaatgtttattttgaaaattttctttcatttttattttaggtctataaatttatgtgtttttttatattcttaaacctcttccctaaacctttaagactagaatcacaaaaaatatcatttaatctattgtggatatatctctaaagtacaacatgagaaaaagagatagaaaaaaaaaatgagaatttgattataggatgggttcattgaaagaggtggtgattgggttcatccatggaggtagtggttggacttatcaatggtttgtgaaaggaaaaaggtccataaaatttcaaagagagaaatgaaaaactgagagagaaactaacaaaagaaaaaaaaaatcaaaa

SEQ ID NO: 100632 - DNA, 925 bp, Cannabis sativa
atgtctaatgttattcaacacataaaatcatgtccaacaatcaaattgagtccctacctcattaggatcgtcaaactttctccaaaacagatgctcctaagcccctaattattaagttcaaatagattagtcactttatcctacattctcaaataaaataaataatttttatctttgtaatgtattcttaaaaccaagtccaacgacatataccatgactatatttgaagattgaagtaaccaaccctacgcggtgcacaaagacgatcagtgacattaaaaattggtgtacttgaaacatagccaaaaataagaatagtatatatgaaattaaccacctcggtaaatagatcacacccgtgccaaccacttatcgaaacagtatacggtatcacagaaagttacgaggaagtggcaaagctacaaaaacatcaccagaaaaagtagtgaactgggtcaaatgatttagtggagatttttctcctcgaaggtgagtctagcagtgaaaatagatcattaaatggaggttagagctagccaaaaaatccattcaaagtttgaataccaaactttgacccacgatcccggtctaatgatgatatttgaggcaatgccacttaaggtgaagggttgcggaagttggagagtacaatgctccgaagcgtgcgattgagtggtgaatggaaacaagttgtcggagcttggttagtcatggtagttatggtggttctttgatgtgagagaaagaaaataagaaagaggaaagagagtggtagtttgtgcgagaagggaaagatgagagggaatgtttaataaagctgtgggtcccacccactaatttaatatacaatttttttaccgactctaacatttatccctcttaaaaagaaattttatcccgaaattttgagatacaaccccaagt

SEQ ID NO: 100633 - DNA, 574 bp, Cannabis sativa
aaagcattaaaacaactgacctaccaaaggaaactttaggatacgatttttgttgatccatttttaagatcaattgataatttaacaatttataaatgtattttaatgaagccttttgttcagttctgcgtttatttactttggagctgactcattacacaaatatgttattcgccctgtctcgtcttgtgcaccatagcttttataataagtaatgtttgacaaattaatcaatgatctatgtttgaactctagtgattgcttatttgaagtagtcctcatatttgccagcaatcaccttttttttttattgttgatttctcattattaggttaggagttatgtatagtttctacatcttaaaatatttcaaataagataccgaaagggcagctcaaatggtcaagacttgtggtatactctcgcaagatttaaagttcaagcccatcctaggttcctacaatgatgctacagaaatgaaaatccaataagatgagataaaacccttggtgtgactcagattttggtagtttggcaaattctataatggattaaaaaaactgaaaatacatgt

SEQ ID NO: 100634 - DNA, 826 bp, Cannabis sativa
  modified_base (26)..(32): a, c, t, g, unknown or other
  modified_base (788)..(800): a, c, t, g, unknown or other
tctttttctttttttttcttttcttnnnnnnnttctttcttttcttcttcgtcttcttcgttttcttcttcttcaacccaaccccaaccagccaccgacgcaccaccacacccccaaccacaacaaccacacatcccgactactgctaactccggcccgccctaaccccactgcagccccgaccccacgaccccaaccacaacccccgaccccacaaccccagccctaaccccaaccacattctcttcacttatcggtggtaatctcgaaatgtaatattcccggataggaaaatcaaaattacatatatatcatttactagatttgttgatgaaaacctcccctcttgaagaaaattattattaaataagtttgaaacagatctaaccagcctcttcgtagtcggagacgcttcatggatggagattcttcgtagtcgtcgtcgtggtcggagagggaacataacgaagttgggcgatgctgactgagatgctcggggttgggggacacctccgacgagatgaggatgagaatgggcgtgggtttctttgggtataagggttgtggttttcctgggtatcaggggcgagttattctgtgggacttgggtatcaactatcaagggttgtggttggggtcgtggggtcggggctggagtggggttatgggtggccggagttagcagtcgggatgtggttgcggttggggtcgtggtggtgctccgatggctagttggggttgggttgacgaagaagaaaacgaagaagacgaagaagaaaagaaagaannnnnnnnnnnnnagaaaaagaaaaaaagaaaaagaaaa

SEQ ID NO: 100635 - DNA, 930 bp, Cannabis sativa
  modified_base (868)..(904): a, c, t, g, unknown or other
tgtgcaagaaagggtaagtctatttcaaatcagccatgagtgtgggagctgggcgatgaatgtacatgttggggccatactataccaagcagtatggggtttaccagtgttgaaactttttgtaactctgttttgatgcttaggtcggctaaggggaaaattgtactattttgtaaaatgatttttttgggatcccaaaacatgtaacttttatttgtaaggttaagttgtaaaaatgtcacactgaaaactttttatctttccttttattcatgttcctgcttcccttcctaatgaggaagttgaaaaatagatgtcaatgtttctaaagaagaagaagacgacactcttccttgtactcctcttcgtgacaagaaaaagcgtgcgtcgacattgaaattttgcttttgttgattttggtttgtctgatttgaagaccactccattgaagtttatgtcttcagactctcaatctataagagaggatagggttttcggacttagagtgatttggaggctaggtgaaggtttagtcacttacattttctaggctaaggttacgacacctttatataggaggactaaaatcctaggttacagtttaaatccctaggtatttgcatagtttgttagataattaccaaagactaaaatagccttgaatctagatacaattttagtcattctgttaagcttttagggccaaatttgtaacccataatttgatgtccatgtttttggctatacatagagtcctaccaggttaatcttgactgcccatagacctacaggggatgtttggccgcccaaggcctgtagcacctggcaggtcatgtgtctgccaagatcatgttggaaattattttannnnnnnnnnnnnnnnnnnnnnnnnnnnnnnnnnnnncaccctaaatatgaacttctaaaatg

SEQ ID NO: 100636 - DNA, 823 bp, Cannabis sativa
aggcccatcttttgtctaggctggacttattctcgtggaaaggctttagtctagaccattttaggctaatcctactttggaaaagccatgtgtccccccttctggaaacacgaacaatatttatccccaagttttgggacttgagagtaacggaggcttgcattcttctttctggattgccatggacacgtggacaatcttgaaaatgaagagaccttttcaccttttatgtttccgaatgcggaaggttggaaacttttggattacagctaatgtcatgcacatgtcattagcctcttggtctgtgaacctcatgcacattgggaaagaccatgatgcttgggataccgtgatgatggctaattcatgttaccacaggtattgatgtgaatatcattatgaaaaatgcctcggttccaataaagacaattaaatgaaagctttcagctcctcaattgttcgatcatttctttacgttcttagatgatatatgagtcgttgatcgcttaagctctcatatcgccttccttcacttataaataggaggaagaaacacacttcactatttttgttcactttgtagaaagcataaacctccagttcgtccccggtgaatgtccaatcccttcgacgatatcttaaatcttcttctttggattcgagtgagggagaatccagaagcatcaccgccaaatctgtctacaacttgttcaagttcattgaagctattgaacgttcaagcagggatcaacgaaatactagcttgggcatacccttctccttcaggtaagtactctccttcttttgaactgttgatttctct

SEQ ID NO: 100637 - DNA, 563 bp, Cannabis sativa
aaatccctttagcacatatatggatccccaagtacttaaaagcaagtgacttctgcaaaaactagatgtttcaagtattctttccacttcttacaatgaagccaaatgttttagaaaataatttcaagccttgcaacatgtagtaaatagacttaaaatctccatgactgaacataagaacatcgccaacaaagcttaaatgattaagtgctaattcgtcacacctttcatgaaatttaaagtctattttattcccgattttccttatgattcgagataggtattccatctgatcctggggctttgttgcctggtttagaaaagattgcctacttcacctctttagttgtataatccgccagcaacatttgagcttgtccctctgttgtggtgttttcaacacgcaagtatacgtattgttttaacaagtaatactctaatgagtgagattgttcccatgggaaccgtagctaagtaccaatcaattaaattcttgtttctatatggtaatagaatagataaattttgaaactaaataaactaagaaaaaataaataaaacaa

SEQ ID NO: 100638 - DNA, 627 bp, Cannabis sativa
attgaatagttgaggagtgtttgttatcagattctgcctataatgtggttaatttcttaggtttcattgtattaaaccctagtattgttcaaaaattgagtatgctgtggattttagtgtagttgattttctagattttattgtgtactgataaaccctagccttgttctgcaattttgtatcttatgagtctgttttgttcttcttactacttgttaataatgataattcatgtatgaacatggcaatcttgttctgcaattgggtatgttatggttttgttttttaagtaattgttaatgtgtggttggttttctagttttcaatgtgataaaccctaaaccggaacattaaatgtttgttgcagtaagacacgtggtaccgtagctgggcgcaagctgaagagccaccgtatcaagcaaaggtgggctgacaaatcttacaagaagtctcaccttggtaacgaatggaagaagccatttgccggttcttcccacgcaaagggcattgtcctcgagaagatgtgagattctttttcgatacaagtctttgttatgatcaacaagctcacttgattctaaaaatactaactagtttcgttattcattgtgtttcaacagcggtatt

SEQ ID NO: 100639 - DNA, 968 bp, Cannabis sativa
  modified_base (783)..(800): a, c, t, g, unknown or other
tttttggcattgtaaactattcaaaaatttacaggaataatactgtaactataattaatactgttattaaaaatattttggtatgtgatttcgtgcctgaaaattaaactaattcgtgagtgggactggtggctaattaaaaaaataattaattgacttgggtcaaaagtccaacaagtattttctttaatggtaaataaaataaattaaaatagggcaccattttgtagctaagggaagtcaggaggagccagtatcaaccagtcgatttgttatttttaaaaggaagaaatatggataaagtaatgttaataatagtaatacccaatagtcaaaccaatcggtattgaagtaaaatttcatgaaatttgcattgcaaaccaaggcattcatagatgagtagatttgaagtttgaatagtgttaggcaagagaagagctacactaatggccactaggatagtataatttaatataactatttttgtgaaatatcgctaatcattcttaaagtaccactttacattttacagtggtatttatattaggagtgaaaatagatcgggtcgaatttgatccagtgatgatctgatttgattcaaatcatgtaaggattcgctccgccccgccctgctagataagataattcgacccgacttattcggaacgaatttgatacgattagattttttttaatatctaagcttataattttatattcattttaattttgtattagtattatttaatataatactatgtttagtattgacttgtattaatnnnnnnnnnnnnnnnnnnatatattttcaataaactcgactccaatataaactacgagtcaggtccgagtccaagtcttgggtctcagttccaggttcggatttgggatctggatccgagtcgggttaacataactatctaaaaactggatagggttaaaatgtgtgtggtgtgtgtgtgtggatg

SEQ ID NO: 100640 - DNA, 575 bp, Cannabis sativa
tataacgaaaaatgttgaaaaggtgttattggtatctagtacaactgatgtctagtacattcttcggtgtcatactgcaatagtgtaattgtcgctcaacaatcataaatcgtcatttatagaagtgttaggcaccactaattcactagtacccaatatcaatactctttttttttttttgaacaaaaataattcattaaacagcactatccgctatcaccatagactgaagagcatgtgaaacattgttctcagtaaaaagataatcaaaccaaaaacaagatatcaatactcttttttagctaattccttattttctagtaattttttctttacataggtatatattaaaaaaatatctcaccaaataaggagaaagtttgtaagagggtcttatatatcattattcaatgatgctatataaattatccatacaaaaaaaaaatgatgctatatatgtttttaattaatttttcaaaatcttataaaacaaaagatattacagcaaatttatatataatttcatcgtatacctcaatccaagttgggacgcatgcatgttacacgaacgaaac

SEQ ID NO: 100641 - DNA, 641 bp, Cannabis sativa
ctggcgggtgcgttgcacgactcccgcctcattggggtttctttcatccaaggattttgtgagactttcattacggttgagaagcttcttgaactcaacttcattgatgccagagggacggttggggcactgagggttagtgtagaagaaactacaagggaaaattgcatcggttgagaagtcatttaatctgccataatagtggacaaggctcgtgacaccggacactgtgccagtttgatgcttcggtgactgaagggattgacatagttggcggtgtggacaagtgtggcaaggggacatttagttgctccatagttgtaactttattatgggctagaggaggagatttaggcaattgcggggtagtagtcttaagtggtacaccagctgctactctaggtgagttgatgggcattggagtgggactcatcgagtgaagaggttggtgggaaacatgggggagcaagttgttgagcgtacaaggttccatcttgtcgtaatagttgggatatgagaatccgtatggacaggcaaggagcctggactgtttgaaggtcccgccacaaaaaggccaacagaaacagtgcgaccttgactgaagtgctgaatgttgtaatctaatgtcggggcattataag

SEQ ID NO: 100642 - DNA, 871 bp, Cannabis sativa
cctaaaatatccaaagctaaattgagaaaaatattttgttgtgaataaaaacgcaatagataaacattattagctcgagaaaagcaagataaaatggcataacagtaaatatatataaattagcaatgttgaccatcaataaagcaaagtttaaatattacaaaatgccacaaggggcaaacaactgtctcgacctaaaagtccattgctcaaaagataaaataatgaaaactaaatctacattattggagatttagtagggacttcttcttcaatatccttggcatccttggcttcatccttttatattttctcgcaaaaagcaagcatctctcggctccctcccccagaaagcttaagtccatgtttggattttttatccatgctcgataaatagatcgcttggcgatcaaatttatcctagctatggcattgtcctcgacctcttcaagctttttgttggcttcgtcaagcacctccccggtcttctggtgagccccagtgagatcctcagcttgttttttggcagattcaagttcagtcttgagggttttctcctttttctcttgttcttcaacttgcttcttctacagagaaatctcactttgagaattattccattgcctcgcaacaacttcacattgttcattagacttgcgaagttttgtttctagctagttgattttttaaaagtccctttgttaagttacaaaagacagatgagatgcctgcaaaaagcgaagtcagcaggataggacatgaaaagaaatattatatgtgaatacaaaatgaagaaaaactaactgagtgcatgagatcataactccttgtcacgagactttgaaagtcacccttattaatcaagtcccag

SEQ ID NO: 100643 - DNA, 527 bp, Cannabis sativa
agtagaaaataagagagataattttgggtttgataaaaaatgaacataatttaacattattggtacctaatgattagggataaattttaacttaataaatgtatataaagtcaaaattcccatagaaaattagaatgaaaaaattgaaaatatatttttctatgttagtaaaattacttcaactatacaatttgtcatgccgcaaactggttttacagttttgtaccatgagttgttctaacctttaattcattcagtttgtgtttgaaagcataatctagtatttagtaataactcagaaatttatcatttatttctcatatcttcatgcatattattctacctagcttcttcatttttaaagatttactttttcaatggattttgctcacagatacaaaaggaataaaaggcaatataattgaagaaagaaagaacagaggaaaaacttacaagaagttgaagttttactacttaaaaaaaaacatacttatatagcaaagaaatgaacattggaaaaatgacct

SEQ ID NO: 100644 - DNA, 1299 bp, Cannabis sativa
  modified_base (1253)..(1255): a, c, t, g, unknown or other
tgatgatgataagattctaaaatttaaaaaaggattcactttgacacacattatactaatatgtctgccatctggtatgtgtgaaaagtctctctttggagtattatgtttttgttttgtcccatttgagtgtatctggtcttggagtatctatttcgatttgtgtcaaggagtctgctgtggtacttttgccttctattcgttttgttctttcctctctggtgttttatttcgactgtcgatggatctgcaagagttggaagatcagtgggcatcgttggaattagaggaagacgaggagatcgatttggttgccccctaagtggagcaggaggaattggtgatcgacacacgttggtgtttgattgggaaactgctctctggacgagtaagtgattttgatgcttttcaaaatatgatggcatatctatggcaacccggtaagggaatgtatgtcaaagagctgaattctaatctgttcttattccaattttatcatgagatagacattactagagtgattacagggagtccatggactttcaacaaaaaacaactgattattcataggttgaaggaaggggagaatcctagaaacgtgaatcttcatttcctggatctatgggttcatatctatgatttggaacatggatttcaatctctaaaggttgtgacggatattggaaacttgatgggtaagtttgtggaatcggatattaataatttctcaggagtatggagagaatatatgaggatccgagttacaatagacgttgaaaaacctctccggagaaaaatgaaaattttcagagaggatcgtagttggttctgggcgaattttaaatatgaaaatctttcgacgttttgtttcatctgtggaattctgggtcattcagaaagattttgtcctaagttatttcacactcctgcccatttgattcagaagccgtacggtatgttcttgaaagctaataataaacgagcgtcggagaaaataggagcaaaatggctccggtcaggggctgctgggggagtgatcgagaaaggggaaggcagttcgaatgtggtgactctggcgatgtttggggctggacagacggtgatgactgaggaggtgattgagggaggtggtaatcgtgggctggcagctaaaattgggggagggggagttatggtgcatgatttgagggagaaaagagtggagggagattcaaatggtgataaggaagatatgttaggttttatgccctaannnaaactctatttcaatgtaatctattttattcaacatcaataaag

SEQ ID NO: 100645 - DNA, 621 bp, Cannabis sativa
aatcttgtcccttcatttttttttctggttatttaagattttcgccctaatgacttatatattattgtaccctataaatttttcagctcgatacaaatggttcttgaattatttatagtattgtaaattggtcattctgttaaatttagtcacgtgacaaacaaaatgataatatggttatttactcaattaatgtataagcattgcgtgtataatacacaaatcataattcgaggacaaaaatcttaaatagtctttctttttactttaattgattgattaatcaaactacttttgtatgtaaatcaataccatcttgttaggagtaagaataacaaagatttttactaaaatatgtaacatttttttctttttttttttttctttttttcataagggtaaatactattttgtactttctgttttgcaaaaaatattaattgaaccttttattttattaaattacaaaatgaatcttatattttctaaaaggataaaaatatataggtccttaagctaaattttcgatattttttttttaatatagccaacttgaaaacaattcctaatacgaacagatataaaaaatgtaaacagttatgtcataatacctttagatcg

SEQ ID NO: 100646 - DNA, 668 bp, Cannabis sativa
aattaataatttaaaattaataaaaaatttctataattaaaccctaattatctgcaaatttctaaatttaagctaaacggtctttacacagcctcctcctatacctttgtaagattatttctcttcctcataacaagtttttccaaataaatgaaggcgagctctccaattttgtggagagaaaattaccattataaaaatagatgtgatagtgcaccttagacactgaagaatctgaattcttaatcagcctccaaacttgcttggaactaaggctttattctgcaactccaaatctttgaaacccaacccccttgttcctttgttttgcatagaatttcccactcacaccaataagttttctgcttgcactcagtttaacccaaccacaatttagaagccatagtatggatactattaatcgtatttttagggaataaaaaataactcatagcataaattagcatcgcctgaaccactgctttaatcaacacttctttaccagtcacaaagaacaaagaacgtttctaaccctttaacttgttccaaatgcgatcctaatgtattaaaacccaagcttttttcatccttcccacgaacctgggcatacccaagtatctttcaaaatttagagtcacctcaccacaaaaatattagccgacaaacca

SEQ ID NO: 100647 - DNA, 559 bp, Cannabis sativa
ataaatgttaattctgccgtgtgacagtaaaattgaaaagtattaccccaaatccagtatttttgtaaaatgccctttattttagggggaatccaaagaagccatcacattctctttaggcccaataataggcccacttttcataatggacaaaatgtccaaataacgagcccaatatgtgtggcccaatatccagatactaagaaagagatggcgaggcggtgagatatgctagattgtgctactgcttcccctaacaaggtatacagtacaatcctccaaactccatggatgaaagcttccgagcccgagtggacaaggtgttcggatcgctcgcctcagtgcggtcctcttcttcatctcttcagtcgtctccctggtccatcaccggcgatgaggtcgagcgtaaagagtggaggcgctgtgctgatacctccggtagagacgaaatgccttgttcttcgtctttcgactcgtttttgaagaaagatcggggagctttgcgccgaagaaactttgaggacgatcgggagggaatcgatgacgctgatgaagaagg

SEQ ID NO: 100648 - DNA, 875 bp, Cannabis sativa
aaaataaaataaatttaaaaattaaaataccaaaataaaaataaaataaaacatattataatttaaaataaaaacaaacaaaaaatatataaaacaaaattataataaattgatttaaacttttttcttaaaattgaatttagtaaataaataaaagaataaacctaaaaaagctaaacaaaaaatattatttctctaaatctaattttgcctattctgccccctctctcatcctcaatcttcaccttgtctaacccaaacagttgccagtaacggaaccaattggctccgaaattaattttcctctatatttcttaccattttctcttgcacacctctcccaccccgaacaaaacctataagtgatccacttgttgtgttccttctctcttgcacgagctccattagaacctaaacgaccagacagatgattgaacacagacattcatctcgtcttctcagatataggatctcgtctttttagatctcatctcctcattttaaatctcatcttctcgtcttctcatatttgagatctcatcttcttgtagaatttgggtatacagcacaaacaagggtttgctttgtaactaaatgagatgtggggtctcagctcttgtccctttggtgagcaagcttctccactctttcacctctctctctttcatttatgtttttggcagatttaattgctcgatttaatattttttttccttatgggtttgaatggagtttatttatttttgtgggattttaaatcgagagcgtggtaggtgtttatgtttattttattatatttggattatgggatcgtgtttgaatcgggatagaggtgatgataattgtggttgttttggattaaaaaagaggtggta

SEQ ID NO: 100649 - DNA, 669 bp, Cannabis sativa
aactatttttaagaagttaatgttagatactttaaaaaaatataaggattaaattattctctttggttataataattaggaaacaaatttcactttgtatgtgtggatgtattttgtttagtgataaataataaaaaaaaatatattaaatcaaattttaatattttttagaaagaaatgcactaaaaaaattcattaacagcatggataggatggagttgtttcgacctataagcttatgcaattttgtttataaggtgatttctcacttattgtcctagcgtctaagagggattatggatcaaattgtctcactatttcagtccactttcattctgggaagttggatagttgatgctactgttttagctcatgaagtggtgaataccatcaagaagaatagaagcaaaggtagtttgatggttgtgaaaataaatatgcataaagcttgtgatgggatcaaacgaaaattcctcgagacgatcctgaaggcgcatgggttctcagagcattttgtccatcttgtgatgaaatgtgtttcaaatgcctcctgtgtggttcttcttaatagtaaaccacttcaacacaggtctttgaggagaggtttgagacaagggaaccatatttcttcattcttattccttctatgtaatgatgtgttgtctcgac

SEQ ID NO: 100650 - DNA, 980 bp, Cannabis sativa
ttctaggcaagactcgcatacaggtaattcacctaagacgacattaggcgggttgaaaataggtccaacccgcccaattaaaccgaacaacccgattttgggttttaatttttttttaaaactttttagtttttattttatatagcataaatgattaaatatataataatataaagttttatagttaattgttagttttaaagtcatatatattgtgttgtactttggtgaaatgtgatatttttaatttttattgattttgactttgaaaataataaaaaaaaaaagtttaacccgcccaaaccgttggtcggtttacaattttttttttaaattaggtgggttgcacttaaattgtagcaaccggaattttagattgggttagaaaatatataggataaaccacccaaaccgactgatgtacagccctattctacataaatgatgtgtctttaaattattggtgggacagagttgaattaagcgtttatatattataacatgttttacctgagactcgaacccagaacctccaacactcacacacccacctatgaccacttgagctagccccaagtggttggtgggacagagttggtataggaaatttaagacatcagatttttattcgattcgaatagagcattggttagacatggtgtgcatgggtaagtggattagctggtgggtcctctttcgtaggattgttggagcttgcgtgcatttacaatcggtggagctttagttgggctatttaatgatggacccaacccataaatttagaccatatacatataaataatttgaaaagaaagcttgacacgtgagcattatatttcaatgtgggcttcattttctttgaattttaaaaccttgcacattttgaaaataacacaaataaaattaagtcagaataatattttcatctctaacaaatttttcatttaaaacttataaaaataaatactaaaacttaattt

SEQ ID NO: 100651 - DNA, 655 bp, Cannabis sativa
attatatatttgaaaaaaaaaatcgacatgttatttagagcgcgaaaattgactaaaagattgtgattaactaaaaactaccagggttagttttgaaaagatcgctatcatacttaaatacttctattaatcgtaatttatatatagttaggtgtatcttaaataaaactataaaaaaaataagagtaacatgaacattcctttaatatttcacgaagttcccataaaaaataattaaataaagacaaattctaatagtgttgattctcatgttcatggcaatcaagtttgtcacttcccaaaactttctctgtttaggtagaagatttgggcacagaaagagagtgattgcaactcctcccatcactacttttagggactatgcttgctgattaaaccattcttaattaagataataaaacaataaatgataacaaaacaacatacaaattgatcactataaacttgataaaaaaaacatcttattttagtgttaaaattagttactttactggttttaaaaagagaaaactttgactaaccaagtagagttttgaaggtaataaacttgtttactgagaaacctgtccaaaccaaaagagctcttaggcttaagccaagaaagcttagcattagactatgtctatgaccacat

SEQ ID NO: 100652 - DNA, 777 bp, Cannabis sativa
tccacaagctgatctattcttggaagtggaaaacaatcttttagacacgccttgttgaggtcggtgaagtcaatacacactcgccatattttgcttggcttgggtactagtacaggattagccacctagactgagtagaaagcttcaataatgaatttatttatgcatagcctttccacctcatccttcagtgcttgtgcttattctttgtccagcaatcttcttttctgttggacgggacaaaagtttggatctatgttgagggcatgagacatgatagttggatcaatctcgaccatatcttcatgcgagcggacaaaaatgttgaaatttgctcttagaaattttattaaagctaattttattttaagaaacaaacctttgttaattttgagcttcctagttggcatggtgggatcaatctcaacttcttctagtgcttctacgaacccaacatttttattttgttccccaaggcgggggtccatatcttcatccctgccttgggcgaattcctattgggaaaagctatttccctttttagaactttgaccagaggtgtcctcctttttggccttagatagagcaaggttatagcattcacgtgcagttctctgatttccttttagacaacccactccattctttgttggaaattttatgcacaggtcaaaaactaaggtgacagcctttaagtcatataagcttggtcggcctaacatgacattaaaagtagaaggtacatcaatcaccaggtgctgagccatcatcattatg

SEQ ID NO: 100653 - DNA, 839 bp, Cannabis sativa
tacatactttgggtcctccttcttcttagctataattaagtaccaataaattaatatgcatttaataaattaatatgtatacaatacaatcattacaaaaagttttacttttagtcacaacaaaatttgtaactaaaagtaaaaatgttgtgactaatataaattatcatttttgtactgtgactaaaaagtctgtgcctacaaatattagtcacaaaaattataattgttgtgactaaatatacttttagtcacaatacttgttgtgattaaaactaaattaagtgacaacttgtatctaaataatatgttttaatcacaaataattttttgttgtgactaaaaatcatatttagtcataaaaatttatgttgtgatgatttttttatagtgaatatcactataaataaataaatttatatacttaattttaccttcaagaaaggctgaatttagatcttcataatcattcttattagcatttattggtgcttgataaccattgtcttcaaatttataaatattattattatttaagagttcattcaatacttgaagagaccacgtatgcttctcttttagttttcttaaactgattatccatccatgacctgatttcaattcaaaaagtacataattattataacacataaaaataagaagttataataatattattattactatataacattattattattatatatatacatatatatatatatattatacatgcatctcttctataacataggaaacaataaaatccaacatataacaagtactatttataaggacacaaattttagtattatcggtagagacatctatgtttg

SEQ ID NO: 100654 - DNA, 713 bp, Cannabis sativa
atacatgcaacaaaatttcccaacggagtcttttaacctatttctatgtatgttatggaagtgttggaatagtaggaatgcatttgttttcaggaatcaatgtgcaaactcaatgagaattcaacaagaggcccaagattacttggatttttaccaggaatcgcaaaaacagcatcaaattcgaacgcaacctattacagagtggaaggaagagacatgggcacccccacctataggctttctcaagctcaatgttgatggtgctatttctagcagcaggggtaaaacaggggcaggggctcttgtccgtgactcgacgggacaagttatagcagccagggcttccagtcgtatgggccagatgcaaccaaaagcagctgaaggttgggcgttactacaaggccttcgatggtgctctgacaaccacattaacattcattacgtggaggtggattgtaaaaatcccgtcactgatttaacatcaaaggaagttattctctcaagctatggagccattatcgatgctattcggcaggtgttatctttacttcccactgtttcccttcaacatattcgtagacaagggaatacaggagctcacaatttagcccagatgacattaggatttgataacacatggtgttggaatagtcacgacccataccctttacctttgtaactttctttgggtcttccctatcaaaaaaaaaaaa

SEQ ID NO: 100655 - DNA, 514 bp, Cannabis sativa
tcgagctggcccagtcagcatcagtgtagccagtgagagtgagttgagatgcgggtgtgaagtgaagaccataatcaatagtgccagcaagataccgaagaagccttttacatgcagtccaatgttcattagtaggagctttgagaaattgagacaacttgttgacagagaatgaaatgtcgggtcttgttaaggtaagatattgaagtgcacccacaacacttcgatacagtgtggggttgtccatggcagtgcccatattggcagagagcttcgtgttggggcacatgggagttggtgttgaagcagcagtatccatgtttgtgcgtgtgaggagatctgtagtgtatttggcctgagtgagaaaaagaccagaagaatttctagtaacttcaaaaccgagaaaataacgcacgggccccagatttttaagagcaaattgctgatgaagctgatgtatgagatgatgaatgaaatctgaatcttcacctgttaataaaatgtcatcgacata

SEQ ID NO: 100656 - DNA, 1040 bp, Cannabis sativa
  modified_base (1001)..(1013): a, c, t, g, unknown or other
ctcgtggactaaggcacattaacgccccaaccacgtaaaaagtcttcatctcgctttcttatagctcattatcatattcatatttcattagttgccgaaaacctcggtcaacaggaacaatctaggagagtatgcgttactgtttcaaaaagacaattacaagatgaacatgaaggagtaggtatgatttcttctgaaaaaagattggaagcagtaggacgaatatgataaaaggccatccaaccaaagatcttaagtttaggggggaagacataaattctgaaacttcttccaccaatatttattaaaactaatatcacaggttgaaggaggaagagagatagtgttaacaagatggtaagctgatttgacagtaaacacacctgaagaatctcctttccaaatctgactatcattcttgtccaacccccaaataggaacctagagaatactaaaaacaatatcactatcaaaataactagtaagtcgattcaaataccaatggccatttggattaataaaaaagttaactctatcagaagagggcatatgattgtctttataactaacatatctgatatttggaacccagaaatcctctaccgtacagagggagctaccattactaactttccagataagtccgtccttaagaagattcctaccccaaaacctgtccttaagatgtctagataagcccgtccttaagaagattcctaccccaaagcaaataaaagatctaactaatatttataaattggttattagatatttatatttgaatttaaattctgattcaaatcaaattagatattttctttttattttaataaaaaattaatagaatttatttatacactatatataggatcataaattaacaactagaatatactgaaaataagtgaaaatcaaatgtcagttgtagagaaaatagaattagatttctaactcttattctctctctctctctcccatgcaaactctctctctctctctcnnnnnnnnnnnnnctctctctctctctctcttgtctcaca

SEQ ID NO: 100657 - DNA, 838 bp, Cannabis sativa
  modified_base (778)..(813): a, c, t, g, unknown or other
acgtaatgtgccacccgattcgctaattgtttgataaacagtaactaaacattatgtaatgtacagagtagaactttgtaatccccaacaatcaagccaaaagttgagaacatttttgctgactgcgtatagcttgcactgatatcaagctgtctgtctcaattattacccgttcccagtgttggccttttacccaactgagtgcctctttgattgccatgacttcaatgaattcagctgcaaagttacctccataacagccagagagcagttataaggttgccaaggtgattacgagcaacaataccagagccatatttgttctcttgttcaaaagtcgctgcatcaacatttatcttgattgagttttcttcaggtttggtccatagctcagctccatcacccttgtattcgagacacagggaattaagaatgaatttatcttaagcttttttccattgatcgagagttgttcttgcaaatgcaattacttccataacatatgtgcttttcttcttcctaactgttttatttcttgccttccatatagaccaacaaaccattgcaacactacacacattttcctccgaaagtgtttggaaaattaactccaaccagctgcaaaaacttccaccagggtcaaaaacaaaattaatcctgagtctacgccagcaagcaagggcaattggacaagaagtgaagacgtggcttgtggattcaacttgagatgagcacacaggacacatcgttgagatctttgttgggttttgtgccctannnnnnnnnnnnnnnnnnnnnnnnnnnnnnnnnnnntaataaagatcagaaatcacatttt

SEQ ID NO: 100658 - DNA, 1109 bp, Cannabis sativa
ttatttcgtgtcgacctgttttcgtcctgtgtctaatttttccaatcctaacccataaaattcgtgtcgtgttcgtgttcgtgtgccgtgtcgaaatctgttttgccaccgctatttataatttcatcaactaacctttttatacactttcttactgccttactgcatttcttgctcatgatagattaatttatttagttttgtcatctagtgtcactgctattcactagacattatttaaagagagttttactatctagaagttgttgtaaggtgaagcgtgtcatttaccacaacaaatttctatattacgaattgcttcaatatgacggtaaatacaggtcgatcccacaaagattattatcaatttattattcaaaaataagtaacaagaatgaaaagtgggaatttttaattataaagattaaataataaattagaaagcaaataaagatagatacttatacaatattaagaaatagttaagaattaatctccaccctcaacaatcattcaagattaataataataagaattatttcaatttctcaattaaactattaaccccacagaaaacgctgaagcagaaaatttttccaatctccctataacaattaatcaaggaaaaacgcttaataattaaatctttttaccaagcaatagatccataaagaatgcaatctatttaacctaggaaaaacgttaatttctatatagataagttaatctaggtgtatagttcttctaaatgaaaaaggtctcttagagcttttatcactcctgaaaattagttgacttgcagaagctaatcttggaaggctttcttgttcttccaggaagagccttcaggaaagctagccctaggttgttcctcctagaaggtaatcttggatagtcgactctagttggctcattcctattcaggaaggtcctttagcgagaaccttggtccgtgactccgagagccatcatactcactccctgatgcactcttacgtggagatctcggtcaaaggggagttcctacgcctataaataccaccaacacttatcatttagtcggatcgatcagaatcaatcaggttgagattaagagagagagagagaga

SEQ ID NO: 100659 - DNA, 924 bp, Cannabis sativa
gtagatatcttttactatttcattctaaatttgcaaaattataaataattataaaccccaaaattcacaataaaaaaattacaccatatattattttttaatttttttttcaacttttatagtttaagttgttctgtttgtttttatgtaagttgttatgtagatttaggttgttttattaattgtttatatgaatttccgtaaaaataattttaaaaaattattttaatatgtaaaaataaaaaaataaataaaaaaaaaaacaaaatacaatgcacaaaactaaatgaaacataccaaaaattatttcatttattttgcctaaattaaataaatgctaccaaactctcatttcattttattatcaaaatggaaatgtgcattattgatttaattttctattttttttacagtaagtaattaaatcatatacttgattttggtaaattattctaattttttgtaatttttaatcatattagagcaaaatgattatatatttttaaagattaatataataaaaacgtaatcaaaattgatgcttgaagcatcttttgacacaagtaattaaatttaaggacttttttatttttacaatttaaaataatttttttatatttttacagaattctatataaaaaaatttattgaaattaatggagtaacttaaattgtaagtaaaatatatattgcaatctacataaaaatcactttaaaaattcaaaccgtaaattaaaaaaaaataaaaaaattatataagggataatttatcttaaatttattgcattaacttgtaagtacattaatatttctacaagttccaattgacactaaagctaacttttcattttcgatttcaagctcttaattgattatttatgatgaaatggccaacacagcgaatcatcattattaataaattac

SEQ ID NO: 100660 - DNA, 1377 bp, Cannabis sativa
atttttttacaaaaaatactgttaagcggtaatctttttatttttactatgtttttctaaaggttttatactgatgttatattgtcttttattaattttttttttatcatattttggaaaatgacaaaaaaaatttgatgttgatataaaaactttttttaaaaaaatttaaataaaagttttagtgttgatatatatagacatacattatttctatttaatttatatataattttaatttgattgatgttgtcaccttgtgacaagtttttttatttatttattttgtacttaaaattgatgatgataaagatgagactcaaatcatacatattctctctctctatgttcatcatatttcttattatctctctccatgttcatcttctttttttttcttcataggtttctctcttttttttttcaaaatccatagtcacgttttttatttttaattttctctttatgttcttattttacttattgttcaatttttcttcatcttcttttcattttttttttagttttctaagttttcagtcacattttttggaaaaataagagtatggtttttttaatttaattttccagatctgagcttgcaaatatagcctctattgcgtgttgaggttgtgcagaaaatggttagtttctttaatttttttttattcttttgttttttttatttgttttagtgttgttttacgattgttttctataatttatttttttaacgtcgatttcactgttcttgcttcatctcgctggaattaatgattattttctaggtgttcttaaggtgttgtggtggttctatccgtgggtgcggaaaatggaggctataaaatacatttcttcttccttctctatggttattttgtagtttttattattcttgttctcctaatatagttgattaattatcattatatctcctttattacttttcttgctgagttcttgtgactcatgggtactctgtggtgcaggtaagggcaaagaaaagtttgagcagccatgaagagaaggtcttctccaacgaatgtacatattgaccatttcggcctgtgtggtcgagttgccaggagttgttttgggctgtatctactgtgtattttaacttactactgtatatagtccttttgtaagacttttgtaacagggatccctggaacaaatttttagtgtcgttatgttgttcattactagggttttgttttagtgaagttttttttttttttttttaatattatcatagattttaatgactgattaatctattattactaaactagtttataaaaccacacatgtggcgtctttatagattagggtgttataacttggtatcaaagcagccatggttttaaaggtcct

SEQ ID NO: 100661 - DNA, 579 bp, Cannabis sativa
tccggaggtactagcatcaggagccccagtgttgggaaccgtgaatgatagcttaggccaggaaggcgcccgctctctgccagcttctaccaaaagaaccctcccggcagcagcttgagccttaatataagctaactcatgttccctcctaaagaggtacttttggtaccggtctttcgcggaggcgataatgtttgcccggagtgccttctccgagtccagactgcgtatgttgggacaaaggactttggataagttgaagtcatccaccgattggctctccatgatgagcttagtcctcctacagtgcgcagctgtcactaagtctcccacattcagcccgtccttttcgtacgtggagaagacctttgcatgttggaggaagagttgggtaggggtggtgcggtgcggtgcattggaggtaccctaacccactccgtgagcagttctaggcattctacggcttgaaaataggaagagaagaaaaatcggtgacgatactcctttacattcttttgaaaattataagggaccggaccctcattagaaggatgggcccggagtgtgaaaaaaccgtct

SEQ ID NO: 100662 - DNA, 750 bp, Cannabis sativa
tcgcccaagcatcacaaaaaccagtgagggagagatcagttgttgctgtgagatgcagaccatagtcaatggtaccctttagatatcttagaatcttcttgacaaccttccaatgagattccagaggagtttgcatgaattggaaaaccttgttgacagcaaattctatttctagtcttgtaatggtagcatactgaagtgtaccaacagtgcttctatagagataaggatcagacatagtatcactaccaaaagcagaaaatttttctcctccaggcattggtgttggtaatgaatttgcctcttgcatattgactctcgataacaaatcttggatatacttcttttgactgagatgaagacctgaggaggtgtgatgaacatgaataacaaggaagtatgcaacttcacccaagtctttgagagcaaaagaagtatggagcttagacacaagagagtcaatagcagtgatagaattccctgtaactaatatatcatcaacatatatcaagacaaaaattatatgttgagaggagatgcacaaaaatggggaattatctgccttggagcatacaaaaccaagagatagtaggactgttcttagcttgtcaaaccaggcgcggggagcttgtttaaggccatataatgctttgtgcaacttacaaactaagtgaggtttcttgggatccacaaatctaggaggctgcaacatgtaaacctcttcacttagttctgttgggttttatgccc

SEQ ID NO: 100663 - DNA, 554 bp, Cannabis sativa
gggtccggttcgggtcccgagtctaggttcgggttccaagtttgggtttgggtcttggtctaggtttgggttcgggtctgggtccgggtccaggtccaggtccgagtcccggtcccgatcctaagttcgggtacgggtctaggtcatgatccgggtcccgtgtttgggtctggatccaagtccatgtttgggtcccgtgtcccgtccgagttccgggtacaagtctaggtcacgagtctgagtttgggtcccgggtctgtggtcttagtctgtttgggtcttagatcccaatctgggtcccgagtcccggtctgggtcttgggttattaggtcccaagtccgagtccgagttcgggtccagtcctaggcccgggtccgagtcctggttgggtctgggtcctagcccagattgggtccaggttcaggcccgagtcccggtttgggtccgggtcccgagtctgggtcccaggttcgagtccgaattcgaatctcgggcgggtttgtggtccaagtcttgaattaatttttttttaatatattgaaatcggatcgga

SEQ ID NO: 100664 - DNA, 809 bp, Cannabis sativa
ataagatcaggactaaacctgcatattatatctttctaaaaatgcaaaatatacttaaagtaaataggtaaaactttcatttgttagtaattttatatcagtgaggttcccacaaacaacacaagttgtctatggattgtttttatttttctttttttacttagaagattgtttagctttgaagtactttttctttatgaatttttaaatgccttagcactttctatatttatttgtagaccttttgtggtccaacactagtgggaatgggtctcaatactatgaaacaaaagtaaagaagataaaaaagcaatgtcttagaagactaggtttagtagttgttgttgggccaataaatttggtactgtagttgctttaaaatctttcaaggaattattctttataatataaaaaagatttaagtattattttggattctgtattatgtaaaaattactaattgggttcttaattttattaaataattattcagatggtataattttacaagcgatacataataatatcttgagtctaatattagtgaatattttttcaatatgattaaagtatcaactaatttgaagttattttctaatattaggaggtataaaagacataattaattggtcataatactttttgtttagggtattattattttactaaagaaaaaatataggatccaaattatcatttaacgaaataaaaagtttaataagtaacttttaaaaaatataaaacttaaaatggtatttatcctataaaaaatatgtaggcacttaaaagtgtcatattgctcttattat

SEQ ID NO: 100665 - DNA, 890 bp, Cannabis sativa
gtaatgtgtataagttttattatactttatgtataataacatattcaaaaataatgttgaaagttcgtaatactataattttttctcattgacataatttattagtattgaatgatactttaaattatatagatgatgcaaaatatagtgataacatcaacggtgaatattagaagattgacagtgtccataatagtaacagtggttacgacagtggctataatggtattggtagaaacagtgatggtgacagacataatattgacacaataaacaaagaaaaatctttaaattatgtggttctttttattttattattgctctatgagtgatagagtttagaatgaaatagtttaattctaagagaaagattattattccatatttgtaatttttataatttttataccataatattatattttttatcgcatcacttttttgaaatataaatttaattaccaagaaaatattataattataattattatgaaagaccgcgcgaagcgcggattaattccatagtttatatataatacaaatctttgtttagttgcaaagaaaactctgatttgttgaattttccaagatctcgtctcaagcgagctaggcgaggctttcttggaggtttaaaggcgtgtataaactgttttaataattttattttgtaaaatgataaattaataaacataaattcttttattgaaagatcatataataatataataacaaaaatctaattatttggaattttttgttgtatttatatattaaaattatgattatatctattctcataacaagctcaatttttagggaaggttctaaattattatatataaaaaaaatcaatattaaaaaaaaaagaaaataatagtaaaaataatttg

SEQ ID NO: 100666 - DNA, 516 bp, Cannabis sativa
tattattattattataatttaatataaagtaacacgcttaaaaattgctaagtacttaaagtcatttaaaatactataaaataatcaattaatagggccattcaaataaagtaatggtacttaacccacttttaaacaatacattaatatatattaatttagagtaatcctataagccacaaaatgatatatatatatatatatatatgtttatatataatttgagtatgtcaaataaattttattctcaattttaacctatgaatagttttaagcaactgcatatatcactttgtatgtttaagcttaattaattatacattatacattgtttataatttgtgtgccaaaataatatcttcactactagatagtacgtagctagagactactaaatagtagtcatatgaaatcacatatatatacatatataatttaaagcacgtggtataatacacaccaacgtgagtggggttatgtgttacgattgggaacttacagggttagttatgacga

SEQ ID NO: 100667 - DNA, 676 bp, Cannabis sativa
gttataagtgtatactaatatgtactctatttttcttttcttttctagatagatactcgcatagttcttcaacttcggtgatttgaactcgaagtacacgagtggatttgctcccttgcatgtcccaaaattctaccagttatggtcacttaagtggatgcggagaatccctaaataggtaatttttttctttttaatttataaaataataaatttgctaactttaaaacacgtctctttcccgcaaattttgaagcaaaacgacaattttggtttaaaaccataactttttatgtgaaaaacattgtgatgggaaacgacaaaataataactttactgtaaaacgacaacatataaacgaacaacaattagggacaaacgatagtttcaatagaaaaacggtacataatttataaataggaaatgcaacacaattcatgggttctaaaattaatgggtcacatattttgtaaaataaatataggtaattaggaatttattttacttaaaatgcataagcaactataacattaaacattttggatcatggatcccacaaagagcttcaagaaacagttttcatgtagattatataatgaaaacagatcgcttagtgttctgatggaaacaagccaaataaacagtaggattacaaactctcaagatcggaagagcg

SEQ ID NO: 100668 - DNA, 584 bp, Cannabis sativa
ttaagagggcaggaagaagccaaagaatcatgcgaagagtctaagacagatgtcaattgcacaagaaaaactgaaggccagtcacaaggcgagagccaaatgactttaattgacagttattcttttctaacacagaatcaaatattgtctcctgtgtcaaactatggtagtgcgcacactccctctgaatactcttctttgtccgacaactcctctaggtgttttgtccactaagtgcagacctttacccgacacgacacgtgcactgcaccaacaatggtcctcactatatgtccggaccattcaaccaaaaagttataccaatagcaatccttctatacaactcaaaagttataccaatcagtctaccaaactcatcactcaactacccctacactaattgaaaataaaaaaataaagaagaagaagactccaactagccaagagtacttcgccacataagacgatcaggcgttgtgaatctaacccactttctttattttttttctttattattcatttattaaggcacatgtaacaatacattttgaagcgaaagagtgaaattcgaaagttgtacgtgg

SEQ ID NO: 100669 - DNA, 863 bp, Cannabis sativa
gaaagggtttgaattatgagaggggtatttttggggttttgaaaaaagtgtcataattttttttagttttaaaggtattggtttaagaataatttttttttaattttttaagtatataaaatcaaatttcaaaattatgtggaaacaaattttttaagttttgagaaaaattgaaacaatatgaaagaaataaattaaaaaaaaaaaaaactaaaaaatcaatcataataaataggtaatactctaaacaaccaaaaaccgttttgaatttatgatgtataaatatatattttgagttaataccgaagagaaaaattattttctgatataattgctctaacatatttataaatcaaagtataaatgtaagaaataaaaacataaattataagtgaaatgtagttattattattattattatttactatacacaaaatcatgcagattaacaccttttgtgttgcgatttcgaattatcttaaaactgtgcttattaataagaagtatcataaatgtggtttaggttgtaccgtaatttagaaaaatatcaattttcattgctatgctagccttagcctccctaactagttttattgaattgttatatagtcatatgtaaatattctaggggttttcacaaaaaaaaaaactagattttagataaaaattataattttaccgtcgcacggaatttttttataaagatattgtttttttataaaacaaccgtaaaataaataaaatatcagtagatcaactaaaaaacaagaggaaattacgtagaatatggcattttttccttaaatttcataaatatggaaaaattagagatttacttaacttatggcttttttacaatttaa

SEQ ID NO: 100670 - DNA, 1023 bp, Cannabis sativa
attgaaacctatcctagctcaattaggagttgtctttagacactcgtgtccccatacacaccaacaataaggtcgagcggagcgaaaacatagacatgtcactgaagttgggctcactatgcttactcaagcaaaaatgcctttaaactattggtgggatttttttgtctcagccacctatttgattaataggctgcatgttcaaagaaattcttacatctctccctttgaaacattgtttcaccaaaaacccgattatagttttttaaaaacgtttggttgtgcttgcttcccattcctaagaccctacaataaacacaaatttgagttcaagacctctatttgtgtgtttcttggttatagtccttatcataaaggatatcgatgtttgcactctactggtcgtgtgtacatagtgagaagtgtcaaatttgatgaggaaacttttccttattctcaattatttcccactattacacatactccctcatcaacttaccaaccaatcacattacctatacctccactaattctccctcatactccacccacaccagatcctaatcccaaccccattactccaacaaccaggtccacaggaaccacatctcccactgatataactcccattcagccacaggcatcaatctcagaccccaccagagacataatatcaacaccacctgctatatcaccaactcaaccacaacaaaccactttacctgatcacacccgaccatatcaccccatgcaaaccagatccaagtctggtatacacaagcctaaactgctagctgctacaataactagattcaataataattttcttgagccaagatctgtcaagaaagctctagctgacccgaaatggaactcagctatgaccacagaatattatgctcttattagaaacaagacatggattcttgttccctatattgatggtatgaaggtaatacaaaataagtggctgtttcgaacaaaactcaacagtgatggctcggtggaaaggctaaaagccag

SEQ ID NO: 100671 - DNA, 1387 bp, Cannabis sativa
tatattgatgattctcatagttttacgaggattattggatacgtataattatactttgtaactataagatattatattttttagctaattaatgttattaaactattactaacttatttattgttaaacgtaaaagtaagaagtcatatgtaattgtactccacatcaaatacataaatgtattttaaaaaagagtataattataagtgagatacagcaatgacaatgagtttaaatgtagtggcaattataaatcagatatggtactaatgataatagctttaaatatagtgatgactacaagtgagatgaagtggtgataacaactttaaatatactgacgacaacgagtaaaatacggactttaatcttttaaccttttttttttcaaatttaaagtttaggtttctaaagtagtttctccagtagtttttacgtgtgttgctatacgatttattgttgcgattgcatcgctagttgcaatagagatttctatatagaattccgtaaaaatactgttttgaagtgtaaaaataaaaaaaatcccaacagcactttcaattttatatttatagccgcaattaaaaaaaaaaccatatataaagctatatatatagtaaggaaagagagagattacgggtcgggtatccaagcaggaggggcgggtccaaagtctttatagcaaccatagaagagcatctggtgcagggagaaggggaggtcaggcgacagaatatggttggcaatattgatccatgtttggggagtggcagcgccataattacacacgatctcggccagtctaccatggagtgtctcagcaacttcagaggtgatacctagggctatgaagtcagaggccacaacagagtccagggacttgtaattcttacccattattacttctattaaactgtgctctgctattttagaagatagaaagagagagtttgaatattatatatatttatattggattttgggatgggttatttgatctagcaacatgcaccttttttatcaaagacttgctcaataatggattaggctggaatttggtttgggtacgtactacacaacctatcactgtgttgccttttaacatatgcatataaattaatatacttactactcctacttatttatcatgagaaatgctaaaacctacttattttctttaatttaatattgagggacaattgttttactttaataaaaaattataaacttatataaaacgtcaccgtattagcatcttggtacgcataacaatgcatatatatttattttattaacaaatggaataaaaaaaaaatatacgtatatagtgtagggtaggtagtgtagggttgttttatgcatggtgttaagtaactagggcggttca

SEQ ID NO: 100672 - DNA, 1519 bp, Cannabis sativa
cacatcaccttatgatgctactgggcaacaagtgtacccaatatcaatattcatattttaaatatgagcatttttataaggtaccaataatatttatcatcatctataggtgacacattataaatagttagtgatacttcataatatataattattaagttgaataatctgagatccaatatttagttactgtaaatgatatgacactataagtaacattaaatacgattaatatcttttaatatttctcgttaaatatagatatattttaaaatttatgtttttaaaatatatataatataatataatattatctattataggaaatttgtagtagaccccttcaaggattattttggtagattttttatttattttagcatctaagagagcatttaatagtttaacgtgattacacatataagaaaaacaatcgtgtatgcaacaaatatgtaaatcttattttgtcattctacactactccaaatttttctaaaaatttacaagcacgatcgtaaaaataaattaaactgaaaaatctcatgtatgctcaaacaaataggtctacttaaacactctttaagagaatgcattgtaaacttacattatattatatataatatataaatgggataaaagaattatcaagattttgcatcgattggcgggattgatctacttgtattatttgtaatatagatactataatatagagattctgtggaatggatcacattcacatgaatacactccaacagtctaaaaactctcaccactcgcgcgcgtgacattattgtgttctctctttttgctcatgctaatctccaaccttccgttcctgcatgtacgcccttcatttcttaattagtcgagtgttacggttatattacaacattttagttgaccttgtgtttgaaaatatacattgaaatattttttttttaatttttttttatagtactttttttataattttatttttgtaaatttttaaaaaatttcaaataatttacagtaacgaaaaatatgtttgaagttatttgaacacatatgacaatttagaatatcaaaaattctgtttttaatattataaattattcagaatttttcaaaaatttattaaaataatactgtaaatataacaaatgctattataaaaaaatatattataatgtataattttgaacgtaaaaattaattaaataattatattagaaagttgtaattaatattactcttctctcataacactttatttgctctgtatatattacatataattaattatttggagtgatatgaagatgtgcatttaataacattagtctacctttgggtggtgtaaatccgtatttatatatttttatactgtatcaagtgaactaatttaatctattgtatcacgtgatcgaatattgaatgtaaaaggtagatccacatctcatgtaatggactctaaaccaaaattgattactaattaaaatctctattgaactccctatcaaaaaaaaaaaaaaaa

SEQ ID NO: 100673 - DNA, 749 bp, Cannabis sativa
ttatttgcttttaaatattttttattaagaatttttttttattattttatatcattattttttttatcatttatttggtagctaattgagttttgttaatttttttggcaaaatagttatttttagttggaatttaatttgttaaatttgattaatctcttaattcttgttatatatggtggaggttttattgtttagtatatttttctcttagaagacttagcttctagtacatgggacataaaaattagtttcaatacattgctaacaaaatgagtgaaaaaaaaggcttcaaatataagtttttcttattaaaataataattgtattttattcttaatttaaaaattcacaatattattgatcgttatatagtgtactaaaccatttttttatatttatttatttcgtaagtgatttcggtccaattgtttatttatttcagatgtttttttggatgtggtcttaagttattttgtctaaatttatttatataaatcgtgttctttgtactcatattctaattttagatatttttatttagatcactaaaaaatatatatatttctttataacccacaccactcacttatatatatatttttttaatttaattaaaaaaatagtttagtaataatgctatatatgtatgttattacagttttacagcatggttagaaaaatctggtcacgcgtagagaattctatgttgtcggctgagcatagtgcatggcttttcaagaaaagca

SEQ ID NO: 100674 - DNA, 609 bp, Cannabis sativa
ttattttatgttaaaaacaacacaccaaacaatctcgtatgccatccaaaatattttattattatcatgttcacctttatgttaatgcatgaatgaatggtttgcattgacatgatttaaaacattaataaataattttacagtatcccacatagatgtattgctaataaatagataaaaatgaggatatatattcatcctaatagagatttctaattaagttatgtatcatatataaaaagatgataattcaaaaagcccaaaaaaattgtccttttaaacatattatttggttacgataattcgttatgtgagaaattacctaatttaaacacccgacaatatttataaatttctaatgttagataacctcaacttctacaatcaatatcataataatagttcatttttgaagaaataaccattgccaaagagggctacttttattattatcaactaaactaaaaaatcattaacacaaacacaattgatataagtactaaatgttaaaaggttttaagtaaaaaaaacagctcatctataacaccgaaaattgatataagtattaaatattatgcccatgcaaaatatacaaacataagtagaggg

SEQ ID NO: 100675 - DNA, 858 bp, Cannabis sativa
tttttttttagtatagtttaatggtattttataattaattaatagctcaatagtttaaggttttgggatcaaattcatgatctctttctttttttcatctctctctcactactaagctagccttagagcatctttaatggtaaaaaattaaaagatacttgcttagatgaatagatgaagtgacaaaatgttgagatgttataccattaattagatggaaaagagtactattctagaaatatgtgttaatgccatacaatagtattgatgttattattatttttttaataaaaaattaaattaaaaaattattattgttaaaaaattaaataataatgtgtgagatcataattatagtatttttgaagagtgctatactattagagtgattttaagtaagagtgccaaaaataatatggaagagagataaaataaaattttatatttttagatgatgtagaaatttttagcatctttaaaaaatattaccattagagatgatcttcttagcttaggtgattcattgagttaagcaccatattttgatatattatgctattagggtatttaaatattagattttacacattttagattataaataatatgagaaattattaattataaacattacaatgatgttaaccatgtttatttttctaaaaagaaaaaaatataagctcctttttttttttttttctttttttgaaaaaaccaatgctctttttaataagtaaaataatgtttgtaaaaaataaaataaaataaaaaataatgttgagtagtttatggtaggatttaccctcaaattactttaccatatagtcactaactagatgagacgaccttaatcataac

SEQ ID NO: 100676 - DNA, 531 bp, Cannabis sativa
tccacctcagtctctttttgattaagagcagaggttggctaagatgtaagctcgaattactcaacaagaggaagaaatttaaaggcttagacagtaggatgctccgatggtgcttccatcacaaccaccagctgtagtggttcctgtggtgccagcagaacaacctgttgttggcaactatatagagcctctgtatgaacagttctggaaacaagcacctccagtaattttgggggtattgatgttttgaaagcagaacagtggttgacagtgattgagagaattttaaacttcatgggagtcactaaaaatgacagggtggcgtgtaccacgtttcagtttcaagaggatgcccttgtgtggtgggaaatggtgtccctcacttgagacgtcaccaaaatgacttgggaagaattttgggatctgtttaacgcaaaatactatagtgaggcagtcacagtgcaaaatagaaagagtttgttaatttagttcagggcgagaagatgtcagttactgaatatacaaccaaat

SEQ ID NO: 100677 - DNA, 686 bp, Cannabis sativa
ctacggcaaaggagatgtcgggtctggtgtgactgagatatttcagagctcctattacacttctgaacatggttggttggctgagaggtgttccatccgaaatggataatgtcttcccagctgtcataggagttacactgggttttgtgttctcaagtttggctttctgtaacaactctgcaatgtatttcccttgggacaaatagattccggtgttgtctctaaagacttcaatgcctaagaaatattgaagtggcccgagatccttcaatgaaaaggtttgattgggtctagcaatgaagtcatgaagttcttttgaattgtttcccgtgaccactatgtcatcgacatagacaaggactaacacaacatgcttcggttgtttcatcatgaagaatgaagagtcggcctttgaattctcaaacccccattgtataagtgtcattcttagttggtcataccaagccctcggagcttgtttcaacccgtagattgacttatgtagcttgcaaacatggtgaggtttttgagggtcttcaaaacccggaggttggatcatgtaaacatcttcatcaagagttctgtttaaaaatgtgttgttgatgtccacttgtcttacctcccaatcatatgtcacagctaaggtgagtacaacacgaaccgtggctgccttaacaacggggcta

SEQ ID NO: 100678 - DNA, 779 bp, Cannabis sativa
tctttcaacaacagaattttgctggggtctttgaacacaggactgataatgaataatccctagatcattaaaagatccttaaattgcaactccttggtattgtcagacctaacagcttttatggttttgttaaactggttttgaacaagttttatgaattgaggaatagcactttggcattataattttattgattagattgatccaagtgtatctggaacaatcatcaataatggtgataaagtacttgcatccctctgtggtcttggtgttatatggaccccaaatgtgaatatgaataagatcaaaataaccttcagtaatattgtgatcagaaatgaatggcaactttctttgttttgcataatgacaaatggagcaatgaaataaagaaactgaattggcatgaaattttaaagctttattcaaaagatgagtctttatacaagatggatgacctaatctgtaatgccatacagtgtcataagtaactttggaatcagaaatggaagaaagaacagaagcatttgcttatttctggtttgattacaatgcaggtaatacaagttgccaattttcctacccatcccaatcaccttggtcttcaaagtgtcctggatgacacagttttcattagaaaaagagaaagtgcaatcagttgtagctgttagtgaattaacatatagcaaattgcacttgaaactaggcacataaagaaaattttcaagaacaagatcaaatgtcaaattaattgttccaagacaaaagactttagtatg

SEQ ID NO: 100679 - DNA, 650 bp, Cannabis sativa
catgaacatatgcaatctgggttttcctttcacagtttccagaattaaattttcctttttcctaattaaattgataagcatttaaaattaaaaaacaactcttggaaacgaaaatggagtggggatcacgaagaactcgagcagccttccgaatctgaatgagctctttcttcaagtggagcttgctcgaatcagagaagcgcgtttctgccattatcgttttcttctttctatatctaaatactagtcttacaatagactcaaaatgattaaaaatccaaaaatccagataagtaaatacaaaatggtctcttttcagttatagatttctctaaaagtaaatagagaccaaagtaagaagtcctactgatctattgacattagaacttagaaaaccagtaaatcccacattcccattgatgttcaaactccacaaaagcatggcttctccttctgagagaggcctacacatacatacattcatatattatatatagatgggaatggagaatcgattcaaagcacgaaccagtacaaatttctcttgaacaaatttccaagaaaataaataagctttaaatcaaactctccttatcctttcgtaaccctaacctaaaaaagatcaacacacaagcactattcaaaattat

SEQ ID NO: 100680 - DNA, 1476 bp, Cannabis sativa
actttattaatttattatgtaaataatatctttacttacatatttttatgggatattagggatgtaagctctactatataaaaaagcattagtcaaagcctaagccttaagctccaagtctgatactcatcgcatctctctctctctctctctcacataggcataggcattctctatcacttgagattttccatctctgattctcatattataatcttaagagagccacttcagatcctataactattgtgatctaagtggtattatctctagtatcaatacaaccaaaagggaagtaggtcattacccgctaacaaagggtgttgaacctctataaaatcttgtgtccatttacttttctattcttattgtgtaacatatggcaatcatcagaattaaatacgactccattgtcggttggccaaatctaaggttaacattctctttttgcttctcgaatggctccttgtatacaggttctcgctggagtctagtgttagctcagatcaatctgtgttcccgcaattttgctaacgtgcgaagaatacgtcaaactcgttctctgattggaagattgcttatgaccaccgcgatttccatacaatccctagtaagcttacatcgagctggcctccctgcaaacacaaagaaaaatcagccacctttgaatccagataaaaataatactaagtataaaagtctgcgacaaacaagggcgacgatcaaagtctattctaattccaagtagtgaaaatgcataaaaccatttcgaattctaatctcccatattggaaaccatgccttcaattatgttgacctctaagtttgcccacttactgaagtagtaaaatccattattgtgacaaacattcttaatgtcatagaaatagtagaagtcctccatggtaggttctccttgcgagcactccatatacatctcatagaatccaaagaagattttataattgttaggggtgagttggaagggagaaatgtcataatacatcggaatgtatttgacaaaagaatgaaatggaaccacaactccacaacgaagaatgggaactgaaaccactgggacattagtcaggataatcgttggattagtaaaaggaaggtgcaaacattgtattgacactggttttgtacaactagtgttgatcaatttcagcctttagaatgtcgtcaaatcagacttccttactcgtaaaactaaatccccataggaaaatggttcttcatttagggcattaaacccaacaactatgacttctccatcatcttcctcatcgtccccacagtcaggaaattcaaagtctcgtcccatttctttgacttctccatctggaacagccctaggatggaacttattgggttgagcagacacagtggattcacttcctcgcacttcaatagccaccaattcttctaactctttaaccatgcgagttatcttgccagaagaccacacagctt

SEQ ID NO: 100681 - DNA, 1008 bp, Cannabis sativa
  modified_base (102)..(115): a, c, t, g, unknown or other
actaaaaaattcttctaaatgccgaaacaaattaagggtgcatcagtacatctattttaagggggtgcattatagaatcaccctaataataataataataannnnnnnnnnnnnnataataataataataatagattacgaaatatatatttttttcttaattatgtcaaaaaatgtaagtttatttccactaaaaaaagtttatttcttaaaattgacaaagagtacaaactaaacaattttgatttttcatatacatattattactattagtgctttaattgaaattataacatcttataataataattaaaaaaaaaatccatcgcaagtttattacaaaaatactttataatagtttgtaacaattttgtaattaactattttctatttaatgatgatgggtccggctcacattaaatccgctttcgataaagctctggttaatgatgattagttacgactttttcctaatgttgtgacaatctctccatacttgcaatttagaccataggcccctatgtgtttatacagtggatcttgatgctagaataagacggtcatttcgatttgaggcttggtggacaagggaccctcggagtgcgctttgttgttgaccatgcttggaattcaatttctcacgattggaccccgactagcattagccagctggaagaccatctccgaaatatttagaaaataccagctgtctctaggagttgggcccacgaggttgatgtgagaaaggccctcaatgaggcgttgaggtggaacgcattatattggcaataaagatcctgtatttcttggattaagaatggtgataattgctctaagttcttttttatagttgccactattcgtaataggcgaaatgccggtgagagtatcttaaataaggatgggatctgaatcacgaataagaaggacattagaagggagttcctagcttttctaggggacatcttcactaatctggtccagggccctttagagactttgggccat

SEQ ID NO: 100682 - DNA, 727 bp, Cannabis sativa
tgttgtgcttattgctataaatactagctaatctttttttgatacaacacaaaatcagcagaaactcgaaaaatacaagatcagatataaaaaaaaatatgagtaaacacaaactcaaaagggtacaacacctaaacacaaatactctagcccccaaattagaaacattataatttgacaaaaaggataatagtaatttgagtatttattaataaatatttaaattttaataaatctaataatattttttttgtcttcccgaggcaataatatttttatgcacaataatatttttttttgtatgattttcttaaaatatatatataaataaaattaattagaatttttttttattaaattgttaaatttaagtacattttttaagaatttttaatggtcaaaaaaataatttagtgaaagtaacttaaaaataatcgaaactatgctatgcatataatttaataattaaaaatattatttttttttgggtcaaaattaataaaagaatattcttttttcagtgaaaaaaaaaacatattatataaaattaggcaggggaagggaagatatatagaagaaggggaaggtgtggtaaacactgcacgagtcaccaccaccatcggaagagagctctgtttttcaattcggtacttttctctctttagggtttcacctaaccagtttcagaagatctaagatttttgtaattgtttctgttgtgcgggtt

SEQ ID NO: 100683 - DNA, 530 bp, Cannabis sativa
ttattggctagcaaagcaactattggtggagtcacttgttcacttagaaagagaactcagtttacttcgcacttgttagaaacttgattgcttgcgttttattagtcgaagtaattattagagttatcacaatgtttattattacaaacggcttagtaaacttatactgtatattggttgattttgctctaaaaatattagtttttcgtgatgaactatgttcaattgacttattaataataaatatttcttttcaatattatatatattttaaaagagtatgtaacccaagataaattttatagttgattgggatactttcctaaatttgagtcaaatgacatgtcatgatcatcttgcccaacctaataacgagagaatccacactcagccactaaattaactatatattacgagttgccttaataacttataatgatgatcttcttctataaataccattaatttagaaattatctccaatccaatatggcccatgtcgacctcagcccagcccattccatccaatc

SEQ ID NO: 100684 - DNA, 1190 bp, Cannabis sativa
atgaggcatctccatctacaacccgtagttggagatcgtcaccggcgataatccatcttttttctccatcattggatatttcccgctctttaagaacctggtaataaaatttgactttagatatttcccgatgaagttgtaattgtaaagctttgaagtgttctttcaaaacttccaattgcgtatcttcttaagactgatatcaatgtacaacatctactcccataccaattcaagaggggtttcttccgttgattagttagctagaagagtaaagaaatatgaaaaatataataataatgtctatttttgataatttagagcttggttctctcttgcacgggatacaaccaactaaaattctccacacatcaaaattactttctcacctcttttattatattcccttagaggtatgtactctatcttcactgtagacaatccaatatactattgacttggaagtgactctgttctctctcttttactctttgggtatatttatatgtaaggactcatcgacattattcttgaaccataaaagtgttgaacacgacaacatgtgaagaacataattacttttattatttcaaaagtaattacactaagacttgaatacttttactagaccacaacgcacaaagcactcacatttttattttaccacttgacaaccttattacacacacatatacaactcacactttggaacttttattaatttggggcactttagaatatacacttatatataagcatcacaccatacattaggacttcacttattttgtgcactcaccacaaaggattcaaggttcgtatatatatagatggtgttggtcggtggtgatgaattaaaaatttgctagagttttctagcatttttttgggcttatgtctaaggcccaagtgctagatagcacttaatttatctcaacatttctcaaagtttctagaatgttcaaagtaggtgttgactttcaacactccccctcaacaccttttcatattgagttgttctcttaacttttaaaatcttgaaatgttgagtcctttagtgaacaagtctgctacctggtcttcgctctttatttggtgcatctccatatcttcttgatgtactttctctctgagaaaataatcatgcacctccacatgctttggtcgtacatgaaatactagattttttg

SEQ ID NO: 100685 - DNA, 859 bp, Cannabis sativa
gaatttcataaaacttgtgtttttgttaaggacaaggaaacgggggcagtctttcttaaagggaaaatcaaagatgggctttatcaccttggagatgatagctctagtctttcaaacactgcacttcaagtgcatcttgccacttcagtcatctcatctcagtttttgtctagacagtctaagtgttgtaatcatagttgtaccaatactgattcttcttattgtactaaacacagtaataaagattcttgttttgcctattcttgtgttccaaatcccactgtgttactatctcaaactaataatgacatcaataattggcacaagaaacttggacatccatcatttcatacacttagcaaaattctgcacgaaattaatataccctgccctctcaaaaatctagaattttgtaaagcatgtcaattaggcaagaatcatagacttccatatcctttatccacatctagagcaaatcaacctcttgccttggttcacacagacctatggggaccttcacatgttccatccaaagaaaactataaatactacataatttttgttgatgattatagtcggttttcttggatctttcctctcactatgaaatctcaagcctttgagacctttattaggtttaaaagtcttgtagaaaaacagtttaatttaccaattaaagttgttcaagctgatgggggaggggagtataggccttttgaaaagtttctaagtgaccaaggaatagtctttaaacaaccttgtcctcatagtcatgctcaaaatggtagggtagaaagaaagcatagacacataactgaaactggcttaactctcttagctcaagctaatcttgatcttt

SEQ ID NO: 100686 - DNA, 1348 bp, Cannabis sativa
gatatgagataaatagttaaatgttattctccaccctcaacaatcattcttaacttctattaatgaatgtaatttcagttttctaatcaaactattaatctccaaataatgttgaagtaatcaattatctcaatctccctattacatgtaattaaggggaaacgctcaataattaactcttttacctaagcagtaaatctaagaagcatgcaatttatttaacttagataaagctttaagatttatggagatagactaatcaaggtaataaattaatgaagcatgtaattcatttaacctaggttatattcttcatcgcaaataataatacccgtcacaatatcatcaaaagcaaattatcacttaaacctagaattttagactattaggtgaatagtaatcctaaggtgataacaaattaggtgataacaaattaaagtaaaactaaagtaaaacttaatttagcgatcgttaatttagcgatcgtctatttagcgatcgtctaaacaagattaaaataataatcatggcattgaacataaaagaatagaagcaatttgatataatagaaactagaaaaattattaacattcatcatagaaattaaatattcatgtctcgagttttaaaataattcttaatttaaaagaagactactccataaactcaaacataattgtaaaaaaaaattaaaaagagttcaagaaaaaaaaaaaactagatatatatgtagattctcctcttctcttgagttctctccttcaaaatgtagttcaaaagttgctagaaacgaaccctaaaaatcctataaatacccctaaaaatatcttagtttaaaacaagataaaaaatttaaaaagtggttgaaatcacattcttgccgcggccacgtgttccctcgccacagcgacagcttcctgccaaaaaattctattgcatattcagattagtattttggtcgtaacttcttcaataaaacttagaattagacaattcaagatgtttcgaaaatctgagaacgagatgtacaacttttatattgagctccaagcccaattttgcctttaaagtcatcaaaatgtgcagttgaattttttcttttcaaatcgagctcgctgacttccactattttccacaaaaatgtgctaacatccctccaaaagacttcaaatgcaattagtctttaaaatagctgaaacaattacaatcacagtaatcaatattttaaagaatctatttaggaatattaatacataaatcggttatatttatcagataaaatatcgatttatcaagagctttatacactttattctaatagcccacactattctttgtgtgtggtgga

SEQ ID NO: 100687 - DNA, 801 bp, Cannabis sativa
atgtcagtaaaaggacgcttgaaaaaagattaagagccaagagctcacaccaaaacttgatgaaaaagtaaataaaaacaagcagaatatcagacaaataaaatagcagcacaacaacaaaaacaatatttgagaataatgaaatctataagagggataataatgccaaaaataaaaataaaaaaaaataaatccacaatctaaccaacacaaaaataaattatattcaaacaaaatcaattggtaataaaatttctagcaagctcatcttcgaccccatatttcattaaactaattaatttcagttctaattggtagaagctactcccaagggaaatgaaacacatattgtgagtttgatcctaagagtccctgcaatgaaaatacaactaaagaggtgtgtataaattaaagtaaatatatttcacctattctcatattgattatcagtgaaatgaaagctaagttatgtagtaacaaacaaaataaaagcacacgtccaaaaaagaaagaaaagaaagtcgtagcatccattaaaatcagtttcttcatttcaaccaatatcagtacaagcaatggttgtgagtgattgagtaatattacaacactacccaacaataaatgggttgccgaaatcagaaggaagaaaaaaacaaaaaaacagagagtaatattacaatattatatgagcatgatgaaaatacacttatcttggataaactcaaaccacaataccaaccaaaatgaaatgggttgccggcaacctggaagtagagaatcgatggctagaacaaaaaaaaa

SEQ ID NO: 100688 - DNA, 860 bp, Cannabis sativa
ctatatttgccagcttcagaatggtcaaatgcgttaattaaattatttcaagtatattgatagactagttacaaagggttataattccttttatacgatgtgaaatgaaaaagagttctcttttggtgacaaatctgttaagacaaatagcaaaagttaataaggatggtggggtgacataaggccttaaataaatcatgagaacatttttctttaaacaaagtcgtcttgttctaatcttagttttggctatccaattgaatctgacctaagctaatattcatcaattttattttttgttaattgttgtgagtaattaagattcataataggccatgcgaacgaggtagtacaatattagattcttattttcctgttatgtgtttatgagaggtttactatatgaaacacaagttactgtaatactgttaaatgctttgagcttgtgtaattgtgtgaattgagtaacacgtacagcactttttatattttaaagcgggtatgaactatgagctacattacacttttgaattacattccattattctctcttcgaaatatatctaagaaaacatcactgaattaaagcaccttttcttttgcccatcataatctttcctaatcgtatttggatttctatccaggttctagtagttgagattcatgtaaagactgtgctcccaaaacaccacgcgtgacagacagcttaagtatgtagtaatttacaaacttgtaagttgtaaataaataatctcttcagatagatcactacagactttactcattctttccaataatccataattacgagtcagaataatgcatcactaaagggtctaacatatgtgttgaactgatta

SEQ ID NO: 100689 - DNA, 520 bp, Cannabis sativa
attttaaaattaattggcaataaagaatataggtcattaatcttatatatcatatttagttttcacacattaataagtaataatgtgaaactctataatatagattaattatttatttaataagtacttaaaaaggttttatgcttaaaaattaaaattttacaatttaagcatagaacttgaaaaaaaaaatgaacttaaattaattgattggtcttgcgtacgtaccctttcatgtccatgaagagaaactttgaaaaagatgtctagtaaattaaaagtatagttgagacacacactctgttcttctatgactaattttaagtcatgtcatattcttaagttttcataaaataaaaagaaagaagctttttatcaatataattgggtttaccagcaccataatttcatctttagacatttagggtgtgtgtatccaatcaagtatacctttttttaacactcttaaaatattacaattcaaatatttaataaggcccttcaatttatgtggttttct

SEQ ID NO: 100690 - DNA, 961 bp, Cannabis sativa
ctaaagccttgttttgcagtagtgttaactctcacactcttacccaagaatcttcttcatctacagaaaattcttcatacaaaatccaaccccaatctctctcctttctctcctttctctctctacctctcaatcttttctctctctatctcaaaactcaatttgatcgttctacctgaaaggataactgttggtagtatttataggcttaggatcgagatcctaaagttggtggctgcaagaaggaaggttgttaagttagttaggcagtagctaacttaacccgctctcctttaagcaagatctccacgtcaacataactataggtgctttcgagaacgtgcatgagagcttccaaaaatacaaaccaaagttactccctgaaagagctttgtagatagaaaagagtcagctgaagtcgactattcgaaacttatttctaggaggaaaagctagtcatccggaactccttttcggaaaaaggctagctttcctactgatccggaaggacaagaaagccttccaagacttgctcccgcaagtcaaaaacttttcagaaatgataataacttttagaaatttttttatttgaaggaactattgctcccgttatttttttttaataatcacatttttagtaaaaacaagactgtcttatattagtagttattcatattaattaattacagtgtctttgccggttaggatctccctagttccaatatggttaagctaatggctatttttagaatctctttgctctctcataacaaaaattagtgttagaaaggattttgaaaacctttctgttgatgtaatcattgtgtttctcatctcattgaaatgtttttaatttgatattatatattgaggtatttttttttaaaaaaaaagttaaccttaatatatgaaatataatacatataagaagaagaggaatttcaattaatatatagtatta

SEQ ID NO: 100691 - DNA, 1017 bp, Cannabis sativa
tggataaatagatgtagagcatgcgttcacgtagtctatcttcatatttatcttcttgtttttattaataaagaaatgaaggcttgatggtctaaaatctaatacatatatataaggaatgcaattgcaaaccaattaaaggcaggcaccaacttttttgttgctgaattatgggtcatctcatctcatgtcatgatggattggtgtataattaaagagacgttatctcttaacacttttcccccacgaaggaaccccaaaaaagacctctctcttctcttaaagactttttgtagtgtgattttcatatcatgtcttctaattatgtcatgacatcttttttcttggcttgtgagttttgtaggtcacaaatagccaaattatatatttatttaatatatacttattatatggaatgaaaatgtgttttttgaagtcccccaaaacaataacataaatatttttattttataggcttaagcttaatcatcttactttgattaccaattataaatgttctttgtatctttctttcaagtacaaaattaaacctatatatatatatatatatatatataacaataaaaagtattccattccttctgttttaaagaagacttgtgaaatggaatttgtctattaatatatttaaatgttcttggtggtatatatcaagtttgtgcttttttttattgaaaaggaaatattttaagtttctgtaatgctccaatgaaataggcttattataaagtcaacagcaataactatagccgacacaaaaaaaaatgtatataaacattgattaaaaaaaatcaatttagaacaactaattggttaaaaaaatattggtaataattagttatttaaatgatcttaaataactaagttataaaagtaattttttttttacatttatacaaaaatgcatgaaacacgaataaatttaattctgcaatttaaatcacaacctaaattataaaaggggaattactctatatatattatttttttaacttt

SEQ ID NO: 100692 - DNA, 1078 bp, Cannabis sativa
atacggtaaaattaattaattaattttctttttaaaaaataattttaaatatctacatttaatttatttaataaattataacttaaataattatagtttggggtgctatggtgttgctccgctagtttttaagagaattcctatgtagattttagttgcaatgtagggtgctccattagctagttgctattagatttccgtaaaaatataaataaattattttgaagtataaaaataaaaaaacacaaaaaaaataaataattatttcttaaatagttatatcctatgcatatatatatatactaggcagaaggtacgtgtgcaatgcacgtatacttagttatatacttaatttgaaaaaactaaatgaaaatacaaaaagttttaaaaatagtaaattagttgcaaaatatttacaaaatgataagttaaaagcaattacattttgaaaatgttttaaaaaaacttgtttccaattctaaaaaattaagaagaaatatgctctaaaactttaaaaattaaaaaaagacaggaaagccttgcttaagagaaaagaacaatgtctataatttatcataatatcaaaaatataggccacatttcataatttctaaagttaatgttactttaaccaataaatatttagaatagtctgtaccctctttcatagtttctctccctctcatgaagagatttggaaaaactcatgaaaaaattatcagtcaccgaaaagaaaagaatatacaaagtgtcaatataaactataataaacaagtcatataaagagaaatattactaaacttaaataaaaaaaatcacaaaaataaatgttaaaaaaaaaaaagcgaaagacttatcccatatgaattaatgtcgatacaataactaatcaaagataatagctagtgggagagaccttcacaccaccgcaaacaccagcaccagtggcaatcaaagctagctagccatcctttttatttttggaaccagtggcaatcaaagctagccatcctttttatttctggaagaaacaaaaactgttgcaccaaacatgattgaacaaattatatgatgacga

SEQ ID NO: 100693 - DNA, 906 bp, Cannabis sativa
tggtttctatgtaagttgctatacgatttttggttgcgatttagattgttcagtttgttaaagtaagggtttctacgtaaaatttcgtaaaaagaacatagaaaaaaaaactattttaaaatgtaaaaataaaattcctaaaaaatattatagaaggcaattccttatttttttaacaaacaaaaagaaacaataattattaatacacaagtaggaggacaattacgtgcataaagtgatcgtaaacgaactttcgtagctcttttcttcttttgttctattataataatagcatgtccattctctccatccttatccactctatatcaatttgatttatgtatacagacaaggctattatgctatggcgatcgataatcatgtttttttctgaatcgatcggtaatcatgtttattattaattactatactttactttttatctcttaattaagtgaagtaattcattatctgacagttaatttctataattgtttgatgacaactagataattttgtttttagaattttttacgtaagtatatatcttaaaatttagttgaaagaaataaaaacataacaacagtaataagaacggaaataggaatcggaattatttagaatcaaatttaaaatgcatttaattaataaaaaaaattaaaaaatttcttatcttgcattagaatgatcattattctttccatttcaaaatataatagtcatttcatcaaatataaaaagtcatttcattaaaatgatatttgaatactttaaaatgcaactacaaaaacaaaagaatggaataaatattattacctttcatttccattctatttcactacctacaaccaaacgacaccaccatgatctcacatcaaattaaattaataactttttaggtaaaaa

SEQ ID NO: 100694 - DNA, 848 bp, Cannabis sativa
atatatatataattctctacctacagccaaaaccaccattaactatacatattggttgaccaaacgattaaaattcctagttttgggacgtgcaatatacttttttcgttatatttgttgcaatcatttcgtataagtttgttcaaatatacataccttttttacagcattcactataggattgtttgcggtgtagatggtgagttttctggccaatttattaaatcatactgcacatatatataaatggtttgagcaattaatttttcaaactacatctacaatctacatgcctcatatatctcaagactgcataaatttccaccacaaaaatgtagtgagctggtgcaacgtgacagtttgcactagtcgccaactaattgaataatttaacattaatataaaatttcataatgtgtacattgacaaagtttatattacaaaaataataacaaactaatcaaatacaaaatatattatatatatagacaactcaaaatttaatacacaatatatactataattatgttgttgtgatattttgcaaactcaaaaatcatgaggtcaatcatacgagaattgtagttaagtacgttaaaataaaacttttacttctatttggttaaataaaaattaaaaataagttaaaactagaaaataataaaacactacaacattttactatattatgaccactccgccgctaatacccccaaatcggtcgctatagggtattagcggcggaagtcccccgctaatggtccgccgctaataagtggccgctataaataccattaacggcggaattagttcccgccgctaataataccattagcggcgggaccctg

SEQ ID NO: 100695 - DNA, 683 bp, Cannabis sativa
  modified_base (620)..(620): a, c, t, g, unknown or other
ttatttatataaaaaataaaatacaaaatacattaaaaatataatatttaaatgatataaagaaaacatagagaaatgatgtatggtgtaatgtaacttttagataaaatagattaaatggggtatttgtgatgtatgcaaaaatatgtccttttttcaaaagaaaagaaaattatgtaggaaaaatttagaaacaagttacaaaatatggaaaaataatgtaaggtaacaagataccttctcctaaaggctaactagttatcttatagtatataattgtgctacaaagtacaaacttgatagtgataatcacaacttctaattagaaacttgagcattttttttttgtgaagagctctatcggacatgctcatcgatgattttcaccgatgcctctttcaatgatggatttgcaggcacccttgctgtaagttccaatcaagtacatggaaactcttaagagtgagaattctgctatatttttaggtgtcaacaggccggctctgaaatttagtcggccataaaaaaaatatttttgagcttttatttaaaaaaatgttgtattttttaaaccagtaaaaaaaaataggctaattaagatttttgtcccctgaactttnacatgtaccaaattatgccccttgaacttttaaggccaatggaaatgccccctgaactattga

SEQ ID NO: 100696 - DNA, 847 bp, Cannabis sativa
gcctcacctatttatacaataataaaatttaactaacatcaactaaatcatcaaccaaaataaatagcctcttatagacaggctgaatcaaataaaatattttactaaaaaggccaaataaaaacaatgtcaaatagaacagaggaaaattatcatgaagtactatacaaagtctcattccttatccggccaataacacaaagatcaataaagaaaacaaatacgataaataaatcaccaaataatccataaaatcaaaaaaaaggatggaacctaccttttggcttgctgctcctctaattcccttgttctttatataactttcacaccactgatattagtccatgcaaagaaatggatatcacatcatttttcacattatctgctctgtgaaacataaaattagagccatcatttatcttgctctgtgcaaaattatattttaacaaacctgaaatgcaaatcatatttggatcaaagctgtaaacatatataaaaaacagtttactttagccctttaaacattctcaatgtctctctatccgagtattttttttttctcttcgacgagaacaaatgtggctccagaaataaaaaagaataatgtgaatgtggcaaccaaagactcaagtccttaactttatttaacaagttttcaaatttcttagcatgtggacttcccattcccaaggttaaattatctatcagaaaataaggaattacaagaaaaagaaaatcgcacttactgcaaggttaaatatgtctatttcttgatgagcgcagtttagatcaccagttcaaattacaggcttcaacttttctagctcctgtatcaagaaaaaaaaaa

SEQ ID NO: 100697 - DNA, 1012 bp, Cannabis sativa
aggttgttgctcctcagagagatcaatgacctcgtcaaccgacatcttctccttggacagactctcactacctctaaactttttggccagaggagacaaacccgagcaatcccctattctcttattcagagcctgaatcatcttctgagacatttatgcatggacaaaacaatacagtcagaagaagatatgaagaacgagaagacataaaaaataggaataataaatacttgctgaagtactctgcacactggcgggagcattctcccgaacgattacagatggagcgtcatcatccgaagagtcttcctgctcctccaggatagcttttccttttccttcgagagggattgatgaccgagcaggcacactaggctccctaatctggatagtatgttctatgggcactttctcggtcgggagagttttcgtcttcttgcacggcctctcatgctctgaatattcttgagcctccttctcctgcttagaatattcttaaacatactgtttggcttcgaaaccaccattcaacttagcctcacgctttagatgaatgagctccttctcctgcttgacgccctcagcttggcctaacctggatttcctcttgttctccttcacgaacttgggtataacaaaggtggtagtaatctgtaaccctgggtgtgaactgggtcatacaaaggtggtagtaatctgtaaccctgggtgtgaactgggtcatacaaaggtggtagtaatctgtaacccttttgaagtacgggtgcaaaggtagcatcgccccttgttttgtgtgggcacccgacaaggcatagtacccttccttcggactagttgcccagtgattgggagtaggaagaaagcactcaagtctgcccaaatacccaaccttctccaaattttttaggtggtcctcagttacgatggacggaggacacacccatctagccctcatggcaccctgcctcttatgagggaccgcctcggcatactcttgggtgacatagtcttc

SEQ ID NO: 100698 - DNA, 764 bp, Cannabis sativa
  modified_base (730)..(733): a, c, t, g, unknown or other
agtagtagtagtatagtagtagtatacatataaatttatgccttgttgttggcaataatgtagtcatcgagctctttaaaattcttgatagcaaaatccttgatggcatctggatcaggggtctcatcagtagccttttcgaactcacaactccatttaaggacacttccttcttctttaggaaccacttgaacattggccttgaaactcttgtagtactttaacagatctccttctatcacattgtaacaaaatatcttgtttggcacatcaactacttcgatcctttcttttgacactttcacaagtggagaaccttgtttatataataacaaaacaaaataatattattcttaaataaattataccatcataggaaaggaaacccttttgaattggttgatccaaaatgggttattattcatattaaataattttgaataaataaaatttgtcctcactcaactatattacttggattttgtttttgttgcaaatataaaaatgattacaaatattctctttaaattttatttaaagtaacattaatttggtgtgcccgcaattaattcaaaagtcttagatataatataaattcaaatgcattataaaaagactaaataagatttactaaatcatgtcccttgaatttttaaggttgttaacaatgcttcttgaattattgagattattggatttaatgacttttttttttaattttagtaaaaannnntaacatggatgaaaattcaggggcatgattt

SEQ ID NO: 100699 - DNA, 630 bp, Cannabis sativa
gatgatattggtatgggcatgggtatgggtatacctctaatgattattctggagacaataacaggttatacttatatctcctatccaaaaagaaaacaaaacgaaaaaaacagtttatgttctgtgaagggaattagtgaatatatgtatgatatgaatctccttactcactgtacaccattattttattgtttcttttttattattattattgagatgaaaaaggcaaggggcattattgaaaagctgcataaaaaggcattattgaagagctgcataaggcattaattaaaaaaaataaaaaaaactatgtagggtgcagtgctcaaaatgtgtggatttaatattagaatgtactaataatatcactttttttgtggtgcttaaaaattgctagttagcattttctaaaaagaaaattatatcttttgctattagagtataggaaagaaacttaaaccttctgaaaatgaaaattatttagtacaagaagttatcattctaattttccatacggtaatgtgtattatagtgctaacatacgttttttcagtttaataaaaaaaatctgatttatttattttatgaaacaactttttgtacatgtatttatctttatgtttacatatg

SEQ ID NO: 100700 - DNA, 754 bp, Cannabis sativa
aatacattttctttctcttctcccctgtttctctttgttttctctctttgtttactaataagaatggtcaaaattcctaaaatacaaagtccaaccacctccaaaaagcacctaaaatcacctagcaccaataaacagtagccaccactggcagcggatgcaagagatttgtgaccgcttaaattggagaccccaatgactacgcctgcttgtaaaatctcccatccagcactagagaacaatgatcttggaaaccacctccaaaagacatgagtgccacctccacaaagcatattgtcagtcgcttgcattaaagtcagacttggacaagacagagagagaggagcgcatgaacgccgcaaccataagccaacgaatgctacaacctacgaccactgacaaccacaaacaacaaagatccaaaactatcctttttgtcacgtagcataattagtggtagtcttagctaagagaataaagaagtttgaaaagtgaaaaacgtaaatcaagaaggagagaaaatgtattatctcacaaacttaaattaccaaaatatttacaattttgtgatgcaagataattaaattttgaattctattatttaacttgcaataacctaaattaggtattttaaaatatttttcagcatttcacttaaaaaaaaagtaaagactatatgttagaatttgggataagatgaatgagattccatctcaaaaccaaatggcaatgggaggagtagcccattcatctt

SEQ ID NO: 100701 - DNA, 770 bp, Cannabis sativa
tttttttttttttcaaaaaattatatattttattattattttttagggaaaaatattttcattcagtatatatagtatagattttagtatatataataaatatatatagataagaatatttttggcactggttggcttcccattcccaggaatacttgttctaaatggctgactcagaacactcttcttgtgatgacaattttgctcactctcaagctgaagaaggtgactacttcaattttttgttattaattagtttattttccctatttttatttatatatattagactcataatctcaactctctctgattctccaaatttaattggtccaatatagatatttaaatattgtatttgatgtatggtatatagaagaagtgatgagtgaggaatcaattaggcgtgaagtagttgaggttgaattctctgaagacgaggaatcacttatcatcagaatgttcaatctaattggagaaaggtgagagattaaattattgtacttctctctctgcacacacacatatacatatatatgtatatatattatataaatcacataattatgtgttgggatggcaattataccggctggttcggggcctatggggtggatacgggggttgacttttggagacaggggcgggtatgggtttaaagattcatacctgagtcagaaacgggctaggggaatagatacccgccctgatatgatatatgtatatatttaagttttaaaatcataactattacaattaaaataacttca

SEQ ID NO: 100702 - DNA, 916 bp, Cannabis sativa
aaaatagattacattgaaatggagttttatttagggcataagacctaacacgaataacatccaatcctttctatattgctagtacccgtactcgtcttcgcccccatatcactaaccccatctttttggctgccccctgcaatcctcatgctcatcagcccctcatcatttccgaaagcccttttaatgaacaaacctctgaatatggggtccaacatctccaccaacctcgcactaccccggttgggtgttatatgacacaaactccccaaaatagtcctgttaatcgtgctcatagtgttgctaactcccacttgaccttctcggcatggccaagcaatgagcatgtggtggatttgggtagccctccagttcggtccacagtccctgtaccttttttgaccaccttgggatcaaatggccctatgcataatgttgcatctgcccttgaacaagcagtaggtgctgctgctatctcgcccgctcctattgtggcaaccacggtgacatctgaagtcatcgggcacacggttcccgtctctcaggcctttgctacaattatggttgatctcaatccaagccaacctctccactttgccattggatcatcttcttcacctgctacagcttccacttctactcgcaaatatcggtccaagcgtccagaaagtgccaatgaaattgagtttcgaaaaatgttgaaacgaacctgtgaccttgctcgtgctctcgatgaaggatatattgatgaggcgggtgctgcccagcgcacccgccgggcaccatgattgtcataagttggaatgctcgtggattagggagtaaacgagcattctgttccctctcccttttagttaggaagttttggccaacccttttgtttatatcggagactaaactccaagttggctcttta

SEQ ID NO: 100703 - DNA, 895 bp, Cannabis sativa
ggaaatgttaaagtgcctattaactatgaatggaagcctctaatatgtgctcattgtaaaggattggggcatgcacctgatgaatgtaggaaaaaagaaggtgctaataaacaatgggtggtcaaggagaaaaacattggaagcaaggatggggagatagcaggtccggttgtggactcggatggatttcaagtagtgactagaggtaaaaaagatagagggaaggaggtgattgctgaagtacacacaagcaacactttccaacctttgtcaatgccagcagggccttcgggtatggctggaaatgagaagactgagacacaagtaattactattggtagtcatgagatcaaagcagctgaacatacaagaggagggggagatcctcctctccaacatggataggatccttagttggaatttccgaggaatcaatgacccccagaaacaaaaaacggttaagaatttcattcttaagcaaaaaattgggttagttggtttgctcgagacaagggtaaaagcccggaagttgggggctttatatctaagtatgttcaagggttggtgttttacaactaatattgcttggcacaaaggggaaaggattattgtagcttggaatccccatagtttcaatgttagcattctcaagtgtactagccaacttatccatctatttttttccactatagatggtaagtttaacttttatactacatttgtttatgctttcaatgaagctgataggagacaggatttatggagagacttataaggattgtttgtgaaagaggaatgggcgataatgggagactttaatgacatattgaggaaagaagagagaataggagatgttgaccgaggttttcggcaactaataaaatattataaagtt

SEQ ID NO: 100704 - DNA, 676 bp, Cannabis sativa
caggctgctaagcctgcgatgacaccaccgtgggaggcacccgcccacgcacctacggtgaagattgctagcttcccgtaggttgaggcgagtgaccaatcggtgaggccgcacccgtaggcattgcagaatgccagaacgggtgcgagcgtgtagattactaggatgtagtaccatttgagttgggggaatatgtgggggagtgttgagattgagattgcggcgattgcgacgtagcctgatgcggcgaaccatgtggggatttggtctttgaggaagatttgggttcggcgttggtcgtcgaaagagggagtagtagttgtagttgtggagtgtgatgattcttgttgtgatgaatgaagtggaagagtggtgttaagtaataggtgcctttggcggagatgtgtggttaatgctgaaatggttcggattatgacctttatgaagttgtataggccatctcctagaatcatggctatggcgatgaacacctacaaaacattgaaagtattagttcacattggttttcttattataaatttgtgtgtggatgcatggaaaagtttacattagttctagctattagttaataatgttgtataaaaattattagtttatttttatataatatctaatatataattgccccaccccaataataacgaaacttattaaa

SEQ ID NO: 100705 - DNA, 842 bp, Cannabis sativa
tttttttttttttttgtatatcagagatggccaagcaatttcagtcatatatttcagagcaggatatacgccaactgactatccatctgagtcggtaagcaattttcaatgtaatgtgttgcttatttgactaagaacttctgttgttatcatacaaatgcttttactttcagtgcaagttctttgctataaatttgcatctggaaatggtgactgctagcttagaatgttgttgtctgatctgtaggaatggagagctaggctactgttggagcagtcatctgctgtcaaatgtccatcaatatcttatcatttagtaggtaccaagaagattcagcaagagcttgcaaaacccaacgtgcttgagaggtacatactaagctctgatttatgctttacactgccctagtagtcagaaattcaattcttaattaatactgctggtagcaaagagctgaaaaaattattaaggattcgtttggtaggctgtacaagggtcgtatggtattaaataacaagtaacactacgtttggataaaatattgtattgtattattacgaccataaattttaatacaatatgaatcgttgttattaaatacataacaaatgatctgtaatagcttttattataatatttacaaagggtccagggttgaggacttcggccccaaaccctggctccagtcctgacccccggatttggacctagaacccgacttagcttcggaccacggaacacggacttcgatcccgaacccaaactcttgacctggacaagggtcggacttggggtcgagtttatggcaaagataataaattttacacaagctattaataca

SEQ ID NO: 100706 - DNA, 1229 bp, Cannabis sativa
gattgcgcctgactattggttgacatcttggctctgataccaagttaatttttagagatattgtaaattgatttcctcagctcaatttgctgcttagatttcgatttctttatatagaaagagatggccaagagccaattacaaacgtgagcaattagctcaaatacagctggcagaaattaggttaaaagagaatctttttcaaatacaatgattggcaacaaatcataaattctaacggtaaatatcatcctcaatttcagcaataaaggagagtgtgacacatgtccaatcataggaccacagtagtaatagaaaagattcaggaatcttcttctcgattccttggtgaagagaaaggtttctctgcaatgcagagtatagtaaatcaggtgcattcctctatttcattttctctaacactactacgttatttttttttcttcatgaaatttgtttgttacaactttatactttcaactctttttttttctctttctttttgagttaatgatagtgttaacgtggattttcattaaccaataaataacatttttgtaataaatgaactcaaaaattaaataaataataataataaacaacaagaggatttttaacgtgattttgaagttaattctttatagtccacaagtctatcttattatgagattttataaatgatatacagaatacaatgaaagatcagtataattctctctttttctctaatttgtcgtctcttattctttgaattctgtctctatttataggaattcaggatagcaattatttccttgggaccttatctttgtaaccgttcatgaaacgtggacaatgcccacgttttatatttacatcacatggaataatgacaaataactgcttataaccgctctttagcttaatctgtgagtggttatgctaactatgtcttattcttctcgcaatacaagcaatctcctgaaaacgctttattctgaagaggattatcagcgcctaagtatatctcaagtaatacttcttgccttctgttgttggaggaatttagacaacgccaaaataaagtaatatatttaaaaatataaacaagattatgcgagtactcaacctagaatggcgaatattcaattatgtatacacagatgtactggaaatataaatgacacaaagagagtatagcggttcagtcagatcacggtctgcttagtccactattgcaagggttttct

SEQ ID NO: 100707 - DNA, 809 bp, Cannabis sativa
taaaaagtatgaccaaatgcaactttaataaattaattaatgttaataacatcttattgcatcgctgccttggtttgcaagatttggcaagccaagaatcaaatgttatggtcccaggagactacacaaccgcaagcattcttgcaagaaacaaaatggccgataaaaaatagaattacttgtgtaatgccaaaaagtatagataaaaaaaaattagaatggtttcaagatttataagagtttgcttgtttttttacagtaagattatagttgtttgctttttgaagagccatagggtgtaacataaaaggttattgtgcaatgaaatttctgattcatcaaataaaaaaaaaaactaatgttatattaaatttattatgttatagtttctatataaattaaagtaaaattatgtttatcataatttattttgaaagcaattgtgtttatcataattaatataagtaataaaatgtacatacaataagtaaacaatcaatttcccatcttcgagtatcatatataattaccaggaagtttatgcaacgtagtttaccgagtataattagtcgttttaactggtcaaatctccatctatacatatacgtgttgaccaatagttagtattatttctttcaaaatatgagaaattagtaattaaatttcaaacatggaagagataatgtattatttacacacgcaacacgctcacgctatttacttttcttagctccaattaaaacacgcaataattttatatcctgaattgttaagacgaataccaattttaaaagaaacttctgttagta

SEQ ID NO: 100708 - DNA, 824 bp, Cannabis sativa
  modified_base (54)..(54): a, c, t, g, unknown or other
  modified_base (92)..(97): a, c, t, g, unknown or other
atgtaaggtttccttaactttatatatgtttatatcgttttagaaagttcatanttaggatgttaaacaacatagttgtgagtagatctaannnnnnggtaaaataaattccaacatagacctattcctgactcatttgtctcttgctgccccctcctctaggtttttaaaaccttttcactgatgctaccatttgtgaaaacagcttgcaaataggttttggtgttgaggtgcaaaatagcaaaggcgaagtggtggctactctgtcatcttcccaccctgataccgtagctcctatcattactgaagctcaagccctttcttcagccctcacctgctgccaagaagtgcaatttgcctttaactggtatcttcttgaattgccaagttttagtgaataaaatcaagcataaatggaaagatagatccactctctcggattggattcagactattgttacttctctgtctcttttcccaaggcctccattgattacatcccacgacatcaaaatgtcctagctcatagcttggcaaagaaagctttgggaacggatagagaatatgtggaattcatgtggttccaatgttttatttttctaatcttgtaacgtggtttttacttcctattttctatcagtttcacatcagttttcactaaaaaaaaaaaaattgtattgtatactttatttataacactcttttctgtttattttcacttaaactattctctctccatttctttcatataatcgacatatatttcaactctataccattttaattaaattaaggttacgccaaaaaaaaaaaaattatattta

SEQ ID NO: 100709 - DNA, 993 bp, Cannabis sativa
aataataataataatgaaacaaacaagttgccatgacacacattattgaaactaacaatttatttttctgaaaaatcaaaaagttgaatttaaagtaccaattaaaccaactacccaaacttccatgaaatcaaatacttctctctctcctttttaactattcctattcaattcacttattaatatgtacattgattattgtaactctaatttaattatgataaataataataatgaccaaaaccttacacaaatttcctcaaaaaaataaataaataaaaacattacacacacacacacaaattacactttcatttttgaaaagctactattttttttgatgattaactctacatgacaatatgtatttctcaatttatttgtagttataaattttcaaatgctatacctttcttttttaaaaaggcaattatatccttttaaaaaattcaaatattaattttaaaattcaaaatataaacaaataaaaataattaaattaaaaattactatatattaaaactcaaatatattaagagaattatctcatatattatttttttaaaaaaattacagtgtgagttgctacgatagtttctatgtgaattttagttacgatttaagttgttccgtcagttgtacagaatttttgtaaaaatataaaaaagattattttgaaatgtaaaatgaaaaaaatcctaatttattatttattaataattgtataagctcactatttttgtagggtgaattaaattcataatatatattcaattatattcttgtaacattcatattttcacatataaatctttaccaaaaagtttaaaaatactattttttctctatgggacctctgaaacttgtgagttgtgatacatttattttgtattatttaatatttactataaaaaaatacattttttttgtctgatactataacaaatattaaatgagataaaacaaatattcttcaatacctacaaattttga

SEQ ID NO: 100710 - DNA, 722 bp, Cannabis sativa
tttgagcgcatgtgtagtagtgttgggtttgggtagtgctgatatggtctgatctctttgggactgatggctcctaaagacggcgagacaaaagagcttagggggtcgagctagcaagcttggactcatcaaaccccaaccgatatgtcttctcaaaactcggcattggctcgcttcgctcggcgcccttgtccctacgtcgcccttgtaattccgtgatttcatgatccggtgccaccgtttctatcggaataatgatgtagacgcgttttctaatttaacctattctttattgtttgaaacccttacccaatgcaatatcaatcaaagttttgtcatttgtcactaattaaagtacgtatgtttatatccttaaaaaagaaaagtaggtatgttactgtataagcaggattttgttatacaaaccattaaaaaaattaaaatatattgtgagtaggctaattataattttgaataatcttttaataattatatataatagtttgaaaagcagggaaggaaaattggacagttgagttgacgtagcctctcccaaattttttatttataaagaactttcgtggtacataagtaaaggtaattcccttgatttattgatgtaccttttacttgtttcggcatccaaaaagattttaggaaaattatataatgcacctcttaaaagagatatatcgatacatctctatctgttttagtatccg

SEQ ID NO: 100711 - DNA, 697 bp, Cannabis sativa
ccaaggagaagcacgccataggtgttgcaccacctcgcatgagagaaataaatgttccatagattcctccccaaacccgcagaaagggcaatttgagttctcaatctgaaaccttcttcctatgattgatctcacagggagcgcattagaaaggatacagcaccaaatcactttatgacgttccaagattttactattccaaaagttattccaaagggccggagcaacaacacaatgaggacctctatccaaggcctgggatagataagccgatttacacgagaactgcccattgctttccaaagtccaaatccatttgtcctgaccttgccccgagggcttaccaccttttaagatagcataaacagtctcctgttcagtttatggacatcccaatccccactattcagtagaagatcagccacgaataagtgttctgacaacacatcaccattcgatttcgggacgaaacctttgcaatgggggtatccaaggatccctccaaacactagtatctctgccattggccaccaatttaaaggccccttttctctatctaaatggcattttctttctttcacaaacaatatatatttttccaaaaccaggaatcagagtctttatatctgtaactgagaaaatccttcccttttaagtattttgcctccaagatcttgctgttggaaatattttacca

SEQ ID NO: 100712 - DNA, 821 bp, Cannabis sativa
cccattacataataaagtttgaaaggcagtatactgccaaaaaaaaaaacagtataaaagttaatttgagcgtgtaacagtataaaagaaagaaattagaaaaaaacagtaatgggtgtaaatttcccaataaaaaaccagggacaagttcaaaaaaaggaaataaaaaaatccaagagaaccgctggtgtacttaggtccaaaagtcacagacaaacatgaaaaagaaaacccatttgtaatcttacgaagaagaaactataagaatacgaaggtaaaaaaaaactaaaatacctggtgagattgagatgatttattgaatagctccacttgattaatgtacctacaaatatacaaaacaatcaatagttaatagataatattaatgaaagaacattcaaatttatgaggaaaatgaaatttaaagcataaggaaggaaatataacaaatatgatgatgagtctttgtggtgcttcaccataataaatctgagatgaaattgaaacccctcaaactaagccaaaaatgaaaaaagataacttaaattacttcaatatttcttcccactaaaaaccctctttgagtcttgaaacaaacaaaaaacttacaataaaggagaaacatattcatatattgaccatttagtatatatggcttttaaagaggaagaggaagagcttatgggtcaccaagttttgtcttattattaataaaagcaatttgttggatcccaataagctaataagttaccaattcaatccaacggtaaatatgcacttttgaaaataaataaaaataataattaggtaagttaatgtta

SEQ ID NO: 100713 - DNA, 517 bp, Cannabis sativa
aaatttattatactaaaacatcacatcaactaaagtgaccatttttcttttacttagcatataatatatataaggatcatttcttaacaaaaaaaaaatcatatataattaaatgtcaactttaaaaatattaacttttaaaaatatgattttaatttaatagccaataaaaaaaaacaattagaattttctgtttaatttcaaaaattaataaatatattgagtgcatattgtagatattaaaatttacaataatcaatcgaacataattgtatgcgggctctgataatttgtagaagaaagacaaaagtaatcgaaaaactttagaacactgtgatagtgccggtcgaacagactccaacggtcaagttagcaaaattattaacaatgtagtaaaaaaaaataagaataaataaccaaactaaattaccacctatcttagtaaaaaatgatgcagcagtaaatgatgaaatcagctcaatgagcttttggggtatactttcatttatatagccac

SEQ ID NO: 100714 - DNA, 673 bp, Cannabis sativa
gatgctgactgggttgcttacccagatgattgtcgatccataacaggtttttgtatcttcttaggtgagaatcttgttggatggcaatcgaagaagcaagctactatatctaggtcctccactgaggctgaatattgcagcattcccgctgttgttactgcaatcagttggatcaactcattgctttttgagctacatcaaacacctcttgctactctcctggtttggtgtgataatttactgttgttcatctcacagctaatcctgttttgcatgcttgcaccaaacacattgaaatagatattcattatattcgggacaaggtgatgcaaaagaaaatacgagttcatcatgttccttctgaaggccaacttgcagacttacttactaaacaaatttcttgttctaggttccctcttttaagagacaaacttagtatggtctgttctaccaccttaaatttgaagaagtctattaagggtacttagtttagctatagtttagtacaagttcttgttgagtctttttagctcattttagtgtatatatagccttgtatttttttttttaaatcaatgagaaaataagtgcatgtttgacatcataattaaaaaactgtttttttatttttaaaaatagaaaattattgtttttgaaaacaatttggcttgtt

SEQ ID NO: 100715 - DNA, 839 bp, Cannabis sativa
ccacgtcagcataagtatgagtgcatctaggagcgtgtataagggcttccaaaattatgaactaaggcactcgttgaatgaacttcttggataagaaagtgccagctgaagtcgactatccaggactcccttctaagagaaacggctagccatctggaactccttttagagggaaggatagctttcctgaggactaaatctggagtggacatgatggtcatctgtgaactcccttcgagatggcaaccatcattccacgagatatttttcagatggacaaataagttgtacaagaacatacttccgattggtagataacttttcagaaataatttttggagacatttttcatttagagaaactataccacactaaaaaagttaagaatacgatttaatacatatcaaggaaacaaaaatcttaattagcttttataaatgtcgatgactctaaagtttataatggttgtactaagttagatgatattgacaatagttcccttcatcatatatagatgagtttaattattacttttctttaagaacattggcagccattcattcctttaagaaagcattatgacaattaggagtatggataaatcgatccaatctaataacaattgaccgattcaattataactgaccgctaaacattggatatccaattgtgatcggattgaattggatattatttttgaatatctaatcggatcgaatcgaatgttggatggggtagccaaaaattgaatacatttaacacccaatcgaactaattaatatttttatttattttgaatgagtaattagattttatgttgttatacgtaaaatatatat

SEQ ID NO: 100716 - DNA, 1028 bp, Cannabis sativa
gtgtatttgtgaaattatcccttcaatttttgggttgggtcgagacttttatttgggttgtgttattggtttacactgtaaacacatagtgttttcaataataccgttataattatatcactcaaatagaagtgtctcataatcacattaaaacattattataaatatagtatactaggtaggaggatatacgaaaatattacttcaaattgcatacaattttcagctacaactaataatctagctagtactcttggataagttcttcattagtagtagtagtttctccttgtccaaatctttcttcactcatttttgtggcagaattcaacaagaatgccaggtcctttttcacttcagcaactgttgacacatagcgaaatttataatcttcattctgcaattgaattggaggaattatttttccatctttagatttttggattgctttcgaaagatcttcccatttattctcatagctgataatatcagctcttggaaaaaatccagtttcaaatcctttccattccaatttttgttgaatatatttcgatcttgcagcttctgcaatcatttggataacaactagaagattttggcgaagctcgtctgtaggattcgtgctatcaaacctcttaaatgcttggagcgagttgtctaatgacttgaatcccaaattggttttttctctatttcctaagatatcataatttgttttgagattaacttcaacttttttagtacattgtttgaaaagtagagtttttgaattcggtggagcttctttaaagaagtagcaacgcctttctgcgtctacttgataggcaacaacatacgagttaagagcggatattgcaaatgttatggcaacacttggattgttaagtctcacatatacaaattgtttgtctttgaccgccgcagattttgtgcgcaacaatggtatgccatggctctcgatgttactagacaattctcttcgaagagattgcatgaaaatttgatatgatccgacgctcatacctttg

SEQ ID NO: 100717 - DNA, 984 bp, Cannabis sativa
aaaaaaaaaaaaaaacttacgaatggtcaaacagctagaaaacatgccctgaagagcaattaaaaggtgatgatagctctgatagatctgaagatccactttcctcagatatggagctccatctaatcccacctttaccaatttacatttcttcataacattcattcttgatcctctcacaggtggccaccccaccatttgtgccctatataatttcaattcattaattaattaattaatcacccatacaatacatatatatatgtaaggaattttgtataatgattaattgatcttactttggtggtggaggttttgaaacagagcttgattcatcaccttcatcttcatcaagattaagatcaatggtttctgagaatccacgtttggtgccacgtgtatcgccaggcaatcccaaggttagtttggtctcttcgaaattgagctcgacggattctgattccgacgactggtttccgtttccggctgacatttttggggtttgcagagatttttgggaattataataaaagagttttgtttggaggtgacttaactgttggtgggtttgtgttgtgagctattatatattggcaagttaaagaaggagagatattaatttcaacgaatggattcgtgacacgtgttgagtcatcgtccacgtaagaaacagacaatatatgtgaaagaagcgcgtgtgtctgatttcagtgcttcagagtttgggccctctgtcggcctttctttccttgttttatcactcattaattgtttctttttaatgacattaatatatcaaccattaattcacaaaataaaaaataaatattgtcaaaatatatatgtgtgacaacgatacttaaaaatacagtaaacctctattcaagaatacatttgagaccaattaaattatattctaattaggacgttataattaaatagagttacactaggaaaaaaaattaaaaaaccaaaaaatatcaa

SEQ ID NO: 100718 - DNA, 551 bp, Cannabis sativa
ggatttacatatatatgggaattggagcatgcataatatggtaagtccaccacacaaattactacttttgtgcctcagaagaaaacaagtgtacaataatgtatatatgccctcaaataatgaatctgtataaattgtggctgtggcagaaatggcatggcactgagttttataggtagatagatacaatttgattatcatataaatatatataaatagagtgaaagagagatgagtcagtgactgcgttggttgctgccatctctttctctttctctttttttgtttatgtaattcttttgggttaaatggatgtgttgtatatatgtctcctgacagtagtaatagtataatgttgaaatcagctttaatttgagaaagaaagaaaaaaagaaagagggggccctactttactgatcataattagcccctatgcacctctaaatttgtagtcaaattttacacttaattctattctcatcagtatgaagtatgaacatttaagaatctacttcacaacacacttgtaccctaaaaacatattgggtatg

SEQ ID NO: 100719 - DNA, 1851 bp, Cannabis sativa
attattgatcatatgtgcatgaggatgagacatattcatgttgcattcttttttttgtctgctatggttttttcctaacaaggtttttaacgagtcaactttaaatcatgctaacatacttgtactttatgaagcaagaagataatgtgtgggagtgagatcattgacataatatattcggggaaacatatggattacattcaataaagcggtatcaacattaataattctctatgaagattatactgcttgaattgtgcaactaaaatgaatgtataatgaaggggataaaatcaaacccatttcaccaaattcttctttacatgcaatcttcaagagagtggtaatatcaacaaattcaatcaagtgtcaatcttatagacttattcacaaagtcattaccaacatcaacatttgagactattattcacaagaattaaattcgccgataagaagatctccataaatgcctaaataagagtgaataaattcatactgcactctttttcctttggtcgagtttttgtccttttaggttttctgacaatgattttaatgaggtagttattatggatatccaagggggagtgttatatggatgtacaaatcacccaaatcaatgcattaattatcactataaatgtttcattacatttctttttatttcattgatttaattttttattattctagtcatatttttgtatgaataggggttcatcctattgaaataaattacgaagaaattctcattctcattctctcttcttcttttctccttatttattttgtattcttcatagtaattttatagcatattgtaaattgttctaaatttctcaaaattatttaattagctacaatatacaccatattataaaataatttaaaattataactatcaattttaatatttaatttgtataaagaaaatcataattggtatctaaaccctggaagcagcctagttaggaaaataaacttgcatctccaatggttaaatttttgaggatacttacttatgtggaatgtttatttagcaaaatacaagtatgctatactattgaagataaattagtgttatcatagaaattgtgttgatgcaactatataatattgatgctatctttttatttttataaaagaaatataaaattaaaagtatataaatagtgtgacaatatttataattaaaacaaatttactcaggaaaggaagagcctttcattgtctcctttaaatgatggagggcagacatgtgagtgtttgattgcacctctgttaaacaagattaaagttaatgttgatggggctttatttgaacaagaggggcggtttggagtgggctgtgtagatcatcatggaaccatggtagaaactttcaagaagggaaaggttgggtatgtccaacccaaaattgttgagatcataggcatcaaagaagctttgagttggattgcgactcatccctgggacaatgtagtgttagaaatggatagtttgctgtgtgtccaagtagtacaaagtaaaatttttatgtcctcacagttcggtcttattgttcaagatgttaggaatttacttttggctttatctttcgttgagttatgttttgttaaacgatctaaaaaaaagttggctcattgcttggcaagagactcttgtttctctataggttgtgtgtttcagttggaggattcttcccctgaagtgtgttctattgttttgaacgagtttattaattaataaatctcctgatttattaaaaaaaaataaataatataggagatgataattatattattatataaaaaaataatgttaatcaaaaataacataaattattatatt

SEQ ID NO: 100720 - DNA, 1117 bp, Cannabis sativa
gttaagcctttgaaaagagctgatggtgtcctatttagtaaataggtggcagtttgaatgatataggaccaatagactaatggtaaattggattgaaaacatagagcccgagctatgtttaagatgtgttgatgtttcctttctaccactgaattttgttgtggtctttccacacaagagtgatagtggataatgcctttagaagcaaagaaagaggctaagtttaattctttggcattgttcgagcgaattgctttgattggagtagaaaattgggtacaaactagatgataaaaattcatgagaactgtaggtgcatcggctttccttttgagcatgtatgtccaagtaaatcgtgatttgtcatcgacaatggttagaaaatatctatatccttcaacactaatgatgtgaaaaggaccccatatatccgtatgaattaaatcaaaaacattagtggaaaaattgttattagatatgaatggaagtcttttttgtttagccaaatgacaaattgaacaatgttgattggaatttggagagagaaaagagtcaatctttttattaagaacattggaaatgtacattgatgggtgaccaaggcgattgtgccattgatctacattattttgtaaagaaaaaacagaggattgacttgtatttgccatgacaggagcttcatgtggcagcagaaagaggttgccatgttttttagctatcccaatcacccgattctgatagcgctgttggataacacaaatttcaggttgaaacaagactgaattagttgtgttatcaatataggcaactatagaaaaaagattaatatggaattgagggacataaagaacattatgtaaagtgatggcagagtttattttaatgattccaatgccattaactgatgtgtgattattattaggtaatgtaaccaatttgggatattgatgatgtgaaaaagattgaaataaatctttgttgaaatacatgtggtgagttgcactgctatctattatccaagaattaaacaatgtaaaagagtggttaccagccatattggaagctgctgccacagtgttggggtctgtgcgaggagcatgttggtgaagttgttggc

SEQ ID NO: 100721 - DNA, 594 bp, Cannabis sativa
aaaaaaaaaaaaaaaacactattcttgtcggttgttaaattggtttcttttcgaaaatcatcgctaataaaattaagtgattagagtttaaaaaccaacgcctacacttaagaatacccatctgttttaaagggtcgttaagaaataacatagtttttcaaccgatagtgaattagaaataaaataaggttcgcattatagtcgtcggttattagtcgtaggctaaagtatagttagcggttctaaaccactggctatactttagcctacaactaaaaactgacagctattccccccaccccatataatataaaacccttttattcaattcatttcaacccctctctctcacacacactcactcactctcaaccgtgacaatctaccaatgccaccactatcacctcctctctctccatcctcgctctctcgtcaaattttttggagtcaatcacaactgatatgaaccctatgcatcatcctgcactaggttaatctttaataccaaaatgattagtaccctaatcccaaatttattcctcaaaacccaaaggttcttcatcatctaagtgaaaagtcaactcattctcttct

SEQ ID NO: 100722 - DNA, 944 bp, Cannabis sativa
gttcgatattttgacttttgagattagatatttagataccccgaactcagatttgatcaatgtatttgaattccaaactcaaatttgattatattatttgattaagaatagtttagtcacattgttgattttatagtactaataatgtacaatttcaaataataaaaggtaggggatgaacacagaatactaaatgaatatacattccttaattaagaaagggttaatttaatgtgtcgtacttgtgtggatttaggaccttggcgatggttcgatgattcaatgcttgattgttgtgaaccactagaaaagattaaatctgaagggattacatttgggaaagtggcttgtttggctcattgcaatggagctaaagttgatgcttttagaacgaatgggagctcgattgaagagttccgcaaatttgtgatcttatgttctgcttcagagaattgtcatttgatcacttcataccatagaggacattttaagcaggtatgtatggtgatgtttgtttcatttaggatttggcacttattttcgattctttatagtaatgctgctgattagatgtgtgtagcattgtaatttgatgtacaaaacatttcgtattactatgtgtttgcagactggaagtggtcatttttcaccaattggaggctaccatgctggaagagatatggttctcatattagatgttgctcggtttaaatatcctcctcattgggttcctcttacacttctgtgggacgctatgggtaccattgataaagcgacagggcacccaagggggtatgcattgctatattcagtttctatgttgtaattgtattaagagaattgtgagcttttttgaattgtgctctatttgctgctttgtttccatttcagcaagtaataacttcattggataggccactctcaactgttttcattgcaattga

SEQ ID NO: 100723 - DNA, 870 bp, Cannabis sativa
atctaaaaggcgccctgcaccatggtctgcacataaaacagagtgacaatttgagccttgttggttattctaatgctgactgggcctgttgcccagacgatcgaaaatccatagggggttactgtgtttattttggagagactcttgtgtcttggcaatcaaagaaacagtctgttgtgtcccgatcgagtacagagtctgaatatagagcacttgctcaagtctctgctgaaatcatttggctcgaatcccttcttcaggagatacagttcactccttctgcaataccagtaatttggtgtgataacaccagtgctagtgcactcgcatccaatccggtttatcacgctcgtacaaaacatatagaactggatattcacttcaatcgtgacagagtattgcaaaagaaaacagatattcggtatgtaccttcatgcgatcaaatagcagactgttttacaaagggactgtctcactctcggtttcagtacttagttgacaagctcggggttacatctcccccctctcgcttgaggggtggtgttaagaaactataatctgcaatttactctgttaaccctgtttttctattgttaatcctgattgttttatttgttgagaaatacccttgtacagctgtgccaatggcacgtttattctttttctgttattaccttttggtacgtttgtgtaaaggttgtgtggtcctctttgtataacagaattgtgtaagggtttgtctatataaatgtatatcctcagtctctctttctgagctgagttttccatttttccttttctgtgaaaaggtctttcttatcttatcctgcgtgtgtagggacggagccacaaccatagcaagagtggtca

SEQ ID NO: 100724 - DNA, 1038 bp, Cannabis sativa
aaaaattactcataactattagtgtcactaaaaattactcataactattagtgacccgcacttttgtgcgtgtcactaaatagtgtcactaaaagaccaaattgtagtagtgtcttgatgtttgtctgtttgaaatgctaagtgtttgtggtattaaattataggcttaggatcaagatcctaaaatcggtggctgcaagaagttaggtgttaagttagttagacaataactaacttaaccaactttacttttagcgagatctccgcgttagcataagaataagtgcttccaggaacgggtatgagagcttccagaaacacggatcaaagttacttgctgaaggagctttcgaataggaaggagccaactggagtcgactattcataactctttttctcaaagggaacagctagccattcgaaactccttttcggaggaaggctagcttcctataatacccttcctagaagtaaaagagagccttccaagaacctacctacatgactaacagaaaattgagttagcgatcaagcgatgatttggcattatatatcatgtcaactccactagatttaattataaattaaataattaaaaataattactaaaatcaaataattaaagtaataaaatcaatagaaaattatttagttgaaactatacatcacattagtaccaacaaatgacacataagcatttcgttagttgacgattgattaaaactcatagatcaaaaggcataatttagtaacattaataattgggagaattttcaacagacggtaaaatcagtaaaacgaatgataatatatagtttaagaagaataaatccaatttattcattatattcttaattgttacattgatattactttaatcaatacattaaattaatataatattaaaaatttgacatgatacgcttaccttttaatattaatattgttcaaaaaaaatattaattaatcaataatattgttgtagtagttggttggttggtaaatgttacatcatatcattaatataaattaatttat

SEQ ID NO: 100725 - DNA, 756 bp, Cannabis sativa
  modified_base (554)..(556): a, c, t, g, unknown or other
aagtaaacataagatagttttaccaccaaaaaataacataagggggttaagtgtctacaaatataaacataaaggggtttgaccgcaaatttctcatatttatatgttattatagtatagagccaaacaaatttgctggaagtagtcaaagtgacacatgcatgtgcatgtgcatgtgcatgtggttgtaaggtgctatatgtccacttctatatatgaaaatcccaccccatatattcaaccaaagctacgtcttgtctaatgctttagcggtggcaaagtcagaatttgagttcaaagcaacaaaaaaaacataaaatcatactcacgtgattcgtgaatgaccatcacctaattttggcataaatatatatacctatatgccaaagatattgtacttgcagagtgtagttaatgatcaaaatttcaatccattaggtttaaattttatttctgttaactaatattcgccaactaggctaaattttatctatttattaaattatccttcctattttttaacactctcgtttatctctctctctctctctctnnntctctctctctctctctctcggagcgaaggactacataccactgacccaacccctaacatcaaacatcccagactctctcaccaacccacgaccattacagccaggggcggagccaggacctaattactagggggccaactattaatttctatttgaaaaaatttatagtgcacccctagctaaaaaattcgttttgaca

SEQ ID NO: 100726 - DNA, 1298 bp, Cannabis sativa
aaaaattgtcactaaaaataacagtttttgtatattttttttttttcaaaaaaaagctatatttttctgaacttttacaaaaaaaataaccataaaaataaaaattctcctacatttgatcagtatatataatgaatcatgatgtatataaacacaaaatatgtactaaaatattacaccagagccacaacttaacaaatatatatattttatactatcacgacactagtataaaaatcactatttgtatcactcaacatcgttaactaacacaaaatactatgactcaatatttgtgtcactagaaactatggctcaatgtttgtattgaaaaattaacgtaattgatgggctaattgtgttagttatgaacatatccctcaccctaatcctaactctatccttctttctttttcctaaccctatccagctcattactctttaattgctacctcattctagcttctttctctattgtgattgaaatgatgctccaagtccaaatgctgacaatcttctccctcaccctatcatgcattctattctttctctcttcctcttcgatcgtcagctttggacgttaagttatgttctcactttgtatctctcaatcaatgtcattctctttctctctctatttttttagatatgagtttgtaggttattatggcagtgactcaacagttgtggtggtgatactacaagaaatgtcacttttgctagtatatttttgtgctagcaaaagtttggtattccgccggtaaaatagaatttcctttaatgtgttggcaaaaggggttggtaaattaacgttggtattataactttttccagcacaaaatgaaaagtgctgacaaaaatgactcttcagctaaatgtgctggtaaaagttagaaatttagctactgcaaatgtgcgctggtaaaactttaatctttttgccagcgcagtttgcaaaatgcgctggtaaaagttacttttaccagcgcagtagcgaactgtgttggtaaaagtgacatttcttgtagtgtgactccgaataatatatattatgtttgtatatatattttgcgtttttttttttgtatatttttgtgggttcactaaaaaatccagaataattctcgatggagaattctcgtcggttcataaaattgtcgcctatacgagcgttgcgaatactgagtacgtagaataagcgatgttaaaaacagtcgaggaatagcatagcctacagtgtaaaaccgtcgcctatagtatatgttacagtttagaattgtcgattatagtgatataag

SEQ ID NO: 100727 - DNA, 1639 bp, Cannabis sativa
aaaatgcgatagatggccatttgaatcacatgggcaagtctagaacctttttcttagtggaataatattagagataaatagaatactgagttttagcggggttatgaattttgaccattttacccttaagcctttagattacttaaggtataagtaagggcaaaatggtaattttgctaccttggtggggtttgtcctttagtggattttgtagaattatgttcagctattatttgtaaaaagaattgaatttttgattaattaagtgttggctagaagacagagaacaattagaaccaaaaacacaattttgagctatttctttctctctctcggttgaagcaaaaccaggggaaacacttagggttttcatctgatttttgagttttcttcaaggatttgaggaagttctaaccaaggtaagccctagaaactcttatttcttgaattctctaagttctaattggttatgacatgcaatttttttttaatggttgttaggttagaaatgtttggggttcggtttctaggtttattttaagttgaaattgagttttggttgctggttttgatgtgttatatagaaattgaacaagtttgggtttggaaactcaaacttgagtctttaatggcacttttggattttaagtttttctcttgctgttattacttggaatatattgtggaatgattttataggtgttctggaaagtttggttttgtttggacacgatttgggcatgattttgaattagtttgggttacctggtgcaaatcggttaaccggtttctcaggccctaagaaacctgttaaccggatcagaaaccagtttcccaaattttttcgtgttatttccaatgccttagttggttatttccttgattttcggggtattgttttagtagttaccaatagtagaacccttaataggagtttgagtttcccgaattagagttttggcgtgttatttacccagttatgtgaatgtggcttagggcatccatccagcgtgagattttctgttcaagtcggccaacttacttgaattcgaaaataaggtaagactagtatagaacatattatacatatgaatgcatatatgtgtgatatgtacatattgtgcttgtgattgtatatattttgggtgatatcatagcgacacaatcattgtgtccattgtgtcggttcggcagtacagtcatgcagtacagtcatcgtactggttatgagtgatattcaccccagaaagtattaattggcgatatcatagcgacacaatcattgtgccggttcaacagtacatgcatcttactggttaagagtgatatcatggccaattatactttcaagtattattgatgctatcatagcgatgcaaacatagtgccggtcccgcagtgcgatcatagtactggtagtgagtgatatcatgatcagtagtaccaactattaagaacgttcttagatcatttgataagccttgtggataggtgtatgggtgcctagacataagttgtgaatatatatatattctgttgtatgtttttcttactgagtttgttgactcacagatgctactttcatgtgtaggtaatagtatggcgaaggctgaataggagtgagctccgggcttggatg

SEQ ID NO: 100728 - DNA, 536 bp, Cannabis sativa
gaagattctttactaaatgattttcaaaataccaacaagatgttattggaaggtttatgaattggaaatactaggctactgtaatcccatagccatattcaactataataactcatggaaacctggcaacaattacagcttttcctaccggcaagactagcatttagtgcaccaatccaaccgacttgatcaaatttttaaattttatgtttcttgtctggtttttgaaagatgcactgaatttaatagttaaaagagcatgtaaccatctcaccctatcagggtttcaacaaaattaaaacaagaaaaatattaagctgttttccattctaaagctgcagcaaactgaagcttgatttaaaagttccaacttagtaaaaacactagatctacctgaaatctagtataaagcatatagagaaactatgttattacagcaaaaattacacacattaatcattatgttagaaactaattatttacccgaactagcatttattgcacctttgcattcaaaagtttcagaagtgaataac

SEQ ID NO: 100729 - DNA, 717 bp, Cannabis sativa
gagttgagttgagttgagatattattagattctcacaaacaaacctgaccaaaaaaacaaaagcaaaatctacttcactttctctgactcttcctcactctttaacttactatttacaaaagaagaaagaatcccagtctcaaaccataggttatataatttcctttttttttactgtttagtatttttgccgccaaagctgacaaccatcctcaatcgtcggattatttaaagctcatcaagtctagagtgggtcccttctttgatgggaatggaccccactgcaatgccattccaaagagaaagaaaatgatttttcttccttccctttttccttcctcccacacccccactctctctctcttcttctctatagtctaatctctcatccccaccattaatatattttttttcttctttcctttcatagctcacttcttaattagtattgctcactcatctttgagtcattacaaagcgataaaaattccaaatgggcacccttgtttttgtgatttggcttccaaatcttcttgtttctgatctgtgtatttcttaaattgttgcaattaatttgctcgtgggcattctttgtttctgtattagaatagaaagatttttctgtttttttttttcttattttcttattttctgttgacatttttggggttttggttatctatatatatattttttggttttggtcatcttgaaatc

SEQ ID NO: 100730 - DNA, 679 bp, Cannabis sativa
atgtttgttgccgtacaaagtcttgtttgttttgcaaaaatgtgagggatattcgcctgtcttgtatttaatctttaagatccattaatttgaactattatattggttcctgaatgtgccaaattatatttcgtagtaaaacttgatatttgaattcattgcaattcttcatgagggtgtcatcaaggatatataggtcatcaactatctccactaagacctcaccgttttgttcttggacactttttcaaaaatccttatactaatggagatatgtccatctttatatagccacgatctatctatttttagctaatgtgggacttttatttgtattcccaacagaggggtctttcaaggcaggcttgtttatataatatatgatggaatttgagatggctgtataggcttcgtttgaacaattacacactgataagttctttgtaagcttaagatgggacttgatagtacaattagtccaattggatcgagcagagtagtgctagttagaactgaattagtaatatgagtggggtctgggtcaagaatggttagaaacagtggtaataaatgataaagattgataggaaatgtggtttcatcaaatactacatgacaagttatgtagaggcgtttagtggactgattagacacaagtgatctttgtgattggtgctat

SEQ ID NO: 100731 - DNA, 603 bp, Cannabis sativa
tatgcttgatattgacttgtattaattatttgtgtaaagttataatatattttcaatacactcgactccaacaccaactacgggtccgggtctggttctggttctgggtccgagttcggggtccaagttttgggtctcgggtccgggtccaagtcccggatcttgggtctaggtccctagtctgggccctaggtcctaggtctcgtgttcgaattcgagttcgggttcgggtcctggtttggatttaggtctcgggtcggggtcggggtccgacaatcggttcgaggttcggggctcgagtctgggtccgggtctggatcttaggtccgggtctgggtcgtggtccgagttcaggtcccgggtcggggtttgggtccagcaatcgggttgaggtccgggtccaggtttcaggtttcgggtttcgggttctgggtctgggtctaggtcttgggttcgggttccggtttcgggtttgggtcctggtccgagttcggatccaggtccgtgtccgggtcttggttcgggtcttgggtttgggtttgggtctcgggtatgggttcgggttggagattggtgttgatcccgaatcttttgtaaatatta

SEQ ID NO: 100732 - DNA, 639 bp, Cannabis sativa
acaagggggccgaacctctataacaaatcccgttgtctattggtttttattcttatttgtgcacacacttggcaagcatcagatttgcacgacctcactgtcggttgttcacttatcaagatcaacaaaaatgctctcaactttcttggtgggtttcgaatccatactagtcggcaacaaagagttctcacactacctcaacaatcaatcaagcttggcatccacttccttaggacaattgaaacttaatgttgatgttggccttgactcagctataggggttatgtgtattggtggtattgttaggaactcttttagtaatgttgtggcagccatttctaaataagtctaggctgtttacaagtcaaagagattgaagctaaagcaatttcctcttgcttacactggctacatcatattggttgttttctctactttattgaattggtgctcttgtagtctcacagagtatcaatgcttatcaagagcaatatagtcgttgcatgatttagttcgtgatattatttatcagatttcctttttttttagagtttttttgagtaatgtgcgtcgatttgctaatgagacgtcgtatgatatagctaaattttatcttaggatggatactatattatttgg

SEQ ID NO: 100733 - DNA, 961 bp, Cannabis sativa
tgaaataaaattaattgatgatgtgtagttgtacttgtactgtatacgtaggatatgtttgctgctgggacagatacaacctacacagtcttagaatgggcaatgacagagttgttaaggaatccaattatcctaaagaaacttcaaactgaagtgtctcaagcagccaatggaaaatcagacataacagaggacgatttagacaaaatgccttacttaaaagccataatgaaagagactcttcgcttgtatccaccaattccattgctcgtgcctcgtgaattaacccaacatatcaaaattaacggctttgacatagctgctgggaccatggttatgaccaatgcttgggccattggaagggaccccacattgtgggaccaacctaaccagtttcagcccgagaggtttatggattctgatgtggatttcaaagctgggagtgatcatttccaattgattccctttggagcgggcaggagaggctgcccgggaatcttgtttgccatggttagtaatgagttggtgttggctaagcttatccacagttttgattggacattattgcctggggttgatgatcttgatatgacagaatgtgtgggacttgctattcataggaaggttcctcttcttgctattgcaactccaagatgatgatcaatatatataaaaaacttttgtaatatgtttttcttttaaaactacattgatgttaaaagtattgtgatatttgatgttgttcttttgagaacgtgttggtgtgagctaagctatcttgattatttgagctggagttttggaggaattacaagtgtaatttgtgttataatgtttataaataatataatatctatatctattctatataaaatgtggctatataactgaattcttggtttatgagaaattagtgggtgaatttttttttttaatcttttattcaaaaataacaattttt

SEQ ID NO: 100734 - DNA, 890 bp, Cannabis sativa
tagcgaagtggagaagtcacaaatggtggaacgaaagatttgacactctggtaaaatgtctgggggaagtcttgaatccgattctactccaagaattaccaaccagaattctctgcgtggggaggtacaaacttctaaacttcttttcctttcgaatttgtgaatttaattgattgcttttatgctaatcggggaggaaaagagttagaaaacgaaggaggctcaggggtgaaaagaagagcggacagtagtgaggttttaatcagggggaacgggttagacaatgaaacaggaaagagattacacagagatgtcagtagaggtaatgagaaatcggaaatggttgtctctagcaaggagggggagtggatagacatccctatcacattggacaggagctgtgggaatgtgaaaaccggtcagaagggagggaggaaaaagagagttgtgaataggaaagataaaatgatagataataaattgaaatccccagtggtaacccaaggtgatgaatggatcggaagctctggaaacttgatgaaggatacagcaacaggggacatttctaagtctttcgatttgtcctctggtttgattttggaagtggagaactcggttgaaccgagtcgccgagaacaatgagtatcttgttttggaatgtttaggggcttgggaacccctggacattaaaaactctttgctcccatgtgaaagattatcatcccgggatgatatttatttccgaaactagacttaatgaagcagcgatggaaagaattcgaattgtgttgggttttgaaagttgttttgtggtggcagccaaaggtaagagtggtggtcttgccctcttgtggaaagatccttttgaagttaatataaaatcctttact

SEQ ID NO: 100735 - DNA, 724 bp, Cannabis sativa
gccttggatgaaggctgaaatggccgtctatagttgcttcaacacgaggaatcaactggactatttcagagaaagtaatggccggtcttcttctccggcaaaggttcctccgactgttacttcgaatcccaaagctatgggaaagagaccagtccaagatagccccagaaagcagtgtctgcaccaatctccttgctctaaacctccaaggaaagtagtcaggatcaggagcaatgaagcaggttcttctttaggcaaatatttgaaagttgtaaacaaagatgcccctaacccgttggataaaagacctggatgctctaatatagttccacgggcttcaagacaggatggaagaggaagaaaggccagatcaatttcacctagagccttgcgtaatcaccaacaaggtaattctcgtacaacctcagacaatgacttattaaatagcttttcatctagacctcctcccaatgaggctgataatggcgttatcacaaccattatggccaatattgggcccacttataaccaaatggtggaaaagcctcatgctgaattgtgtcaatctagacaaccccacaaacaccctgagcccactcattttccatgacccatttatgctgaggaaattgggctggctgaagaacttatggggccggcccaagtagacaagtttgaaccaatccctactttgttccatgacccaagtgatgtatctgaatta

SEQ ID NO: 100736 - DNA, 1094 bp, Cannabis sativa
caagttatggatattacatatctgccacggcctagggctgaggtcgtgacaatacatctaagaagatttctaaaaagtatttgatttattcaatcaaatgtggaggatatatgtgatatttaattgattgaataatgttacaatagtgtatcacaaattttaatctagtggggaaatactatattatttattataatataatatagattaacatatttaaatgtgatatattatatattaatatgagattaatgtatttacatatgattatatgtaattaagtgagttattacatataaaagttataaaatcaatgggataagtttctaactgttagaaactattacaatattcatttatatcatttaaataggtgttggaacattggagaaagattcagcttggagaggagttacaaaaactcaatattgagttatctggaaacaattattttatggttaataacatgttgatttatggttgttctccttcatctagagccaattttaaaataacgcccataaatatacatgaatttattgggtacgttttcagctctcttatctaatatttttgtcataataaacactaattaaagtactggtaatagccatgtagtgaaggaatttcgacttttatatgcgatcctcaaaatattataaataaaggtctttgggttcactttgggtgacaccaagtttctgccaagagaacacataattacgagaaatactttaggcttcataactttagaaaactatagacaattgtttatattcttctctttttcctaagtgcttgtggtagaggaaataagtttttggataaacgtgcaagaccttgttcaagtttagtggttcttctattatacacttgtggtgtatgtggtgttaagattgtttttacatcttttatatatatttatgctatttatatattgtattttatgtgtaacttattagtttgagttgtaatttttctctttaattacttctataatatctattttatgtgtatattttatttaatgttgtaacattatttaatctatgtggtaaataatccactcaaaactaaaccagtttttacctcca

SEQ ID NO: 100737 - DNA, 1139 bp, Cannabis sativa
gtcatcattaccagcaagtggttggtttggtctttgaagctcatcaagagactggggataatcagtgcatcacaaatggcgagcaaaagtagcataaaacttagcttttttttttttagttcaatctccaggtgacatgtcacttactgtggccaacacgtcgctaatttttttcacatatttcatgattcctcgactaaataaaatataaaattacaaaaaaataaaactcggttcaaaaataaaaatgaaaaactaaaaaacgaaaaaaaaaatgtatgggttgcctcacataaagcgctttattatcgtctttagctagatattgttgttgcttcaagtttctttattacggagttgttcagtcatcactctagtagtgcatgccttcagtttacgcctgtgaacctttagaatattacctttatcgtttttaatacttacaaggccacaatgaaataattcattgactttaagagaatttttccaccttgaaataacgttacttgtcaaggatttgaattttgaatgaatcatcaatactcgttgtcctattgtgaagtcctcctttggattctttttacctcgaggcttcttagtcttttctttatgattagtctctctattatctttattggagtcacgaggctgaaccatattgcatatgttctcagtagtagcttgattcgaagacttataaatgtcaaacatgatttcttcatcactggcactcaaggttaggtgaccttcttcgaacatctataagcgcatcaccagttactaagaaaaggcacccaaggatcaatgtcatatcattgtcttcttccatgactagtaccgcaaaattagctggaaatactaacttacttatttttattagcacatcttctattatttccctaggataagtgaatgatcgattcgccaattgtaacaaaattattgtgggctttacttcaccaatacccaactttttaaataccgaaagtgacattaaatttatactagctctaagatcacatggaaaaactaaatttttgcaaatgtcaataatatatatgaaaatataaaactgtatacgtttgcacaagcagaatataattctgttactgcagaacaagttttccagcgacaaaaca

SEQ ID NO: 100738 - DNA, 1061 bp, Cannabis sativa
attttccaatcttatttgtgttaaaattttatgctttaaataaaattcatttgaatataattagatttactttttcactatataaataaaagaaaatctattggcaggacaaaaatcgtgcatagaagctctattttttgtgccaatatacgtttaggcacatcatgtcgtgcctaaaattttgtgcctaaaggagtctattggcactacaattgaatgtcgagcctaatagaaatttttgaataaaaaaaagagaaatttacaaaaatactgaattttagcccaatttttacgaaaatactatcacacggcagaactaacttttatattgtcctggccttttttttttcttttatattgtgaacagtaaaaatggagaattaggcctccttcatggcacaatcatcaacctttaaaacaccttcagcaacaacaccagcatcatcattcctcacatctccaactccaggctcaccctacccaagacaatctccagcatcatcgacgtcatcatcactactatccccataatcatcatcaacaatatcatctcctttctcatccgcttcttcagcctcattctcttcttctaaaatagactcttcatcatcatcatcattttcagatatgcggagtgcattatcaaactgagtgccagtttgagtatgagcagcatgggaggactgaaaataaaccaaaattataattcacaagtaaataaaagaaaatattaaaaaactataaaaacaatataaaaaatcgaaaaaaaacataatgaatacctcaataagaatgtccaacttcttgttcatttcagcaaaaagaattcataagaatctactgctggttgataataacaaacatatatttttttaatttctcatactcaacacaggtacataggtgacatgctcatgagcattcgatgaatatggacccataaattcagcttgaacaaaagatttggggacaaactttgaatctagaacacgtgcacctttaactttaactttaataaagtttaaagtcgtgtcacccgggaaatagtcatcgaggttcaa

SEQ ID NO: 100739 - DNA, 1379 bp, Cannabis sativa
  modified_base (1132)..(1132): a, c, t, g, unknown or other
  modified_base (1310)..(1310): a, c, t, g, unknown or other
ctcaagacattcattgagcaacaatctaatctcacatatcttaggaaaaaaaaaagattggcagtaggatattgagccccaaaaaatatttcagtaacattgtaaaataacttcaacttttcacacatcatacttgctaaaaaccaatcatgttcattaggcaagtgtctatattttttctcactgattgttaggcgactgaaaacattagtactataatgtagatgaattctctttatggagataagctatacaatctctagtaccccaccatttactaacatttattctctttatggagataagctatacaatctccagtactataatgtagatgaattcttattaataacacattatttgttgccggattgaacatgcatatttttataagtgacatcattttgtaaattaatgtagtaaagacctttagacatgtgtctagatcaagtttctaaagaaactttaatcataaaggtctttgataattttaaaataatgtcactactatattgcttgttccttaaactgctaaatatgagaactaatcttgtctatggataaaattttctcacagttactgacttttttaggtttatttgtaaaccttacaagaaattatgaatgtggattaataatccactgtgttaataattacaataactatattaaaataaatttatacaaatgaaaattggtggtaatgaagtgtgatttatttttccttaattgtacagtaaaaaactgtacattgtgatgaagttatcagagtaaattttagaaatttctactagtgttttagaaatttatgaatagtgatgtaataaaattacataattattaatatataattttgaggtttaaataaatcatatttttaccaatgtataaacatgcttaaatatgaaaccttattaaacaaaaattacatgtgggctaaatttttaatttaataagattaaatttatatgtaaattatggtagatttaaacaatttatgaaaaacataaggtttaagttctatacagtttttggcattgtaccaataatgaattaactactagtattacttcctcactagcataaaagtagttggcaaaaagtaaagaatctaatatccctagaggagtanacatatagagaggaatttcaaaatatcaagttttttgtgactaaagatatttaatggtggagaaaggatgtattaaatataatctatcagatcctaatacagagagaatactacatactacgcttgatttggatatcaaggtggttaaattatttgaaatgcacttttagttttatantagtgcaagtgggagtttattgggttgtatgccctaaataaaactcatttaaatataatcatatttact

SEQ ID NO: 100740 - DNA, 505 bp, Cannabis sativa
aaattctgagagatgctaatgatgatgacgctacgaatttcttttagtatttttagtttagttatatgagcaattagttttatgtgtatttatattttatgaacatttacttttagtaagtattatttttgtttaacgatattgttatatttgtcttttgatatttgatataaaattatttagtttgttgttacattttacttttaatttgattattttgtatattgtttaattttaaaaatatttaatataaattgattagtaaacaaattaatatttaatataaataatttttttttaaaaaaataaatatatgaatggtgacttttttgtcattgacaacattatcaatgacgaaaaagtcatcattaatatattttcggaataaaaaaaaataaaaaagatgcatattattgctcatgacaaagtcattggtaattctttttttaccaacgactttaaatatcgtcagtaatagtacctatcaccgacgaggtatcaccaa

SEQ ID NO: 100741 - DNA, 632 bp, Cannabis sativa
cttaaaataatcaaataaaaaaaagattttgtctattttaaaccaaaataatctaaaataaacatttatattactataaaaaaaaataaacatttgtacgatttaatgttgacaaaaatttcttatttacaaatatgctttgtagccaataaaattaagtcaaattagaactaggtgggcgcgtgaatgggagtactctgacgcatgcaagtgtgaataacaatgagataaaccctcacactcaagtgtatagctacagaaaaagcctcctaaagaactactgacttatgttctttttttaaaaaaaatactaataggaactactctcaaacaaaaacaattaattttacaataaaaaaaatacctatttctatcttcactttttttattattttaataatatatgtcattagaaaatacgaaaagatacacttctatctttacttagacaacattatattcaatttgctttatatttaatttggattaccacttacaaaaggggaaatttcattttttgaccttaataaaataccacatatcaaaatttataccctccattaatttgtacaaatttagtccattgattacatgaacttctcattttaccctttttttttaaaaaaataaaa

SEQ ID NO: 100742 - DNA, 671 bp, Cannabis sativa
cttcataaaactggaggaagtcttcagacaagctcagatagagggcaagtcagtaataggtagtcttaggatgttgtacagccccaagacttcccaaacatgcatgccagtacaagcagtgccagccagccctccagcatcaaaaataccagaggcaaccgcaataacaatagttctggccagaacagtggcgaaaaaggaaagtacaacacttgccttacaccacgaaaccaaaggagaaggaggagaagtacatgtgcttcaccctcctaactgaaaaactggagaccatttacatggctacacaggctactgtcccatacaagaagcctcctcctatcaaaaaggagatgagcaagagggacatgtcaaagttttgctaatttaacaatgatttggaccacgacactaacgagtgtcaaaacttgaagagggagattgaattcttcataaagaaaaaaaatccccacttgcatcattatgtgcagaacgaccaagctcaggcataagctgcaaagaatggagaccttatgccaccaccaatgtcaggtcacttaggggtcataattggcagacaccatattacaggcgagacaagcaatgccagaaatctccaacacaagccttgaagcgacatcttagccgtcgaagaaagaggcttcaagcaactc

SEQ ID NO: 100743 - DNA, 632 bp, Cannabis sativa
ggaacatcttttcttgactcatgagcattgtgtccctttcaagaaaccacctcctatgagaaaagataggtccaagagaaatccaaacaagtatggaaggttctacaaggacatcagacttctcacagaggagtgtaaacacctcaaaacttaaattgaagagttgatacaacaagggggagggtactgtagagaaaattgaatgccagaagaccaaaggctagaggatggacatcaatgggagaccccttatgaggcactagaagtgctaagggacataagaaccatcataggaagaccgagaataggggagacacttgtaaaggcagagataagtacgctcgcaaagcccgacgagagccactagtcttgagcttagagtaaagactgccaaaaagtttcaagggagataatgactccatcacatttaccgaggaggatgaaaggggtgtgtatttctcccataatgaccccctggtgctaacaattaaattgcttaacacaagagtacaccgagtcttggttgacaatataagttttgtagatatctcatacctcttgccactgcaggagatgagactgggagtaaaggacctgaaaccatgtatctcgccattatatggcttccgctc

SEQ ID NO: 100744 - DNA, 1151 bp, Cannabis sativa
atgttttcttcatggagatcttcagtaagaggtgtatgtggagcaatctcctgggtttgttgttcagggggagtcagggcgagtttgtcttcttcgcaaattttaacatggtttgaaacaaagtcctcgagcttggtttggtaaatttagtcaggatgttgagatatttggtatgttggaaagtaagtccgatcattctgtgttctataaaagatcaactaccggtattattttgttaattgtgtatgtggatgatattgttattactggagatgatactagaggcatctcatcccttaaatcattccttcataaccaatttaacacgaagaatttggggtgctcaagtatttttttgagagttgaagtcactcggagtaaaaaaggtatttttctatatcgaagaaagtatgtacttgatttgttaacttagacaggaagattgggagcaaaatcttgtagtactccaatgagtcctactatgcacctaacgagtgatggagaactatttgaagtccctgagaagtattgcagattcctccaagtattgtagtctcagttagtgttgtcactcagtttatgtcatctccaatttatcattgggcaacattagaacatattttgtgttactcaaaaggagcacccagacgaggtattgtttacagggatcacgggcacacccaaattgagtgtgtttcttagatgcagattgggttggttccaaggtggatagaagatccacttcaggttattttgtcattgttggggtaatttggttacttagaagagtgagaagcaaaatgatgtgtgcagatacagtgctaaatcagaatgtagggctatgagacaatctgtgtgtgagataatgtcgatatcaacttttgactgaagtaggattgtagtactagcaaaattgtggtgtgataaacaagttgctcttcatattgcctcaaatcctgtgttccataagcgtactaagggccagtttggcacagctgtgctgtgggaaaaaagcagctgtagctgtgctgtgaaaaaaagcagctgttctaaaactgtgaaaaaaagctgagctgagtgtttggtaaattataaatttcaaagtactgtgagttgttaagatctatcataatgataatgttataatctag

SEQ ID NO: 100745 - DNA, 624 bp, Cannabis sativa
atgcagaaccaatgtgtgaatgatgaaaaatcacattatagtggtgttgtaaatggaactattcatgtggtaactggaggaggaggaaaaagcttggccaaattcagcagcttgaccccaacttggagtgtattcagagattatgattggggatttgtcaaactcacagcctttaaccactcatcactcctcttcgaatacaagaaaagtcgtgatggtgaagtctatgattcttttaccatttacagggagtacaaggacgtattggcctgtgttcatgacggttgtgaaccaaccactttggcagcttaaaatatcatcccttttttcctaataattacaaagggcattgtgggtttaaagtatccaaactttgtagtaagaacaatgtgaaggagatgaaagtactaaaactatcatctctctgtctattttgtggtattctctagcagaggttttcttatgatgaatttaggtattttcaagttaaataacaccttatgcttcttctataaatgtgttttagcttcacagaggacattgaactaaatctaaatctgactagtccttttttaaaaagaaaattgcctaaaaggagtattaataaatttctttgagaacttt

SEQ ID NO: 100746 - DNA, 846 bp, Cannabis sativa
tcagtggcttgtatcaatgatacttctatttgtttgattccaaaattaaaggagccgtgctaaactattgatttttgccccataaacctttgatgatgtgatttacaaaataattacgaagatgatgactaattgacttcgtattgttttggttgatatgatttatgaggagcagagtacttttattccaagtaggcttatcactgataatgccatgattggttttaaatacttttaatctcaccaaaagacataaacggggcaaaaaaggaatcctggcttttaaagctggtatggctaatgcttatgacagagttgagtggggtttcattgaatgaatgatgaaacagtcgggtttccctgagttgagggttaatctagtaatgaaatgtatctcttcggtacggtactcacttactgtcaatgggaatgggaaacattatcccttctcaaggtcttcgtcaaggtgatctttctttctccctttttgtttcttatttccactaaaggactttcggctaatatcaaaaataattaatttgggtaggtttcatgggttgccttatgggagacggggcccgatagtttctcacttgttatttgctgatgatagtttcttcttccttgaagcttctagtgttagattcagagaaattatgggttggtatgaacgtgcttcagggcagttggtcaatctttccaagtctattgtttgcttttctttgggtgtctctcgaggtatggaaaatgacttggcagctttgctaggggtttatcatgttccttatcatggaaagtatttggaacttccttgttttgtaggtcacagtaagtctagtttattcc

SEQ ID NO: 100747 - DNA, 577 bp, Cannabis sativa
aatgttaatacccacttagaaaaatccttatattcctcgattatttgaattaagaagaatccaagacttaaaattcgccaaaatatgagtttttgggtattgtaatctgtaaatttttatacttggatcgattcaattacaccctcttcctatttcgcaaactttccaggttaattatgagattcttgagttttcatttttttaaaaaaaaataataataaaaaaaattggatgatgaacacttcctttttaataatgaaatagggtgttaggtaacaaaggggaaatataaatgtgaaccatttattttcgagaaaaaaaattatttatatacacacacaagaacattggctcgatattccttccaacttgaaagagccataagtttatataaaaaagaactagttagaggttcaacactagaattttcacttcccagtgtggtaacagaagaaaccatagaactctgaactttggacttgtattgtttaattagtgtttagttttgttttggtttgattttggagccataatttttcagaatgggattagttctatattgggtatctgatgattt

SEQ ID NO: 100748 - DNA, 819 bp, Cannabis sativa
ggcccctcggctgggtgggccctaagtacaggcctagcccgcctatgcccaaagccgggcctgagtacaagagtttatttaatagcattaagctacttaaaattcaatttattgacattaaacatagaaataataactttaagaatgcgtatacatatttttataatttataattagactgctattcatgaatgtatattttgtctactcttgaattgagccagattaatattttgttagtgttatatcattatcaaaaagttatttaaagaaatgaataaaatacaattattggggatatttacatcgttttttataatacaagaaaaatttttacaatggaaaaaaattcatgaaacaaaactctacaaaagttatagttcaagcatctaatagagggacaacccttggcataattttgtttatttgttttttgcatgttgttgtgtggtttagtggttttcttgcttgaatcaaggattggaatcccatcacattccattatgagaagatttatgcttagctttttgagagagtagtttattgtggtcgtactatctttaataaggtagaaactctcaaggtacatactaataactcaattaaaaaaagatgatgtataagactcctgtaactaacatgtggttctcgaaattgtctaaactactgaaagagcgaagaaaaaatccccaattctttttctatttttttataaaaaaaattgtttgtttttttttcttcacaaaaactaaattttttatttttttatatatcaacataaactaattcatttttaaatcttacttgtttggagtttgt

SEQ ID NO: 100749 - DNA, 1090 bp, Cannabis sativa
gttagttccttgggaagcaaagagatcagtgtagaactgaacaaaagaggtggtaatatcatttagagtggtgattttagaattgtcgtccaaagtgagagacttaatgaaattggtacgtttcctcgctgaagctcggttatggaaatatttagtgttcttgtcaccagctttaagccaatttactctggagcgctgcttccaaaaaatttcctccttgaccaagatgttatccagattacgttggagatcattggctttcttggcatcagaatgagaaacaataggacccgccaggaggcgctcaatatccgattagatacgttggatgcggtgtgagaattgatttttattacgaccccaggaggacaaagaaacagaacaattttgctgtttggataggaaagtgaggatggggttattaggggtggaagaattagaatccgtactccagctatctctaagaagctcggggaaatcaggttcgagtaaccaatgattatcaaaaacgaaaagtaggattacgagcaaacatgtaggattgccctccagcaacacttttagagctctgtggtcagagtcaaagaaacctaagtggtggagagaggccgtgggaaataaatcagcccattttttattaacaatggcccaatccaaacgctctagagtggtaccatgcttccaagtgaagcggcttccagagaaaaggagcggtgatagagagtatttaccaataaagctttgaaaagaatgcatggcatggggaggtggtaaaccgtgagtattacgatcgttaaagccaaggtaatcattaaaatccccaacaatgagccacggtgagagaggggcagcatcaaaaagacgatgcaataaggtccaagaattgtgtttatcagcaacatatggagatccgtaatagcaagacaagtgaaaattaatattatttatagtaagcatacagtcgaaatggtgaagggaatgagacaaaatattaacaataacatcctccttccaaaacaaaagcaaaccccccctaatccacttctaggaacttgaaaaacattagcaaaatacatattagccctagcaa

SEQ ID NO: 100750 - DNA, 892 bp, Cannabis sativa
actcttccagttctacatcgcaggaggcatggtggcagctgttttggggattaaatctcccatctaaggtgagaatttttggctggagagtgatcaattctgccttaccagtggcacaaaatctttttcacaggaaagtgattacctcagccacctgctcactttgttcaagagcatgggaatctattggacatgcattattttcctgctgtcatgccaaatctgtttggcagcataccagttttcaacttgattttacgaaggctggtttcatgaaagatggtgactacctactgtttctatccacaattctaaccaaatctgaactggaaaaactattttgcactatgtggtttatttggtcggatagaaataattatattcatggcaaacaactcaagcatccaatggctatttcatcacaagctgaagcttatcttgctaattttcactctgtgaaatctgctactgcaccagcagtttcgtgtgtggcagctgatgcaagaactgtgaaatgggttcctcctactgaatcaaatctaaaaatgaatgtcgatgcaacacttgattcttcgaggaatgaaataggtattggtgtgattatacgggattcctctggtcgagttatagcagcaatgtccaagcctgttgttggcaattttaaatcgcaagaaatggaagccaaagctatgttttggggtcttcaatgggctaaacaattgcagctacaacctcactgtgtggaaactgattgcttgatgttagttcatgctcttcaaggaaaacagtcacaactctctagctttcatgatttagttgaagatatttcatatcatttatcctctttctctaacgcttgtatatctcatgttagacgggatgctaaccaagc

SEQ ID NO: 100751 - DNA, 1276 bp, Cannabis sativa
  modified_base (769)..(771): a, c, t, g, unknown or other
  modified_base (1159)..(1164): a, c, t, g, unknown or other
tgctagttagggtgttacagaatcagaccaagctgtctattttgaggatgaatttggttcaagtcaagggtgaagagacattgtattcagggaagagcgtgtctatgtcactgtacctgttacttctgcttccacttctaatcttactaacgatcatgtgattgaagaagttccaatagaagctcatggtgaaccttaagatccagtacaagatgaaaatcttgatttggggaacgatgaagttgtggtgagaagatcacaaagagactgtaggcttgctattcccgatgactatcttgtctatatgcaggaatgattttgatgtcggagatgattctgagccaagcagttaccaagatgcactgaatagtcctaaatttgcattgtggttggatgcaatgaaagaagaattgagttctatgtcacaaaatgaagtttggagttggttgaactacccaaaggttgtagacccattgggtgaaaatgggtggataagatcaaacgtgactcaaatgggcaagtagagaggtacaaggctcgacttttggctaaaggctatagtcagagagagggcattgattttaaagaaacttttttgcctgtttccaccaaagattcgttgcgaatcattatggctatagttgcccattttgttctagaacttaaacaaatggatgtaaggacttccttcttgaatggtgacctatctgagaatgtgtacatggctcaacctgtaggttttgagaagtctggcgaagaacacatggtnnncaaactcaagaagtcgatatatgggcttaaataagcatcaaggcagtggtatctcaagttcgatatgattgtcactcaaaatgttttcagggagaatgtggtggactaatgtatatacatgaaggttagtgggagcagtttcattttcttggtactgtatgttgatgacatcttgcttgcatctaataattctaacttgttggctgagaaaaaataactcttgtttaaccattttgacatgaaataccttggtgatgcttcttatgtggttgggattcaaatccttcgagatatggccaattgtattcttcgtttgcctcaaaaaacttacattgattggatcttagaaagattcgacatgcattcatgttcttctaggaaggcaccnnnnnngaagggtgacaagttctcaaaggcccaatgtccacaaaatgataaagagagatgaaatgaaagttgttccttatgcatcactggttgatagccttatgtatgctcaagtatg

SEQ ID NO: 100752 - DNA, 765 bp, Cannabis sativa
ttttttttttttttggtaaggaaatacatatctagtttagttagtctaaatatactaaatatgtaatatataaatcatagaaagtatcttattgagagtttttttttttttctttgaaagaatcttaatgagagttattagcaaaaatataatgcatgcgtttttttttttttccattatatatacatctcaatagctcatttttttttccgttaaagacttctaaaacttgcaacacataggatcatgcttatattgtattatataaatataaatattaaagccccaaatttatctagtttagttttttcaacagctatagtaatatgaggattgtgatatgaaatatatatgtgtgaatgcatgcctaattagtacagtatagctattatcactataagaaatatcaattttgttagtacaaagacaaaagtttagtattgtgctggtaaaatgaatttacttctgatgtgttagcaaaaggagttagcaaatcagcgttagtattaaaacttttgccagcacaaaatgaaaattattggtaaaaataatttttttcagcgcgtaaatatgctgataaaagttagattttagccactgcaaatatgcgctagtaaaactttaactttttaccagcggaatttacgaaatgcgttggtaaaagttatttttaacaacacagtaacaaattgtgctagtaaaagtgacattttttgtaatgtatatattattgtggaagtttatttatttatatgtaagtatata

SEQ ID NO: 100753 - DNA, 998 bp, Cannabis sativa
cctccaactcaaaataaagtgtttaatttctagacaaagcctcgctttcagataccgtttaacccatgatagcttcatcgttgaacattccagcagacgccgaagaatttataaggcgtattaaagctttctaaacgaggcttcatcctgctcttcaagacacgatacccccagtaccaacctttacttgtaagtgcctctatcttgtactcgtaatacgactattttttgggtaggtaggtaggttctaggtagcatgctttaggctgtgatgctatgcatttttagggtttttatggtgaccatctatcgcctgcaccaccatataaggcataaattttaggtttttttctcttagaaacttagaaatcgatagggagaattaacctaaatttttttttccatgtcttagaaaaattaacattcttagaatcatgtatttttcactttgcattgctgatgaacttatgaggtccgacaaggtcttaaatgctattgtcgtgactggttctcttgtgtctggaatccttatagtgtcgaacaaagcaattttgaacccttctttattttcttccttgtgttcctgattctgttgtccaggaactatacgttctggtacataaggtctggtgaggacctctccaagtagttaccagggaggacttttggcatactaggccttccttattttgggatctaattgcttgatgtttactttttctttttagatcgtactttgtcagacaagaatcttcctgcagaggacaacgaagaaaatattggagaccaggtgaggcccgagcagaacatactcgttggtccagagatagtggaaggcctgtaacgtccccgtttcaagcctccattggccccttacacccacggaatgatggctcttacacgtgagtacgtcactctggctgcttcctagattgatgactgactctacaaactaacacgagtgttttcagcgtgctttgtccttactcacacgcttc

SEQ ID NO: 100754 - DNA, 700 bp, Cannabis sativa
ttcttccaagatttggtgtatattctaatgttatttttatgctcacaatatttagctgtcatatcaaattgtggactctttgatttggctgggaatacgggacatgattaatgatcttcgcaaaaagaagctgaaactccgtcctgtcacatatttaagtggctcacaagggtcatcagattcagacattcctcatggatatatatggagtccccacctggttcctaaacctaaaggtagctgctttacatttcaatattcttatgttaatttttgttatttgactgagtattagtgagtacctaatagtgttgcctgcgattctttgttgttcatatgctatcctgttctttatttccattttcattacttgcaatgaataagcataatattatttagcttaaccattttagaaatatattcgttaattaatttgcagattggggtccaaaagtagatgtagtgggtttctgtttcctggatcttgcatcaaattatgaacctccagaggaacttgtaaaatggcttaaagctggtgaaaaaccaatttatattggatttggtagccttgtgagtttcttatcttaactcttttatcaacaggccttttctttaatgtaacaaattttattttgatttaatagttctttcaactgggattagaggggggaaaaaatagagaagaagctttccttttata

SEQ ID NO: 100755 - DNA, 792 bp, Cannabis sativa
cttctgtattaattcctgccaccacacttcaggtgttgagcatccagcagttatacaggatcagtacaatgtactgggatgacaaatatggtacacacagcgtgtcttcagatgtaagtttgaccattaacgacccaaaatgtcaactttattatcccttaaagcactataccacgagttagctgaatcatttgtgttaggcatttgaaatccctgttctcctgacaggtgaatcttttgttgccaattttttttctgaatatgttccataatgacgtaggtaatttcgagtatgagagttatgatgaccgaggactctaacaatgccgttagcagttctttcctgttggatgatgactcaaggtatggtttaactgtcttccatcaaactacttttacttgtccctaaaaatatgtcctccacctaatttacacataccacgtcaacaatatgcagcataccattctcggtagacgacatctccaagtcaatggaacaggtagatatagctgacattgatcctccgccattgattcgtgaaaactcaggatttgtgttcctacttccacgtcccgagtgatcaatgtgctgaacaaggtctcccacttagcacgtcaactaaggtgctgaaacaatcatgtgcatagtattattctcttttgatgtcttcatcttcatccatgtgtatagcacttttttctatacgacccacaaatcttggtttggtgatggctgggtcaattcattcttttccctcgcgtttcatcgacaagaggggtatttgttaagaa

SEQ ID NO: 100756 - DNA, 1158 bp, Cannabis sativa
aaaattaaaatataaagagtaatttataaataaatataatataaaatttattatttcaaataattattgtaaaattattaactaaaattaaaaaattatgaaaataacctatcaacttaaaattaatttataaataagtttaatttagaagtagttatggcaaaaattactactaaataattaatgaaaattaaaattttaaaataacttttaaatttatacatataatatataaataaaatttgagactaatattttttgaaaaaaaaaaaaaaagcttagctttgctttatttatatactatactacattaagcactataaaataatttttaaacaatatgagatttttgtttatcattacatgtgaaaaaaataagtgatgtacataatatatatatttataaaaaataaaattctcttaaaattagaaaaatagattaagaatactatagaatttcacatcataactctaacatttagctttatataaatatgtagatagatagatagatttgtaatcgtgttaatgtttctaagattttcttttataattgttctgcgaactctttagctaataatctttctaaacttgccttgtctttggatgtgacaagagtgtggtggccaggtttatcaggtgttctttgataattggtggtgaaacttctttatgtttaaattttatacgctttacccttaatctttttttggtgaaaaaactcccttaactttatttattattattttttttttttgcaaatttgagtcaccagtgaaatctcaccgttaactaccaactgaattactactgtgtatacatgtgtatacatgacatatttttattggctttgaagttttactgtcacgtgtacgcatgtgtacatagtgacaatcccaattaatatttgacagtaaaattaactggcatcttaaatttataaataaaaataaaataaaaaaggttaagtgtataaaaattaaaatataaaaggtaatttataaataaatataatataaaaatcattattccaaattattattacaaaattgtaaacaaaaataaaaaatcatcaaaataacccatcaatttaaattattttataaataaatttaatttagaagtaattattacaaaaattactactaaataactaat

SEQ ID NO: 100757 - DNA, 845 bp, Cannabis sativa
tttcatctctgtcatgaactgtaaatcgtataacatgatgacaaaatcctagttatttttgttatttactacaaaggcaagatgaactgaaggaaatggaaaaactaatttgaaatatgaagtgaggaaattttaccgtactagagttcgattccagattatctacattacccatcctagtaaatatacgatcaacaactctgagagttgagaagcgggctggaatgtaacaacctatctgagcaagaataactataagacagagctgctggagatatgtgctctttccactcctgaagcaaacaacaacaactttaacctcaagtagaatgataattgaattctaccttccttatatgcacttctttatttacactttcctaatttctatcgatatcatgggacagaaagaaaagtggaaatatttcatttacttgttttttttttttttttgtgtgtaaatatgtattaattgtattttcaacatatgtagattgagaacaactaattagtagtctgtagcagaaagagcagaatttgaaataacttggaaagagcatgtcttacatgtttgggcccatgactatcaccatatttgatgcctccgataagaagatgttattgggctgcaaaatgcgagcttaataatcttataaattttttccatgaagagaatataattatttaatgaagcttctttcttgatcaaaaaaataaattaaaaaaggatatgattatttctctattttgaaaagtaaaagaaaagatagagagcatataatagcaatgccatctacttcagtaaaactagcaaataagtaaaatcactggagaaaaaaattacg

SEQ ID NO: 100758 - DNA, 838 bp, Cannabis sativa
cttgtagtggaccatattacaagtagctctataaacattctctcgagtatctaccaaattggtatgctcaaaatatcttgtttcatgtcttctccctttctttggagcttcactacgacttggatttttaccattccttttattcttggaatgactcacattcaattccagaacttttgtttgttgacttagttgtctgggggtgacactgcatccggtttgtgccaccccaaagccaaataaattggtatatgtggctatatgtccttagacaacgggttcgtacacggttggagttgtgaataaactttcgagaggagtaatagttgaagcagagaattgaggagcttgagtcgaactgctgacaattgttgatggctttagaggaactctataagcatgaacataagtttcctctaagtttatgaaaccttgggtcctcgatcagaaatcagacaaggtgttggacctctttttttgcaattctccctacaacaaggatctggtagatatcctaaaagttaaggccatcaacttcatattattattaacttttgttttagctactgtgaccatcatcctgtagatgtacttcttgagactttctctctgttgctgcttaatattagccaagggactgacttccatgttataatcctttgtggctacgaacttctttttgaacatggtttgtagatcttttagttacgaatagatctaggagataatctttttcaccaatctttggtagacatttgacaaaattaatgaaaaatagaggcactttacatcatcacttgccttcgccacttgtatcaatcgaatatatttagatagg

SEQ ID NO: 100759 - DNA, 817 bp, Cannabis sativa
gggtgcttgtgggtaagaggtctgaggttggagtcccagtgaccagtaggaaccgtcatactatcggagcactctgctaaaatgctaccttaaggctaatttttcctttcattgatattgaaacgtatctatatgttatgtgccttacatggtatcagaaatttccagtggttgattttaaattgtagtatcagtagatacaaattctaatgtcaatttttattaaaagaaaaccctgagcatatacgtcaaatgatttgtttccattcctataattgacgaccacactacctactgtcagttaccaagttaaactctgggactgtattcggtaactctaggattaaaatgtgtgcgaaatggaaagattcgaactgagtgacattcaaccttttaggaaaggtgggagggtccttgagaatgaatagattagagccaaatagaaacataatgtgtaaacattgttcgtaaatgataatatcactatttggttaaagaaatggtactgaaaaaggattgaggagcgtttggttttggaagaacgaatttgaagtatggtctatgagaaaagttagttggatgcctttaactttcccacaaacggctagaataatttttgagaataagatttgttcatttgtttgtgtcatgcagatttcttaaatgtcaaacgtttatatttatttttttagttgataatagcagttaatctatttattaccttgtcaagttttagaacaattggtttccgagtagttaaacattggaatttcttgactcattgcatcaattacaaagacatataacagtcaaaagt

SEQ ID NO: 100760 - DNA, 1084 bp, Cannabis sativa
attttaaataaaaaaagacaaagtagtaaatgaaatcaataaattaaatataataaagtataataataaaccttctcaatccaaggttgtgtcttgttgttgagttgttgaggttgaaagagtaaaaagagtgcttatagtattgtcattgagaatctctataaaacatcaaaagtataatctagttagataataaatatgcatacctaaataaatattatgatattagacttaaattataggaatcaaaataaaatataacaaactaaaattactatcttcaaacaatgcttgtgtttgaagcatttcttattcatatatgtactctcacacaacaatgggttgatgtgatccactccaccaattattgagacaaattaatgcttcgaccatccttgggctaagtgaactcctaaaaggatccaaaatctgacccccaacagagaatgctgcctcagaagcaacagtggtaactggttgtatttgcactcactactagcccaccatcctaaaacatcaaattgtttagttggttgctcagcttcctcttaaaaatacttatcgagttcacagttcatcttgccgccattttctccattttttgtgccatgaactcatcatggacattacaagacttcttgtctttaggtcgattagaaacgatgaatgaggaagaaccaccatcatcaataggttgagcttgtgattgagtgattgagagatcaatacttgatgctgaatcattatattgattaaacattctccgaatagtttgttccactccttttaccatctctttgcattttatctccgtatgtgtaaagctaaaataatgatagagataatcaagtttgtatctagggtcaagaaccaaggcaattagaagtgcctcattacagtcatctagctttccccaatacttgtcatactatgatttcatgttatgtgccatattcctcaacaactcatccccatcttcatccacctacagaatcaaccaactcttggtgaatattgcatatcttaatgaagtacttatttgcagctacataagtagacccactaaacttcaatgttacattat

SEQ ID NO: 100761 - DNA, 1070 bp, Cannabis sativa
  modified_base (796)..(804): a, c, t, g, unknown or other
tttttttcttcgattctagtcggttgagggtatgaagacgatgttggctccagaagtgagtgtaacttaggtcttagttcagtcggtttcgtgagaagacaagcgagtgggagcgagagaagaaagagagaacgggtgaaatttttgagagaaataatttggagagacatgaaaaataaatctatattgctaataataatttaactttaatttaagttgttattttttttctaatataatcatgttttatcaaatttctcattgagatttcaatttttatttatttatttttttgtatgtacagtgtcacaataaatagtgataaaatatagcggccatggatgatcatattaagttattaaccacagtttatgaattatgacacttctaacatatttattttggtaaatcaaaagataattttgcatatttaaatttaacaacatagctcattatttatatttaaagtgctaaatcacggattgttggcttaagtagtggagtattgtaagtcagtgctggtactaatactatatcctcgtttggaacttaggataagggcttcggattggacaaaatagtcctaaattcgaggaaattatattctataccattttttatattgtttttttttttatttttacttttttttttaaagtctatcatttttactttttttttaacattgtaccaattttacccttgtcacttcaagatattctccatgtgactcttttatgtcagggtattttgggtacaatacatgtaaaaagaggtatgtttcaattaaatatannnnnnnnngtaaatttgattaattgattaatgaaaatggtatttttcaacttacccctaaattatgtatggttttttaagtgtggatggtcccttcttttctttcaaattgacttgggattgatttaacccaggttaatatagtacaaggacactcacttgtatttaaaagttaattttataatcggtccacttgtattttgttgagttatgttttgttaaacgatctgcaaataagttgactcattgcttggcaagagactcttgtttctcta

SEQ ID NO: 100762 - DNA, 640 bp, Cannabis sativa
aaaaagaagttttggaggataggtctggtggcaacatggcgggttttaaggctagaaagtaacaagggaattatgaataccttgaagaaaatgaagagaggctttgggataaaattaggcattgggtagccatttggctttttaatgtataaggagtttagagattccgttagttgagttatttagagaatgacaatattttatataattgctatgttcttcttcttcacttttgctgtttgtgtgggtatcttcatccattgttgcctgcttgtattatttaatcattaataagaaactttgatgtctggttaaaagatgtcttgaagagagacctggaattaggattttacatgacagaagcaatgcaaattgaagaagcaatattttactttggttttccctgtacaccctattgctgttttgaatttcgcaagtcagtgaatttactgtagacttttaaacaagatggccaatgggaggttctctttaggctatttgtggttggagggagaaaacgtaggaaagaagacggagagctacataagtgagggtaaaggaaggagggatttcttttggtgtgtgtggagtgggtgtattggtttttaagaggaaggggagaaaattgcatcgaattata

SEQ ID NO: 100763 - DNA, 839 bp, Cannabis sativa
atatattatcacagtatccttgctccttctttcacctccttcctcgagcttcaaaataaatgtatgaaaactctcaagagttggaatagtctaaaaactctgtcggtcacaacattaactgtttgcaaaaccaaattgaggctattcacagaaaccctatcctgtccactgaggaaattgttaaggccaatcatctccaatcaactgttgactctcttcttttaaaagaggaggttctttggaagcaatggtctagggttaattggcttaacgctggggataagaacactaaattctttcatagccgtgcaaattccagaaggagaaacaatatgattaagtgtattactctggatgatggttccactgtcactaccttccccactattattgatacctttatggagttttaaactaatcttttcacctccacgggggctaatatggattttatcaacactatgctgcagaggattacccaacgtctcacccttgaccatctcactttccttagtagggacttcgatttttctgaagttaagactgcccttttccaactttctagggataaagcccctggtcatgacggtctcaatccaattttttactagaaacattggcaccttcttggtaactcttttggtaaagcaacttttttactagaaaccttttcccaagaagcaaggtggagcttgcttctattgcctttagaacccaataaaaaattgcgataactcttgtctatggcagtcgtgagtttgaaaggaataatcaataggaaaaaatgctttttttccccctcaactattacgtgggtagactgttgggttttatgccct

SEQ ID NO: 100764 - DNA, 920 bp, Cannabis sativa
  modified_base (266)..(266): a, c, t, g, unknown or other
gacctccaacactcacacacccacctatggccacttgagctagccccaagtggttatgcaaatatttctcttcaaaaataaatatagccattgctcttagctggctcaatatcatacacaaatagccaaatgataaaagtaagatctagtcaaaataattagtggacaccatgatcaattttttgagatgatcacaaagtgggtacgtcctaatcaagtcctcagttaataaaagttgagttatgtttatatatatatatttatanatatatatatataataataattttgtcaaaaagaaggctgcggctttacttcaaaacgaaatataaagtccaaaagaaatctctttggcaaatccaaatggattttttctttctttttcttcttaaaaaaatgttatttattgcaggttttggttttgtttttaataatatattattttgatcatcaaagtttaatgtacgttgtataagtttaataaaaaaattgttcgaccaactcaatagttaatctaatagttatatattgtatttgtataactttttgtaaacttaaataaaaaacttgggaccagatcatagtgcttttccaaataatcatggaaaatccaatccattatgatcattactacctactttttcttatgtgtaactttccaatgtaaattagtcagccatgtatcttaactgtggtgccaaattaatattctctctttctttaatttgatatgtttttttttttttcctttcaaagatgaaatcaataatcttgaaattggtggtggaatagatcgaatgatcaagatatgtttgaaaagatttggaaatccattatatatgtggaccaacaatatataattaatttcttttgggattatttaccgaataaaactttaaaacactactacaaaaaccccc

SEQ ID NO: 100765 - DNA, 1034 bp, Cannabis sativa
agctgcacagtatgtttaaaactcacgtaatacgcctatggtagttagggtgttacaaaattctttgagaattgaagcctttacgcatatattctacttggaaaaagtaaaccatagcttcacaaaagctttccccataatatgtcagtaagtatatagtattttaaaaaaataactaataaacttttctaacaaggtgaaaatcttgaattaaatcaagtatataataaaattatgtatttcaatatatatttgaattaatcttaaagttagcataaagcatgaagaaaataatgtgagagtgatggttcaactacattgtgcttagaagagattttgtctagacatatgatgtgagaaagaaaaatactcaataatctttaaataaataaataaatttaaagtaatatcatttcaaacttttgtaaattatggtcaagtgaaaacttgacaaatctttcaaactgtaaaagatttagtaagaataacatctagctagggagctgataagattaaattaccgaatagattaaccattaatgataaactaggcaatgaatgtatgtattaagtttaaaaggagaaaaaatgagatgttagaaaattaaaattatatcgatatatagatatatagattgatggatagatatacaaattttgttatcgattgactagcttgaggcctcatacttagtcactacaacatttgatagcattagcgggggacaaatccgccgctaataccctctctcttcgccgctatagggtatcagctgcggaaatcggccgctattggtccgccgctaatgcttgaccgctattaatattattagcggccgaaaatggggtccggagctattaatattattagcgggtcccgccgctaatgctccgccgctaaaaggtataaaaacaaaaataaaatattttcctaatattaaatatataaataattatttatatataaatatataataaataaaattccaattaatataattataataattcactaaaatttattaataatttaa

SEQ ID NO: 100766 - DNA, 597 bp, Cannabis sativa
tggcagttaaagccattcagagtcagatgatggtgaattctccttttcgattagttgctaatgactgtagtttcttttttgtttgtttatcgttctgctaacagagttgctcatagttttactaaaatttcttgttctttttcatattacatttttagtgggggatttaacttgaaatttttgtcttttctttagatcaatttatatcttttcttctagatgatttatcttctttctatttctattaaaaaaataacatattccacatttttttttttggaaaggcatattccatttaaattaaaatatatgaaactctacgttctattttaaattaaaataccactaaagctagttccgagaccacccatcacacaaattaaactattggttctaaagtcctatcttaaaagttatgtctatactaatctgtataaacgtttctattaaaagataagtttggtggaaagaatggagactacgatgcttgaagaacttaagagggatggagagtataacttttctacacttttcttttgtgttgtttggtattggagataaagttggaaggatagagagaaattattgttgatattg

SEQ ID NO: 100767 - DNA, 809 bp, Cannabis sativa
tcagtgtagaacggacgcaaatagtcttacaactgacgctattcttgcgtcagttcataaccgacgtaaaatttatgggttctttaatagcatcggtttttaaattttgccgacgtcagaaccgacgcaaaatctagtttttgtagtagtgaacctactgttaaccaggaggaaatgaggccctgaagcaaagtgtggaagatcaaaaagtacggaatgagtggcaacaacaaatcatgcagacttagaatcaattcctgaacacgtttcaggagcagttcaggcatctagccaacatcactcctagcttcaacatgcccccgataatttcgatttcactagttccactattttggcctcctagggttgggtcttcttcaaaggcttcccctccctctcaggacaacgatgatgatgacgatgttattgacttgtagttttatttttagtttacaatattctgtgtaaatattactaatatttataaactaacaatactttatttagttttcgacaatttatttatagttttgtattataatataaattttaattttataatataattcagattatatttatatattattatttaaaaaattggttttagttttaatttaattgtaattttaaaaaaattggcgtaaaagttttgtcggcgactgattattctggcaaaacctcgttaggcacccctcagccgataactgaattccgacactggaacttatgtccgctaaggaagtcaccgacataaactcttttttcggcaaagttatgtgttccaccgacaaaactacttatgtgga

SEQ ID NO: 100768 - DNA, 847 bp, Cannabis sativa
taaaaggttattgcatttcccatattgttttttgtgtgacagagattctaatacattctatgtcacattttgagcttggaagtgtggtcatgatgaacgaatttaggcataacaatattagatgtaacatttgaaaaacatttcacaagtcgagcatgaaatttaagggcatataatatttgaatattatcaataagacatcacaaaaatcttactttattgattttactactttttactttgtacaacagcatcagcttttatatattttttttagcacatcatttgaatattatatttttaatgtattttatttattttaaaaaataattgaatgtactaatagttttatattacacatatatattgaaaaatataataaattaaggtataaataacctatcactatgtgtaggctaactaagtaattaaggtaaaaaacaaggatttttttttctattttaagctaaaataactcaaaataaacttttatactacaagaataaaaaataaatatttatagaatttaatatttactaaaatactattttttaaatgttttatttacaaaaatatgatagagacaaaaaattgaaaatgatagttattaggcgggcgcgtgaaagacatgcgtgacttgagaaaacactcaaacaaattaatggatgcaagttattaatcgacacatgtaaaatcaaatgatagggactaatatttacttttattggttttgacaaacactaccaagactacttcagtaaaaaaaaatttataaaaatgtacacaaaaatatatattttattcaaattgatataaaatgtggtgtttgggattttttttttttttt

SEQ ID NO: 100769 - DNA, 650 bp, Cannabis sativa
gtgaaacaactagcttctcaaatctaatttttcgaaagacaaaatttgtaaccataactaataattagttttagttattaattaatttgtaggtataataatctatgacggctactttatcaggttgatcacgtggtggaagcactgaaatttccaaagaaaatattatatcaaaatttctttaaaaatgtttctgaaaaattatataatgatcagtatatactactcctacttccttcaagaaagtttgtacacgactacttaattatattagattatatatattataattgacttaagagagaatctaacatgtgagaatgacctaaaatttcgttctttgatcgatcaagaaatatactattattctaatttgtaagagagaggttaatttataatcatttggtcggtaaagatgtaatttggtcaactgtttattatcttaaacagttatatatatataatattaataactatatataatataaactatgtgactgctattgttttaatctttttttttcttttttgctgagaatgtgcttgctattgttgacaaagccatttatatatttatacgtctatatgcatcaatatatattcaaaccctaatccgagttaataaccaatataagcaagtttatatatat

SEQ ID NO: 100770 - DNA, 1263 bp, Cannabis sativa
tcatatccaaacacactttgtattttaaaatatagtataattactaaactgtgtacttgccaccctagtaattacttgccaccctagtaattaccatatacctagtaattacacagttacttccaaacacacccttaaactttcattagttatatgtaactaagtacttacatatgacaaccttggaaagaaaaaaacacgtgaagttaggtaaagaaaaaaaatacgtgctagagaaagaagcagtttttagggtttctttcgtttcaacctttgctgacatcggtgcccggatgacgattccctattcgttgacgacggtatctggacaacgatacctccttattcgctgacgacggggcctggacgacgacacctcccaatcacagacgatgacagagacgttacttccctgatctcgcagacgtcaacgatggtggtggatgaatctgcgatttcgccggcggtgttaaggcttcgtccgtgttctcaacgtggttgatgaaactgggaacgaagaccgagttctgtccaagagtttttgccaaggaatgaagatagcattcggttccgtgaacgattggtttttacttggttttaatttcttttgtgttaaattattctttggtgccgtcagaaggaacattactctttattagttttttttttgtttttcaatgtttatatttatatccatattttactatttttaggttaattccaattagtgtttatggggttagaatttttagttttatgtgttaaaactaactaggttttcccattagtcttgtcttttgacatggttctttagtgttttctggtcctttttttttttgttcttgtttttcgttgttgattttaggggtgcatattcgtattgtggaggaggaggtgactatcttgtcttatgatgccagtgctacggatattactgactacgatgataggcgatgtattgttggaaggttcttgactgaaagaaaaattgattttgaggccatgcaacatatgatggcttcattgtggcagccggggaaggggatatttgttaaggaattggatattaatcgctacctctttcaattttatcatgaaattgacatccaaagtatgatgaatcgaagcccttggacttttaataggttattgttaatttttagaaggttgcagcggggggaggatccaagattggttaccttgaatgaagttgatatgtgggtgcaattgcatgatctcagatcggggtttaaaatggctacg

SEQ ID NO: 100771 - DNA, 1322 bp, Cannabis sativa
gctaggaagagacatcaggtgaggctggtggggaaggggcagtggcagtatttggggcagttgtgagaggtgtttgtgactgaaaaacaacatcaaaatggtcagtggtagcagtattcatatgagaggagatgtacctggtgtggctgctgctgtgaggagacaaggtgaagttcggaggtgctgctacaggggatgcagcaggtgatgttgcagatgcatcagctgaaccagtaggtgagggtgaaggatgggttgagtgagattgaaaatggaggttagggagttgagaccagccttcatgatggacaaggagagactgctcaggagcatgtttattgagaaaacctaatttgaaagggaattctttctcattaaaaactacatgtctcgagatatagaccctaccggttgtgttgaggcatttgtagtctttgaaggattcactatagcctaagttcacacactttagtgagtgaaactaaaatttatgagattgataaggtctgatgcaaggaaaacatgtagctccaaatgttcttaagagcttgtaatccgattttttatggtaaataacctcaaaaggtgatttgaaattcaggataggagttggtagtctgtttatgagataaacagatgtttggaatgcatcgacccaaatttcaaaggcatactagcttgagctagaagagttaagcccatttctacaatatgtctatgctttctttcagctctcccattttgagctgaagtgtgaggacatgagtgatggaatcggaattctatttgtgacaagaaagttgttaaagctttggaactctccaccccaatcggttctaagaaactttatcttagtgtcaaattgattttcagccatggatttgaactgagtaaaggcatctaatgcatcagatatttgtttcaaaggatatatccaagtaaagcgactaaagtcatcaatgaagtggatataaaacttgaaattggtgttcgaatttactggggcaggtccccacagatctgaatgcactagttctaacatcttagcagccctactatgagaaagtttaaagggaagagcatgagatttaccatactgacaagcatcacagatttttctttttcattaatagggacagttacattacttgttctcaagacatgtttgagaattctactagatggatgatccaaccgttggtgccatacatcatttttggaaagaaaactagacttatgggcaaaattagcagagaaaactaagctcgagttgatagtggaaaccgattttgtattgctggtgttgaactggtacaagccat

SEQ ID NO: 100772 - DNA, 1120 bp, Cannabis sativa
atatcacatcgctatagtatttgtgatagcctgtttgacaaatagttttttccaatggttactctgtatagctatttgactttctgttttcataaactgcaccccttatcaaaatccctgaagtaatgtaaagaaaaaaaatctcaaaattaataagaataatactaattagtaattttaatagtaataatattccttttgtggttaataataataatgttaattagtgaaatatagtatttcgaattttgtacaatgaaaagtaagaagctctatttagaatcttgatttatcctatcagaaaattacattgattttgtgctatttttttatgggagaaatgatgaaaagagaatagtcagaaaaaattgagtttatacaagaatgatggaggtctttattatcgtgacttatctctttttaacaaagttttaccgccttagctgttcatagtaatcccaactctcttgcaggaagagttcttaaggattgtgctttccttcctcaaactttttggtggccaaagaaaactctagatcctcatatttttgttatcacgatttataacatttaacctaaatattagacaacctacaacatgcatactagaattgaattaaaacacattaagtataagtactccgttgggattgtaagtcttaaataaaactctattcaatgtaatcttatttactatcaataaatattagaaattataccttaattttgtcatatgctttgttcacatgtttattacatgattatattaatatataaattttattaaattttgaacatatagttatttatcattatagtgatgtcatcacagtgaaaaataattgtgattatatgtttcaaattatttagtcccacaatttatttgtgtagtggatttacactgacatgataatcagcgatgtggtttatttacacttgtatatgtgaatatccttttcagggcattagtaaagtaaacttgtatcggatatattagctatacatcatactggaccgatattaacagtaaaaaatatatcataaacttattattatgtcttttctaagtcgatgttacttagttgatcttaggtcgattgatctgttgggttttgtgccc

SEQ ID NO: 100773 - DNA, 777 bp, Cannabis sativa
atgtaatttctttcaattttttttgcagggtaagagcgatccgtactcaaatgacgagatgaatattttgcgtgatcagtggattgaatatgtccgagcaaaggcagtgtgacaagggcttttacaatgatcagtttctgtttttgtttatactttatcctaactaactagtgacaatatataggaaagattaattaatgtaggggaaattttactatgtaaaatagtttctgtttaagtttcactagtgacaatatatatactttatcctaattattttttttcttttttttttacaatccaatgactggcaaaaaccatcgttaaaaaatacgaaatttataattggattgaaaaatttactataggcgacactttaaatctgtgcttcaaacattatattccacggttaaaaaccgtggcctatagtataggtcacgatttaaaactgtggcctatactaaaggccaccgttttaaactgtgcctacaacattgtaggccacggttttgaaccgtagcctatagtataggccacggtttttaaccgtcgcatatagtgttttaaaccgtggcccatactattttcccgacaattttcgaccatcgtcaattttacccagtatccgcgacgctcgtataggcgacagttttatggactgtcgggaattctttggctgaaaatgtaaaaccgacaggaatttggggttttttagtagtgctcaaaaatgccaattttccaatttaaccacttcaatgccaattctaattatttaat

SEQ ID NO: 100774 - DNA, 620 bp, Cannabis sativa
ttgtccttgtttagtattattcttcatgttgtaaaccaaacatgataatgtactataagttagaccgcatttatgaattataagtcaagattgaaagcatatgatatgaaaatgacagagcagctctgattttctgcagttacatagacagttgtgggctcagtggtgaaattccttccacatttgctaagcttcaaaacatgagagtcttgtaagtatgagatcttgcaaattatgttttttaagtaattttagtctctttttttcttcgtatagtttactctttctggcctaaacttaccataagtcggttgttgaatgtcaggtacgcaacagatagtcctttctcagggaagataccagaattcattggaagctggaaaaatcttactgaattgtaagtattgaaagtttgcaaactaataattttccatcaattatgaccagcattattctttctgctgaccttattgcagtgtctcttgtgtaaacttataatgttaaatctctgagatgatttttgtaggagattggtaggcaactctttcgaaggtccaataccagccagtttttctgagttgacctcattgcagtctctgtgagtattatatatatatata

SEQ ID NO: 100775 - DNA, 1278 bp, Cannabis sativa
gaatgaaagagaagtaaatacacagatttttttatagaggttaggcccccttgtgatagcgggtaatgacctactaccattttagttgtattaataccaaggattaatactatctagatcactatagatgggatctgctatagcacccttaggaatacaatgtttgaatcaagaattgtaaaactcaagtatagagataatgcttgtatgagcgtgtgagagagaaagtgaagaagagagaagttgtcagacgtaggcttagagcttggaggtaagtattagacataactgagcttaggctttctaggttagagttaagcccttttaaataggaggcctaaatcctagattacaacttgaaaccctatatatttgtatattttattagttaattacaaaagacaaaaatgtcaatgaatctagatcttattcaactattctgttgggcttttagggcccaatttgcaacccaaaagatggaactacacaggaaaccctacaggaaacctcatggctggccaagccttatggaggatacgcaggtcagccatggtacattccccaggttggctagccatagggctggcctagggtggccagccagatcctgtgagggagctagtttgtcattagatgttcatttgagtgacacggtctccgttttcttaggtgcttacttggccttcttattggtgagttgtactgtcacatgtcactgattttgtccatgtaatcatgccacgttaggaggaaaaaaatcaagataacatttgccccccaagtctctgtgcggatgtctgatagatagggactttaccagctatgttgctacggtcgggactattgtagcctttgctgaataaaagttgatgtgtttttacccttttgaaacactttttcttgactgcctaatctcttgcagtagaaaaataattgctttagctgcctttttgctatgtagtggaagtaagtgaagaaagggccccacttgccttacataagtgctttttggaaggaaaacctttttcacttctcacttctcacttttcactttctctcactataaatttacgttaaaaaaagctcctccttctctctagatggtcgaaaccacaagcatcatcttctcgagatttttgcaccgtttcgacgatccgagcttcctaccttcttctttaacaacatcttgtagtaggtaagctttctattccctatatttcacttgatttggttaattttttcatggatgcatgaacactattccttacattgaacatg

SEQ ID NO: 100776 - DNA, 1090 bp, Cannabis sativa
gatttcttcagtttagatcatagaacaattgaatatgttgtttcggtacctgatcagattcggacagcagtgaaacacaataactggtttcgattcgaataattttaacttaaggatgatgagtgtagagatgttattgtcaagaattggaatgattccacacttaataatccaacatcacagctggtacacagcttaactgcttgttcttctactcttcagacctggcacaacaagaagtatggcaaaatgaagcgagatataaataatgctaaaaaacatacgactcatttacacaacagtaagaatcattctcctcaacacactactgatatgttgaatgctgagaaaatcttggatgatttacttgaaaaagaggaaatgcattggcaacaatgtgcaagagtggattggcttaaaagtggtgatgctaataccaaatttttccatgctaaagcaaaagctagacacaacaccaacaagatcaaaatgctccaaactagtgatggaaatatacttcacactgatgtcgattttgctacagaagcctcaagtttcttttctcaactgtttactacttcagggattgataatgatgctcttaatgtcactttggcttccatcacctcttccattacagcagacatgaatgtgagtctactgaaggatttcactttagctgaagttgaagatgctctccattatattgctccagataaatccccaagtattgacggtatctccgccatgtttttccagcatcattgggatgtagtcaggcctcttgtttctaaatgtgtgctacaaatcttaaatgatggagctaacatctcggctatcaattcagcaattatcactttaatccccaaggtggagagtcccaaacagttgggtgaatatagaccaattagcctatgcactgttatctacaaattggtctcgaaaactattgttagcagatttaaaaaggtgcttccagttgctatttccccacatcaaagtgcgttccttcctggaagattaattactgataatgtgcttcttgctatcgaattggttcattgcttgaagaataaaaagagaggacgtt

SEQ ID NO: 100777 - DNA, 983 bp, Cannabis sativa
aaagacttagcaaatccttccaagttatctgatccacgtgtcccctcttgactggtccacgtattttgggcgaattttggagcaacatcatctataatatgtttctttttaagcttatttatttttataattagttttcaaacaatttagtaaacaattataaaataaaaagtgctttattagttacaaagtgtgaattgttatatatctagttaaagagtattgttattgaataccactagtactatcacttaattgcacaataataatatgcttgtgccttctcctatttcaaatcataaagcatatctaattgaacttttacgtattctaatagtgctattaatacacaattaaattttagggcgcttttacaatgcactccctcagaagggatgctgatgtaccctctacttatttctacattcataagaattttttagtctaattttcttcatattcgtgtacgttatagttatttaagatatcctacaaaattttataaaattcaaaacaatttacaatatataaaggagtgttcaaacagtctatttcatacgagtgtaaaataaaataatcacgtgtgcaacacactgtttgaaccttattttcgacgttttaaatttttttgaatttcttaaaattttacaaaaaatcttaaataactataatttacatgaccatagaaaaaatttgactaaaaattaattttcatacaatttttttttttttgaataaaagcatatttcattaatagaataagttagatctcacggtcatttatataacatgtttaacgggatggtagatagcggaatatcaccaaataacttgtgggtaaacgcccacttagtcacattatgggaaaaaatggtacattgacacatacctttaaaaagcagtatttttttttaaacttcatcactattaccatttttttaatatataaaagaaaaaattttaaatttatatttagggaaatt

SEQ ID NO: 100778 - DNA, 971 bp, Cannabis sativa
atcttaccataaaaaggaaaaattattttgtcacctaacttgccaaaaaaggactttacaaatttttgtgtaatgggctggcctttttttatttttttttttcttggtaatgttacttgcataggatcaaaactcactctactttgcgtctgttataattaaaccgatgtaaattctcaaaatgtcggtttaaaactgacacaaagtaccatcgatcccgatcatcaataaaaaaattttaaggagttttttttttgcgtcagtttttattattgactaacacgttgactgatcccaaaagtatactttacagtagggtaacacgaaaatgaccaaactcgtttatttcttgcaggtttcaagccatttatcaagtatgacccattttgctgcctctactcgaggcttggcctaaactcagagtttgagagtggggctgtagggctaacgatggggtccggggttcagggttcatgttaggggttataccctaaaaaatatgtaaaaatcattttgatcattaaataaaaggaacaatattatatttgtaccagaaaattttacattcatttatgagagtatgttcatgtatgagtagaagagaattaagaccatatataatgaataaaattgtatattaaagtttgagatctttaattaaatttgagggaaactattacttttgtggtagatataactgaccacttccgagtttgttgaatgaatgacgagagtaggtctcgaatgcaggttggagagtctttcagggccacaaaagacattgagtagcatcaatggtcaagcgttgttcgaaaacttcactcttgaatctatcttctttttgcatatatagggctctaagttgattgttgtcatcttttacaaccactttcacagacatcagagattctttaagagccacatcatcaaatattttatatctcattgtcaaatgaaagtgagcaacatca

SEQ ID NO: 100779 - DNA, 767 bp, Cannabis sativa
aaaggttgctggctcaatttagactttattgtttgtttactgttctaatcatcaatcatctatgaaataattgaaggtaaaaagaacaaaaaaaaccacccagataagagtaaaaattgggggtttcaaagtgtattagtgattagtaattagtaatccttattattattattatgcagaatgaaaatgagtggccagtgattaaacaattaccatcatatggtaaaggcaaatacggggaaactggacgattcagaagtcttattttcggaacaaatctcaatgacgtcattatcacgggtatataaatttggtaattaatttcatttttaattatatatgtggttaattaatagttgtgattaaatgatgaacaggggacaaagggacgattaatggccaaggtgatatatggtggaagaagtcaagaactctaaagtacactcgcccctctctcatcgaactcatctactctacaaatattcagatttctcgtctcaatctcctcaattctccctcttggcacattcatcctgtttattccaggttttcttataattaattatatatgtattgttttttgttaattaagattatcatatttttgattatttatgttttatgaaatatatatgtatatgtatgtgtttgtgtgtgtatgcagtaatattattattcaagaccttaggatcattgctccaataaactctccaaatactgatggaatcgatccaggttgacatttctactactatcctatatatata

SEQ ID NO: 100780 - DNA, 737 bp, Cannabis sativa
  modified_base (323)..(328): a, c, t, g, unknown or other
ttaattcttggctggtcaaataaacacataaataaatacaattaatctacattatacatttacatatagatgtgcatgtacgttaacttcatcttcttggctggtcaaatattcgtttctttgtcggctttggaatttgcttattttggtatttggtattggtagagtgagatgacaccaaataatagtttaaggtttagggtttggggtttaaacaaattcagtagagacaacagagcagagaaattgtcagagccgcactcaacagaaatgagtctagaaaaaaaaaaaaaattagaaaataatatttttaaaaattattnnnnnnaatatgtatattttttaaaaatatttttttatttgaggccataaaatgagtaagtccaaggcacgatcttagcacacttatgctcaagactaactctggatatggtatgtatcaataatattacctaagtatttgtttattttgtatatatatacaaaataataaaatttacattatttttaaaatttgatgtggaccaaataatataacttttatagtaagactatgtaataataatatgtacataagacactaataatttcactataaaaaattttatttttagtgacaacaaaatttgttattaaaataaaaaaattataactaattataaatcactattcttatgttgtgactaaaatatctgtgtggcaaaagtattaattaaaaaaaattacaatttattgtg

SEQ ID NO: 100781 - DNA, 1076 bp, Cannabis sativa
aattgactgttctgaaactaaaaatactaaaatttacacaaacacatgaaaagttactttaagaaaggtcttaaacttttattaattgtaattgcttgatgattatttttatttttgaaaaaataattggttagatatgattttgcataccattaaatgaatttagttcgtcatttaattgaatacttttcatgttaaatttttgggtgtttaatagcattaaatccttcggcaaagataggatgtggagttcggaattttatgctttgcaagaagcagaggcagcttcagctgacagataggaaggcatcggacctaattgctcagaagggaatcagttgctggaaggcctggcttaataatccctttacttctaagttgatgtcccactgatatgatatataaatatattacctcaataattttcaaacacttgaaaattccattctcacaacttacatgataaaagcctaatttaatgtaaggacaataatactaattatgtgagacaatattgtagtgtttaaaggatatgttcttcttgaataatcttaatttgctgaagagttcattacctgtggaaccttcttggaatttaacgggacaacaagaataatattacttatatagactctaaagtttgaaagagtttagagatgtgttgtccgtatttaatttggaatatatttagatgtatttgtttattaaagttagctaacttttttacattattcaaactaaattcaacggtgcagaattagtgaaaaatctatggttctaatggcatatataaaatccatgtctcttttttttggttggggaatattttcattcctcatttagggataagagattacaaccaaatagtactgaaaatacaagtaatgtacatgacaatattacatgagaactgaactatattgagaagaatagaagattttcttaaaatacaaatactagattatgagactaattagaagaagaagattataaagtagacaataaattctacaaaaaaaaaaataattggaatttttactctttcctttttgtggatgtgccactttaaaatgcat

SEQ ID NO: 100782 - DNA, 528 bp, Cannabis sativa
tgtaatattttgtgaaaacttttacgggatcccggatcatgtgtaatattttgaaatggtttgtaaagtttaaatagttacaagttaaatatatattccttaaatgttttaaagtttaaattcagctctttttccagtattcccggtttagcagggttaggttatatttatcgaaaaccttagggtgcctaattgttagggcattacagattatttgctatgaggtgcattttttagttagcagtagtttttttgacctcttcatgggttttgagtttgctcccgaagaagtctctgaggcggccaccctcttcttcccttttttacctgaggcattgagaagattctctaaatccatatctatgaaataaaaaaattaagtcagcattcatccaaaatagataataaaaaggtggggaataaactcccacttaaaggaagttaccataaatatcagatgatgaagaggaagaattatggtaattactaaactccctaaacccagtgatcatgtatatatcgtaaggg

SEQ ID NO: 100783 - DNA, 1072 bp, Cannabis sativa
  modified_base (319)..(328): a, c, t, g, unknown or other
aatcattgaaaatggcgggatttttccctctaaaactatcaataacgaaaaaatcgtgaataataaactgacattttcgtcagtaaaaagttcatcactaacgactttgtcgtcagtaaaaaatggttaaaaacctaaccctaattcattctcttcttcttatctctctgtaaaatcttctctttatccccaattcctctccatcgcttgaagcttcgcctgctactactgccgccgccaatcaccggtaatataattttattactcttattctctttttatatatattacttgaatattttatatatatatttatatnnnnnnnnnnatatatatattttttatttttcagtcactgttagtgtgttactattcatattggagtctgttgattttttttttttcaatttatatttgtttattatatgttatttttttaatttgtaaaatatatgtctaatttgttttatataaattaattatttgtataaaaaattattcttttggtgtaagtttttaaaatcagatttaatatagttttgaaataataagaacaaaaaaattaaattatatgtgatatttttttctttttaaagtgttactaattgtttattattattatttttttttttgatatatgtaattttttgtagtatagatctgtgatgttttcgaaatttttagagtgtttagagcatgtaaaattatttaaaaaaaaattatgttaatttaataatttataataagttagtaattttatcaaaaattattgaaaagtttaatattaaaatgaattattatttaaataattaactatataaaaaaaattgatgaaattaattttaagtaatttgattaagaaaatatttttgcatatttcatgaaaaaataataaaaaaattaaataattagtaattaatttaataattaataaataattagataactaagctcaaaaaaaaaattagataactaatttaataaaaatattttaaatgatttaatatctaattattaaaaaaagattataaaaaagtttaatattttttataattagatttttaatttaata

SEQ ID NO: 100784 - DNA, 946 bp, Cannabis sativa
aataccttgctatataacggaatcaagggttatagtgattgaacggaaggagtcactaatttctgctgaacccaatgtgaggattctattccatttatgagtttaattatcattttatgagtttcatattttaggatgttagattataacgaatataatcaaacattgttagtaaattaagatcctggtaaaataagttccaacaattggcctcagagccatggtaattatttactgtaacaccctactagattagacgtgttattgtgatttcttaatgttgtgctctcctttactaatcagaaagtttatggaaaaacatagataattaaaactttctttattaacctttaaaattaaatcaacaaaagttttacataatttgggatcccttctttaaaatttaaaattgtattacaagataattaattacaaaagttgtcgtttagcaaccaccaaaatacagcatgttgtcccgaagatcgaactctccaggtctaattgtcgcaatatgtacaatcttcattagctcgagctcattgctgttcagcctttaccttgcccttacctacaccaaacaatatctgtgagttgacagactcaataagaaaatcataattataaactggattataactaggcgcccatacacccaattataaccatatcgatcccacatcccacgcgtattgagtctataacattcgtatgatagtactaatgaccataatatcagcctatactcggtagtctagtcgtaccgatatgataacatcaatcagtactttgccaaatatatatctattggtattcagtgcaattctatgtacactaacaccatcattacctatatgttatctaacatgcattcataaacatgtacgctaaacatgtaattatatatgcaattattatactaatcttaccttgattttgaatttaggtg

SEQ ID NO: 100785 - DNA, 2052 bp, Cannabis sativa
  modified_base (2001)..(2017): a, c, t, g, unknown or other
caaataaataagtcaaatttatgtggtctattttgaaataaagcttatgacttaagggcatgattatcatgattttaatatgtggatgccataaggataatttctagtttgatgaacggccaaattagaaatagacaaaaataattaattattgttttttcaattattaataaacaggcattggtccccatttttgcatcacttcacatatcgtatcttttttcttgaatccccatcatcaagaaaactcaagttccagatggaaaacttggcggggttgaacggtaagatcagacatgatttagtcattacaactaataacactacaacctatgctaaaatgtttaataaggctctatgagctgagggagtagtaaagtttctgcatgaaaaatgagacgttcttggttctggtggaaccactactctccctatctttggtcctggcaaggagagtgttgattccactattaagcagaagaagagaattttcccacctacagggagttcagggcaaagtaagagtttcgcggaaaccagggtaaagggggacgtcagacctactcttatcctgagtgtccgcgctgcaagaagcatcaccttggagcatgtaaccgaaggccttgtttttagtgtggatcagtgggcacctctagaaagattgtccccaacttaagaaagaggaacccaagccagaagttaaacctgtaccaacgcgtgtgtttgctatcacccaggcggatgctgccgccagtccttcagtagtcacaggtccgcttcttatcaatgactttacttatactgtattatattattcgggagctacacgctcatatgtagcaacaagagtacttaatcagcttggtaggcctagtgatgtttttgagatgggttttgaaaccctattgcctaatggggaattgattatatcgtgaaatggattagatctgtgttaatcagaattgagggtaggaaattgagtgccgatctagttgagttaccttttgccaagtttgatattatactcggaatggactttttgtccaaatattctgccagtattgattgtaaacagaaaatggtaacttttcaaccagagaatgaggaaccatttgtttttgttggatcagttcaaggttctcgtgtcccaagaatttcagtattgaaggctaggaatttactacgcagtggatgtgtagggttctagcggatgtaattgattttggtaaacatgtgttactcggacccgaggatgtcaaagtggtaaggaattcttggatgtgtttcccaaggaattaccaggactaccaccacaacgggagatagattttattaatgacctaatgcctggggcagaacctgtttcaaaggcaccctaccgtgtggctctcgcgaaattggaagagctgaagatacaactttaggcgatgctggatttagggttcactcgacctagtgtgtctccctggggagctgcagttttgtttgtaaagaagaaggataggactcttcgaatgtgtattgactaccgggatctgaacaagttaactattaaaagcaagtaccctttgcctagaattgatgatctgtttgatcaacttcagggtaagacagtattctccaagattgatatgatatctggctatcatcaattgagaatctggaaagaagacattccgaagacagcttttcgaactaggtatggccattatgagttcctagttatgtcgtttgggttaacgaatgctccaacagccttcatagatctcatgaatagggtattcaaggatttcctcggttactttgtaattgtatttattgatgatatccttgtgtactctcagtcgaaagcacaacatgagtagcatcttcgtatggttctgcaacggctcagagatcataaactctatgcaaaattcaaaaagtgtgagttttggttgtcgtaggtgtcttttctggggcatattgtgggaaacgacgtgttggaaattattttaccannnnnnnnnnnnnnnnnacaagtatgttgattaacaccttaaatatgaactt

SEQ ID NO: 100786 - DNA, 818 bp, Cannabis sativa
gcagttaatgtcctatccaccgtcgtttccatctactcagtggacaaagttgggcgccgtatgctgttgttggaagctggtgttcagatgttcttatcccaagtggtgatagccattatattaggccttaaattgtcagataactctgacaatctagggaaaggttatgcaattctcgtggttgttatggtgtgtactttcgtgtcatcattcgcatggtcttgggggccgcttgggtggctgattcctagtgaaacattcccattggagactcggtcggccggacagagtgtcacagtttgtgtcaacttgctattcaccttcgttatagctcaagctttcctctccatgctctgtcatttcaagttcggaatcttcttgttcttttctggatgggttcttgtcatgtcgttctttgtcttgtttttgttgcctgagactaagaacattcccattgaggaaatgactgagagagtatggaagcaacattggttgtggaagaggtttatggatgatgatgatgatcataataatgttgtcaaagttggtgacaagataaataatggtgcttattgatatggagtagagtataggcctctgcatgccatgtaaatttttttatataatttttttttgggggggatgggagtaaagtttcgaagaataactaggaaaatgactaataatatgtagtcaagtacaattttatttttatgtgctgtttttatgggggtgtttttttcgtatacgaggccaaaatatataatcaaaggcttcatttgttttttgtttaaaactcttaattttaattgtgccct

SEQ ID NO: 100787 - DNA, 579 bp, Cannabis sativa
tcaatagttcaaggggcatttttaacgaccttaaaagttcggggagcatgatttggtacatgtcaagagggcaaaaatcctaattagccaaaaaataattatagtaataacgaaaactgaagaatatatacaagtagaagttagagatgttcatgtaatctaatctaatttgtactattttactttatagtacattcaatttcattaatagtagatttcatattttggatcttatccaatttgaattaattattttaaattggttacttttcactattaaataatttaatatttattaaaaaaataatttttttcaataaaaaaaaatgtttaattttacttaatttgtatgtaacaaaaaaaatataaaaatagaatatatgtttgatttattaaatttttaaatatattcatattatatatattacatttttaaattattaatttttttacataaaaatagtaattgtatacataatttttttaaaattttataaaaatacgtataaattagattgcatcggttacctttatcttaattaattgcacttgtagtctgtagattaaattcaattgaat

SEQ ID NO: 100788 - DNA, 658 bp, Cannabis sativa
ctggacaaaaatgggcttacacaactcacctccttgcaaacacttgagatttggttctgccctgtgtttgagacaattccagaagacggattcccaaactccctcacctctttggggatatatgattgtcctctagtgaagaaaaagtacctatatgagagtaggaggaaaaagtactgggacaagattagtcacatacccaatgtcgctattgcataatgaccttgcatttaccacatctcaggtttgtttcattaacttattcttcttccattcttttttatgtataatagtactataggagctgctctgctcctaatctgtagagttgtttttgttcaaactctgctcctaatctgtaacaagtgttaataattcattgttaaatttgttttgacaggctttattagaagaaatagtttgcaatttgtatttgaggtaatgaaatagtttccaattcaaagtgtgtttattttattttattttgtttggttttattagttgatgatttgtttatttcatcttcacaattcttttatctatctcaatatatgtttttgatgtttttcttttgaatattacaatttacaccatttttccccagttaaagcatttttactttttctagattttgcttttacaggaccaggagatagtt

SEQ ID NO: 100789 - DNA, 750 bp, Cannabis sativa
taaaatttaaaatatatgtatatttttaccgggtattacaatttcaattttgaatattatgaacgtttatcattaagataatggatctagcagataaagtagttagagaaattaacaaatagctagataggatagttgttccaatgtatacatttcctaagaatttaaaatttatatgtaaagtaacggaggataagaataaatatgattagttgtgagagtgattaagctataggtttgacctattctcttagaataaatgaaagccaacgtggtcaaatgctagtaatgggtcaagattatatacacatataacttagtatagtgaggtaatgtattaatggatattagtagtagtctctcgattcagcaggagtgaggtaccttttaattaccttggtgttccaatttgttcaaagaagatttcacttggggaatgtaagactctagcagaaaagataacagttagagtgagagcaaggagtactagaaccctcccttttgtaggtagagcagtcttagtcaactcagtattattggcaatacattcatactggagtcaaataatgattttaccaaagaaaactattgcagaaattgagagtatatgtcgagccttccttcggaaaggtcaagctaatgcctcgggtccaagtgcaattgcatggaacactttatgccaaactaaaataactgggggattgcttttagatagatagcaacctagaacacagtagcaatgatcaaata

SEQ ID NO: 100790 - DNA, 666 bp, Cannabis sativa
ttttttttttataattttatttttacttttaaatttgaatttatatcaaattataattttgaactttttttatttgtcaaaatttttttaaaaaatgattaagattgttgaatttagaaatttttatttaatttcattattttgttaattttgtgattattatgatatttagacccatgttaatttttcttactaaagaataaaatttcttttaatataaattgaacattttgttttaaccatttgccataataataataataattattattttaataatgagacaatttcattactaaaggatgatattactaggtctagaagggtagcatatccatatactaccatagctagaaatagacaaaagacaaagctggctttggtaggaatgggtaccaaacctaaacagaaaaacaaataagtgtatataaaaaccacatttttaaatgaatgtactacagattttttctaattgtactatattatacataataatttattttggctaaaaaaaataaggctaattaagatttttggcccttaaattttaacatgtactaaatcatgcttgttgaattattctgaccgttaaaaattctccatgaactattgagattactagatttaaggacttttgtctacttttattcaattttactatttcag

SEQ ID NO: 100791 - DNA, 1342 bp, Cannabis sativa
aaagttatatgtcattcggtaagatatttttgaaagtctaacttatccatacggaagaaatcttgcggaatgatagatgtcatccaaaaagacgtttctaggagtttatcctgtccactctggaaggtgtcttcaagaaagttagtctttctctgaaaagggatttcggatggctagctgttccatcctaaaaggaagttctggatatatagtcgactccagttgttgccttttctatctaggaagtccgttcaacgtatgctccggtctttctttcaggaagtgtacgtctcatccgaaagcactttaacttaagctgatgtggagatattgttatgaggagtttattaagtttattaggtcgtaattaaccaataacaacttggcatttgcaactcccgaatttcccttatctataaatactaccaacttatcatttgagggatgagatcaacaaacgagttttgagagacgatttcgaagagagagattgagatgtacaaagaaaagagagagattaggttttagatttgtatgaagaagatcttctatatatgaaaaaaattcttggtgtaagagtgtgagagataaacactttgaaagaatctaaacaagaatcaatcttgagtaatgtattgtatcatgttcttgctcaattaataaatgaaattttggtggtgttccaactaaagtaaaaccataaatcacatcaatttatatgacttgagccaatatataatttggtattgattttattattttattgttttcctagttttaaatactttgtttatcatctcttatttttatcttagattcttgtttgtgtgaattattaatcttatcattgccaattttattaattaaagatttagttgatttgattcatattcgttgtaatttttccacattttctatacaatttgaatacttaggccaccaaattgtatttgtagtaattgttaaaatatatttagtaagaatttcagctactaccttagggtattaggataaaatcaactttccactaatataaacatatttctttctttctataattcttgctcaagttttagtaaagggaaatgaccccttaatttatattatgatattttctaacctaatcgaaccgtaactctcttataactttggtgtcaaacattcatctaaaaaataattacaaaaagtactttacttatataaaaaaaaaaaaacaaatttttttttttttttttgatgatcttcagtttatccactcatttagtagacaatctctactaaaatcggaaaataaattaatttatgaataaaaaaaaattggtttgaaatcaattataataaa

SEQ ID NO: 100792 - DNA, 1937 bp, Cannabis sativa
attacattttccttagtcacaaaatacatgattttgtgaattccccatctgtatgctttactcctcttagggtacaagattctttactgtttgaaaattacatctgtgtcaacaccgagtcacactagcaattattctgtgtttgcaaataatgccaaagtttgcatcaaactttcctgagtctgaataattccctaattgccattatggaatccttattattcagccttacttgtagagttagtgattctagatagacttttacacttctccagaaaccactgctctacccacacagtaatcaccatgtcttaagtagactttctagcattgatgcaagtctagaaaaatgattggtgtagcctaagggttttaatataccacccttactaattaacatatagttcttcttcttgtatttcaagatgtgtttgattatcttccaatgttcctttttggatttaactaatacttattcatagatcccactcaatagaagatgtctggtcttattgcatacaagagtgtacataagacctcttacaattggaaacaacccattagataaataaatccatgtctggaagtcaagtgacctctacaagagttagccatttaaaagtttctgtagcatcttactaatgtgagttgcttccaagaaagtaagtaaattaccatttataccacaggccataaggtttgatgttctaatcaaacccttgatattaggaacgagaaatttgcttaagtccattgaatagactaagcatggtttctcatcttatccttgtattctgaaaactctaggttgctccatgtgaatgggtaaaccatagttctctaggcttcaaatcttagttccttatttggactttccattgcttattcaaactaacaaatggtcatcatcactagtgttatccaagtcatactagggtgggttcctaaaaaccctcccactatgattcggtaccatgataatatatctaggaacttcagtggtatagaccttttagttgtagcaataaagcagaggttgtgggactatattatataatataagatgacgaaactcttttgtataactaattggtatctctgcttctgtaacgccctaaaacttaggcgcgctatagtgactttcaacgtgccacctccgctaatcaaagggtttttcttgaaaatcgtgccaaattaaaacttttgatttcattgcgaaactttataatttaatatatacatttacatagtcgggatctcaagtaaaacttatacaactgttaacaaattacattttaaagattggtcgcacagcaactacaaaatacaaccccagatgtcccgagaccgaacactccaagtcacgtcgccttgacatgtacaatcaccatccaaccctagagctcactcttgttcagccatcgcctttcctttaccttcacatgaatgtagcatctatgagttaacatactcagtaagaaaagcatacaacaaatcatataatcacgacttgtttctaggcacccatacacctatccataaggcttaccagatgacttaagaacgttcttaaccgttggtgctattgaccatgatatcacccactaccagcactatgatcgcactgcgggatcgacactatgttcgtatcgctgtgatagcatcaataacacctgaaagtataattggccatgatatcactcttaaccagcacaatgtctatactgctgaaccgacacaatgattgcatcgctatgatagcaccaattaatacaatatggggtgattatcactctaaaccagtacgatacctatacagccgaactgacacaatggttgtaccgctataatatcacccaaatcatatacaatcacaaacacagcatgtatatatcacacacacatacattcgaatatataatatgttctatactatt

SEQ ID NO: 100793 - DNA, 1129 bp, Cannabis sativa
atgaaattatataattgcataaaggggatggaattgataaaggaagagcgtgcggtactatctactaagtacaatattaattacttcaactctatatagtcgatattattaattcgtattgatattttggtaacgtgtatggactttctaaccacaattaattgtaaccttttttttcttgcttaataaaaacactttcatatataatgaaagagcattgttattgagtaccgatgtctaacaccctaaagatgtgtcattttttaattgactaatcatattccctaaaaattattatatttgtaggaaagtgcttgtccttttagcatttctcatgtccttttagcatttctcataatgtaattagcttctttgctattaatgtgattcggctgcaaattaatatcatacatatgtaaattataaatacatataccaatatactaatttaataataaaaattgaaatagccagtggcacacctcattaattatatatgagtccgctcacgactgaccaagtattcggcagtttagccactgcataaaactatcattttttttttaaggttttacttttttaaaaaagattttttatatatatgtttacactatatactaatatttttttaaagtttttatttatactttcataaaaaaatttatgtatatatttttccaacttataattgcggcaaaagtcctcaaaaatttaaagttgatacagattagtcctcaacctcaaaaattggcggtgaaagtacctaaggtcgacaaagttgtgagtcagttaatccctctttctaacagatccgtttactagttaaaacttccacgtgtcgacaacttattagtctaaatcatattttttaattttaaaaaataaaataataataattaattaataaaaaatcataaaaataaataaattatttacatatctgtttagtttttcttaacaattatttatatactggaaaaaaaaaaagagaaaaaaaaaaaaagaaaaagggcagccttcgtcccccagttccctctggctaagcttcaccaagttcctccagggtgcaacctatccatcgacaatgaagccccttccatcacaccttaagaaaccttgcccatcgttg

SEQ ID NO: 100794 - DNA, 1364 bp, Cannabis sativa
  modified_base (35)..(67): a, c, t, g, unknown or other
  modified_base (1280)..(1292): a, c, t, g, unknown or other
aacattaaatgttagttctgatctatattaataannnnnnnnnnnnnnnnnnnnnnnnnnnnnnnnnagggcataaaacccaacaggaccttccccgccggtaataggaccgcccctaattatcaaaattgttgtagtgtggagtaatattttttgagaaaaaagaaaaaaaaatgcggttttaaaaaatgacaaaaacataaataattgatacaaacaaaatataaagccgaactccaaacatgacaaaaaaaaaaaaaatacaaattactatgataattttatttattttgaaaaaatacataagagcaaagactatatataggaaaacattacttaagcggtgtgtaacaagtaaaaaaaattaaaaattatgtataattaaaaaaatagttaaaattataattaaagtgattaaggatatgtacatattaagagcaaatctaatggagagttgaaaatatcacgtacatgcatatttgaagtcctctttataaaagtaaactctaatgtagtatataaagtggtctaaatttaacgcatgctaaaagttgtgtaaaatttaacataaaatataacatgtgccgaattttatatcatactaaatattacttttttatttactctttgccacttattaatgtaattaattattttttatattttattaatatatttaatagaaattttatataatttagtaaaactttaatactttgttgaatttttttacacatttctatcgaaaaaagagttaattttatctttaatccataaaaaaagttaaaaaaaaatttggccaaatataatttaactcatttttatctcaaattatacaccatttattagaaataataagaaaaatactaaggaatatgctaaacatcataaatagtgacataccgttattgttgtatttcattattgggtcttacaaattttaatttagtgaataacatgagaaaccactaaccaattattaagtgttatatttgtataatgttggacatctgaaggtgctaaataataatactatattaacaataaaaaaaatacataattctccagaaaaaatattgtacaaaaaattatatatataataatatcttttataagaaaaaaagaattaagatcataaaaaaaaacccacaaaaatagttgtaaaaaaattgttatttataagaaaatactaaaggaggtactaaataccataaatagtggcatactattattggtgtcaagtatcacaaaatgtaacaaaacattaaaaaaaaaaaaannnnnnnnnnnnntttcgaaaaattttttaaaaaaaattgaaaaattcgaaaattaaaaaaaaaattaaaattaaacatacaatt

SEQ ID NO: 100795 - DNA, 1061 bp, Cannabis sativa
tttttttaataataataactattaatttattttaatattttttattttatttatgtgtatcttttaagggtataagaagaggagagttgctcgtgagaagaagagtactgaagaaaaatcagtccctatggatataatagtgattgattaagggtccatttgtttgcacttaatgaaaatatatatctgaaagatgtatatttggattgtgtttttagttctgtttaagttttaaacttaatgtttttagtttatttgaataattggatggttttatattattatcatataatcaataaaatatctatcttccaaactagtgaaatttcaattctataaacaacttgtgtttgtcattctctcaaaaccaaaattacatacaaagaattattaaaagtaaaaatatttaaaaaagaaatggaaaagctttcagttctcttgtggcgtatctagttaatttcgtcgtaatttatggatttgagagaagagagggttgtcgtttgggctatggtgcggtgatccatgaccatttgggtgtatgtttagcctcgaatgctactctagcattcgagactatctcaccgtcagtagctgaagctctttttattttccatggtctcgtgtactcaatcgatttggctaccatgagattgaagttgagaatgattgtcgaaaaattgcgatgcttctcagtgagaatgatctttgtatagcagagtttggaatagtgttttggattaaaatgtttaatgtaagcttatatatatttgtgtgttttgttatataaagtttgatctaattaaaatgcttattttaataattgagagtcattaattattaaattagtcaaactttatatagcaatacaaataaatacatataagtgcctacattaaagattttaatccaatacagtgttacaagatattcataagatttgtcttagctttacattttttgtttttaaactttgaaaccgttttacaaactctattattcataaacttgctaagataacactctgtcttgatgttgcaagagtttgatggtcaagtttatct

SEQ ID NO: 100796 - DNA, 817 bp, Cannabis sativa
taaaccatttgactctttagtccagaccgacctatctctaccctgaccacacgactaaccacctttgatgatgttattgatcgtctcatggtcaaaaagagtgtgaaacttaaagatgtccaaatccctgttggctaagagtaaatctgccactttcttcaaaccctcaactagatgagtataaggctttgggtagaagtcctggccatgtataacccatgggtcatcctagatattcgtctcctttccatctgaaataagcttgcaagcccctttcttaaggatttctttagttcgcacaatattcttccaaaactacgaatttgagttcttaaaggaacactccaaaaattggctacccctaatatacttggcccttaaccccttatagcacatcgactattccttattaaggagtgcctagctccacttggccaacaatgcgtgattcatttccaaggaattttgaaaaccaaggccaccccaggatttggaaagacacaggtgatcccaagcctttaaatagataccacgatttccttgctcacaaccccaccaaaagtccttggtcataccattaatattagaggcaagcttcttagaaatctttgttgtttgcgtagtgtaaactggtaaggcaagcccaacaaatttgatcaaagtagctcatcttgctttggaaaatgttttcaatttccactcatggagttttgaaactaggttatccaaaataaagttaaaatctacattcttttggcaagacctaaacaatgggagacccaaataattaatcttttccatcgatttgttgagtcca

SEQ ID NO: 100797 - DNA, 546 bp, Cannabis sativa
tctattcattacttccatatttttagggctgcctttggtaataagcaagtgctagaatagtctgccttttaatacactatataattatatatactgcacaacacagaggttgaagaaaactaactttctttctttcttttttgtttttataaaaagatatatttatgaatagaattaatattagataaaacttattgatattcgagaatagaccgagaagaagacaaagatcacagggtaaagaggacaatttataaaggagaaatccaaaaggtgagagaaaaacaaaaaaagtttactcaatcattaaaaaactcttgacacaaagttgctcatctatttaaatctacatatatacgtggaagaatttttaatgttaatgctatggtataagttatacagtggttacattttcattagtttgtaatttggtatagatggtctcaatctaaaatttttaactagcgctattcattgaaaccgaaaaaattgcagaccgtaacaatctgaaccacactgtaaaccgtaatcggagaaactattttt

SEQ ID NO: 100798 - DNA, 1531 bp, Cannabis sativa
gtacatgggattgtaaaacttcccaaatctttcaacttaggaggaatttttctcttcagcatttcactacacccttccgtcaaagccaccatttcaaactcacctagccttcttttctttgtcaaaatgtccttaaaaaatttaaatagttgggcatttgctccaaaactttcactaatggtatgttgatgtggagttgctttaaaacatcaagaatcttcaaaattgaccatcttcttgctgcattttgaatcgttgaggaaatggtggaggtggcttgctatgttacttctctgctgcatttttatgagaaatcgatgtcgcattttgttcaagttgctctttttccatattagaacgttcaacatttttttctttttccactcgactttggattgaagtgggctcattttgatccttagcctcttcctcatttgactccagatttttacaacttctcaaggttaccgccttgcaatgctccttgccatctcttctcggattttcagtatcactaggcaaagtaccttgtggcctatttcgaagctcactagctagttgccgaacttgattctctagagttctcatagaggttgcttgactttgcatcgcagtgtcattttttgccatataattctcagttcttgtcatgaaatttttttgtcttgactatgaaatggcacatcatactctcaagataatttgtttggacaccttgttggggtctttcttgaaaggcttgttaagaaaaactaggtggaaagttaggtctaagaggcataaatgaattgcttggaccaaccccttgacttctgcatgccaagtttgggtgttggttgtatgtttggttgtatccattctgacttcccatgtaaaacacagatgcaagattgaatgggcaattttcaaatatatgagtctcactacaaaaaacacaagaaacctcctcaagttgaaccataagtgaggaaacactttgttgagccatgctcatagtcttagtcgacatagaagctactttggccgataacacagtaatggcatcaacttcaataacatcagcaactttcttacccaaaggtactctagtagtgggccactgataattgttgttggcaattctgtcaataatattataggcctcattataggacttagcaagtaaagcaccatttgttgaagcatcaaccaccattcgagtatgagcattgagaccattgtaaaatgtttccatttggatgcaatgaggaatgccatggtgaggacatttgtgcaataattccttgaacctatcccatgcctcatacaaagactcatcttcagattgttgtaaggaagttatttccttctagagcttggcattcttagtgggaggaacatacttcatcaaaaatggccctaccaattcttcccaagttgtaactaacgcaaaaggcaaggagttcaaccaagcttgggctttatctctcaaagaatacgggaacaactttgacctcaaggcatccttcgtaacttcgggcaatttgaaaga

SEQ ID NO: 100799 - DNA, 1061 bp, Cannabis sativa
tcgaactcggcctaatagttaaccgagtgtaacctgaacctgacttttaatttttgaaactcgattattttgggtttttcgggtttcaagtcgggtgggtggttttcgagtccaaatgttcaaccctaaataattatataagaccattgatcattcatgaaacactaactcgtgatggtattagactattcatacaatccgcaatcagtagttttaaacctcaactaatctaaactaaaccatttgaaatcgaaccaagtgaatttaatgttaatagatggtcaatttgaactgttcataagtctttagtttgatcacaattttaggatgtttttatagtagtttatatgcataatatgtttttttatatattgaatattaatatttggtaagagtgttaggtatagtattatctattttaaatatcttatttttattgttatttatatattattaaatttaatgtgtaaaagaatatagtaaaacaaattaaaataattacgaaatacaaattataattttaaattaaactaatctctttttaagtagattcgtttgaatatttaattagtataattcggttttaaattttaaaaaatttgtattacttgcttagtaaaaaaaaaaaaattcaaatcacaccaattgattattaattttgacaaaaattatcctaattgatcctaaaatactaaccttaaatatacatctgtttaattacacgtaggaccctatatgtagtgattcaaagtcaataactcattgtgtattatttatttcaaccggccctagaaatagaagtatattatatatttcaataaaaataaaaatgtcaatgagaattgaaaaccaaaatataatttctttagctaatattagaccacctagagtctataataattgataattgtgtttccattgcaggcctatgtatccaacctgactccatgttttatggattgagcattgtggtgtctttctagccaggggcggactcacattgtagcgaggggggcagtcgccctgaaaaaaaaaaatcgagaaaaaaatgtatatgtatt

SEQ ID NO: 100800 - DNA, 972 bp, Cannabis sativa
  modified_base (757)..(757): a, c, t, g, unknown or other
ttaaaattttttgtggtgcggtacctgtgcaagttttaatttaataattgcagttcaaatcgcaccacactatatattacaaagttatcaatttttaaaatatgatttttatttctttttttttttcatataaaaacaaatatatataataagtgtatattattttatttttagagacaatttaatataataacttgatgattattatgcattttataatgttaaaactttcataagatttttttttttgtattgttaaagttttattagtttgattttaaatttttcataaaaaagtttgataatagtgataatataaactgtaccacaccgtattttcgcggtgcgattgtaatttaaaaatttacaaaatctgtataaacagtttggttttaaaaaaaactataacctacaccactcgcactacaaaaactcctaattccacatcttatccttccaagattttttcttgttggagatttacaaataaactttcttaatttgtcttctctacttattatttatgatagtacgacacttgttaatagttataactactaatgatagttgggacttgggacatagtactatatcataacttattgtcacttgttttcacttttttcaagaatgatttactaatttattttaaggcattgttattaaacactgatcattgttattaggcaccagtagtgtcttacacattctcgacatgtcgcgttgcgattggctagcgatactccctaaaagctantatattaaattatataggacccgaaacttagtttgaccaatagcgatattgacacataggtgggtactaagcaccactggtaccctttaacatttctcttaaacattagtagtgcttagcatattctagatgtgtcgcattgcaattggttaacgatacttcataaaatttattatattaaactatataagacttcatacttaattgcaccaata

SEQ ID NO: 100801 - DNA, 835 bp, Cannabis sativa
agcggtgttcaatatttttttataagtgacgtcctacaattagatagtaatattctttaaaagttatattttaagttatataaaatccgatatttaattagactaaaagtgatatcacttaagagaatattaggtactaataatattttttagcaattctttttttacaaaatagcatgagcaaaatgtgtatttttgtcaattattcttagatcaatattaaaaaaaaaaaaacaatacatacatttaatataatagttttggaaaaatttatatacactcctagtatacatctatctattttgacatttttataaggtttattagcttaaattttgtaatgataatgtatgttgtagttatttaaaattttttattaatttttataaaattctgaatagtttatattaccgaaaattaaagtttaaatattttattgcataagtaacgttttattttatatatgtggtaagccactatttgagtagtaattttaaataattaagacgtataatattatgaaaaataattagactatttaggctcttcatattgcccaaacaaataaaaatttatttcttttaaaattttaggaatactataaaattacccaataaaatatgaatatatattcaatgtctctttgaaaaataacaattttcttttactttttgtaagcagatggaaatcatggtaataattagtcaacctgagttggctttgaacattccgcttaggagtagggcctttcatccgattcaatccgcacttttttggtcaaacaacatctgatccgcactaagtgtagatttcattttttggatccaatccaatc

SEQ ID NO: 100802 - DNA, 525 bp, Cannabis sativa
ttttttttttttttttgtcttatagggtaattttgaaaagtcaaactcaaaagtcaataaagttcatctatccaaaaatatgctgtaaattttttttattattattattattattattattgctaagttaatttatgagtcgcaaaatattaaaccgggacaaacttaagaaaaagagaaaaagatgtacttgaaaaactacaataaaacattaaaattttgaataagcaacaacttaagcaaaaatagatatatttttagtagaaaaatattagtccttcctgcttgaaaatcaagctgactatactagccttatatatactccatacactgactataaaatattactactaataaaatatttctatgatttttttaaaattgatattaaatgaaaataaagaagcagaaaaatgaaaggaagcagctaatagttaattgttgtcagtattatattaaaaaaaaaaaattataatacatatagtattaacataatggggtaagttgaagaatactctttttttt

SEQ ID NO: 100803 - DNA, 624 bp, Cannabis sativa
ttctctttttttttacttttttttaacaatttcttaagtaggtaataagccaaatatgattttaaaagtttaatgtcaaatatatgttacaatcatcagccttaaaactaaagaaaattacatgtaagtaatttgtcatattaggtggtatttggttggaagtaataaaaatgaatagaatgaaaagaaaataatttttattctatttttttgtttggttttattttaaaaataataaaatgtcatttcaaccaaatgtcgtcttagtaatttttaagtctcaactctaagttaaaatgtggtagagaattgttaaaaaatattattggtgcttaacactttttttggtgtcataagtgtacttaagtatcgaatcttatataatttaagaaaataacgttttagaaatatcattaaccaatcatagagcgccatttaaagatggaaaataggaagaatggagaatcagtagaggatgtagaataagagggaaggagagtagcaatctttttaagttgtttggtgaaaaaaaaagtgataaaatgatggatactatttatttatgaaattattatattgtccttagatgtaatttttttaatattatattatgagagtatattt

SEQ ID NO: 100804 - DNA, 785 bp, Cannabis sativa
  modified_base (586)..(590): a, c, t, g, unknown or other
  modified_base (737)..(755): a, c, t, g, unknown or other
aaaaaaaaaacaagacttataaatctttaaaattattaaaatttatatataaatttacatttaatttgatacacgtgcggagcacgtgtgtctcccactagtttattaaaaaagtacatatatatttatagaattattgtatatatgacaaagtttataagttttaaattggaaaattagattttctatgcttcaaatggggaacaaacaacaaaattaaccaatcattgaattccgactccattacaaaattatgctaatctttctccttttttctgagatacccctctcattttaaattctcctaattttttcaatctttagttctttcttcttctttcacatctttctattctaaactcacattgaaccaccatcaacagcagttgacctttaccaccaccaccggggtcggcccaagcagaaaataggcctaaaaattgtgttatatgtaaatatggaaatgactttgggtaagtgtgggtttgggtattagtgggcctatttcacaaaatttaactgaaatactatttttttctctacatatttataagggaaatctacaaaaatactggaatttgggttnnnnnttacaaaaatactgtcacacggaatttttttcaaaaatactttgtttttataaaacaccagtaaaacacaaagtattttaactcaaaacaacagttgaacactagtaaaacactagtagaacaccagtgaaacttaacacagtatannnnnnnnnnnnnnnnnnnaaaaaacacagtaaaaaagtaataaatacc

SEQ ID NO: 100805 - DNA, 605 bp, Cannabis sativa
atgtaaaaggagtatataggtacaatgtacactcattattgaggggtgactatagaatttccctagaacaaataatttcatgaatcactatagtgaaaatttctttcaactatactacattccattccaactttttgaggttaactcaagtaaccataagaaggtgcgtgtgtgttggaggtcctggttcgatttccaaattttacattatgtcggtaatatataaacgcttaaatcaaaataccacattccatctccccctagattttcctcagctaaatttttaagtggcaagaattttatagaggcagctaaggatccttcattttccctgataacttctccattttctattcatccttttaagcttttaattaatactttagcaaatataacttagtaatcgcatgcaaaatcaagaaaagaaattatatctgaaaaacaattagaagataacctatttgaaataagccatagtataatatacattaacctatctaagaaataacaataaactccactaaaaaagaagaagaaaaaaaaccttaaatcactactatctagccccaacctcaacgactagtgcccaacaacgtcgtccactg

SEQ ID NO: 100806 - DNA, 1056 bp, Cannabis sativa
gatgtgtaatcattcctcattgactagagctttatcgaggaccgattttacatgatccggaccattcctatggttgtcccaagtcaagtagtccccttttatgggcatatcaatccaaacattgtaaccggatcaagaatgaatgggagaaatcgctctttctccttggatccaacacgatcagagtttctcaaaacaaaattcacatcccctaaaattaatcaaggccctccaaccttgataccgatttccataatgtctaaccaaaatttcttcttctcatggaagtaagggggtccgtaaacacaagacaataaccaaggatagtgctcaaggtcagaatgcacaaagcccaaaatttgattttttgagatataaatactttcaaaattaaagcccactttccaagctagcataataccccgcactacccacagtaggaacaaaaatattataacaaaagtgaagtgttttaagagaacgtaccaaataggtggtgtccactttcaactaagtaatgaagataaaatcaagagagcacaaccaaatcagggctttaagttccaaaaatgtagaggtctgccccaaccctctatagttccaagcaacacctctcatagctcttgtggatgagggacaccatcctcctccacaagggtcacaccaccatgtggcccacaaattatagattcctcatcctcgattgccacttcctccttagacgggatagaaatgtccatcaactggactttttccttccatgccataagtctagctgactaccccagggagaccagtttgttaacttgttgggaacatgttgtatcaaccttggcacaatttaacgtttatcactggccaatagttcctctaaagagtcagaaaatacatgaatacattagcattcacctctccacctaccaaccaactccatgagggaagtcccttaccacacgctttactcttcttaatatgaggttaggttattcccgagtgaggaatttttgaaatccaatcttctcttctttataagcgtagtgtgttcattaaattcag

SEQ ID NO: 100807 - DNA, 1189 bp, Cannabis sativa
ttgtcatagagtagaaaggctttcacattgtttgccttcataacttagaaattgtttatacctttttaaaactagaaattgtttttaaaacaattttttgaaaactgagttaaaacacaaaacatcaaaatgctttctattttaaaaaatatatatatttttgtaaaatataattttaaaacattatctcacatacccggagtttgagatcgggtcttggggttgggtgcaggctccaggtcggggtttggggtccggagttcgggtttgagtctattcaaaaattttggtatattatgtaaaattttaaataaaatatataaaaagattaaacaataaatattataaatattataaagagagcaaagtaatgtgaaaacaataaaatattaatataaataaatttgaagaaacttgtttgtggagatgatgtgaagtatactattcattttgttttttttttaaatagagaagctagctaagtgaatcatctcaatgccacaattctatagtttgatttaatgtcaccttttaaattgttttgattttctatttaaattccacttttacatagtaaaggaaaactcaaactttgagtactttttttagaacttagataagttataatggactattaaaatttatttaattaatttaaataatttattgtgctaaaaaaatattcaaaacaacatgtttttacacatgcttgttttttctttttttctttttcatatgtgtgagtcaagtttgattttttacttttattttattttcgaataatctcaaactcttcaaacacttaaatttgaaattcatctcaacatttctcaattaaagttcaccaactaaaacttttaagccaaacaccactttaaaatttattataactacaatatacactatcttattaaattttttggagttataacttaagtgtcttaatcaaaacacttaagaacaaccctaaactatattagttgctttttatattcttaaaaataatttgacagaaagaataatttagaaaaatatttaaatggctgagatattaagtggataattatttattaagagacggttaactttttagttaatctttgtatctaaacacacatgtcagaatatatattttttttaatttttttatagcgttgttcatgaatatacattagttacaatattattt

SEQ ID NO: 100808 - DNA, 943 bp, Cannabis sativa
taaattacctttgttgcattaagggcatcttcaactctcaacttcttttctttgagctctgtctcagtttgtgcaccaaccttaataacattcaaaagattaggtcacaccgaaaccaggaataaaataatcgataacacccttaagccttaacacgactctaatgtttacctgaatcacagcaacaccgccggacagttttgcaattctctcgttaagcttctccttttcgtagtcctgctctgcagcctgcgataaagtacaacaaatttaagctaccgaaactaacaaagctttcacattgataatttgtataacacattaaaaaatttacctcaataagattcttaatctgtgcaactcgcttgttaactgcatcttgggtacttccatcaccaacgattgtggtggtgtccttggttagcaccaccttcgaagcatgaccgaggacctcattgcctactttgtccaaactgagtcccacctcttctctgatcacagttcctacacaaaacgagaaaaagacaaactatcataagctttgttataaataggcaagtaagtaatgtgacaaattagaagttaactaacctccggtcaagatagcaatatcgtcaaggtattggctcttgcgatctccgaaaccaggagctttaagtgcagcaatcttcaatgcccctctaagcttgttcacaacaagagtagccaatgcttcttgttcaatatcttccgaaataatcagaattgggtatccacccctgatggcttcctccaaaacattgataagatcccttgcatttgtaattttcttgtcaacaagaagcaactgcacaagtatgcacccgaatcagtacgcacttaacaaaaaagagtaacatgtggttgttattagttaaaagctaaaatcaataactatagtattactatatataccttgcagttt

SEQ ID NO: 100809 - DNA, 651 bp, Cannabis sativa
gcaattctcaaggcccttttcacttggagatacaataaaagtatgtcaggctcacccttaaaaaaaagaaatgatgagtttagaataaattttgcttggattcttgttagtgtaagtgccataaatttagcgtttctcctttggaccacaaatagcacgaggaaatactttaagttacctgtgagttacactttatatatatacacaaacatctgaattttaattcctaaaaaatctatataactaactgatttattataaaatggcaataatacgtttaagtcattttgcaggctcaatggtacagggattctataaccaacctactatctaatgctaaacttgctccttcaatacttattttctgcatgctttgtactattactataacaggccgggtctatagaaggtcaggtagtggaaatgggacttactaccacctcattactgaatgctgagaagtttcctgtcatagttccgaattctctgttttctagtcaagtgagtaattgtctcttaaatcctttctcgcaacttgttatttcatcagtaggatgaaccaagaattttcttttttgtcctctgttatttacttcctttcagaagttaatggtagctgcaggtgtttaataatcaaaaggatttgtagta

SEQ ID NO: 100810 - DNA, 826 bp, Cannabis sativa
aaaataaaaaaaaatgttaaaacataaattttatagctgaaaaaaaaatataggaaacccctacggagtcggttattatacggagtcggttatttcataattaccaacgctgtagggaccctacggaagcagttttttcataataaccgacgtcgtaggatccttacagcgtcgattgtttttaacccttttagcgtgactagaaacaacgtcggtagtgaattttgccaaaagcaacgctgaatggccttaaaaacaacctttaaagcctaattttgtagtagtgataacccaacttgcataactgaacctagctttctatgtaaaattgaaagagaaatcaagggagcagcttacgttatccttcggctaacaaagccttctaattcccttctcaaaaacccttgaatatggtctaaaaatgttgaataaaaccttggttttccttggctagctagggttgaacaaagaagagagaaggaggagacctaatttttttaataagttcctaatttactaacttaatgtatatcttaaacaatcaatctattacaaaattcactaacttagtacaaaatatcaaatttttcccttccttccctaagaataaacctaaaatgtctaagggtaaaatggtcctaaactacaaccttgaataaactcaatattcaaaatatctaactatcatgacccgttaattctaagacacttaaccgcatctaagtgactctactggcaaaaacgtcgcattccactattaccgacataaactatatgaaaaatataaaattttatatataacatatatattacatctagaatttaa

SEQ ID NO: 100811 - DNA, 930 bp, Cannabis sativa
tcttaaccagtctcctcctcgccggaatcactccaccgaatttttgaacggcggagcacatattaaaatcaagatatcgctctattattgaaagtttattgttccaaatccaaagtgtgtagtaaatcacatgccaattaactatatattgtaatcaaaaacaatatttatatatatattgacaaatatatcaataataagaaattaataatagtatagtaatgggaaagagatctaaaggatgtttatgaagttattggttagtttatatgtacaaacattatatacgtttgagccttattgttctacatataaatataattttatacaaactattaatacaaataatataaaacaaactattatattaaataatattaacacagtagaattatacaatacaatactatgccctgaaaaaattaacactaccatcatgttaatgtaaaatcaaaatgtagttatttagtaaattttaaacttttatgttgtttgttcagtaaattcctctgttgtttgactgaaactctggttttatcgtgtgggggtgcctttatttattatccaattaattaaagaaatctttttcagtcctatttgaatgaactaaccatatctcatgaatgaaatcccatctctttgtcaaatccataaaatcaaaattacaaaacagagtcacaatcattattacattttacagagaaagtagcataattgaaacagttaacttcaccatacatagaacaacatcgtatgagataaaaagctggatcataatcatcaccagctttacatattaactttggtacttttaagaagaagaagaagaagaagaggtggtggcatggaataaatcagagaatttcttgactatatattgaaacatcattgttttgaccaaccttttttttgggagaaagatggcatgag

SEQ ID NO: 100812 - DNA, 702 bp, Cannabis sativa
gtatttaatacattgccgtacaatgtagttgtttaagagtatttgtaaattttcaaatttttttgcctaatttacaatattaagattatttggtgtaataataaagggccttactttaaattaagagatcaaggaattaatttctaacatctacttttctatatcttttaaaaaatatttaatatgttgttatgaaggattaaaccttgaagctcgtaagaacttttaaaatttttactattatactaaaatattagaactatcattttgataatagttaaactatatgtaagggtcccaaaatttaatttatcttaggcccatataccttaggaccggccttgttatttccttaacatgtttcagtatattttctatattcaagatagttttttagtatttaatacatcgtaatcgtgtacattacagttgtttaagagtacttgtaaaattttcctcaaaaaaagagtacttgtaaaattttaaaaaaatttaaataatttacagtactaaaaaataaaattcaaataattattcacattgcgtataagaaaaaataatcatccatgcaataaaatattttaattttattttagcattctaaactatttaaaaatttctaaaaatttataagtgatcataaataattacaatatacacgatggtaaaaaaaaaatgaacaaaaaaactctcataaatacc
